(19) United States
(12) Patent Application Publication
(10) Pub. No.: US 2004/0005579 A1
(43) Pub. Date: Jan. 8, 2004

(54) Nucleic acids, proteins, and antibodies

(76) Inventors: Charles E. Birse, North Potomac, MD (US); Craig A. Rosen, Laytonsville, MD (US)

Correspondence Address: HUMAN GENOME SCIENCES INC, 9410 KEY WEST AVENUE, ROCKVILLE, MD, 20850

(21) Appl. No.: 10/264,049

(22) Filed: Oct. 4, 2002

Related U.S. Application Data
(63) Continuation-in-part of application No. PCT/US01/18569, filed on Jun. 7, 2001.
(60) Provisional application No. 60/209,467, filed on Jun. 7, 2000.

(51) Int. Cl. C12Q 1/68; G01N 33/574; C07H 21/04; C12N 9/00; A61K 38/17; C12P 21/02; C12N 5/06

(52) U.S. Cl. 435/6; 435/7.23; 435/320.1; 435/325; 435/69.3; 435/183; 530/350; 536/23.2; 514/12

(57) ABSTRACT

The present invention relates to novel ovarian related polynucleotides, the polypeptides encoded by these polynucleotides herein collectively referred to as “ovarian antigens,” and antibodies that immunospecifically bind these polypeptides, and the use of such ovarian polynucleotides, antigens, and antibodies for detecting, treating, preventing and/or prognosing disorders of the reproductive system, particularly disorders of the ovaries and/or breast, including, but not limited to, the presence of ovarian and/or breast cancer and ovarian and/or breast cancer metastases. More specifically, isolated ovarian nucleic acid molecules are provided encoding novel ovarian polypeptides. Novel ovarian polypeptides and antibodies that bind to these polypeptides are provided. Also provided are vectors, host cells, and recombinant and synthetic methods for producing human ovarian polynucleotides, polypeptides, and/or antibodies. The invention further relates to diagnostic and therapeutic methods useful for diagnosing, treating, preventing and/or prognosing disorders related to the ovaries and/or breast, including ovarian and/or breast cancer, and therapeutic methods for treating such disorders. The invention further relates to screening methods for identifying agonists and antagonists of polynucleotides and polypeptides of the invention. The invention further relates to methods and/or compositions for inhibiting or promoting the production and/or function of the polypeptides of the invention.

### CROSS REFERENCE TO RELATED APPLICATIONS

[0001] This application is a continuation-in-part of, and claims priority under 35 U.S.C. § 120 to International Application No: PCT/US01/18569, filed Jun. 7, 2001, which claims benefit under 35 U.S.C. § 119(e) of U.S. Provisional Application No. 60/209,467, filed on Jun. 7, 2000. Each of the above referenced applications is hereby incorporated by reference herein in its entirety.

### STATEMENT UNDER 37 C.F.R. § 1.77(b)(4)

[0002] This application refers to a “Sequence Listing” and Tables listed below, which are provided as electronic documents on two identical compact discs (CD-R), labeled “Copy 1” and “Copy 2.” These compact discs each contain the following files, which are hereby incorporated in their entirety herein:

| Document | File Name | Size in bytes | Date of Creation |
|---|---|---|---|
| Sequence Listing | PA133.seqList.txt | 7,576,995 | Sep. 18, 2002 |
| Table 1 | PA133.table1.txt | 5,293,346 | Sep. 18, 2002 |
| Table 2 | PA133.table2.txt | 727,163 | Sep. 19, 2002 |
| Table 3 | PA133.table3.txt | 3,527,668 | Sep. 17, 2002 |
| Table 4 | PA133.table4.txt | 550,331 | Sep. 17, 2002 |

### FIELD OF THE INVENTION

[0003] The present invention relates to novel ovarian related polynucleotides, the polypeptides encoded by these polynucleotides herein collectively referred to as “ovarian antigens,” and antibodies that immunospecifically bind these polypeptides, and the use of such ovarian polynucleotides, antigens, and antibodies for detecting, treating, preventing and/or prognosing disorders of the reproductive system, particularly disorders of the ovaries and/or breast, including, but not limited to, the presence of ovarian and/or breast cancer and ovarian and/or breast cancer metastases. More specifically, isolated ovarian nucleic acid molecules are provided encoding novel ovarian polypeptides. Novel ovarian polypeptides and antibodies that bind to these polypeptides are provided. Also provided are vectors, host cells, and recombinant and synthetic methods for producing human ovarian polynucleotides, polypeptides, and/or antibodies. The invention further relates to diagnostic and therapeutic methods useful for diagnosing, treating, preventing and/or prognosing disorders related to the ovaries and/or breast, including ovarian and/or breast cancer, and therapeutic methods for treating such disorders. The invention further relates to screening methods for identifying agonists and antagonists of polynucleotides and polypeptides of the invention. The invention further relates to methods and/or compositions for inhibiting or promoting the production and/or function of the polypeptides of the invention.

### BACKGROUND OF THE INVENTION

[0004] The female reproductive system is comprised of both external and internal organs. The external organs function in permitting sperm to enter the body and protecting the internal genital organs from infection and injury. The internal organs form a pathway (the genital tract) for reproduction, beginning at the ovaries, through the fallopian tubes (oviducts) and uterus, to the birth canal (vagina).

[0005] The sexual and reproductive functions in the female can be divided into two major phases: first, preparation of the body for conception, and second, the gestation and parturition. Gestation and parturition only occur if an ovum becomes fertilized. If fertilization does not occur, the reproductive system undergoes a cycle to ensure frequent readiness for conception and fertilization.

[0006] The complexity of the female reproductive system renders it susceptible to several diseases and disorders. In particular, the ovaries and breast are subject to diseases and/or disorders such as infections, hyperproliferative disorders, as well as regulatory and genetic abnormalities.

[0007] Disorders of the Ovary

[0008] A woman's ovaries are located on both sides of the uterus, below the opening of the fallopian tubes (tubes that extend from the uterus to the ovaries). In addition to producing egg cells for reproduction, the ovaries produce estrogen and progesterone, which affect many of the female characteristics and reproductive functions.

[0009] Anovulation (the absence of egg release by the ovaries) is a serious condition leading to infertility. The exact etiology of anovulation, especially in women with otherwise normal menstrual cycles, is unclear, however several potential causes are under study, including: impaired follicular development (probably due to low or absent estrogen production or binding), normal follicular development with lack of egg release (probably due to progesterone deficiency), or insufficient production of gonadotropin-releasing hormone from the hypothalamus. Current treatments include clomiphene injections or hormonal therapy, although both can lead to serious side effects such as ovarian cancer and ovarian hyperstimulation syndrome.

[0010] Anovulation is also associated with polycyctic ovary syndrome (also known as Stein-Leventhal syndrome). This syndrome is and endocrine disorder characterized by an elevated level of male hormones (androgens). Other than anovulation, symptoms include growth of male-patterned body hair (hirsutism), excessive acne, irregular or absent menses, excessive bleeding, and obesity. Usually, the ovaries appear enlarged and may contain many follicular cysts.

[0011] Ovarian cancer develops most often in women between the ages of 50 and 70. It is the third most common cancer of the female reproductive system, but more women die of ovarian cancers than of any other. Ovaries include a variety of cell types, each of which may give rise to a distinct type of cancer, including, but not limited to, ovarian epithelial cancer, ovarian germ cell tumors, ovarian papillary serous adenocarcinoma, ovarian mucinous adenocarcinoma, ovarian Krukenberg tumor, malignant mixed Mullerian tumors, and ovarian low malignant tumors.

[0012] Other disorders of the ovaries also include, but are not limited to, inflammatory disorders, such as oophoritis (e.g., caused by viral or bacterial infection), ovarian cysts, and autoimmune disorders (e.g., premature ovarian failure and autoimmune oophoritis).

[0013] Disorders of the Breast

[0014] The breast is comprised of different structures, each with its own specific function. One-third of the breast is comprised of fatty tissue. The other two-thirds is made up of structural components called ducts and lobules. Milk is produced in the lobules and funneled through the ducts to the nipple. Disorders of the breast typically involve the formation of lesions within breast tissue. While many of these lesions are benign in nature, they may lead to cancer if left untreated.

[0015] Benign breast lesions include, for example, cysts, which are non-cancerous, fluid-filled sacs that form a mass within breast tissue. The cause of breast cysts is unknown, though injury may be involved, and their main symptom is pain. While considered harmless, a professional should drain cysts and the fluid examined because cancer of the cyst wall, although quite rare, is possible.

[0016] Other benign breast lesions include fibrous breast lumps (fibroadenomas), breast infection (mastitis), intraductal papilloma, and abscesses. Fibrous breast lumps are small, solid lumps of glandular tissue. These lumps usually appear in young women, often in teenagers, and are easy to remove. Intraductal papilloma are small lumps located within a milk duct, often causing inappropriate discharge from the nipple. Breast abscesses are collections of pus in breast tissue that develop from breast infections that go untreated.

[0017] Breast cancer is the most common cancer among women, other than skin cancer and is the second leading cause of cancer death in women, after lung cancer. The American Cancer Society predicts that there will be about 182,800 new cases of invasive breast cancer in the year 2000 among women in this country and about 40,800 deaths from the disease. Breast cancer also occurs among men, although much less often. It is generally believed that this malignancy arises from a multi step process involving mutations in a relatively small number of genes, perhaps 10 or less. These mutations result in significant changes in the growth and differentiation of breast tissue that allow it to grow independent of normal cellular controls, to metastasize, and to escape immune surveillance. The genetic heterogeneity of most breast cancers suggests that they arise by a variety of initiating events and that the characteristics of individual cancers are due to the collective pattern of genetic changes that accumulate.

[0018] The discovery of new human ovarian associated polynucleotides, the polypeptides encoded by them, and antibodies that immunospecifically bind these polypeptides, satisfies a need in the art by providing new compositions which are useful in the diagnosis, treatment, prevention and/or prognosis of disorders of the ovaries and/or breast, including, but not limited to, neoplastic disorders (e.g., ovarian Krukenberg tumor, malignant mixed Mullerian tumors, and/or as described under “Hyperproliferative Disorders” below), infectious diseases (e.g., mastitis, oophoritis, and/or as described under “Infectious Diseases” below), and inflammatory diseases (e.g., abcesses and/or as described under “Immune Disorders” below) and as described in “Reproductive System Disorders” below.

### SUMMARY OF THE INVENTION

[0019] The present invention relates to novel ovarian related polynucleotides, the polypeptides encoded by these polynucleotides herein collectively referred to as “ovarian antigens,” and antibodies that immunospecifically bind these polypeptides, and the use of such ovarian polynucleotides, antigens, and antibodies for detecting, treating, preventing and/or prognosing disorders of the reproductive system, particularly disorders of the ovaries and/or breast, including, but not limited to, the presence of ovarian and/or breast cancer and ovarian and/or breast cancer metastases. More specifically, isolated ovarian nucleic acid molecules are provided encoding novel ovarian polypeptides. Novel ovarian polypeptides and antibodies that bind to these polypeptides are provided. Also provided are vectors, host cells, and recombinant and synthetic methods for producing human ovarian polynucleotides, polypeptides, and/or antibodies. The invention further relates to diagnostic and therapeutic methods useful for diagnosing, treating, preventing and/or prognosing disorders related to the ovaries and/or breast, including ovarian and/or breast cancer, and therapeutic methods for treating such disorders. The invention further relates to screening methods for identifying agonists and antagonists of polynucleotides and polypeptides of the invention. The invention further relates to methods and/or compositions for inhibiting or promoting the production and/or function of the polypeptides of the invention.

### DETAILED DESCRIPTION

[0020] Tables

[0021] Table 1 summarizes some of the polynucleotides encompassed by the invention (including cDNA clones related to the sequences (Clone ID NO: Z), contig sequences (contig identifier (Contig ID:) and contig nucleotide sequence identifier (SEQ ID NO: X)) and further summarizes certain characteristics of these polynucleotides and the polypeptides encoded thereby. The first column, “Gene No.”, numbers each disclosed cDNA clone related to the sequences sequentially. The second column provides a unique clone identifier, “Clone ID NO: Z”, for a cDNA plasmid related to each ovarian associated contig sequence disclosed in Table 1. The third column provides a unique contig identifier, “Contig ID:” for each of the contig sequences disclosed in Table 1. The fourth column provides the sequence identifier, “SEQ ID NO: X”, for each of the contig polynucleotide sequences disclosed in Table 1. The fifth column, “ORF (From-To)”, provides the location (i.e., nucleotide position numbers) within the polynucleotide sequence of SEQ ID NO: X that delineate the preferred open reading frame (ORF) shown in the sequence listing and referenced in Table 1 as SEQ ID NO: Y (column 6). Column 7 lists residues comprising predicted epitopes contained in the polypeptides encoded by each of the preferred ORFs (SEQ ID NO: Y). Identification of potential immunogenic regions was performed according to the method of Jameson and Wolf (CABIOS, 4:181-186 (1988)); specifically, the Genetics Computer Group (GCG) implementation of this algorithm, embodied in the program PEPTIDESTRUCTURE (Wisconsin Package v10.0, Genetics Computer Group (GCG), Madison, Wis.). This method returns a measure of the probability that a given residue is found on the surface of the protein. Regions where the antigenic index score is greater than 0.9 over at least 6 amino acids are indicated in Table 1 as “Predicted Epitopes.” In particular embodiments, ovarian associated polypeptides of the invention comprise, or alternatively consist of, one, two, three, four, five or more of the predicted epitopes described in Table 1. It will be appreciated that depending on the analytical criteria used to predict antigenic determinants, the exact address of the determinant may vary slightly. Column 8, “Tissue Distribution” shows the expression profile of tissue, cells, and/or cell line libraries which express the polynucleotides of the invention. The first number in column 8 (preceding the colon), represents the tissue/cell source identifier code corresponding to the code and description provided in Table 4. Expression of these polynucleotides was not observed in the other tissues and/or cell libraries tested. For those identifier codes in which the first two letters are not “AR”, the second number in column 8 (following the colon), represents the number of times a sequence corresponding to the reference polynucleotide sequence (e.g., SEQ ID NO: X) was identified in the tissue/cell source. Those tissue/cell source identifier codes in which the first two letters are “AR” designate information generated using DNA array technology. Utilizing this technology, cDNAs were amplified by PCR and then transferred, in duplicate, onto the array. Gene expression was assayed through hybridization of first strand cDNA probes to the DNA array. cDNA probes were generated from total RNA extracted from a variety of different tissues and cell lines. Probe synthesis was performed in the presence of ³³P dCTP, using oligo(dT) to prime reverse transcription. After hybridization, high stringency washing conditions were employed to remove non-specific hybrids from the array. The remaining signal, emanating from each gene target, was measured using a Phosphorimager. Gene expression was reported as Phosphor Stimulating Luminescence (PSL) which reflects the level of phosphor signal generated from the probe hybridized to each of the gene targets represented on the array. A local background signal subtraction was performed before the total signal generated from each array was used to normalize gene expression between the different hybridizations. The value presented after “[array code]:” represents the mean of the duplicate values, following background subtraction and probe normalization. One of skill in the art could routinely use this information to identify normal and/or diseased tissue(s) which show a predominant expression pattern of the corresponding polynucleotide of the invention or to identify polynucleotides which show predominant and/or specific tissue and/or cell expression. Column 9, “Cytologic Band,” provides the chromosomal location of polynucleotides corresponding to SEQ ID NO: X. Chromosomal location was determined by finding exact matches to EST and cDNA sequences contained in the NCBI (National Center for Biotechnology Information) UniGene database. Given a presumptive chromosomal location, disease locus association was determined by comparison with the Morbid Map, derived from Online Mendelian Inheritance in Man (Online Mendelian Inheritance in Man, OMIM™. McKusick-Nathans Institute for Genetic Medicine, Johns Hopkins University (Baltimore, Md.) and National Center for Biotechnology Information, National Library of Medicine (Bethesda, Md.) 2000. World Wide Web URL: http://www.ncbi.nlm.nih.gov/omim/). If the putative chromosomal location of the Query overlapped with the chromosomal location of a Morbid Map entry, an OMIM identification number is provided in column 10 labeled “OMIM Disease Reference(s)”. A key to the OMIM reference identification numbers is provided in Table 5.

[0022] Table 2 summarizes homology and features of some of the polypeptides of the invention. The first column provides a unique clone identifier, “Clone ID NO: Z”, corresponding to a cDNA disclosed in Table 1. The second column provides the unique contig identifier, “Contig ID:” corresponding to contigs in Table 1 and allowing for correlation with the information in Table 1. The third column provides the sequence identifier, “SEQ ID NO: X”, for the contig polynucleotide sequences. The fourth column provides the analysis method by which the homology/identity disclosed in the row was determined. Comparisons were made between polypeptides encoded by the polynucleotides of the invention and either a non-redundant protein database (herein referred to as “NR”), or a database of protein families (herein referred to as “PFAM”) as further described below. The fifth column provides a description of PFAM/NR hits having significant matches to a polypeptide of the invention. Column six provides the accession number of the PFAM/NR hit disclosed in the fifth column. Column seven, “Score/Percent Identity”, provides a quality score or the percent identity, of the hit disclosed in column five. Columns 8 and 9, “NT From” and “NT To” respectively, delineate the polynucleotides in “SEQ ID NO: X” that encode a polypeptide having a significant match to the PFAM/NR database as disclosed in the fifth column. In specific embodiments, polypeptides of the invention comprise, or alternatively consist of, an amino acid sequence encoded by the polynucleotides in SEQ ID NO: X as delineated in columns 8 and 9, or fragments or variants thereof.

[0023] Table 3 provides polynucleotide sequences that may be disclaimed according to certain embodiments of the invention. The first column provides a unique clone identifier, “Clone ID NO: Z”, for a cDNA clone related to ovarian associated contig sequences disclosed in Table 1. The second column provides the sequence identifier, “SEQ ID NO: X”, for contig polynucleotide sequences disclosed in Table 1. The third column provides the unique contig identifier, “Contig ID”, for contigs disclosed in Table 1. The fourth column provides a unique integer ‘a’ where ‘a’ is any integer between 1 and the final nucleotide minus 15 of SEQ ID NO: X, represented as “Range of a” , and the fifth column provides a unique integer ‘b’ where ‘b’ is any integer between 15 and the final nucleotide of SEQ ID NO: X, represented as “Range of b”, where both a and b correspond to the positions of nucleotide residues shown in SEQ ID NO: X, and where b is greater than or equal to a+14. For each of the polynucleotides shown as SEQ ID NO: X, the uniquely defined integers can be substituted into the general formula of a-b, and used to describe polynucleotides which may be preferably excluded from the invention. In certain embodiments, preferably excluded from the polynucleotides of the invention (including polynucleotide fragments and variants as described herein and diagnostic and/or therapeutic uses based on these polynucleotides) are at least one, two, three, four, five, ten, or more of the polynucleotide sequence(s) having the accession number(s) disclosed in the sixth column of this Table. In further embodiments, preferably excluded from the invention are the specific polynucleotide sequence(s) contained in the clones corresponding to at least one, two, three, four, five, ten, or more of the available material having the accession numbers identified in the sixth column of this Table (including for example, the actual sequence contained in an identified BAC clone).

[0024] Table 4 provides a key to the tissue/cell source identifier code disclosed in Table 1, column 8. Column 1 provides the key to the tissue/cell source identifier code disclosed in Table 1, Column 8. Columns 2-5 provide a description of the tissue or cell source. Codes corresponding to diseased tissues are indicated in column 6 with the word “disease”. The use of the word “disease” in column 6 is non-limiting. The tissue or cell source may be specific (e.g. a neoplasm), or may be disease-associated (e.g., a tissue sample from a normal portion of a diseased organ). Furthermore, tissues and/or cells lacking the “disease” designation may still be derived from sources directly or indirectly involved in a disease state or disorder, and therefore may have a further utility in that disease state or disorder. In numerous cases where the tissue/cell source is a library, column 7 identifies the vector used to generate the library.

[0025] Table 5 provides a key to the OMIM™ reference identification numbers disclosed in Table 1, column 10. OMIM reference identification numbers (Column 1) were derived from Online Mendelian Inheritance in Man (Online Mendelian Inheritance in Man, OMIM™. McKusick-Nathans Institute for Genetic Medicine, Johns Hopkins University (Baltimore, Md.) and National Center for Biotechnology Information, National Library of Medicine, (Bethesda, Md.) 2000. World Wide Web URL: http://www.ncbi.nlm.nih.gov/omim/). Column 2 provides diseases associated with the cytologic band disclosed in Table 1, column 9, as determined from the Morbid Map database.

[0026] Table 6 summarizes ATCC Deposits, Deposit dates, and ATCC designation numbers of deposits made with the ATCC in connection with the present application.

[0027] Table 7 shows the cDNA libraries sequenced, tissue source description, vector information and ATCC designation numbers relating to these cDNA libraries.

[0028] Definitions

[0029] The following definitions are provided to facilitate understanding of certain terms used throughout this specification.

[0030] In the present invention, “isolated” refers to material removed from its original environment (e.g., the natural environment if it is naturally occurring), and thus is altered “by the hand of man” from its natural state. For example, an isolated polynucleotide could be part of a vector or a composition of matter, or could be contained within a cell, and still be “isolated” because that vector, composition of matter, or particular cell is not the original environment of the polynucleotide. The term “isolated” does not refer to genomic or cDNA libraries, whole cell total or mRNA preparations, genomic DNA preparations (including those separated by electrophoresis and transferred onto blots), sheared whole cell genomic DNA preparations or other compositions where the art demonstrates no distinguishing features of the polynucleotide sequences of the present invention.

[0031] As used herein, a “polynucleotide” refers to a molecule having a nucleic acid sequence encoding SEQ ID NO: Y or a fragment or variant thereof; a nucleic acid sequence contained in SEQ ID NO: X (as described in column 4 of Table 1) or the complement thereof; or a cDNA sequence contained in Clone ID NO: Z (as described in column 2 of Table 1 and contained within a library deposited with the ATCC). For example, the polynucleotide can contain the nucleotide sequence of the full length cDNA sequence, including the 5′ and 3′ untranslated sequences, the coding region, as well as fragments, epitopes, domains, and variants of the nucleic acid sequence. Moreover, as used herein, a “polypeptide” refers to a molecule having an amino acid sequence encoded by a polynucleotide of the invention as broadly defined (obviously excluding poly-Phenylalanine or poly-Lysine peptide sequences which result from translation of a polyA tail of a sequence corresponding to a cDNA).

[0032] As used herein, an “ovarian antigen” refers collectively to any polynucleotide disclosed herein (e.g., a nucleic acid sequence contained in SEQ ID NO: X or the complement therof, and fragments or variants thereof as described herein) or any polypeptide disclosed herein (e.g., an amino acid sequence contained in SEQ ID NO: Y, an amino acid sequence encoded by SEQ ID NO: X, or the complement thereof, an amino acid sequence encoded by the cDNA sequence contained in Clone ID NO: Z, or the complement thereof, and fragments or variants thereof as described herein). These ovarian antigens have been determined to be predominantly expressed in ovarian tissues, including normal or diseased tissues (as shown in Table 1 column 8 and Table 4).

[0033] In the present invention, “SEQ ID NO: X” was often generated by overlapping sequences contained in multiple clones (contig analysis). A representative clone containing all or most of the sequence for SEQ ID NO: X is deposited at Human Genome Sciences, Inc. (HGS) in a catalogued and archived library. As shown, for example, in column 2 of Table 1, each clone is identified by a cDNA Clone ID (identifier generally referred to herein as Clone ID NO: Z). Each Clone ID is unique to an individual clone and the Clone ID is all the information needed to retrieve a given clone from the HGS library. Furthermore, certain clones disclosed in this application have been deposited with the ATCC on Jun. 5, 2000, having the ATCC designation numbers PTA-1982 and PTA-1985. In addition to the individual cDNA clone deposits, most of the cDNA libraries from which the clones were derived were deposited at the American Type Culture Collection (hereinafter “ATCC”). Table 7 provides a list of the deposited cDNA libraries. One can use the Clone ID NO: Z to determine the library source by reference to Tables 6 and 7. Table 7 lists the deposited cDNA libraries by name and links each library to an ATCC Deposit. Library names contain four characters, for example, “HTWE.” The name of a cDNA clone (Clone ID NO: Z) isolated from that library begins with the same four characters, for example “HTWEP07”. As mentioned below, Table 1 correlates the Clone ID NO: Z names with SEQ ID NO: X. Thus, starting with an SEQ ID NO: X, one can use Tables 1, 6 and 7 to determine the corresponding Clone ID NO: Z, which library it came from and which ATCC deposit the library is contained in. Furthermore, it is possible to retrieve a given cDNA clone from the source library by techniques known in the art and described elsewhere herein. The ATCC is located at 10801 University Boulevard, Manassas, Va. 20110-2209, USA. The ATCC deposits were made pursuant to the terms of the Budapest Treaty on the international recognition of the deposit of microorganisms for the purposes of patent procedure.

[0034] In specific embodiments, the polynucleotides of the invention are at least 15, at least 30, at least 50, at least 100, at least 125, at least 500, or at least 1000 continuous nucleotides but are less than or equal to 300 kb, 200 kb, 100 kb, 50 kb, 15 kb, 10 kb, 7.5 kb, 5 kb, 2.5 kb, 2.0 kb, or 1 kb, in length. In a further embodiment, polynucleotides of the invention comprise a portion of the coding sequences, as disclosed herein, but do not comprise all or a portion of any intron. In another embodiment, the polynucleotides comprising coding sequences do not contain coding sequences of a genomic flanking gene (i.e., 5′ or 3′ to the gene of interest in the genome). In other embodiments, the polynucleotides of the invention do not contain the coding sequence of more than 1000, 500, 250, 100, 50, 25, 20, 15, 10, 5, 4, 3, 2, or 1 genomic flanking gene(s).

[0035] A “polynucleotide” of the present invention also includes those polynucleotides capable of hybridizing, under stringent hybridization conditions, to sequences contained in SEQ ID NO: X, or the complement thereof (e.g., the complement of any one, two, three, four, or more of the polynucleotide fragments described herein), the polynucleotide sequence delineated in columns 8 and 9 of Table 2 or the complement thereof, and/or cDNA sequences contained in Clone ID NO: Z (e.g., the complement of any one, two, three, four, or more of the polynucleotide fragments, or the cDNA clone within the pool of cDNA clones deposited with the ATCC, described herein) or the complement thereof. “Stringent hybridization conditions” refers to an overnight incubation at 42 degree C. in a solution comprising 50% formamide, 5×SSC (750 mM NaCl, 75 mM trisodium citrate), 50 mM sodium phosphate (pH 7.6), 5×Denhardt's solution, 10% dextran sulfate, and 20 μg/ml denatured, sheared salmon sperm DNA, followed by washing the filters in 0.1×SSC at about 65 degree C.

[0036] Also contemplated are nucleic acid molecules that hybridize to the polynucleotides of the present invention at lower stringency hybridization conditions. Changes in the stringency of hybridization and signal detection are primarily accomplished through the manipulation of formamide concentration (lower percentages of formamide result in lowered stringency), salt conditions, or temperature. For example, lower stringency conditions include an overnight incubation at 37 degree C. in a solution comprising 6×SSPE (20×SSPE=3M NaCl; 0.2M NaH₂PO₄; 0.02M EDTA, pH 7.4), 0.5% SDS, 30% formamide, 100 ug/ml salmon sperm blocking DNA; followed by washes at 50 degree C. with 1×SSPE, 0.1% SDS. In addition, to achieve even lower stringency, washes performed following stringent hybridization can be done at higher salt concentrations (e.g. 5×SSC).

[0037] Note that variations in the above conditions may be accomplished through the inclusion and/or substitution of alternate blocking reagents used to suppress background in hybridization experiments. Typical blocking reagents include Denhardt's reagent, BLOTTO, heparin, denatured salmon sperm DNA, and commercially available proprietary formulations. The inclusion of specific blocking reagents may require modification of the hybridization conditions described above, due to problems with compatibility.

[0038] Of course, a polynucleotide which hybridizes only to polyA+sequences (such as any 3′ terminal polyA+tract of a cDNA shown in the sequence listing), or to a complementary stretch of T (or U) residues, would not be included in the definition of “polynucleotide,” since such a polynucleotide would hybridize to any nucleic acid molecule containing a poly (A) stretch or the complement thereof (e.g., practically any double-stranded cDNA clone generated using oligo dT as a primer).

[0039] The polynucleotide of the present invention can be composed of any polyribonucleotide or polydeoxribonucleotide, which may be unmodified RNA or DNA or modified RNA or DNA. For example, polynucleotides can be composed of single- and double-stranded DNA, DNA that is a mixture of single- and double-stranded regions, single- and double-stranded RNA, and RNA that is mixture of single- and double-stranded regions, hybrid molecules comprising DNA and RNA that may be single-stranded or, more typically, double-stranded or a mixture of single- and double-stranded regions. In addition, the polynucleotide can be composed of triple-stranded regions comprising RNA or DNA or both RNA and DNA. A polynucleotide may also contain one or more modified bases or DNA or RNA backbones modified for stability or for other reasons. “Modified” bases include, for example, tritylated bases and unusual bases such as inosine. A variety of modifications can be made to DNA and RNA; thus, “polynucleotide” embraces chemically, enzymatically, or metabolically modified forms.

[0040] The polypeptide of the present invention can be composed of amino acids joined to each other by peptide bonds or modified peptide bonds, i.e., peptide isosteres, and may contain amino acids other than the 20 gene-encoded amino acids. The polypeptides may be modified by either natural processes, such as posttranslational processing, or by chemical modification techniques which are well known in the art. Such modifications are well described in basic texts and in more detailed monographs, as well as in a voluminous research literature. Modifications can occur anywhere in a polypeptide, including the peptide backbone, the amino acid side-chains and the amino or carboxyl termini. It will be appreciated that the same type of modification may be present in the same or varying degrees at several sites in a given polypeptide. Also, a given polypeptide may contain many types of modifications. Polypeptides may be branched, for example, as a result of ubiquitination, and they may be cyclic, with or without branching. Cyclic, branched, and branched cyclic polypeptides may result from posttranslation natural processes or may be made by synthetic methods. Modifications include acetylation, acylation, ADP-ribosylation, amidation, covalent attachment of flavin, covalent attachment of a heme moiety, covalent attachment of a nucleotide or nucleotide derivative, covalent attachment of a lipid or lipid derivative, covalent attachment of phosphotidylinositol, cross-linking, cyclization, disulfide bond formation, demethylation, formation of covalent cross-links, formation of cysteine, formation of pyroglutamate, formylation, gamma-carboxylation, glycosylation, GPI anchor formation, hydroxylation, iodination, methylation, myristoylation, oxidation, pegylation, proteolytic processing, phosphorylation, prenylation, racemization, selenoylation, sulfation, transfer-RNA mediated addition of amino acids to proteins such as arginylation, and ubiquitination. (See, for instance, PROTEINS—STRUCTURE AND MOLECULAR PROPERTIES, 2nd Ed., T. E. Creighton, W. H. Freeman and Company, New York (1993); POSTTRANSLATIONAL COVALENT MODIFICATION OF PROTEINS, B. C. Johnson, Ed., Academic Press, New York, pgs. 1-12 (1983); Seifter et al., Meth. Enzymol. 182:626-646 (1990); Rattan et al., Ann. N.Y. Acad. Sci. 663:48-62 (1992).)

[0041] “SEQ ID NO: X” refers to a polynucleotide sequence described, for example, in Tables 1 or 2, while “SEQ ID NO: Y” refers to a polypeptide sequence described in column 6 of Table 1. SEQ ID NO: X is identified by an integer specified in column 4 of Table 1. The polypeptide sequence SEQ ID NO: Y is a translated open reading frame (ORF) encoded by polynucleotide SEQ ID NO: X. “Clone ID NO: Z” refers to a cDNA clone described in column 2 of Table 1.

[0042] “A polypeptide having biological activity” refers to a polypeptide exhibiting activity similar to, but not necessarily identical to, an activity of a polypeptide of the present invention, including mature forms, as measured in a particular biological assay, with or without dose dependency. In the case where dose dependency does exist, it need not be identical to that of the polypeptide, but rather substantially similar to the dose-dependence in a given activity as compared to the polypeptide of the present invention (i.e., the candidate polypeptide will exhibit greater activity or not more than about 25-fold less and, preferably, not more than about tenfold less activity, and most preferably, not more than about three-fold less activity relative to the polypeptide of the present invention).

[0043] Table 1 summarizes some of the polynucleotides encompassed by the invention (including contig sequences (SEQ ID NO: X) and clones (Clone ID NO: Z) and further summarizes certain characteristics of these polynucleotides and the polypeptides encoded thereby.

[0044] Polynucleotides and Polypeptides

[0045] Table 1

[0046] Table 1 is provided on CD-R, hereby incorporated by reference herein.

[0047] The first column in Table 1, “Gene No.”, numbers each disclosed cDNA clone related to the sequences sequentially. The second column in Table 1 provides a unique “Clone ID NO: Z” for a cDNA clone related to each contig sequence disclosed in Table 1. This clone ID references the cDNA clone which contains at least the 5′ most sequence of the assembled contig, and at least a portion of SEQ ID NO: X was determined by directly sequencing the referenced clone. The reference clone may have more sequence than described in the sequence listing or the clone may have less. In the vast majority of cases, however, the clone is believed to encode a full-length polypeptide. In the case where a clone is not full-length, a full-length cDNA can be obtained by methods known in the art and/or as described elsewhere herein.

[0048] The third column in Table 1 provides a unique “Contig ID” identification for each contig sequence. The fourth column provides the “SEQ ID NO: X” identifier for each of the colon cancer associated contig polynucleotide sequences disclosed in Table 1. The fifth column, “ORF (From-To)”, provides the location (i.e., nucleotide position numbers) within the polynucleotide sequence “SEQ ID NO: X” that delineate the preferred open reading frame (ORF) shown in the sequence listing and referenced in Table 1, column 6, as SEQ ID NO: Y. Where the nucleotide position number “To” is lower than the nucleotide position number “From”, the preferred ORF is the reverse complement of the referenced polynucleotide sequence.

[0049] The six column in Table 1 provides the corresponding SEQ ID NO: Y for the polypeptide sequence encoded by the preferred ORF delineated in column 5. In one embodiment, the invention provides an amino acid sequence comprising, or alternatively consisting of, a polypeptide encoded by the portion of SEQ ID NO: X delineated by “ORF (From-To)”. Also provided are polynucleotides encoding such amino acid sequences and the complementary strand thereto.

[0050] Column 7 in Table 1 lists residues comprising epitopes contained in the polypeptides encoded by the preferred ORF (SEQ ID NO: Y), as predicted using the algorithm of Jameson and Wolf, (1988) Comp. Appl. Biosci. 4:181-186. The Jameson-Wolf antigenic analysis was performed using the computer program PROTEAN (Version 3.11 for the Power MacIntosh, DNASTAR, Inc., 1228 South Park Street Madison, Wis.). In specific embodiments, polypeptides of the invention comprise, or alternatively consist of, at least one, two, three, four, five or more of the predicted epitopes as described in Table 1. It will be appreciated that depending on the analytical criteria used to predict antigenic determinants, the exact address of the determinant may vary slightly.

[0051] Column 8 in Table 1 provides an expression profile and library code: count for each of the contig sequences (SEQ ID NO: X) disclosed in Table 1, which can routinely be combined with the information provided in Table 4 and used to determine the normal or diseased tissues, cells, and/or cell line libraries which predominantly express the polynucleotides of the invention. The first number in column 8 (preceding the colon), represents the tissue/cell source identifier code corresponding to the code and description provided in Table 4. For those identifier codes in which the first two letters are not “AR”, the second number in column 8 (following the colon) represents the number of times a sequence corresponding to the reference polynucleotide sequence was identified in the tissue/cell source. Those tissue/cell source identifier codes in which the first two letters are “AR” designate information generated using DNA array technology. Utilizing this technology, cDNAs were amplified by PCR and then transferred, in duplicate, onto the array. Gene expression was assayed through hybridization of first strand cDNA probes to the DNA array. cDNA probes were generated from total RNA extracted from a variety of different tissues and cell lines. Probe synthesis was performed in the presence of ³³P dCTP, using oligo(dT) to prime reverse transcription. After hybridization, high stringency washing conditions were employed to remove non-specific hybrids from the array. The remaining signal, emanating from each gene target, was measured using a Phosphorimager. Gene expression was reported as Phosphor Stimulating Luminescence (PSL) which reflects the level of phosphor signal generated from the probe hybridized to each of the gene targets represented on the array. A local background signal subtraction was performed before the total signal generated from each array was used to normalize gene expression between the different hybridizations. The value presented after “[array code]:” represents the mean of the duplicate values, following background subtraction and probe normalization. One of skill in the art could routinely use this information to identify normal and/or diseased tissue(s) which show a predominant expression pattern of the corresponding polynucleotide of the invention or to identify polynucleotides which show predominant and/or specific tissue and/or cell expression. The sequences disclosed herein have been determined to be predominantly expressed in ovarian tissues, including normal and diseased ovarian tissues (See Table 1, column 8 and Table 4).

[0052] Column 9 in Table 1 provides a chromosomal map location for certain polynucleotides of the invention. Chromosomal location was determined by finding exact matches to EST and cDNA sequences contained in the NCBI (National Center for Biotechnology Information) UniGene database. Each sequence in the UniGene database is assigned to a “cluster”; all of the ESTs, cDNAs, and STSs in a cluster are believed to be derived from a single gene. Chromosomal mapping data is often available for one or more sequence(s) in a UniGene cluster; this data (if consistent) is then applied to the cluster as a whole. Thus, it is possible to infer the chromosomal location of a new polynucleotide sequence by determining its identity with a mapped UniGene cluster.

[0053] A modified version of the computer program BLASTN (Altshul et al., J. Mol. Biol. 215:403-410 (1990), and Gish et al., Nat. Genet. 3:266-272 (1993)) was used to search the UniGene database for EST or cDNA sequences that contain exact or near-exact matches to a polynucleotide sequence of the invention (the ‘Query’). A sequence from the UniGene database (the ‘Subject’) was said to be an exact match if it contained a segment of 50 nucleotides in length such that 48 of those nucleotides were in the same order as found in the Query sequence. If all of the matches that met this criteria were in the same UniGene cluster, and mapping data was available for this cluster, it is indicated in Table 1 under the heading “Cytologic Band”. Where a cluster had been further localized to a distinct cytologic band, that band is disclosed; where no banding information was available, but the gene had been localized to a single chromosome, the chromosome is disclosed.

[0054] Once a presumptive chromosomal location was determined for a polynucleotide of the invention, an associated disease locus was identified by comparison with a database of diseases which have been experimentally associated with genetic loci. The database used was the Morbid Map, derived from OMIM™ (supra). If the putative chromosomal location of a polynucleotide of the invention (Query sequence) was associated with a disease in the Morbid Map database, an OMIM reference identification number was noted in column 10, Table 1, labeled “OMIM Disease Reference(s)”. Table 5 is a key to the OMIM reference identification numbers (column 1), and provides a description of the associated disease in Column 2.

[0055] Table 2

[0056] Table 2 is provided on CD-R, hereby incorporated by reference herein.

[0057] Table 2 further characterizes certain encoded polypeptides of the invention, by providing the results of comparisons to protein and protein family databases. The first column provides a unique clone identifier, “Clone ID NO: ”, corresponding to a cDNA clone disclosed in Table 1. The second column provides the unique contig indentifier, “Contig ID:” which allows correlation with the information in Table 1. The third column provides the sequence identifier, “SEQ ID NO: X”, for the contig polynucleotide sequences. The fourth column provides the analysis method by which the homology/identity disclosed in the row was determined. The fifth column provides a description of PFam/NR hits having significant matches identified by each analysis. Column six provides the accession number of the PFam/NR hit disclosed in the fifth column. Column seven, “Score/Percent Identity”, provides a quality score or the percent identity, of the hit disclosed in column five. Comparisons were made between polypeptides encoded by polynucleotides of the invention and a non-redundant protein database (herein referred to as “NR”), or a database of protein families (herein referred to as “PFam”), as described below.

[0058] The NR database, which comprises the NBRF PIR database, the NCBI GenPept database, and the SIB SwissProt and TrEMBL databases, was made non-redundant using the computer program nrdb2 (Warren Gish, Washington University in Saint Louis). Each of the polynucleotides shown in Table 1, column 4 (e.g., SEQ ID NO: X or the ‘Query’ sequence) was used to search against the NR database. The computer program BLASTX was used to compare a 6-frame translation of the Query sequence to the NR database (for information about the BLASTX algorithm please see Altshul et al., J. Mol. Biol. 215:403-410 (1990), and Gish et al., Nat. Genet. 3:266-272 (1993)). A description of the sequence that is most similar to the Query sequence (the highest scoring ‘Subject’) is shown in column five of Table 2 and the database accession number for that sequence is provided in column six. The highest scoring ‘Subject’ is reported in Table 2 if (a) the estimated probability that the match occurred by chance alone is less than 1.0e-07, and (b) the match was not to a known repetitive element. BLASTX returns alignments of short polypeptide segments of the Query and Subject sequences which share a high degree of similarity; these segments are known as High-Scoring Segment Pairs or HSPs. Table 2 reports the degree of similarity between the Query and the Subject for each HSP as a percent identity in Column 7. The percent identity is determined by dividing the number of exact matches between the two aligned sequences in the HSP, dividing by the number of Query amino acids in the HSP and multiplying by 100. The polynucleotides of SEQ ID NO: X which encode the polypeptide sequence that generates an HSP are delineated by columns 8 and 9 of Table 2.

[0059] The PFam database, PFam version 5.2, (Sonnhammer et al., Nucl. Acids Res., 26:320-322, (1998)) consists of a series of multiple sequence alignments; one alignment for each protein family. Each multiple sequence alignment is converted into a probability model called a Hidden Markov Model, or HMM, that represents the position-specific variation among the sequences that make up the multiple sequence alignment (see, e.g., R. Durbin et al., Biological sequence analysis: probabilistic models of proteins and nucleic acids, Cambridge University Press, 1998 for the theory of HMMs). The program HMMER version 1.8 (Sean Eddy, Washington University in Saint Louis) was used to compare the predicted protein sequence for each Query sequence (SEQ ID NO: Y in Table 1) to each of the HMMs derived from PFam version 5.2. A HMM derived from PFam version 5.2 was said to be a significant match to a polypeptide of the invention if the score returned by HMMER 1.8 was greater than 0.8 times the HMMER 1.8 score obtained with the most distantly related known member of that protein family. The description of the PFam family which shares a significant match with a polypeptide of the invention is listed in column 5 of Table 2, and the database accession number of the PFam hit is provided in column 6. Column 7 provides the score returned by HMMER version 1.8 for the alignment. Columns 8 and 9 delineate the polynucleotides of SEQ ID NO: X which encode the polypeptide sequence which shows a significant match to a PFam protein family.

[0060] As mentioned, columns 8 and 9 in Table 2, “NT From” and “NT To”, delineate the polynucleotides of “SEQ ID NO: X” that encode a polypeptide having a significant match to the PFam/NR database as disclosed in the fifth column of Table 2. In one embodiment, the invention provides a protein comprising, or alternatively consisting of, a polypeptide encoded by the polynucleotides of SEQ ID NO: X delineated in columns 8 and 9 of Table 2. Also provided are polynucleotides encoding such proteins, and the complementary strand thereto.

[0061] The nucleotide sequence SEQ ID NO: X and the translated SEQ ID NO: Y are sufficiently accurate and otherwise suitable for a variety of uses well known in the art and described further below. For instance, the nucleotide sequences of SEQ ID NO: X are useful for designing nucleic acid hybridization probes that will detect nucleic acid sequences contained in SEQ ID NO: X or the cDNA contained in Clone ID NO: Z. These probes will also hybridize to nucleic acid molecules in biological samples, thereby enabling immediate applications in chromosome mapping, linkage analysis, tissue identification and/or typing, and a variety of forensic and diagnostic methods of the invention. Similarly, polypeptides identified from SEQ ID NO: Y may be used to generate antibodies which bind specifically to these polypeptides, or fragments thereof, and/or to the polypeptides encoded by the cDNA clones identified in, for example, Table 1.

[0062] Nevertheless, DNA sequences generated by sequencing reactions can contain sequencing errors. The errors exist as misidentified nucleotides, or as insertions or deletions of nucleotides in the generated DNA sequence. The erroneously inserted or deleted nucleotides cause frame shifts in the reading frames of the predicted amino acid sequence. In these cases, the predicted amino acid sequence diverges from the actual amino acid sequence, even though the generated DNA sequence may be greater than 99.9% identical to the actual DNA sequence (for example, one base insertion or deletion in an open reading frame of over 1000 bases).

[0063] Accordingly, for those applications requiring precision in the nucleotide sequence or the amino acid sequence, the present invention provides not only the generated nucleotide sequence identified as SEQ ID NO: X, and a predicted translated amino acid sequence identified as SEQ ID NO: Y, but also a sample of plasmid DNA containing cDNA Clone ID NO: Z (deposited with the ATCC on Jun. 5, 2000, having the ATCC designation numbers PTA-1982 and PTA-1985; and/or as set forth, for example, in Table 1, 6 and 7). The nucleotide sequence of each deposited clone can readily be determined by sequencing the deposited clone in accordance with known methods. Further, techniques known in the art can be used to verify the nucleotide sequences of SEQ ID NO: X.

[0064] The predicted amino acid sequence can then be verified from such deposits. Moreover, the amino acid sequence of the protein encoded by a particular clone can also be directly determined by peptide sequencing or by expressing the protein in a suitable host cell containing the deposited human cDNA, collecting the protein, and determining its sequence.

[0065] RACE Protocol for Recovery of Full-Length Genes

[0066] Partial cDNA clones can be made full-length by utilizing the rapid amplification of cDNA ends (RACE) procedure described in Frohman, M. A., et al., Proc. Nat'l. Acad. Sci. USA, 85:8998-9002 (1988). A cDNA clone missing either the 5′ or 3′ end can be reconstructed to include the absent base pairs extending to the translational start or stop codon, respectively. In some cases, cDNAs are missing the start codon of translation. The following briefly describes a modification of this original 5′ RACE procedure. Poly A+ or total RNA is reverse transcribed with Superscript II (Gibco/BRL) and an antisense or complementary primer specific to the cDNA sequence. The primer is removed from the reaction with a Microcon Concentrator (Amicon). The first-strand cDNA is then tailed with dATP and terminal deoxynucleotide transferase (Gibco/BRL). Thus, an anchor sequence is produced which is needed for PCR amplification. The second strand is synthesized from the dA-tail in PCR buffer, Taq DNA polymerase (Perkin-Elmer Cetus), an oligo-dT primer containing three adjacent restriction sites (XhoI, SalI and ClaI) at the 5′ end and a primer containing just these restriction sites. This double-stranded cDNA is PCR amplified for 40 cycles with the same primers as well as a nested cDNA-specific antisense primer. The PCR products are size-separated on an ethidium bromide-agarose gel and the region of gel containing cDNA products the predicted size of missing protein-coding DNA is removed. cDNA is purified from the—agarose with the Magic PCR Prep kit (Promega), restriction digested with XhoI or SalI, and ligated to a plasmid such as pBluescript SKII (Stratagene) at XhoI and EcoRV sites. This DNA is transformed into bacteria and the plasmid clones sequenced to identify the correct protein-coding inserts. Correct 5′ ends are confirmed by comparing this sequence with the putatively identified-homologue and overlap with the partial cDNA clone. Similar methods known in the art and/or commercial kits are used to amplify and recover 3′ ends.

[0067] Several quality-controlled kits are commercially available for purchase. Similar reagents and methods to those above are supplied in kit form from Gibco/BRL for both 5′ and 3′ RACE for recovery of full length genes. A second kit is available from Clontech which is a modification of a related technique, SLIC (single-stranded ligation to single-stranded cDNA), developed by Dumas et al., Nucleic Acids Res., 19:5227-32 (1991). The major differences in procedure are that the RNA is alkaline hydrolyzed after reverse transcription and RNA ligase is used to join a restriction site-containing anchor primer to the first-strand cDNA. This obviates the necessity for the dA-tailing reaction which results in a polyT stretch that is difficult to sequence past.

[0068] An alternative to generating 5′ or 3′ cDNA from RNA is to use cDNA library double-stranded DNA. An asymmetric PCR-amplified antisense cDNA strand is synthesized with an antisense cDNA-specific primer and a plasmid-anchored primer. These primers are removed and a symmetric PCR reaction is performed with a nested cDNA-specific antisense primer and the plasmid-anchored primer.

[0069] RNA Ligase Protocol for Generating the 5′ or 3′ End Sequences to Obtain Full Length Genes

[0070] Once a gene of interest is identified, several methods are available for the identification of the 5′ or 3′ portions of the gene which may not be present in the original cDNA plasmid. These methods include, but are not limited to, filter probing, clone enrichment using specific probes and protocols similar and identical to 5′ and 3′ RACE. While the full length gene may be present in the library and can be identified by probing, a useful method for generating the 5′ or 3′ end is to use the existing sequence information from the original cDNA to generate the missing information. A method similar to 5′ RACE is available for generating the missing 5′ end of a desired full-length gene. (This method was published by Fromont-Racine et al., Nucleic Acids Res., 21(7):1683-1684 (1993)). Briefly, a specific RNA oligonucleotide is ligated to the 5′ ends of a population of RNA presumably containing full-length gene RNA transcript. A primer set containing a primer specific to the ligated RNA oligonucleotide and a primer specific to a known sequence of the gene of interest, is used to. PCR amplify-the 5′ portion of the desired full length gene which may then be sequenced and used to generate the full length gene. This method starts with total RNA isolated from the desired source, poly A RNA may be used but is not a prerequisite for this procedure. The RNA preparation may then be treated with phosphatase if necessary to eliminate 5′ phosphate groups on degraded or damaged RNA, which may interfere with the later RNA ligase step. The phosphatase, if used, is then inactivated and the RNA is treated with tobacco acid pyrophosphatase in order to remove the cap structure present at the 5′ ends of messenger RNAs. This reaction leaves a 5′ phosphate group at the 5′ end of the cap cleaved RNA which can then be ligated to an RNA oligonucleotide using T4 RNA ligase. This modified RNA preparation can then be used as a template for first strand cDNA synthesis using a gene specific oligonucleotide. The first strand synthesis reaction can then be used as a template for PCR amplification of the desired 5′ end using a primer specific to the ligated RNA oligonucleotide and a primer specific to the known sequence of the ovarian antigen of interest. The resultant product is then sequenced and analyzed to confirm that the 5′ end sequence belongs to the relevant ovarian antigen.

[0071] The present invention also relates to vectors or plasmids, which include such DNA sequences, as well as the use of the DNA sequences. The material deposited with the ATCC (deposited with the ATCC on Jun. 5, 2000, having the ATCC designation numbers PTA-1982 and PTA-1985; and/or as set forth, for example, in Table 1, 6 and 7) is a mixture of cDNA clones derived from a variety of human tissue and cloned in either a plasmid vector or a phage vector, as shown, for example, in Table 7. These deposits are referred to as “the deposits” herein. The tissues from which some of the clones were derived are listed in Table 7, and the vector in which the corresponding cDNA is contained is also indicated in Table 7. The deposited material includes cDNA clones corresponding to SEQ ID NO: X described, for example, in Table 1 (Clone ID NO: Z). A clone which is isolatable from the ATCC Deposits by use of a sequence listed as SEQ ID NO: X, may include the entire coding region of a human gene or in other cases such clone may include a substantial portion of the coding region of a human gene Furthermore, although the sequence listing may in some instances list only a portion of the DNA sequence in a clone included in the ATCC Deposits, it is well within the ability of one skilled in the art to sequence the DNA included in a clone contained in the ATCC Deposits by use of a sequence (or portion-thereof) described in, for example Tables 1A or 2 by procedures hereinafter further described, and others apparent to those skilled in the art.

[0072] Also provided in Table 7 is the name of the vector which contains the cDNA clone. Each vector is routinely used in the art. The following additional information is provided for convenience.

[0073] Vectors Lambda Zap (U.S. Pat. Nos. 5,128,256 and 5,286,636), Uni-Zap XR (U.S. Pat. Nos. 5,128,256 and 5,286,636), Zap Express (U.S. Pat. Nos. 5,128,256 and 5,286,636), pBluescript (pBS) (Short, J. M. et al., Nucleic Acids Res. 16:7583-7600 (1988); Alting-Mees, M. A. and Short, J. M., Nucleic Acids Res. 17:9494 (1989)) and pBK (Alting-Mees, M. A. et al., Strategies 5:58-61 (1992)) are commercially available from Stratagene Cloning Systems, Inc., 11011 N. Torrey Pines Road, La Jolla, Calif., 92037. pBS contains an ampicillin resistance gene and pBK contains a neomycin resistance gene. Phagemid pBS may be excised from the Lambda Zap and Uni-Zap XR vectors, and phagemid pBK may be excised from the Zap Express vector. Both phagemids may be transformed into E. coli strain XL-1 Blue, also available from Stratagene.

[0074] Vectors pSport1, pCMVSport 1.0, pCMVSport 2.0 and pCMVSport 3.0, were obtained from Life Technologies, Inc., P.O. Box 6009, Gaithersburg, Md. 20897. All Sport vectors contain an ampicillin resistance gene and may be transformed into E. coli strain DH10B, also available from Life Technologies. See, for instance, Gruber, C. E., et al., Focus 15:59-(1993). Vector lafmid BA (Bento Soares, Columbia University, New York, N.Y.) contains an ampicillin resistance gene and can be transformed into E. coli strain XL-1 Blue. Vector pCR®2.1, which is available from Invitrogen, 1600 Faraday Avenue, Carlsbad, Calif. 92008, contains an ampicillin resistance gene and may be transformed into E. coli strain DH10B, available from Life Technologies. See, for instance, Clark, J. M., Nuc. Acids Res. 16:9677-9686 (1988) and Mead, D. et al., Bio/Technology 9: (1991).

[0075] The present invention also relates to the genes corresponding to SEQ ID NO: X, SEQ ID NO: Y, and/or the deposited clone (Clone ID NO: Z). The corresponding gene can be isolated in accordance with known methods using the sequence information disclosed herein. Such methods include preparing probes or primers from the disclosed sequence and identifying or amplifying the corresponding gene from appropriate sources of genomic material.

[0076] Also provided in the present invention are allelic variants, orthologs, and/or species homologs. Procedures known in the art can be used to obtain full-length genes, allelic variants, splice variants, full-length coding portions, orthologs, and/or species homologs of colon cancer associated genes corresponding to SEQ ID NO: X or the complement thereof, polypeptides encoded by SEQ ID NO: X or the complement thereof, and/or the cDNA contained in Clone ID NO: Z, using information from the sequences disclosed herein or the clones deposited with the ATCC. For example, allelic variants and/or species homologs may be isolated and identified by making suitable probes or primers from the sequences provided herein and screening a suitable nucleic acid source for allelic variants and/or the desired homologue.

[0077] The polypeptides of the invention can be prepared in any suitable manner. Such polypeptides include isolated naturally occurring polypeptides, recombinantly produced polypeptides, synthetically produced polypeptides, or polypeptides produced by a combination of these methods. Means for preparing such polypeptides are well understood in the art.

[0078] The polypeptides may be in the form of the secreted protein, including the mature form, or may be a part of a larger protein, such as a fusion protein (see below). It is often advantageous to include an additional amino acid sequence which contains secretory or leader sequences, pro-sequences, sequences which aid in purification, such as multiple histidine residues, or an additional sequence for stability during recombinant production.

[0079] The polypeptides of the present invention are preferably provided in an isolated form, and preferably are substantially purified. A recombinantly produced version of a polypeptide, including the secreted polypeptide, can be substantially purified using techniques described herein or otherwise known in the art, such as, for example, by the one-step method described in Smith and Johnson, Gene 67:31-40 (1988). Polypeptides of the invention also can be purified from natural, synthetic or recombinant sources using techniques described herein or otherwise known in the art, such as, for example, antibodies of the invention raised against the colon cancer polypeptides of the present invention in methods which are well known in the art.

[0080] The present invention provides a polynucleotide comprising, or alternatively consisting of, the nucleic acid sequence of SEQ ID NO: X, and/or the cDNA sequence contained in Clone ID NO: Z. The present invention also provides a polypeptide comprising, or alternatively, consisting of, the polypeptide sequence of SEQ ID NO: Y, a polypeptide encoded by SEQ ID NO: X or a complement thereof, or a polypeptide encoded by the cDNA contained in Clone ID NO: Z. Polynucleotides encoding a polypeptide comprising, or alternatively consisting of the polypeptide sequence of SEQ ID NO: Y, a polypeptide encoded by SEQ ID NO: X, and/or a polypeptide encoded by the cDNA contained in Clone ID NO: Z. The present invention further encompasses a polynucleotide comprising, or alternatively consisting of, the complement of the nucleic acid sequence of SEQ ID NO: X, a nucleic acid sequence encoding a polypeptide encoded by the complement of the nucleic acid sequence of SEQ ID NO: X, and/or the cDNA contained in Clone ID NO: Z.

[0081] Many polynucleotide sequences, such as EST sequences, are publicly available and accessible through sequence databases and may have been publicly available prior to conception of the present invention. Preferably, such related polynucleotides are specifically excluded from the scope of the present invention. Accordingly, for each contig sequence (SEQ ID NO: X) listed in the fourth column of Table 1, preferably excluded are one or more polynucleotides comprising a nucleotide sequence described by the general formula of a-b, where a is any integer between 1 and the final nucleotide minus 15 of SEQ ID NO: X, b is an integer of 15 to the final nucleotide of SEQ ID NO: X, where both a and b correspond to the positions of nucleotide residues shown in SEQ ID NO: X, and where b is greater than or equal to a+14. More specifically, preferably excluded are one or more polynucleotides comprising a nucleotide sequence described by the general formula of a-b, where a and b are integers as defined in columns 4 and 5, respectively, of Table 3. In specific embodiments, the polynucleotides of the invention do not consist of at least one, two, three, four, five, ten, or more of the specific polynucleotide sequences referenced by the Genbank Accession No. as disclosed in column 6 of Table 3. In further embodiments, preferably excluded from the invention are the specific polynucleotide sequence(s) contained in the clones corresponding to at least one, two, three, four, five, ten, or more of the available material having the accession numbers identified in the sixth column of this Table. In no way is this listing meant to encompass all of the sequences which may be excluded by the general formula, it is just a representative example. All references available through these accessions are hereby incorporated by reference in their entirety.

[0082] Table 3

[0083] Table 3 is provided on CD-R, hereby incorporated by reference herein.

[0084] Table 4

[0085] Table 4 is provided on CD-R, hereby incorporated by reference herein.

TABLE 5

| OMIM | |
|---|---|
| Refer- | |
| ence | Description |
| 100650 | Fetal alcohol syndrome |
| 100650 | Alcohol intolerance, acute |
| 100678 | ACAT2 deficiency |
| 100690 | Myasthenic syndrome, slow-channel congenital, 601462 |
| 100710 | Myasthenic syndrome, slow-channel congenital, 601462 |
| 100730 | Myasthenia gravis, neonatal transient |
| 101000 | Malignant mesothelioma, sporadic |
| 101000 | Meningioma, NF2-related, sporadic |
| 101000 | Neurofibromatosis, type 2 |
| 101000 | Neurolemmomatosis |
| 101000 | Schwannoma, sporadic |
| 102200 | Somatotrophinoma |
| 102300 | Restless legs syndrome |
| 102480 | Male infertility due to acrosin deficiency |
| 102578 | Leukemia, acute promyelocytic, PML/RARA type |
| 102600 | Urolithiasis, 2,8-dihydroxyadenine |
| 102610 | Myopathy, actin |
| 102610 | Myopathy, nemaline, 161800, 256030 |
| 102680 | Hypertension, essential, salt-sensitive, 145500 |
| 102770 | Myoadenylate deaminase deficiency |
| 102772 | [AMP deaminase deficiency, erythrocytic] |
| 103050 | Autism, succinylpurinemic |
| 103050 | Adenylosuccinase deficiency |
| 103220 | Progressive external ophthalmoplegia with mitochondrial DNA |
| | deletions, 157640 |
| 103581 | Albright hereditary osteodystrophy-2 |
| 103600 | Analbuminemia |
| 103600 | [Dysalbuminemic hyperthyroxinemia] |
| 103600 | [Dysalbuminemic hyperzincemia], 194470 |
| 103850 | Aldolase A deficiency |
| 103950 | Alzheimer disease, susceptibility to |
| 103950 | Emphysema due to alpha-2-macroglobulin deficiency |
| 104150 | [AFP deficiency, congenital] |
| 104150 | [Hereditary persistence of alpha-fetoprotein] |
| 104311 | Alzheimer disease, familial, with spastic paraparesis and unusual |
| | plaques |
| 104311 | Alzheimer disease-3 |
| 104311 | Alzheimer disease-3, early onset |
| 104311 | Dementia, frontotemporal, 600274 |
| 104500 | Amelogenesis imperfecta-2, hypoplastic local type |
| 104770 | Amyloidosis, secondary, susceptibility to |
| 105550 | Amyotrophic lateral sclerosis with frontotemporal dementia |
| 105580 | Anal canal carcinoma |
| 105600 | Dyserythropoietic anemia, congenital, type III |
| 105800 | Aneurysm, intracranial berry |
| 106150 | Hypertension, essential, susceptibility to |
| 106150 | Preeclampsia, susceptibility to |
| 106165 | Hypertension, essential, 145500 |
| 106180 | Alzheimer disease, susceptibility to, 104300 |
| 106180 | Myocardial infarction, susceptibility to |
| 106300 | Ankylosing spondylitis |
| 106700 | Total anomalous pulmonary venous return |
| 107271 | CD59 deficiency |
| 107300 | Antithrombin III deficiency |
| 107470 | Mycobacterial infection, atypical, familial disseminated, 209950 |
| 107470 | BCG infection, generalized familial |
| 107470 | Tuberculosis, susceptibility to |
| 107670 | Apolipoprotein A-II deficiency |
| 107680 | Amyloidosis, 3 or more types |
| 107680 | Hypertriglyceridemia, one form |
| 107680 | Hypoalphalipoproteinemia |
| 107680 | ApoA-I and apoC-III deficiency, combined |
| 107680 | Corneal clouding, autosomal recessive |
| 107720 | Hypertriglyceridemia |
| 107730 | Hypercholesterolemia, due to ligand-defective apo B, 144010 |
| 107730 | Hypobetalipoproteinemia |
| 107730 | Abetalipoproteinemia |
| 107741 | Hyperlipoproteinemia, type III |
| 107741 | Sea-blue histiocyte disease, 269600 |
| 107741 | Myocardial infarction susceptibility |
| 107776 | [Aquaporin-1 deficiency] |
| 107776 | Colton blood group, 110450 |
| 107777 | Diabetes insipidus, nephrogenic, autosomal dominant, 125800 |
| 107777 | Diabetes insipidus, nephrogenic, autosomal recessive, 222000 |
| 107910 | Gynecomastia, familial, due to increased aromatase activity |
| 107910 | Virilization, maternal and fetal, from placental aromatase |
| | deficiency |
| 107970 | Arrhythmogenic right ventricular dysplasia-1 |
| 108120 | Arthrogryposis multiplex congenita, distal, type 1 |
| 108600 | Spastic ataxia, autosomal dominant |
| 108725 | Atherosclerosis, susceptibility to |
| 108730 | Brody myopathy, 601003 |
| 108740 | Darier disease, 124200 |
| 108800 | Atrial septal defect, secundum type |
| 108962 | Hypertension, salt-resistant |
| 108985 | Atrophia areata |
| 109270 | Hemolytic anemia due to band 3 defect |
| 109270 | Renal tubular acidosis, distal, 179800 |
| 109270 | Spherocytosis, hereditary |
| 109270 | [Acanthocytosis, one form] |
| 109270 | [Elliptocytosis, Malaysian-Melanesian type] |
| 109350 | Gastroesophageal reflux |
| 109400 | Basal cell nevus syndrome |
| 109480 | [Blood group OK], 111380 |
| 109535 | Immunodeficiency with hyper-IgM, type 3, 606843 |
| 109543 | Leukemia, chronic lymphocytic, B-cell |
| 109560 | Leukemia/lymphoma, B-cell, 3 |
| 109565 | Lymphoma, B-cell |
| 109630 | Resting heart rate |
| 109690 | Asthma, nocturnal, susceptibility to |
| 109690 | Obesity, susceptibility to |
| 109700 | Hemodialysis-related amyloidosis |
| 110700 | Vivax malaria, susceptibility to |
| 112250 | Diaphyseal medullary stenosis with malignant fibrous |
| | histiocytoma |
| 112410 | Hypertension with brachydactyly |
| 112500 | Brachydactyly, type A1 |
| 113100 | Brachydactyly, type C |
| 113300 | Brachydactyly type E |
| 113530 | Hypervalinemia or hyperleucine-isoleucinemia |
| 113705 | Ovarian cancer |
| 113705 | Papillary serous carcinoma of the peritoneum |
| 113705 | Breast cancer-1 |
| 113705 | Breast-ovarian cancer |
| 113721 | Breast cancer |
| 114021 | Hypotrichosis, congential, with juvenile macular dystrophy, |
| | 601553 |
| 114130 | Osteoporosis |
| 114131 | Osteoporosis, postmenopausal, susceptibility, 166710 |
| 114208 | Hypokalemic periodic paralysis, 170400 |
| 114208 | Malignant hyperthermia susceptibility 5, 601887 |
| 114240 | Muscular dystrophy, limb-girdle, type 2A, 253600 |
| 114251 | Ventricular tachycardia, stress-induced polymorphic, 604772 |
| 114290 | Acampomelic campolelic dysplasia |
| 114290 | Campomelic dysplasia |
| 114290 | Campomelic dysplasia with autosomal sex reversal |
| 114400 | Lynch cancer family syndrome II |
| 114835 | Monocyte carboxylesterase deficiency |
| 115500 | Acatalasemia |
| 115650 | Cataract, anterior polar-1 |
| 115660 | Cataract, cerulean, type 1 |
| 115665 | Cataract, congenital, Volkmann type |
| 116600 | Cataract, posterior polar |
| 116800 | Cataract, Marner type |
| 116806 | Hepatoblastoma |
| 116806 | Hepatocellular carcinoma, 114550 |
| 116806 | Ovarian carcinoma, endometrioid type |
| 116806 | Pilomatricoma |
| 116806 | Colorectal cancer |
| 116897 | Leukemia, acute myeloid |
| 116955 | Myotonic dystrophy, type 2, 602668 |
| 117550 | Sotos syndrome |
| 117700 | Hemosiderosis, systemic, due to aceruloplasminemia, 604290 |
| 117700 | [Hypoceruloplasminemia, hereditary], 604290 |
| 117700 | Cerebellar ataxia, 604290 |
| 118190 | Spastic paraplegia-13, 605280 |
| 118425 | Myotonia congenita, dominant, 160800 |
| 118425 | Myotonia congenita, recessive, 255700 |
| 118425 | Myotonia levior, recessive |
| 118470 | [CETP deficiency] |
| 118485 | Polycystic ovary syndrome, 184700 |
| 118490 | Myasthenia gravis, familial infantile, 2, 254210 |
| 118503 | Megacystis-microcolon-intestinal hypoperistalsis syndrome, |
| | 249210 |
| 118504 | Epilepsy, nocturnal frontal lobe, 1, 600513 |
| 118507 | Epilepsy, nocturnal frontal lobe, 3, 605375 |
| 118600 | Chondrocalcinosis, familial articular |
| 118800 | Choreoathetosis, familial paroxysmal |
| 119530 | Orofacial cleft-1 |
| 120070 | Alport syndrome, autosomal recessive, 203780 |
| 120110 | Metaphyseal chondrodysplasia, Schmid type |
| 120110 | Spondylometaphyseal dysplasia, Japanese type |
| 120120 | Transient bullous dermolysis of the newborn, 131705 |
| 120120 | EBD, Bart type, 132000 |
| 120120 | EBD, generalized atrophic benign, 226650 |
| 120120 | EBD, localisata variant |
| 120120 | Epidermolysis Epidermolysis bullosa dystrophica, AR, 226600 |
| 120120 | Epidermolysis bullosa dystrophica, AD, 131750 |
| 120120 | Epidermolysis bullosa pruriginosa, 604129 |
| 120120 | Epidermolysis bullosa, pretibial, 131850 |
| 120131 | Hematuria, familial benign |
| 120131 | Alport syndrome, autosomal recessive, 203780 |
| 120140 | Kniest dysplasia, 156550 |
| 120140 | Osteoarthrosis, 165720 |
| 120140 | SED congenita, 183900 |
| 120140 | SMD, 184252 |
| 120140 | SMED Strudwick type, 184250 |
| 120140 | Spondyloperipheral dysplasia, 184252 |
| 120140 | Stickler syndrome, type I, 108300 |
| 120140 | Wagner syndrome, 143200 |
| 120140 | Achondrogenesis-hypochondrogenesis, type II, 200610 |
| 120140 | Epiphyseal dysplasia, multiple, with myopia and deafness, |
| | 132450 |
| 120150 | Osteogenesis imperfecta, type I, 166200 |
| 120150 | Osteogenesis imperfecta, type II, 166210 |
| 120150 | Osteogenesis imperfecta, type III, 259420 |
| 120150 | Osteogenesis imperfecta, type IV, 166220 |
| 120150 | Osteoporosis, idiopathic, 166710 |
| 120150 | Dissection of cervical arteries |
| 120150 | Ehlers-Danlos syndrome, type I, 130000 |
| 120150 | Ehlers-Danlos syndrome, type VII, 130060 |
| 120160 | Marfan syndrome, atypical |
| 120160 | Osteogenesis imperfecta, 3 clinical forms, 166200, 166210, |
| | 259420 |
| 120160 | Osteoporosis, idiopathic, 166710 |
| 120160 | Ehlers-Danlos syndrome, type VIIA2, 130060 |
| 120180 | Aneurysm, familial arterial |
| 120180 | Ehlers-Danlos syndrome, type III, 130020 |
| 120180 | Ehlers-Danlos syndrome, type IV, 130050 |
| 120190 | Ehlers-Danlos syndrome, type I, 130000 |
| 120210 | Epiphyseal dysplasia, multiple, COL9A1-related |
| 120215 | Ehlers-Danlos syndrome, type I, 130000 |
| 120215 | Ehlers-Danlos syndrome, type II, 130010 |
| 120220 | Bethlem myopathy, 158810 |
| 120240 | Bethlem myopathy, 158810 |
| 120240 | Ullrich scleroatonic muscular dystrophy, 254090 |
| 120250 | Bethlem myopathy, 158810 |
| 120260 | Intervertebral disc disease, susceptibility to, 603932 |
| 120260 | Epiphyseal dysplasia, multiple, type 2, 600204 |
| 120270 | Intervertebral disc disease, susceptibility to, 603932 |
| 120270 | Epiphyseal dysplasia, multiple, 3, 600969 |
| 120270 | Epiphyseal dysplasia, multiple, with myopathy |
| 120290 | OSMED syndrome, 215150 |
| 120290 | Stickler syndrome, type III, 184840 |
| 120290 | Weissenbacher-Zweymuller syndrome, 277610 |
| 120290 | Deafness, autosomal dominant 13, 601868 |
| 120360 | Osteolysis, idiopathic, Saudi type, 605156 |
| 120435 | Muir-Torre syndrome, 158320 |
| 120435 | Ovarian cancer |
| 120435 | Cafe-au-lait spots, multiple, with leukemia, 114030 |
| 120435 | Colorectal cancer, hereditary nonpolyposis, type 1, 114500 |
| 120436 | Muir-Torre syndrome, 158320 |
| 120436 | Turcot syndrome with glioblastoma, 276300 |
| 120436 | Cafe-au-lait spots with glioma or leukemia, 114030 |
| 120436 | Colorectal cancer, hereditary nonpolyposis, type 2, 114500 |
| 120502 | Branchiootic syndrome 2 |
| 120520 | Membranous glomerulonephritis, antenatal |
| 120520 | [Neutral endopeptidase deficiency] |
| 120550 | C1q deficiency, type A |
| 120570 | C1q deficiency, type B |
| 120575 | C1q deficiency, type C |
| 120580 | C1r/C1s deficiency, combined |
| 120580 | C1s deficiency, isolated |
| 120620 | SLE susceptibility |
| 120620 | CR1 deficiency |
| 120700 | C3 deficiency |
| 120810 | C4 deficiency |
| 120820 | C4 deficiency |
| 120920 | Measles, susceptibility to |
| 120940 | C9 deficiency |
| 120950 | C8 deficiency, type I |
| 120960 | C8 deficiency, type II |
| 121011 | Keratitis-ichthyosis-deafness syndrome, 148210 |
| 121011 | Keratoderma, palmoplantar, with deafness, 148350 |
| 121011 | Vohwinkel syndrome, 124500 |
| 121011 | Deafness, autosomal dominant 3, 601544 |
| 121011 | Deafness, autosomal recessive 1, 220290 |
| 121014 | Deafness, autosomal recessive 38, 607197 |
| 121050 | Contractural arachnodactyly, congenital |
| 121300 | Harderoporphyrinuria |
| 121300 | Coproporphyria |
| 121360 | Myeloid leukemia, acute, M4Eo subtype |
| 121700 | Congenital hereditary endothelial dystrophy of cornea |
| 121800 | Corneal dystrophy, crystalline, Schnyder |
| 122720 | Nicotine addiction, protection from |
| 122720 | Coumarin resistance, 122700 |
| 123101 | Parietal foramina 1, 168500 |
| 123101 | Craniosynostosis, type 2, 604757 |
| 123270 | [Creatine kinase, brain type, ectopic expression of] |
| 123580 | Cataract, congenital progressive, autosomal recessive |
| 123580 | Cataract, zonular central nuclear, autosomal dominant |
| 123590 | Myopathy, cardioskeletal, desmin-related, with cataract, 601419 |
| 123590 | Cataract, posterior polar 2 |
| 123610 | Cataract, congenital zonular, with sutural opacities, 600881 |
| 123620 | Cataract, cerulean, type 2, 601547 |
| 123620 | Cataract, sutural, with punctate and cerulean opacities, 607133 |
| 123680 | Cataract, Coppock-like, 604307 |
| 123680 | Cataract, variable zonular pulverulent |
| 123690 | Cataract, crystalline aculeiform, 115700 |
| 123690 | Cataracts, punctate, progressive juvenile-onset |
| 123829 | Melanoma |
| 123940 | White sponge nevus, 193900 |
| 124030 | Parkinsonism, susceptibility to |
| 124030 | Debrisoquine sensitivity |
| 124080 | Hypoaldosteronism, congenital, due to CMO I deficiency, |
| | 203400 |
| 124080 | Hypoaldosteronism, congenital, due to CMO II deficiency |
| 124080 | Low renin hypertension, susceptibility to |
| 125264 | Leukemia, acute nonlymphocytic |
| 125270 | Porphyria, acute hepatic |
| 125270 | Lead poisoning, susceptibility to |
| 125370 | Dentatorubro-pallidoluysian atrophy |
| 125647 | Keratosis palmoplantaris striata II |
| 125647 | Dilated cardiomyopathy with woolly hair and keratoderma, |
| | 605676 |
| 125660 | Myopathy, desmin-related, cardioskeletal, 601419 |
| 125660 | Cardiomyopathy, dilated, 1I, 604765 |
| 125852 | Diabetes mellitus, insulin-dependent, 2 |
| 125860 | Benzene toxicity, susceptibility to |
| 125860 | Leukemia, post-chemotherapy, susceptibility to |
| 126060 | Anemia, megaloblastic, due to DHFR deficiency |
| 126090 | Hyperphenylalaninemia due to pterin-4a-carbinolamine |
| | dehydratase deficiency, 264070 |
| 126110 | Leukemia, acute myeloblastic |
| 126150 | Diphtheria, susceptibility to |
| 126337 | Myxoid liposarcoma |
| 126340 | Trichothiodystrophy, 601675 |
| 126340 | Xeroderma pigmentosum, group D, 278730 |
| 126340 | Cerebrooculofacioskeletal syndrome, 214150 |
| 126391 | DNA ligase I deficiency |
| 126450 | Dystonia, myoclonic, 159900 |
| 126452 | Autonomic nervous system dysfunction |
| 126452 | [Novelty seeking personality], 601696 |
| 126453 | Blepharospasm, primary benign, 606798 |
| 126453 | Dystonia, primary cervical |
| 126650 | Chloride diarrhea, congenital, Finnish type, 214700 |
| 126650 | Colon cancer |
| 127600 | Dyskeratosis, hereditary benign intraepithelial |
| 127700 | Dyslexia-1 |
| 128200 | Paroxysmal kinesigenic choreoathetosis |
| 128235 | Dystonia-12 |
| 129010 | Neuropathy, congenital hypomyelinating, 1, 605253 |
| 129010 | Charcot-Marie-Tooth disease, type 1, 118200 |
| 129010 | Dejerine-Sottas neuropathy, 145900 |
| 129900 | EEC syndrome-1 |
| 130130 | Hematopoiesis, cyclic, 162800 |
| 130130 | Neutropenia, congenital, 202700 |
| 130160 | Supravalvar aortic stenosis, 185500 |
| 130160 | Williams-Beuren syndrome, 194050 |
| 130160 | Cutis laxa, 123700 |
| 130410 | Glutaricaciduria, type IIB |
| 130500 | Elliptocytosis-1 |
| 131100 | Hyperparathyroidism, AD, 145000 |
| 131100 | Angiofibroma, sporadic |
| 131100 | Lipoma, sporadic |
| 131100 | Multiple endocrine neoplasia I |
| 131100 | Parathyroid adenoma, sporadic |
| 131100 | Prolactinoma, hyperparathyroidism, carcinoid syndrome |
| 131100 | Carcinoid tumor of lung |
| 131100 | Adrenal adenoma, sporadic |
| 131210 | Atherosclerosis, susceptibility to |
| 131242 | Shah-Waardenburg syndrome, 277580 |
| 131320 | Hypoparathyroidism, sensorineural deafness, and renal |
| | dysplasia, 146255 |
| 131399 | Eosinophil peroxidase deficiency, 261500 |
| 131400 | Eosinophilia, familial |
| 131440 | Eosinophilic myeloproliferative disorder |
| 131950 | Epidermolysis bullosa, Ogna type |
| 132800 | Basal cell carcinoma |
| 132800 | Epithelioma, self-healing, squamous 1, Ferguson-Smith type |
| 132810 | Diphenylhydantoin toxicity |
| 132810 | Fetal hydantoin syndrome |
| 133020 | Erythermalgia, primary |
| 133170 | Erythremia |
| 133171 | [Erythrocytosis, familial], 133100 |
| 133430 | Breast cancer |
| 133430 | Estrogen resistance |
| 133510 | Trichothiodystrophy |
| 133510 | Xeroderma pigmentosum, group B |
| 133520 | Xeroderma pigmentosum, group F, 278760 |
| 133700 | Chondrosarcoma, 215300 |
| 133700 | Exostoses, multiple, type 1 |
| 133701 | Exostoses, multiple, type 2 |
| 133780 | Vitreoretinopathy, exudative, familial |
| 134370 | Hemolytic-uremic syndrome, 235400 |
| 134370 | Membroproliferative glomerulonephritis |
| 134370 | Nephropathy, chronic hypocomplementemic |
| 134370 | Factor H deficiency |
| 134570 | Factor XIIIA deficiency |
| 134580 | Factor XIIIB deficiency |
| 134600 | Fanconi renotubular syndrome |
| 134638 | Systemic lupus erythematosus, susceptibility, 152700 |
| 134770 | Iron overload, autosomal dominant |
| 134790 | Hyperferritinemia-cataract syndrome, 600886 |
| 134790 | Basal ganglia disease, adult-onset, 606159 |
| 134797 | MASS syndrome, 604308 |
| 134797 | Marfan syndrome, 154700 |
| 134797 | Shprintzen-Goldberg syndrome, 182212 |
| 134797 | Ectopia lentis, familial |
| 134820 | Amyloidosis, hereditary renal, 105200 |
| 134820 | Afibrinogenemia, 202400 |
| 134820 | Dysfibrinogenemia, alpha type, causing bleeding diathesis |
| 134820 | Dysfibrinogenemia, alpha type, causing recurrent thrombosis |
| 134830 | Thrombophilia, dysfibrinogenemic |
| 134830 | Afibrinogenemia, congenital, 202400 |
| 134830 | Dysfibrinogenemia, beta type |
| 134850 | Hypofibrinogenemia, gamma type |
| 134850 | Thrombophilia, dysfibrinogenemic |
| 134850 | Dysfibrinogenemia, gamma type |
| 134934 | Hypochondroplasia, 146000 |
| 134934 | Muencke syndrome, 602849 |
| 134934 | Thanatophoric dysplasia, types I and II, 187600 |
| 134934 | Bladder cancer, 109800 |
| 134934 | Achondroplasia, 100800 |
| 134934 | Cervical cancer, somatic, 603956 |
| 134934 | Colorectal cancer, somatic, 109800 |
| 134934 | Crouzon syndrome with acanthosis nigricans |
| 135100 | Fibrodysplasia ossificans progressiva |
| 135150 | Birt-Hogg-Dube syndrome |
| 135600 | Ehlers-Danlos syndrome, type X, 225310 |
| 135700 | Fibrosis of extraocular muscles, congenital, 1 |
| 135750 | Tetramelic mirror-image polydactyly |
| 135940 | Ichthyosis vulgaris, 146700 |
| 136132 | [Fish-odor syndrome], 602079 |
| 136350 | Jackson-Weiss sydnrome, 123150 |
| 136350 | Pfeiffer syndrome, 101600 |
| 136351 | Leukemia, acute myeloid, reduced survival in |
| 136352 | Hemangioma, capillary infantile, somatic, 602089 |
| 136352 | Lymphedema, hereditary I, 153100 |
| 136430 | Congenital anomalies, susceptibility to |
| 136435 | Ovarian sex cord tumors |
| 136435 | Premature ovarian failure, 233300 |
| 136435 | Twinning, dizygotic, 276400 |
| 136530 | Male infertility, familial |
| 136550 | Macular dystrophy, North Carolina type |
| 136836 | Fucosyltransferase-6 deficiency |
| 136850 | Leiomyomatosis and renal cell cancer, 605839 |
| 136850 | Multiple cutaneous and uterine leiomyomata, 150800 |
| 136850 | Fumarase deficiency, 606812 |
| 137060 | Congenital disorder of glycosylation, type IId, 607091 |
| 137100 | Immunoglobulin A deficiency |
| 137150 | GABA-transaminase deficiency |
| 137160 | Epilepsy, juvenile myoclonic, 606904 |
| 137164 | Epilepsy, childhood absence, 600131 |
| 137164 | Epilepsy, generalized, with febrile seizures plus, 604233 |
| 137167 | Vitamin K-dependent coagulation defect, 277450 |
| 137181 | [Gamma-glutamyltransferase, familial high serum] |
| 137290 | Corneal dystrophy, gelatinous drop-like, 204870 |
| 137350 | Amyloidosis, Finnish type, 105120 |
| 137580 | Tourette syndrome |
| 137780 | Alexander disease, 203450 |
| 138030 | [Hyperproglucagonemia] |
| 138033 | Diabetes mellitus, noninsulin-dependent, 125853 |
| 138040 | Cortisol resistance |
| 138079 | Hyperinsulinism, familial, 602485 |
| 138079 | MODY, type II, 125851 |
| 138079 | Diabetes mellitus, neonatal-onset, 606176 |
| 138130 | Hyperinsulinism-hyperammonemia syndrome, 606762 |
| 138140 | Glucose transport defect, blood-brain barrier, 606777 |
| 138160 | Diabetes mellitus, noninsulin-dependent |
| 138160 | Fanconi-Bickel syndrome, 227810 |
| 138190 | Diabetes mellitus, noninsulin-dependent |
| 138320 | Hemolytic anemia due to glutathione peroxidase deficiency |
| 138491 | Hyperekplexia and spastic paraparesis |
| 138491 | Startle disease, autosomal recessive |
| 138491 | Startle disease/hyperekplexia, autosomal dominant, 149400 |
| 138570 | Diabetes mellitus, noninsulin-dependent |
| 138571 | Glycogen storage disease, type 0, 240600 |
| 138700 | [Apolipoprotein H deficiency] |
| 138720 | Bernard-Soulier syndrome, type B, 231200 |
| 138720 | Giant platelet disorder, isolated |
| 138760 | [Glyoxalase II deficiency] |
| 138850 | Hypogonadotropic hypogonadism |
| 138850 | Fertile eunuch syndrome, 228300 |
| 138981 | Pulmonary alveolar proteinosis, 265120 |
| 139130 | Hypertension, essential, susceptibility to, 145500 |
| 139150 | Basal cell carcinoma |
| 139191 | Growth hormone deficient dwarfism |
| 139250 | Isolated growth hormone deficiency, Illig type with absent GH |
| | and Kowarski type with bioinactive GH |
| 139320 | McCune-Albright syndrome, 174800 |
| 139320 | Osseous heteroplasia, progressive, 166350 |
| 139320 | Pituitary ACTH secreting adenoma |
| 139320 | Pseudohypoparathyroidism, type Ia, 103580 |
| 139320 | Somatotrophinoma |
| 139330 | Night blindness, congenital stationary |
| 139340 | Achromatopsia, 216900 |
| 139350 | Keratoderma, palmoplantar, nonepidermolytic |
| 139350 | Cyclic ichthyosis with epidermolytic hyperkeratosis |
| 139350 | Epidermolytic hyperkeratosis, 113800 |
| 139360 | Pituitary ACTH-secreting adenoma |
| 139360 | Ventricular tachycardia, idiopathic, 192605 |
| 140100 | [Anhaptoglobinemia] |
| 140100 | [Hypohaptoglobinemia] |
| 140300 | Hashimoto thyroiditis |
| 140600 | Osteoarthritis of distal interphalangeal joints |
| 141750 | Alpha-thalassemia/mental retardation syndrome, type 1 |
| 141800 | Heinz body anemias, alpha- |
| 141800 | Methemoglobinemias, alpha- |
| 141800 | Thalassemias, alpha- |
| 141800 | Erythremias, alpha- |
| 141850 | Heinz body anemia |
| 141850 | Hemoglobin H disease |
| 141850 | Hypochromic microcytic anemia |
| 141850 | Thalassemia, alpha- |
| 141850 | Erythrocytosis |
| 141900 | HPFH, deletion type |
| 141900 | Heinz body anemias, beta- |
| 141900 | Methemoglobinemias, beta- |
| 141900 | Sickle cell anemia |
| 141900 | Thalassemias, beta- |
| 141900 | Erythremias, beta- |
| 142000 | Thalassemia due to Hb Lepore |
| 142000 | Thalassemia, delta- |
| 142200 | HPFH, nondeletion type A |
| 142250 | HPFH, nondeletion type G |
| 142335 | Hereditary persistence of fetal hemoglobin, heterocellular, Indian |
| | type |
| 142410 | MODY, type III, 600496 |
| 142410 | Diabetes mellitus, insulin-dependent |
| 142410 | Diabetes mellitus, noninsulin-dependent, 2, 601407 |
| 142461 | Schwartz-Jampel syndrome, type 1, 255800 |
| 142461 | Dyssegmental dysplasia, Silverman-Handmaker type, 224410 |
| 142470 | [Hereditary persistence of fetal hemoglobin, heterocellular] |
| 142600 | Hemolytic anemia due to hexokinase deficiency |
| 142640 | Thrombophilia due to HRG deficiency |
| 142640 | Thrombophilia due to elevated HRG |
| 142669 | Hip dysplasia, Beukes type |
| 142857 | Pemphigoid, susceptibility to |
| 142858 | Beryllium disease, chronic, susceptibility to |
| 142958 | Radioulnar synostosis with amegakaryocytic thrombocytopenia, |
| | 605432 |
| 142959 | Guttmacher syndrome, 176305 |
| 142959 | Hand-foot-uterus syndrome, 140000 |
| 142983 | Hypodontia with orofacial cleft, 106600 |
| 142983 | Hypodontia, autosomal dominant, 106600 |
| 142983 | Witkop syndrome, 189500 |
| 142989 | Synpolydactyly, type II, 186000 |
| 142993 | Microphthalmia, cataracts, and iris abnormalities |
| 142994 | Currarino syndrome, 176450 |
| 143100 | Huntington disease |
| 143200 | Wagner syndrome |
| 143200 | Erosive vitreoretinopathy |
| 143450 | Trifunctional protein deficiency, type II |
| 143870 | Hypercalciuria, absorptive |
| 144120 | Hyperimmunoglobulin G1 syndrome |
| 144200 | Epidermolytic palmoplantar keratoderma |
| 145001 | Hyperparathyroidism, familial primary, 145000 |
| 145001 | Hyperparathyroidism-jaw tumor syndrome |
| 145260 | Pseudohypoaldosteronism, type II |
| 145410 | Opitz G syndrome, type II |
| 145505 | Hypertension, essential |
| 145750 | Hypertriglyceridemia, susceptibility to |
| 145981 | Hypocalciuric hypercalcemia, type II |
| 146200 | Hypoparathyroidism, familial |
| 146255 | HDR syndrome |
| 146520 | Hypotrichosis simplex of scalp |
| 146550 | Hypotrichosis, Marie Unna type |
| 146661 | Severe combined immunodeficiency, T-cell negative, B-cell/ |
| | natural killer cell-positive type, 600802 |
| 146740 | Neutropenia, alloimmune neonatal |
| 146740 | Lupus erythematosus, systemic, susceptibility, 152700 |
| 146740 | Viral infections, recurrent |
| 146760 | [IgG receptor I, phagocytic, familial deficiency of] |
| 146770 | Agammaglobulinemia, autosomal recessive |
| 146790 | Lupus nephritis, susceptibility to |
| 147020 | Agammaglobulinemia, 601495 |
| 147050 | Atopy |
| 147060 | Hyper-IgE syndrome |
| 147061 | Allergy and asthma susceptibility |
| 147110 | IgG2 deficiency, selective |
| 147138 | Asthma, atopic, susceptibility to |
| 147141 | Leukemia, acute lymphoblastic |
| 147200 | [Kappa light chain deficiency] |
| 147280 | Hepatocellular carcinoma |
| 147440 | Growth retardation with deafness and mental retardation |
| 147450 | Amytrophic lateral sclerosis, due to SOD1 deficiency, 105400 |
| 147545 | Diabetes mellitus, noninsulin-dependent |
| 147557 | Epidermolysis bullosa, generalized atrophic benign, 226650 |
| 147557 | Epidermolysis bullosa, junctional, with pyloric atresia, 226730 |
| 147569 | Mycobacterial infection, atypical, familial disseminated, 209950 |
| 147570 | Interferon, immune, deficiency |
| 147575 | Macrocytic anemia, refractory, of 5q-syndrome, 153550 |
| 147575 | Myelodysplastic syndrome, preleukemic |
| 147575 | Myelogenous leukemia, acute |
| 147575 | Nonsmall cell lung cancer |
| 147575 | Gastric cancer, 137215 |
| 147670 | Leprechaunism, 246200 |
| 147670 | Rabson-Mendenhall syndrome, 262190 |
| 147670 | Diabetes mellitus, insulin-resistant, with acanthosis nigricans |
| 147680 | Severe combined immunodeficiency due to IL2 deficiency |
| 147683 | Asthma, susceptibility to, 600807 |
| 147730 | Interleukin-2 receptor, alpha chain, deficiency of |
| 147781 | Atopy, susceptibility to |
| 147791 | Jacobsen syndrome |
| 147840 | Malaria, cerebral, susceptibility to |
| 148040 | Epidermolysis bullosa simplex with mottled pigmentation, |
| | 131960 |
| 148040 | Epidermolysis bullosa simplex, Koebner, Dowling-Meara, and |
| | Weber-Cockayne types, 131900, 131760, 131800 |
| 148041 | Pachyonychia congenita, Jadassohn-Lewandowsky type, 167200 |
| 148042 | Pachyonychia congenita, Jackson-Lawler type, 167210 |
| 148043 | Meesmann corneal dystrophy, 122100 |
| 148060 | Cirrhosis, cryptogenic |
| 148065 | White sponge nevus, 193900 |
| 148066 | Epidermolysis bullosa simplex, Koebner, Dowling-Meara, and |
| | Weber-Cockayne types, 131900, 131760, 131800 |
| 148066 | Epidermolysis bullosa simplex, recessive, 601001 |
| 148067 | Nonepidermolytic palmoplantar keratoderma, 600962 |
| 148067 | Pachyonychia congenita, Jadassohn-Lewandowsky type, 167200 |
| 148069 | Pachyonychia congenita, Jackson-Lawler type, 167210 |
| 148069 | Steatocystoma multiplex, 184500 |
| 148070 | Liver disease, susceptibility to, from hepatotoxins or viruses |
| 148080 | Epidermolytic hyperkeratosis, 113800 |
| 148300 | Keratoconus |
| 148370 | Keratolytic winter erythema |
| 148500 | Tylosis with esophageal cancer |
| 148900 | Klippel-Feil syndrome with laryngeal malformation |
| 150000 | Exertional myoglobinuria due to deficiency of LDH-A |
| 150100 | Lactate dehydrogenase-B deficiency |
| 150200 | [Placental lactogen deficiency] |
| 150210 | Lactoferrin-deficient neutrophils, 245480 |
| 150230 | Langer-Giedion syndrome |
| 150240 | Cutis laxa, marfanoid neonatal type |
| 150250 | Larsen syndrome, autosomal dominant |
| 150270 | Laryngeal adductor paralysis |
| 150292 | Epidermolysis bullosa, Herlitz junctional type, 226700 |
| 150292 | Epidermolysis bullosa, generalized atrophic benign, 226650 |
| 150310 | Epidermolysis bullosa, Herlitz junctional type, 226700 |
| 150310 | Epidermolysis bullosa, generalized atrophic benign, 226650 |
| 150330 | Lipodystrophy, familial partial, 151660 |
| 150330 | Mandibuloacral dysplasia, 248370 |
| 150330 | Muscular dystrophy, limb-girdle, type 1B, 159001 |
| 150330 | Cardiomyopathy, dilated, 1A, 115200 |
| 150330 | Charcot-Marie-Tooth disease, type 2B1, 605588 |
| 150330 | Emery-Dreifuss muscular dystrophy, AD, 181350 |
| 150330 | Emery-Dreifuss muscular dystrophy, AR, 604929 |
| 151385 | Leukemia, acute myeloid |
| 151385 | Platelet disorder, familial, with associated myeloid malignancy, |
| | 601399 |
| 151390 | Leukemia, acute T-cell |
| 151400 | Leukemia/lymphoma, B-cell, 1 |
| 151410 | Leukemia, chronic myeloid, Leukemia, acute lymphocytic |
| 151440 | Leukemia, T-cell acute lymphoblastoid |
| 151460 | Severe combined immunodeficiency due to PTPRC deficiency |
| 151460 | Multiple sclerosis, susceptibility to, 126200 |
| 151670 | Hepatic lipase deficiency |
| 152200 | Coronary artery disease, susceptibility to |
| 152427 | Long QT syndrome-2 |
| 152445 | Vohwinkel syndrome with ichthyosis, 604117 |
| 152445 | Erythrokeratoderma, progressive symmetric, 602036 |
| 152760 | Hypogonadotropic hypogonadism due to GNRH deficiency, |
| | 227200 |
| 152790 | Hypogonadotropic hypogonadism |
| 152790 | Leydig cell adenoma, with precocious puberty |
| 152790 | Micropenis |
| 152790 | Precocious puberty, male, 176410 |
| 152790 | Pseudohermaphroditism, male, with Leydig cell hypoplasia |
| 153390 | SCID due to LCK deficiency |
| 153454 | Ehlers-Danlos syndrome, type VI, 225400 |
| 153455 | Cutis laxa, recessive, type I, 219100 |
| 153700 | Macular dystrophy, vitelliform type |
| 153840 | Macular dystrophy, atypical vitelliform |
| 153880 | Macular dystrophy, dominant cystoid |
| 154045 | Cataract, cortical pulverulent, late-onset |
| 154050 | Cataract, polymorphic and lamellar, 604219 |
| 154275 | Malignant hyperthermia susceptibility 2 |
| 154276 | Malignant hyperthermia susceptibility 3 |
| 154400 | Acrofacial dysostosis, Nager type |
| 154545 | Chronic infections, due to opsonin defect |
| 154550 | Carbohydrate-deficient glycoprotein syndrome, type Ib, 602579 |
| 154705 | Marfan-like connective tissue disorder |
| 154870 | Keutel syndrome, 245150 |
| 155555 | [Red hair/fair skin] |
| 155555 | UV-induced skin damage, vulnerability to |
| 155600 | Malignant melanoma, cutaneous |
| 156100 | Meningioma |
| 156225 | Muscular dystrophy, congenital merosin-deficient |
| 156232 | Mesomelic dysplasia, Kantaputra type |
| 156490 | Neuroblastoma |
| 156570 | Methylcobalamin deficiency, cb1G type, 250940 |
| 156600 | Microcoria, congenital |
| 156850 | Cataract, congenital, with microphthalmia |
| 157140 | Pallidopontonigral degeneration, 168610 |
| 157140 | Parkinson disease, late-onset, 168600 |
| 157140 | Dementia, Pick disease-like, 172700 |
| 157140 | Dementia, frontotemporal, with parkinsonism, 601630 |
| 157147 | Abetalipoproteinemia, 200100 |
| 157300 | Migraine with aura, susceptibility to |
| 157655 | Lactic acidosis due to defect in iron-sulfur cluster of complex I |
| 157655 | Mitochondrial complex I deficiency |
| 157660 | Metaphyseal dysplasia without hypotrichosis, 250460 |
| 157660 | Cartilage-hair hypoplasia, 250250 |
| 157700 | Mitral valve prolapse, familial |
| 157900 | Moebius syndrome |
| 158371 | Ulcerative colitis, susceptibility to, 191390 |
| 158580 | Motor neuronopathy, distal hereditary, with vocal cord paralysis |
| 158590 | Spinal muscular atrophy-4 |
| 158900 | Facioscapulohumeral muscular dystrophy-1A |
| 159001 | Muscular dystrophy, limb-girdle, type 1B |
| 159350 | Colorectal cancer |
| 159440 | Hypomyelination, congenital |
| 159440 | Charcot-Marie-Tooth neuropathy-1B, 118200 |
| 159440 | Dejerine-Sottas disease, myelin P-zero-related, 145900 |
| 159530 | Thrombocytopenia, congenital amegakaryocytic, 604498 |
| 159555 | Leukemia, myeloid/lymphoid or mixed-lineage |
| 160700 | Myopia-2 |
| 160710 | Cardiomyopathy, familial hypertrophic, 192600 |
| 160740 | Inclusion body myopathy-3, 605637 |
| 160760 | Cardiomyopathy, familial hypertrophic, 1, 192600 |
| 160760 | Central core disease, one form |
| 160775 | May-Hegglin anomaly, 155100 |
| 160775 | Sebastian syndrome, 605249 |
| 160775 | Deafness, autosomal dominant 17, 603622 |
| 160775 | Epstein syndrome, 153650 |
| 160775 | Fechtner syndrome, 153640 |
| 160777 | Griscelli syndrome-type pigmentary dilution with mental |
| | retardation, 214450 |
| 160781 | Cardiomyopathy, hypertrophic, mid-left ventricular chamber |
| | type |
| 161015 | Leigh syndrome, 256000 |
| 161015 | Alexander disease, 203450 |
| 161561 | BCG and salmonella infection, disseminated, 209950 |
| 161650 | Nemaline myopathy 2, autosomal recessive, 256030 |
| 161900 | Nephropathy-hypertension |
| 161950 | Nephropathy, IgA type |
| 162080 | Retinitis pigmentosa, autosomal dominant |
| 162100 | Neuralgic amyotrophy with predilection for brachial plexus |
| 162150 | Obestiy with impaired prohormone processing, 600955 |
| 162200 | Leukemia, juvenile myelomonocytic |
| 162200 | Melanoma, desmoplastic neurotropic |
| 162200 | Neurofibromatosis, type 1 |
| 162200 | Watson syndrome, 193520 |
| 162230 | Amyotrophic lateral sclerosis, susceptibility to, 105400 |
| 162280 | Charcot-Marie-Tooth disease, type 2E |
| 163000 | Capillary malformations, hereditary |
| 163729 | Coronary spasm, susceptibility to |
| 163729 | Preeclampsia, susceptibility to, 189800 |
| 163890 | Parkinson disease, familial, 601508 |
| 164009 | Leukemia, acute promyelocytic, NUMA/RARA type |
| 164040 | Leukemia, acute promyelocytic, NPM/RARA type |
| 164050 | Nucleoside phosphorylase deficiency, immunodeficiency |
| | due to |
| 164100 | Nystagmus-2, autosomal dominant |
| 164160 | Obesity, morbid, with hypogonadism |
| 164160 | Obesity, severe, due to leptin deficiency |
| 164200 | Oculodentodigital dysplasia |
| 164200 | Syndactyly, type III, 186100 |
| 164210 | Hemifacial microsomia |
| 164280 | Oculodigitoesophagoduodenal syndrome |
| 164500 | Spinocerebellar ataxia-7 |
| 164690 | Leukemia, acute myeloid, with eosinophilia |
| 164731 | Ovarian carcinoma, 167000 |
| 164761 | Hirschsprung disease, 142623 |
| 164761 | Medullary thyroid carcinoma, 155240 |
| 164761 | Multiple endocrine neoplasia IIA, 171400 |
| 164761 | Multiple endocrine neoplasia IIB, 162300 |
| 164770 | Myeloid malignancy, predisposition to |
| 164790 | Colorectal cancer |
| 164860 | Hepatocellular carcinoma, childhood type, 114550 |
| 164860 | Renal cell carcinoma, papillary, familial and sporadic, |
| | 605074 |
| 164920 | Mast cell leukemia |
| 164920 | Mastocytosis with associated hematologic disorder |
| 164920 | Piebaldism |
| 164920 | Gastrointestinal stromal tumors |
| 164920 | Germ cell tumors, 273300 |
| 164953 | Liposarcoma |
| 165215 | 3q21q26 syndrome |
| 165240 | Greig cephalopolysyndactyly syndrome, 175700 |
| 165240 | Pallister-Hall syndrome, 146510 |
| 165240 | Polydactyly, postaxial, types A1 and B, 174200 |
| 165240 | Polydactyly, preaxial, type IV, 174700 |
| 165320 | Hepatocellular carcinoma |
| 166800 | Otosclerosis 1 |
| 167000 | Ovarian cancer, serous |
| 167250 | Paget disease of bone |
| 167409 | Optic nerve coloboma with renal disease, 120330 |
| 167410 | Rhabdomyosarcoma, alveolar, 268220 |
| 167415 | Hypothyroidism, congenital, due to thyroid dysgenesis or |
| | hypoplasia, 218700 |
| 167416 | Hypodontia, 106600 |
| 167416 | Oligodontia, 604625 |
| 168360 | Neuropathy, paraneoplastic sensory |
| 168450 | Hypoparathyroidism, autosomal dominant |
| 168450 | Hypoparathyroidism, autosomal recessive |
| 168461 | Multiple myeloma, 254500 |
| 168461 | Parathyroid adenomatosis 1 |
| 168461 | Centrocytic lymphoma |
| 168468 | Metaphyseal chondrodysplasia, Murk Jansen type, 156400 |
| 168468 | Enchondromatosis, Ollier type, 166000 |
| 168470 | Humoral hypercalcemia of malignancy |
| 168610 | Parkinsonism-dementia with pallidopontonigral degeneration |
| 168820 | Coronary artery disease, susceptibility to |
| 168820 | Coronary artery spasm, susceptibility to |
| 168860 | Patella aplasia or hypoplasia |
| 170261 | Bare lymphocyte syndrome, type I, due to TAP2 deficiency |
| 170280 | Hemophagocytic lymphohistiocytosis, familial, 2, 603553 |
| 170650 | Periodontitis, juvenile |
| 170995 | Zellweger syndrome-2 |
| 171050 | Colchicine resistance |
| 171060 | Cholestasis, familial intrahepatic, of pregnancy, 147480 |
| 171060 | Cholestasis, progressive familial intrahepatic, type III, 602347 |
| 171190 | Hypertension, essential, 145500 |
| 171200 | [Phenylthiocarbamide tasting] |
| 171650 | Lysosomal acid phosphatase deficiency |
| 171760 | Hypophosphatasia, adult, 146300 |
| 171760 | Hypophosphatasia, childhood, 241510 |
| 171760 | Hypophosphatasia, infantile, 241500 |
| 171860 | Hemolytic anemia due to phosphofructokinase deficiency |
| 172400 | Hemolytic anemia due to glucosephosphate isomerase deficiency |
| 172400 | Hydrops fetalis, one form |
| 172411 | Colorectal cancer, resistance to |
| 172430 | Enolase deficiency |
| 172471 | Glycogenosis, hepatic, autosomal |
| 172490 | Phosphorylase kinase deficiency of liver and muscle, autosomal |
| | recessive, 261750 |
| 173325 | Naxos disease, 601214 |
| 173335 | Ossification of posterior longitudinal ligament of spine, 602475 |
| 173350 | Plasminogen Tochigi disease |
| 173350 | Plasminogen deficiency, types I and II |
| 173350 | Thrombophilia, dysplasminogenemic |
| 173350 | Conjunctivitis, ligneous, 217090 |
| 173360 | Hemorrhagic diathesis due to PAI1 deficiency |
| 173360 | Thrombophilia due to excessive plasminogen activator inhibitor |
| 173370 | Plasminogen activator deficiency |
| 173510 | Platelet glycoprotein IV deficiency |
| 173510 | [Macrothrombocytopenia] |
| 173610 | Platelet alpha/delta storage pool deficiency |
| 173850 | Polio, susceptibility to |
| 173870 | Xeroderma pigmentosum |
| 173910 | Polycystic kidney disease, adult, type II |
| 174000 | Medullary cystic kidney disease 1 |
| 174050 | Polycystic liver disease |
| 174500 | Polydactyly, preaxial II |
| 174763 | Progressive external ophthalmoplegia with mitochondrial DNA |
| | deletions, 157640 |
| 175100 | Turcot syndrome, 276300 |
| 175100 | Adenoma, periampullary |
| 175100 | Adenomatous polyposis coli |
| 175100 | Adenomatous polyposis coli, attenuated |
| 175100 | Colorectal cancer |
| 175100 | Desmoid disease, hereditary, 135290 |
| 175100 | Gardner syndrome |
| 175100 | Gastric cancer, 137215 |
| 175900 | Porokeratosis, disseminated superficial actinic |
| 176000 | Porphyria, acute intermittent |
| 176000 | Porphyria, acute intermittent, nonerythroid variant |
| 176010 | Porphyria, Chester type |
| 176100 | Porphyria cutanea tarda |
| 176100 | Porphyria, hepatoerythropoietic |
| 176260 | Episodic ataxia/myokymia syndrome, 160120 |
| 176261 | Jervell and Lange-Nielsen syndrome, 220400 |
| 176261 | Long QT syndrome-5 |
| 176270 | Prader-Willi syndrome |
| 176300 | Amyloid neuropathy, familial, several allelic types |
| 176300 | Amyloidosis, senile systemic |
| 176300 | [Dystransthyretinemic hyperthyroxinemia] |
| 176300 | Carpal tunnel syndrome, familial |
| 176310 | Leukemia, acute pre-B-cell |
| 176450 | Sacral agenesis-1 |
| 176640 | Huntington disease-like 1, 603218 |
| 176640 | Insomnia, fatal familial |
| 176640 | Prion disease with protracted course, 606688 |
| 176640 | Creutzfeldt-Jakob disease, 123400 |
| 176640 | Gerstmann-Straussler disease, 137440 |
| 176705 | Breast cancer, sporadic |
| 176730 | MODY, one form, 125850 Hyperproinsulinemia, familial |
| 176730 | Diabetes mellitus, rare form |
| 176797 | Leukemia, acute promyelocytic, PL2F/RARA type |
| 176801 | Metachromatic leukodystrophy due to deficiency of SAP-1 |
| 176801 | Combined SAP deficiency |
| 176801 | Gaucher disease, variant form |
| 176830 | ACTH deficiency |
| 176830 | Obesity, adrenal insufficiency, and red hair |
| 176860 | Purpura fulminans, neonatal |
| 176860 | Thrombophilia due to protein C deficiency |
| 176876 | Noonan syndrome 1, 163950 |
| 176876 | Cardiofaciocutaneous syndrome, 115150 |
| 176885 | Insulin resistance, susceptibility to |
| 176930 | Hyperprothrombinemia |
| 176930 | Hypoprothrombinemia |
| 176930 | Dysprothrombinemia |
| 176943 | Jackson-Weiss syndrome, 123150 |
| 176943 | Antley-Bixler syndrome, 207410 |
| 176943 | Apert syndrome, 101200 |
| 176943 | Pfeiffer syndrome, 101600 |
| 176943 | Saethre-Chotzen syndrome, 101400 |
| 176943 | Beare-Stevenson cutis gyrata syndrome, 123790 |
| 176943 | Craniosynostosis, nonspecific |
| 176943 | Crouzon syndrome, 123500 |
| 176943 | Gastric cancer, somatic, 137215 |
| 176947 | Selective T-cell defect |
| 176960 | Pituitary tumor, invasive |
| 177070 | Spherocytosis, hereditary, Japanese type |
| 177400 | Apnea, postanesthetic |
| 177900 | Psoriasis, susceptibility to, 177900 |
| 178300 | Ptosis, hereditary congenital, 1 |
| 178620 | Pneumonitis, desquamative interstitial, 263000 |
| 178640 | Pulmonary alveolar proteinosis, congenital, 265120 |
| 179095 | Male infertility |
| 179450 | Ragweed sensitivity |
| 179502 | Lymphocytic leukemia, acute T-cell |
| 179605 | Macular dystrophy |
| 179605 | Macular dystrophy, vitelliform |
| 179605 | Pattern dystrophy of retina |
| 179605 | Retinitis pigmentosa with bull's-eye maculopathy |
| 179605 | Retinitis pigmentosa, digenic |
| 179605 | Retinitis pigmentosa-7, peripherin-related |
| 179605 | Retinitis punctata albescens |
| 179605 | Butterfly dystrophy, retinal |
| 179605 | Foveomacular dystrophy, adult-onset, with choroidal |
| | neovascularization |
| 179615 | Omenn syndrome, 603554 |
| 179615 | Reticulosis, familial histiocytic, 267700 |
| 179615 | Severe combined immunodeficiency, B cell-negative, 601457 |
| 179616 | Omenn syndrome, 603554 |
| 179616 | Severe combined immunodeficiency, B cell-negative, 601457 |
| 179617 | Breast cancer, susceptibility to, 114480 |
| 179755 | Renal cell carcinoma, papillary, 1, 605074 |
| 179820 | [Hyperproreninemia] |
| 180020 | Retinal cone dystrophy-1 |
| 180069 | Leber congenital amaurosis-2, 204100 |
| 180069 | Retinal dystrophy, autosomal recessive, childhood-onset |
| 180069 | Retinitis pigmentosa-20 |
| 180071 | Retinitis pigmentosa, autosomal recessive |
| 180072 | Night blindness, congenital stationary, type 3, 163500 |
| 180072 | Retinitis pigmentosa, autosomal recessive |
| 180104 | Retinitis pigmentosa-9 |
| 180105 | Retinitis pigmentosa-10 |
| 180200 | Osteosarcoma, 259500 |
| 180200 | Pinealoma with bilateral retinoblastoma |
| 180200 | Retinoblastoma |
| 180200 | Bladder cancer, 109800 |
| 180240 | Leukemia, acute promyelocytic |
| 180250 | Retinol binding protein, deficiency of |
| 180297 | Anemia, hemolytic, Rh-null, regulator type, 268150 |
| 180297 | Rh-mod syndrome |
| 180380 | Night blindness, congenital stationery, rhodopsin-related |
| 180380 | Retinitis pigmentosa, autosomal recessive |
| 180380 | Retinitis pigmentosa-4, autosomal dominant |
| 180381 | Oguchi disease-2, 258100 |
| 180385 | Leukemia, acute T-cell |
| 180435 | Prostate cancer 1, 176807, 601518 |
| 180721 | Retinitis pigmentosa, digenic |
| 180860 | Russell-Silver syndrome |
| 180901 | Malignant hyperthermia susceptibility 1, 145600 |
| 180901 | Central core disease, 117000 |
| 180902 | Arrhythmogenic right ventricular dysplasia 2, 600996 |
| 180902 | Ventricular tachycardia, stress-induced polymorphic, 604772 |
| 181030 | Salivary gland pleomorphic adenoma |
| 181405 | Scapuloperoneal spinal muscular atrophy, New England type |
| 181430 | Scapuloperoneal syndrome, myopathic type |
| 181460 | Schistosoma mansoni infection, susceptibility/resistance to |
| 181510 | Schizophrenia, 181500 |
| 181800 | Scoliosis, idiopathic |
| 182125 | Sepiapterin reductase deficiency |
| 182138 | Anxiety-related personality traits |
| 182280 | Small-cell cancer of lung |
| 182290 | Smith-Magenis syndrome |
| 182380 | Glucose/galactose malabsorption, 606824 |
| 182381 | Renal glucosuria, 233100 |
| 182389 | Epilepsy, generalized, with febrile seizures plus, type 2, 604233 |
| 182452 | Lung cancer, small cell |
| 182500 | Cataract, congenital |
| 182530 | Fibromatosis, gingival, 135300 |
| 182600 | Spastic paraplegia-3A |
| 182860 | Pyropoikilocytosis |
| 182860 | Spherocytosis, recessive |
| 182860 | Elliptocytosis-2 |
| 182870 | Anemia, neonatal hemolytic, fatal and near-fatal |
| 182870 | Spherocytosis-1 |
| 182870 | Elliptocytosis-3 |
| 182900 | Spherocytosis-2 |
| 183600 | Split hand/foot malformation, type 1 |
| 184757 | Sex reversal, XY, with adrenal failure |
| 184757 | Adrenocortical insufficiency without ovarian defect |
| 185470 | Pheochromocytoma, extraadrenal, and cervical paraganglioma, |
| | 115310 |
| 185620 | Leigh syndrome, due to COX deficiency, 256000 |
| 185900 | Syndactyly, type 1 |
| 186740 | Immunodeficiency due to defect in CD3-gamma |
| 186770 | Leukemia, T-cell acute lymphocytic |
| 186780 | CD3, zeta chain, deficiency |
| 186830 | Immunodeficiency, T-cell receptor/CD3 complex |
| 186855 | Leukemia-2, T-cell acute lymphoblastic |
| 186860 | Leukemia/lymphoma, T-cell |
| 186880 | Leukemia/lymphoma, T-cell |
| 186921 | Leukemia, T-cell acute lymphoblastic |
| 187011 | HIV-1 disease, delayed progression of |
| 187040 | Leukemia-1, T-cell acute lymphocytic |
| 187395 | Forebrain defects |
| 187680 | 6-mercaptopurine sensitivity |
| 188000 | Thrombocytopenia-2 |
| 188025 | Thrombocytopenia, Paris-Trousseau type |
| 188070 | Bleeding disorder due to defective thromboxane A2 receptor |
| 188450 | Goiter, adolescent multinodular |
| 188450 | Goiter, nonendemic, simple |
| 188450 | Hypothyroidism, hereditary congenital |
| 188540 | Hypothyroidism, nongoitrous |
| 188826 | Sorsby fundus dystrophy, 136900 |
| 188830 | Myxoma, intracardiac, 255960 |
| 188830 | Thyroid carcinoma, papillary, 188550 |
| 188830 | Carney complex, type 1, 160980 |
| 189800 | Preeclampsia |
| 190000 | Atransferrinemia, 209300 |
| 190020 | Bladder cancer, 109800 |
| 190040 | Meningioma, SIS-related |
| 190040 | Dermatofibrosarcoma protuberans |
| 190040 | Giant-cell fibroblastoma |
| 190070 | Colorectal adenoma |
| 190070 | Colorectal cancer |
| 190080 | Burkitt lymphoma, 113970 |
| 190090 | Colon cancer, advanced |
| 190100 | Geniospasm |
| 190180 | Camurati-Engelmann disease, 131300 |
| 190182 | Colon cancer |
| 190182 | Colorectal cancer, hereditary nonpolyposis, type 6, 114500 |
| 190182 | Esophageal cancer, 133239 |
| 190195 | Ichthyosiform erythroderma, congenital, 242100 |
| 190195 | Ichthyosis, lamellar, autosomal recessive, 242300 |
| 190198 | Leukemia, T-cell acute lymphoblastic |
| 190300 | Tremor, familial essential, 1 |
| 190450 | Hemolytic anemia due to triosephosphate isomerase deficiency |
| 190605 | Triphalangeal thumb-polysyndactyly syndrome |
| 190685 | Down syndrome |
| 190900 | Colorblindness, tritan |
| 191010 | Cardiomyopathy, familial hypertrophic, 3, 115196 |
| 191030 | Nemaline myopathy 1, autosomal dominant, 161800 |
| 191041 | Nemaline myopathy, Amish type, 605355 |
| 191044 | Cardiomyopathy, familial hypertrophic |
| 191045 | Cardiomyopathy, familial hypertrophic, 2, 115195 |
| 191092 | Lymphangioleiomyomatosis, somatic, 606690 |
| 191092 | Tuberous sclerosis-2, 191100 |
| 191160 | Malaria, cerebral, susceptibility to |
| 191160 | Septic shock, susceptibility to |
| 191170 | Hepatocellular carcinoma, 114550 |
| 191170 | Histiocytoma |
| 191170 | Li-Fraumeni syndrome, 151623 |
| 191170 | Multiple malignancy syndrome |
| 191170 | Nasopharyngeal carcinoma, 161550 |
| 191170 | Osteosarcoma |
| 191170 | Pancreatic cancer, 260350 |
| 191170 | Thyroid carcinoma |
| 191170 | Breast cancer, 114480 |
| 191170 | Adrenal cortical carcinoma, 202300 |
| 191170 | Colorectal cancer, 114500 |
| 191181 | Cervical carcinoma |
| 191290 | Segawa syndrome, recessive |
| 191306 | Hemangioma, capillary infantile, somatic, 602089 |
| 191315 | Insensitivity to pain, congenital, with anhidrosis, 256800 |
| 191315 | Medullary thyroid carcinoma, familial, 155240 |
| 191540 | [Urate oxidase deficiency] |
| 191740 | Hyperbilirubinemia, familial transcient neonatal, 237900 |
| 191740 | [Gilbert syndrome], 143500 |
| 191740 | Crigler-Najjar syndrome, type I, 218800 |
| 191740 | Crigler-Najjar syndrome, type II, 606785 |
| 192090 | Ovarian carcinoma |
| 192090 | Listeria monocytogenes, susceptibility to |
| 192090 | Breast cancer, lobular |
| 192090 | Endometrial carcinoma |
| 192090 | Gastric cancer, familial diffuse, 137215 |
| 192315 | Retinopathy, vascular, with cerebral and renal involvement |
| 192340 | Diabetes insipidus, neurohypophyseal, 125700 |
| 192500 | Jervell and Lange-Nielsen syndrome, 220400 |
| 192500 | Long QT syndrome-1 |
| 192974 | Glycoprotein Ia deficiency |
| 192974 | Neonatal alloimmune thrombocytopenia |
| 193000 | Vesicoureteral reflux |
| 193200 | Vitiligo, susceptibility to |
| 193235 | Vitreoretinopathy, neovascular inflammatory |
| 193300 | Renal cell carcinoma |
| 193300 | von Hippel-Lindau syndrome |
| 193400 | von Willebrand disease |
| 193500 | Rhabdomyosarcoma, alveolar, 268220 |
| 193500 | Waardenburg syndrome, type I |
| 193500 | Waardenburg syndrome, type III, 148820 |
| 193500 | Craniofacial-deafness-hand syndrome, 122880 |
| 194070 | Mesangial sclerosis, isolated diffuse, 256370 |
| 194070 | WAGR syndrome, 194072 |
| 194070 | Wilms tumor, type 1 |
| 194070 | Denys-Drash syndrome, 194080 |
| 194070 | Frasier syndrome, 136680 |
| 194071 | Wilms tumor, type 2 |
| 194071 | Adrenocortical carcinoma, hereditary, 202300 |
| 194190 | Wolf-Hirschhorn syndrome |
| 194380 | Pseudohyperkalemia, familial, 177720 |
| 194380 | Dehydrated hereditary stomatocytosis |
| 194380 | Dehydrated hereditary stomatocytosis, pseudohyperkalemia, and |
| | perinatal edema, 603528 |
| 200350 | Acetyl-CoA carboxylase deficiency |
| 200990 | Acrocallosal syndrome |
| 201100 | Acrodermatitis enteropathica, zinc-deficiency type |
| 201460 | Acyl-CoA dehydrogenase, long chain, deficiency of |
| 201475 | VLCAD deficiency |
| 201810 | 3-beta-hydroxysteroid dehydrogenase, type II, deficiency |
| 201910 | Adrenal hyperplasia, congenital, due to 21-hydroxylase |
| | deficiency |
| 202010 | Adrenal hyperplasia, congenital, due to 11-beta-hydroxylase |
| | deficiency |
| 202010 | Aldosteronism, glucocorticoid-remediable, 103900 |
| 202200 | Glucocorticoid deficiency, due to ACTH unresponsiveness |
| 203200 | Albinism, brown oculocutaneous, |
| 203200 | Albinism, ocular, autosomal recessive |
| 203200 | Albinism, oculocutaneous, type II |
| 203310 | Ocular albinism, autosomal recessive |
| 203500 | Alkaptonuria |
| 203740 | Alpha-ketoglutarate dehydrogenase deficiency |
| 203750 | 3-ketothiolase deficiency |
| 204500 | Ceroid-lipofuscinosis, neuronal 2, classic late infantile |
| 207750 | Hyperlipoproteinemia, type Ib |
| 207800 | Argininemia |
| 208100 | Arthrogryposis multiplex congenita, neurogenic |
| 208400 | Aspartylglucosaminuria |
| 208900 | Lymphoma, B-cell non-Hodgkin, somatic |
| 208900 | Lymphoma, mantle cell |
| 208900 | Ataxia-telangiectasia |
| 208900 | T-cell prolymphocytic leukemia, sporadic |
| 208900 | Breast cancer, susceptibility to |
| 209901 | Bardet-Biedl syndrome 1, 209900 |
| 210200 | 3-Methylcrotonylglycinuria I |
| 210210 | 3-Methylcrotonylglycinuria II |
| 210370 | Bietti crystalline corneoretinal dystrophy |
| 210600 | Seckel sydnrome |
| 211420 | Breast cancer, ductal |
| 212138 | Carnitine-acylcarnitine translocase deficiency |
| 212750 | Celiac disease |
| 213300 | Joubert syndrome-1 |
| 215400 | Chordoma |
| 216550 | Cohen syndrome |
| 216950 | C1r/C1s deficiency, combined |
| 217000 | C2 deficiency |
| 217030 | C3b inactivator deficiency |
| 217050 | C6 deficiency |
| 217050 | Combined C6/C7 deficiency |
| 217070 | C7 deficiency |
| 218000 | Andermann syndrome |
| 218030 | Hypertension, mild low-renin |
| 218030 | Apparent mineralocorticoid excess, hypertension due to |
| 218040 | Costello syndrome |
| 218400 | Craniometaphyseal dysplasia, autosomal recessive |
| 221820 | Gliosis, familial progressive subcortical |
| 221900 | Retinal nonattachment, nonsyndromic congenital |
| 222100 | Diabetes mellitus, insulin-dependent-1 |
| 222745 | DECR deficiency |
| 222748 | Dihydropyrimidinuria |
| 222800 | Hemolytic anemia due to bisphosphoglycerate mutase deficiency |
| 222900 | Sucrose intolerance |
| 223360 | [Dopamine-beta-hydroxylase activity levels, plasma] |
| 224120 | Dyserythropoietic anemia, contenital, type I |
| 225750 | Aicardi-Goutieres syndrome 1 |
| 226450 | Epidermolysis bullosa inversa, junctional |
| 227220 | [Eye color, brown] |
| 227400 | Hemorrhagic diathesis due to factor V deficiency |
| 227400 | Thromboembolism susceptibility due to factor V Leiden |
| 227500 | Myocardial infarction, decreased susceptibility to |
| 227500 | Factor VII deficiency |
| 227600 | Factor X deficiency |
| 227650 | Fanconi anemia, complementation group A |
| 228000 | Farber lipogranulomatosis |
| 228960 | [Kininogen deficiency] |
| 229000 | Fletcher factor deficiency |
| 229700 | Fructose-bisphosphatase deficiency |
| 229800 | [Fructosuria] |
| 230000 | Fucosidosis |
| 231090 | Hydatidiform mole |
| 231200 | Bernard-Soulier syndrome |
| 231670 | Glutaricaciduria, type I |
| 231675 | Glutaricaciduria, type IIC |
| 231680 | Glutaricaciduria, type IIA |
| 231950 | Glutathioninuria |
| 232000 | Propionicacidemia, 606054 |
| 232050 | Propionicacidemia, 606054 |
| 232200 | Glycogen storage disease I |
| 232600 | McArdle disease |
| 232700 | Glycogen storage disease VI |
| 232800 | Glycogen storage disease VII |
| 233100 | [Renal glucosuria] |
| 233690 | Chronic granulomatous disease, autosomal, due to deficiency of |
| | CYBA |
| 233700 | Chronic granulomatous disease due to deficiency of NCF-1 |
| 233710 | Chronic granulomatous disease due to deficiency of NCF-2 |
| 234000 | Factor XII deficiency |
| 234500 | Hartnup disorder |
| 235200 | Hemochromatosis |
| 235200 | Porphyria variegata, 176200 |
| 235800 | [Histidinemia] |
| 236100 | Holoprosencephaly-1 |
| 236200 | Homocystinuria, B6-responsive and nonresponsive types |
| 236200 | Thrombosis, hyperhomocysteinemic |
| 236680 | Hydrolethalus syndrome |
| 236730 | Urofacial syndrome |
| 237300 | Carbamoylphosphate synthetase I deficiency |
| 238310 | Glycine encephalopathy, 605899 |
| 238330 | Glycine encephalopathy, 605899 |
| 238600 | Hyperlipoproteinemia I |
| 238600 | Lipoprotein lipase deficiency |
| 238600 | Chylomicronemia syndrome, familial |
| 238600 | Combined hyperlipemia, familial |
| 239100 | Van Buchem disease |
| 240300 | Autoimmune polyglandular disease, type I |
| 241410 | Hypoparathyroidism-retardation-dysmorphism syndrome |
| 243500 | Isovalericacidemia |
| 244460 | Kenny-Caffey syndrome-1 |
| 245050 | Ketoacidosis due to SCOT deficiency |
| 245349 | Lacticacidemia due to PDX1 deficiency |
| 246300 | Leprosy, susceptibility to |
| 246450 | HMG-CoA lyase deficiency |
| 246530 | Leukotriene C4 synthase deficiency |
| 246900 | Lipoamide dehydrogenase deficiency |
| 247200 | Miller-Dieker lissencephaly syndrome |
| 247640 | Leukemia, acute lymphoblastic |
| 248310 | Plasmodium falciparum parasitemia, intensity of |
| 248510 | Mannosidosis, beta- |
| 248600 | Maple syrup urine disease, type Ia |
| 248610 | Maple syrup urine disease, type II |
| 248611 | Maple syrup urine disease, type Ib |
| 249000 | Meckel syndrome, type 1 |
| 249100 | Familial Mediterranean fever |
| 250100 | Metachromatic leukodystrophy |
| 250790 | Methemoglobinemia due to cytochrome b5 deficiency |
| 250800 | Methemoglobinemia, type I |
| 250800 | Methemoglobinemia, type II |
| 250850 | Hypermethioninemia, persistent, autosomal dominant, due to |
| | methionine adenosyltransferase I/III deficiency |
| 250850 | Methionine adenosyltransferase deficiency, autosomal recessive |
| 251000 | Methylmalonicaciduria, mutase deficiency type |
| 251170 | Hyper-IgD syndrome, 260920 |
| 251170 | Mevalonicaciduria |
| 251600 | Microphthalmia, autosomal recessive |
| 252350 | Moyamoya disease |
| 252500 | Mucolipidosis II |
| 252500 | Mucolipidosis III |
| 252800 | Mucopolysaccharidosis Ih |
| 252800 | Mucopolysaccharidosis Ih/s |
| 252800 | Mucopolysaccharidosis Is |
| 252900 | Sanfilippo syndrome, type A |
| 252920 | Sanfilippo syndrome, type B |
| 252940 | Sanfilippo syndrome, type D |
| 253000 | Mucopolysaccharidosis IVA |
| 253200 | Maroteaux-Lamy syndrome, several forms |
| 253260 | Biotinidase deficiency |
| 253270 | Multiple carboxylase deficiency, biotin-responsive |
| 253310 | Lethal congenital contracture syndrome |
| 253700 | Muscular dystrophy, limb-girdle, type 2C |
| 253800 | Muscular dystrophy, Fukuyama congenital |
| 253800 | Walker-Warburg syndrome, 236670 |
| 254780 | Epilepsy, myoclonic, Lafora type |
| 256540 | Galactosialidosis |
| 256550 | Sialidosis, type I |
| 256550 | Sialidosis, type II |
| 256700 | Neuroblastoma |
| 256731 | Ceroid-lipofuscinosis, neuronal-5, variant late infantile |
| 257200 | Niemann-Pick disease, type A |
| 257200 | Niemann-Pick disease, type B |
| 257220 | Niemann-Pick disease, type C1 |
| 257220 | Niemann-Pick disease, type D, 257250 |
| 258870 | Gyrate atrophy of choroid and retina with ornithinemia, B6 |
| | responsive or unresponsive |
| 258900 | Oroticaciduria |
| 259450 | Bruck syndrome |
| 259730 | Renal tubular acidosis-osteopetrosis syndrome |
| 259770 | Osteoporosis-pseudoglioma syndrome |
| 261000 | Anemia, pernicious, congenital, due to deficiency of intrinsic |
| | factor |
| 261600 | Phenylketonuria |
| 261600 | [Hyperphenylalaninemia, mild] |
| 261640 | Phenylketonuria due to PTS deficiency |
| 261670 | Myopathy due to phosphoglycerate mutase deficiency |
| 262000 | Bjornstad syndrome |
| 262850 | Plasmin inhibitor deficiency |
| 263400 | Erythrocytosis, autosomal recessive benign |
| 264470 | Adrenoleukodystrophy, pseudoneonatal |
| 264600 | Pseudovaginal perineoscrotal hypospadias |
| 264700 | Pseudovitamin D deficiency rickets 1 |
| 264900 | Factor XI deficiency |
| 266100 | Epilepsy, pyridoxine-dependent |
| 266150 | Pyruvate carboxylase deficiency |
| 266200 | Anemia, hemolytic, due to PK deficiency |
| 266300 | [Hair color, red] |
| 267750 | Knobloch syndrome |
| 270200 | Sjogren-Larsson syndrome |
| 270685 | Spastic paraplegia-17 |
| 270800 | Spastic paraplegia-5A |
| 271245 | Spinocerebellar ataxia, infantile-onset, with sensory neuropathy |
| 271250 | Spinocerebellar ataxia with blindness and deafness |
| 271900 | Canavan disease |
| 271980 | Succinic semialdehyde dehydrogenase deficiency |
| 272750 | GM2-gangliosidosis, AB variant |
| 273300 | Male germ cell tumor |
| 274180 | Thromboxane synthase deficiency |
| 274270 | Thymine-uraciluria |
| 274270 | Fluorouracil toxicity, sensitivity to |
| 275120 | Thyrotropin-releasing hormone deficiency |
| 275350 | Transcobalamin II deficiency |
| 276000 | Pancreatitis, hereditary, 167800 |
| 276000 | Trypsinogen deficiency |
| 276600 | Tyrosinemia, type II |
| 276700 | Tyrosinemia, type I |
| 276710 | Tyrosinemia, type III |
| 276900 | Usher syndrome, type 1A |
| 276901 | Retinitis pigmentasa, AR, without hearing loss, 268000 |
| 276901 | Usher syndrome, type 2A |
| 276903 | Usher syndrome, type 1B |
| 276903 | Deafness, autosomal dominant 11, neurosensory, 601317 |
| 276903 | Deafness, autosomal recessive 2, neurosensory, 600060 |
| 276905 | Usher syndrome, type IIB |
| 277600 | Weill-Marchesani syndrome |
| 278000 | Wolman disease |
| 278000 | Cholesteryl ester storage disease |
| 278300 | Xanthinuria, type I |
| 278720 | Xeroderma pigmentosum, group C |
| 300000 | Opitz G syndrome, type I |
| 300005 | Angelman syndrome, 105830 |
| 300005 | Mental retardation, X-linked, nonspecific |
| 300005 | Mental retardation, X-linked, with progressive spasticity, |
| | 300279 |
| 300005 | PPM-X syndrome, 300055 |
| 300005 | Rett syndrome, 312750 |
| 300005 | Rett syndrome, preserved speech variant, 312750 |
| 300008 | Hypophosphatemia, type III |
| 300008 | Nephrolithiasis, type I, 310468 |
| 300008 | Proteinuria, low molecular weight, with hypercalciuric |
| | nephrocalcinosis |
| 300008 | Dent disease, 300009 |
| 300011 | Menkes disease, 309400 |
| 300011 | Occipital horn syndrome, 304150 |
| 300011 | Cutis laxa, neonatal |
| 300017 | Heterotopia, periventricular, 300049 |
| 300030 | Deafness, X-linked 4, congenital sensorineural |
| 300031 | Mental retardation, X-linked, FRAXF type |
| 300032 | Juberg-Marsidi syndrome, 309590 |
| 300032 | Smith-Fineman-Myers syndrome, 309580 |
| 300032 | Sutherland-Haan syndrome, 309470 |
| 300032 | Alpha-thalassemia/mental retardation syndrome, 301040 |
| 300036 | Mental retardation, X-linked, with seizures and carrier |
| | manifestations, 300397 |
| 300036 | Creatine deficiency syndrome, X-linked, 300352 |
| 300044 | Wernicke-Korsakoff syndrome, susceptibility to |
| 300046 | Mental retardation, X-linked 23, nonspecific |
| 300047 | Mental retardation, X-linked 20 |
| 300048 | Intestinal pseudoobstruction, neuronal, X-linked |
| 300062 | Mental retardation, X-linked 14 |
| 300066 | Deafness, X-linked 6, sensorineural |
| 300075 | Mental retardation, X-linked nonspecific, type 19 |
| 300075 | Coffin-Lowry syndrome, 303600 |
| 300077 | Mental retardation, X-linked 29 |
| 300085 | Cone dystrophy, progressive X-linked, 2 |
| 300088 | Epilepsy, female restricted, with mental retardation |
| 300096 | Mental retardation, X-linked nonspecific |
| 300100 | Adrenoleukodystrophy |
| 300100 | Adrenomyeloneuropathy |
| 300104 | Mental retardation, X-linked nonspecific, 309541 |
| 300108 | Premature ovarian failure, 311360 |
| 300110 | Night blindness, congenital stationary, X-linked, type 2, 300071 |
| 300115 | Mental retardation, X-linked nonspecific, type 50 |
| 300121 | Lissencephaly, X-linked, 300067 |
| 300121 | Subcortical laminal heteropia, X-linked, 300067 |
| 300123 | Mental retardation with isolated growth hormone deficiency |
| 300126 | Hoyeraal-Hreidarsson syndrome, 300240 |
| 300126 | Dyskeratosis congenita-1, 305000 |
| 300135 | Anemia, sideroblastic, with ataxia, 301310 |
| 300136 | Diabetes mellitus, insulin-dependent, X-linked |
| 300142 | Mental retardation, X-linked 30 |
| 300147 | Prostate cancer, susceptibility to, 176807 |
| 300148 | MEHMO syndrome |
| 300155 | Retinitis pigmentosa-24 |
| 300179 | X inactivation, familial skewed, 2 |
| 300192 | Sarcoma, synovial |
| 300195 | Alport syndrome, mental retardation, midface hypoplasia, and |
| | elliptocytosis, 300194 |
| 300200 | Adrenal hypoplasia, congenital, with hypogonadotropic |
| | hypogonadism |
| 300200 | Dosage-sensitive sex reversal, 300018 |
| 300202 | Spondyloepiphyseal dysplasia tarda, 313400 |
| 300205 | Chondrodysplasia punctata, X-linked dominant, 302960 |
| 300206 | Mental retardation, X-linked 1, non-dysmorphic, 309530 |
| 300209 | Simpson-Golabi-Behmel syndrome, type 2 |
| 300210 | Mental retardation, X-linked nonspecific, 58 |
| 300218 | Mental retardation, X-linked, syndromic 7 |
| 300220 | Chorioathetosis with mental retardation and abnormal behavior |
| 300221 | Hodgkin disease susceptibility, pseudoautosomal |
| 300228 | Testicular germ cell tumor |
| 300238 | Mental retardation, X-linked, Shashi type |
| 300243 | Mental retardation, X-linked, South African type |
| 300244 | Osseous dysplasia, digital, with facial pibmentary defects and |
| | multiple frenula |
| 300245 | Ptosis, hereditary congenital 2 |
| 300248 | Incontinentia pigmenti, type II, 308300 |
| 300248 | Ectodermal dysplasia, anhidrotic, lymphedema and |
| | immunodeficiency, 300301 |
| 300248 | Ectodermal dysplasia, hypohidrotic, with immune deficiency, |
| | 300291 |
| 300260 | Mental retardation syndrome, X-linked, Lubs type |
| 300261 | Mental retardation syndrome, X-linked, Armfield type |
| 300263 | Mental retardation syndrome, X-linked, Siderius type |
| 300266 | Spastic paraplegia-16, X-linked, complicated |
| 300271 | Mental retardation, X-linked-72 |
| 300273 | Goiter, multinodular, 2 |
| 300275 | CHILD syndrome, 308050 |
| 300292 | Immunodysregulation, polyendocrinopathy, and enteropathy, X- |
| | linked, 304790 |
| 300300 | XLA and isolated growth hormone deficiency, 307200 |
| 300300 | Agammaglobulinemia, type 1, X-linked |
| 300307 | Cleft palate with ankyloglossia, 303400 |
| 300310 | Agammaglobulinemia, type 2, X-linked |
| 300321 | FG syndrome, 305450 |
| 300324 | Mental retardation, X-linked-53 |
| 300326 | Sarcoma, synovial |
| 300351 | Graves disease, susceptibility to, X-linked, 275000 |
| 300354 | Mental retardation syndrome, X-linked, Cabezas type |
| 300356 | Jensen syndrome, 311150 |
| 300356 | Mohr-Tranebjaerg syndrome, 304700 |
| 300356 | Deafness, X-linked 1, progressive |
| 300360 | Mental retardation, X-linked, with short stature |
| 300377 | Becker muscular dystrophy, 300376 |
| 300377 | Cardiomyopathy, dilated, X-linked, 302045 |
| 300377 | Duchenne muscular dystrophy, 310200 |
| 300382 | Infantile spasm syndrome, X-linked, 308350 |
| 300382 | Myoclonic epilepsy, X-linked, with mental retardation and |
| | spasticity |
| 300382 | Partington syndrome, 309510 |
| 300383 | Properdin deficiency, X-linked, 312060 |
| 300384 | Emery-Dreifuss muscular dystrophy, 310300 |
| 300388 | Polymicrogyria, bilateral perisylvian |
| 300391 | Amelogenesis imperfecta, 301200 |
| 300392 | Neutropenia, severe congenital, X-linked, 300299 |
| 300392 | Thrombocytopenia, X-linked, 313900 |
| 300392 | Thrombocytopenia, X-linked, intermittent, 313900 |
| 300392 | Wiskott-Aldrich syndrome, 301000 |
| 300394 | Noncompaction of left ventricular myocardium, isolated, 300183 |
| 300394 | Barth syndrome, 302060 |
| 300394 | Cardiomyopathy, X-linked dilated, 300069 |
| 300394 | Endocardial fibroelastosis-2 |
| 300401 | Pelizaeus-Merzbacher disease, 312080 |
| 300401 | Spastic paraplegia-2, 312920 |
| 300600 | Ocular albinism, Forsius-Eriksson type |
| 300700 | Albinism-deafness syndrome |
| 301201 | Amelogenesis imperfecta-3, hypoplastic type |
| 301220 | Partington syndrome II |
| 301500 | Fabry disease |
| 301590 | Anophthalmos-1 |
| 301830 | Arthrogryposis, X-linked (spinal muscular atrophy, infantile, X- |
| | linked) |
| 301835 | Arts syndrome |
| 301845 | Bazex syndrome |
| 302350 | Nance-Horan syndrome |
| 302500 | Cerebellar ataxia-2 |
| 303400 | Cleft palate, X-linked |
| 303630 | Alport syndrome, 301050 |
| 303631 | Leiomyomatosis, diffuse, with Alport syndrome, 308940 |
| 303700 | Colorblindness, blue monochromatic |
| 303800 | Colorblindness, deutan |
| 303900 | Colorblindness, protan |
| 304040 | Charcot-Marie-Tooth neuropathy, X-linked-1, dominant, 302800 |
| 304050 | Aicardi syndrome |
| 304110 | Craniofrontonasal dysplasia |
| 304340 | Mental retardation, X-linked, syndromic-5, with Dandy-Walker |
| | malformation, basal ganglia disease, and seizures |
| 304500 | Deafness, X-linked 2, perceptive congenital |
| 304730 | Dermoids of cornea |
| 304800 | Diabetes insipidus, nephrogenic |
| 305100 | Ectodermal dysplasia-1, anhidrotic |
| 305371 | Dyserythropoietic anemia with thrombocytopenia, 300367 |
| | Macrothrombocytopenia, 300367 |
| 305450 | FG syndrome |
| 305900 | Hemolytic anemia due to G6PD deficiency |
| 305900 | Favism |
| 305900 | G6PD deficiency |
| 306000 | Glycogenosis, X-linked hepatic, type I |
| 306000 | Glycogenosis, X-linked hepatic, type II |
| 306100 | Gonadal dysgenesis, XY female type |
| 306250 | Leukemia, acute myeloid, M2 type |
| 306700 | Hemophilia A |
| 306995 | [Homosexuality, male] |
| 307030 | Glycerol kinase deficiency |
| 307030 | Hyperglycerolemia |
| 307150 | Hypertrichosis, congenital generalized |
| 307700 | Hypoparathyroidism, X-linked |
| 307800 | Hypophosphatemia, hereditary |
| 308000 | HPRT-related gout, 300323 |
| 308000 | Lesch-Nyhan syndrome, 300322, |
| 308100 | Ichthyosis, X-linked |
| 308100 | Placental steroid sulfatase deficiency |
| 308240 | Lymphoproliferative syndrome, X-linked |
| 308380 | Severe combined immunodeficiency, X-linked, 300400 |
| 308380 | Combined immunodeficiency, X-linked, moderate, 312863 |
| 308800 | Keratosis follicularis spinulosa decalvans |
| 308840 | Hydrocephalus due to aqueductal stenosis, 307000 |
| 308840 | MASA syndrome, 303350 |
| 308840 | Spastic paraplegia, 312900 |
| 309000 | Lowe syndrome |
| 309060 | Glycogen storage disease IIb, 300257 |
| 309200 | Manic-depressive illness, X-linked |
| 309300 | Megalocornea, X-linked |
| 309470 | Mental retardation, X-linked, syndromic-3, with spastic diplegia |
| 309500 | Renpenning syndrome-1 |
| 309545 | Mental retardation, X-linked nonspecific, with aphasia |
| 309548 | Mental retardation, X-linked, FRAXE type |
| 309550 | Fragile X syndrome |
| 309585 | Mental retardation, X-linked, syndromic-6, with gynecomastia |
| | and obesity |
| 309600 | Allan-Herndon syndrome |
| 309605 | Mental retardation, X-linked, syndromic-4, with congenital |
| | contractures and low fingertip arches |
| 309610 | Mental retardation, X-linked, syndromic-2, with dysmorphism |
| | and cerebral atrophy |
| 309620 | Mental retardation-skeletal dysplasia |
| 309800 | Lenz microphthalmia syndrome |
| 309850 | Brunner syndrome |
| 309900 | Mucopolysaccharidosis II |
| 310400 | Myotubular myopathy, X-linked |
| 310440 | Myopathy, X-linked, with excessive autophagy |
| 310460 | Myopia-1 |
| 310460 | Bornholm eye disease |
| 310490 | Cowchock syndrome |
| 310700 | Nystagmus 1, congenital |
| 311050 | Optic atrophy, X-linked |
| 311300 | Otopalatodigital syndrome, type I |
| 311300 | Otopalatodigital syndrome, type II, 304120 |
| 311360 | Ovarian failure, premature |
| 311510 | Waisman parkinsonism-mental retardation syndrome |
| 311770 | Paroxysmal nocturnal hemoglobinuria |
| 311800 | Hemolytic anemia due to PGK deficiency |
| 311800 | Myoglobinuria/hemolysis due to PGK deficiency |
| 311850 | Phosphoribosyl pyrophosphate synthetase-related gout |
| 311870 | Muscle glycogenosis |
| 312000 | Panhypopituitarism, X-linked |
| 312040 | N syndrome, 310465 |
| 312170 | Pyruvate dehydrogenase deficiency |
| 312600 | Retinitis pigmentosa-2 |
| 312612 | Retinitis pigmentosa-6 |
| 312700 | Retinoschisis |
| 312820 | Sarcoma, synovial |
| 312865 | Langer mesomelic dysplasia, 249700 |
| 312865 | Leri-Weill dyschondrosteosis, 127300 |
| 312865 | Short stature, idiopathic familial, 604271 |
| 313700 | Androgen insensitivity, 300068 |
| 313700 | Perineal hypospadias |
| 313700 | Prostate cancer |
| 313700 | Spinal and bulbar muscular atrophy of Kennedy, 313200 |
| 313700 | Prostate cancer, susceptibility to, 176807 |
| 313700 | Breast cancer, male, with Reifenstein syndrome |
| 313850 | Thoracoabdominal syndrome |
| 314250 | Dystonia-3, torsion, with parkinsonism, Filipino type |
| 314300 | Goeminne TKCR syndrome |
| 314310 | Renal cell carcinoma, papillary, 1, 605074 |
| 314400 | Cardiac valvular dysplasia-1 |
| 314580 | Wieacker-Wolff syndrome |
| 314850 | McLeod phenotype |
| 600005 | MHC class II deficiency, complementation group A, 209920 |
| 600018 | [Response to morphine-6-glucuronide] |
| 600020 | Neurofibrosarcoma |
| 600020 | Prostate cancer, susceptibility to, 176807 |
| 600024 | Pelger-Huet anomaly, 169400 |
| 600031 | [Chitotriosidase deficiency] |
| 600040 | T-cell acute lymphoblastic leukemia |
| 600040 | Colorectal cancer |
| 600044 | Thrombocythemia, essential, 187950 |
| 600045 | Xeroderma pigmentosum, group E, subtype 2 |
| 600046 | HDL deficiency, familial, 604091 |
| 600046 | Tangier disease, 205400 |
| 600046 | Cerebral amyloid angiopathy, 105150 |
| 600048 | Breast cancer, 11:22 translocation associated |
| 600049 | Myelodysplasia syndrome-1 |
| 600059 | Retinitis pigmentosa-13 |
| 600065 | Leukocyte adhesion deficiency, 116920 |
| 600075 | Spinocerebellar ataxia 17, 607136 |
| 600075 | Complex neurologic disorder, 117200 |
| 600079 | Colon cancer |
| 600095 | Split hand/foot malformation, type 3, 183600 |
| 600098 | Ovarian carcinoma |
| 600101 | Deafness, autosomal dominant 2 |
| 600119 | Muscular dystrophy, Duchenne-like, type 2 |
| 600119 | Muscular dystrophy, limb-girdle, type 2D |
| 600119 | Adhalinopathy, primary |
| 600131 | Epilepsy, childhood absence, 1 |
| 600140 | Rubenstein-Taybi syndrome, 180849 |
| 600143 | Epilepsy, progressive, with mental retardation |
| 600160 | Li Fraumeni syndrome, 151623 |
| 600160 | Melanoma and neural system tumor syndrome, 155755 |
| 600160 | Melanoma, cutaneous malignant, 2, 155601 |
| 600160 | Pancreatic cancer/melanoma syndrome, 606719 |
| 600163 | Heart block, nonprogressive, 113900 |
| 600163 | Heart block, progressive, type I, 113900 |
| 600163 | Long QT syndrome-3, 603830 |
| 600163 | Ventricular fibrillation, idiopathic, 603829 |
| 600163 | Brugada syndrome, 601144 |
| 600173 | SCID, autosomal recessive, T-negative/B-positive type |
| 600175 | Spinal muscular atrophy, congenital nonprogressive, of lower |
| | limbs |
| 600179 | Leber congenital amaurosis, type I, 204000 |
| 600179 | Cone-rod dystrophy 6, 601777 |
| 600185 | Pancreatic cancer |
| 600185 | Breast cancer 2, early onset |
| 600185 | Fanconi anemia, complementation group B, 227660 |
| 600192 | Sarcoma, synovial |
| 600193 | Waardenburg syndrome, type 2B |
| 600194 | Ichthyosis bullosa of Siemens, 146800 |
| 600202 | Dyslexia, specific, 2 |
| 600211 | Cleidocranial dysplasia, 119600 |
| 600211 | Dental anomalies, isolated |
| 600221 | Venous malformations, multiple cutaneous and mucosal, 600195 |
| 600223 | Spinocerebellar ataxia-4 |
| 600224 | Spinocerebellar ataxia-5 |
| 600225 | Phenylketonuria, atypical, due to GCH1 deficiency, 233910 |
| 600225 | Dystonia, DOPA-responsive, 128230 |
| 600228 | Pseudohypoaldosteronism, type I, 264350 |
| 600231 | Palmoplantar keratoderma, Bothnia type |
| 600234 | HMG-CoA synthase-2 deficiency, 605911 |
| 600235 | Generalized epilepsy with febrile seizures plus, 604233 |
| 600243 | Temperature-sensitive apoptosis |
| 600258 | Colorectal cancer, hereditary nonpolyposis, type 3, 114500 |
| 600259 | Turcot syndrome with glioblastoma, 276300 |
| 600259 | Colorectal cancer, hereditary nonpolyposis, type 4, 114500 |
| 600266 | Resistance/susceptibility to TB, etc. |
| 600273 | Polycystic kidney disease, infantile severe, with tuberous |
| | sclerosis |
| 600276 | Cerebral arteriopathy with subcortical infarcts and |
| | leukoencephalopathy, 125310 |
| 600279 | Zellweger syndrome, 214100 |
| 600281 | MODY, type I, 125850 |
| 600281 | Diabetes mellitus, noninsulin-dependent, 125853 |
| 600299 | Thyroid carcinoma, papillary, 188550 |
| 600310 | Pseudoachondroplasia, 177170 |
| 600310 | Epiphyseal dysplasia, multiple 1, 132400 |
| 600319 | Diabetes mellitus, insulin-dependent, 4 |
| 600320 | Diabetes mellitus, insulin-dependent, 5 |
| 600321 | Diabetes mellitus, insulin-dependent, 7 |
| 600332 | Rippling muscle disease-1, 606072 |
| 600334 | Tibial muscular dystrophy |
| 600342 | Retinitis pigmentosa, autosomal dominant |
| 600342 | Retinitis pigmentosa, autosomal recessive |
| 600354 | Spinal muscular atrophy-1, 253300 |
| 600354 | Spinal muscular atrophy-2, 253550 |
| 600354 | Spinal muscular atrophy-3, 253400 |
| 600358 | Leukemia, acute myelogenous, 601626 |
| 600359 | Bartter syndrome, antenatal, 601678 |
| 600364 | Cone dystrophy-3, 602093 |
| 600374 | Bardet-Biedl syndrome 4, 209900 |
| 600414 | Zellweger syndrome, 214100 |
| 600414 | Adrenoleukodystrophy, neonatal, 202370 |
| 600415 | Ataxia with isolated vitamin E deficiency, 277460 |
| 600423 | Hirschsprung disease, cardiac defects, and autonomic |
| | dysfunction |
| 600429 | [Ii blood group, 110800] |
| 600430 | Brachydactyly-mental retardation syndrome |
| 600467 | Malignant hyperthermia susceptibility 4 |
| 600502 | Spinal muscular atrophy with respiratory distress, 604320 |
| 600509 | Persistent hyperinsulinemic hypoglycemia of infancy, 256450 |
| 600510 | Pigment dispersion syndrome |
| 600511 | Schizophrenia, 181500 |
| 600514 | Lissencephaly syndrome, Norman-Roberts type, 257320 |
| 600515 | Platelet ADP receptor defect |
| 600525 | Trichodontoosseous syndrome, 190320 |
| 600528 | CPT deficiency, hepatic, type IA, 255120 |
| 600532 | Parkinson disease, susceptibility to, 168600 |
| 600536 | Myopathy, congenital |
| 600542 | Chondrosarcoma, extraskeletal myxoid |
| 600555 | Mycobacterial infection, atypical, familial disseminated, 209950 |
| 600577 | Pituitary hormone deficiency, combined, with rigid cervical |
| | spine, 262600 |
| 600584 | Atrial septal defect with atrioventricular conduction defects, |
| | 108900 |
| 600593 | Craniosynostosis, Adelaide type |
| 600617 | Lipoid adrenal hyperplasia, 201710 |
| 600618 | Leukemia, acute lymphoblastic |
| 600623 | Prostate cancer, susceptibility to, 176807 |
| 600631 | Enuresis, nocturnal, 1 |
| 600635 | Goiter, familial, due to TTF-1 defect |
| 600638 | Fibrosis of extraocular muscles, congenital, 3 |
| 600638 | Fibrosis, congenital, of vertically acting extraocular muscles |
| 600644 | Zlotogora-Ogur syndrome, 225000 |
| 600644 | Cleft lip/palate ectodermal dysplasia syndrome, 225000 |
| 600644 | Ectodermal dysplasia, Margarita Island type, 225060 |
| 600650 | Myopathy due to CPT II deficiency, 255110 |
| 600650 | CPT deficiency, hepatic, type II, 600649 |
| 600652 | Deafness, autosomal dominant 4 |
| 600675 | Melanoma, cutaneous malignant, susceptibility to |
| 600678 | Cancer susceptibility |
| 600678 | Colorectal cancer, hereditary nonpolyposis, type 5, 114500 |
| 600678 | Endometrial carcinoma |
| 600698 | Lipoma |
| 600698 | Lipomatosis, mutiple, 151900 |
| 600698 | Salivary adenoma |
| 600698 | Uterine leiomyoma |
| 600700 | Leukemia, myeloid |
| 600700 | Lipoma |
| 600701 | Lipoma |
| 600722 | Ceroid lipofuscinosis, neuronal, variant juvenile type, with |
| | granular osmiophilic deposits |
| 600722 | Ceroid lipofuscinosis, neuronal-1, infantile, 256730 |
| 600724 | Retinitis pigmentosa, autosomal recessive, 268000 |
| 600725 | Holoprosencephaly-3, 142945 |
| 600725 | Solitary median maxillary central incisor, 147250 |
| 600740 | Hypercalciuric hypercalcemia, type III |
| 600757 | Orofacial cleft-3 |
| 600759 | Alzheimer disease-4, 104300 |
| 600760 | Liddle syndrome, 177200 |
| 600760 | Pseudohypoaldosteronism, type I, 264350 |
| 600761 | Liddle syndrome, 177200 |
| 600761 | Pseudohypoaldosteronism, type I, 264350 |
| 600790 | Chorioretinal atrophy, progressive bifocal |
| 600792 | Deafness, autosomal recessive 5 |
| 600797 | Diabetes mellitus, noninsulin-dependent, 125853 |
| 600799 | Pulmonary hypertension, familial primary, 178600 |
| 600805 | Epidermolysis bullosa, generalized atrophic benign, 226650 |
| 600805 | Epidermolysis bullosa, junctional, Herlitz type, 226700 |
| 600807 | Bronchial asthma |
| 600808 | Enuresis, nocturnal, 2 |
| 600811 | Xeroderma pigmentosum, group E, DDB-negative subtype, |
| | 278740 |
| 600814 | Ataxia-telangiectasia-like disorder, 604391 |
| 600835 | AIDS, resistance to |
| 600837 | Hirschsprung disease, 142623 |
| 600838 | T-cell immunodeficiency, congenital alopecia, and nail |
| | dystrophy |
| 600839 | Bartter syndrome, antenatal, 601678 |
| 600850 | Schizophrenia, 181500 |
| 600852 | Retinitis pigmentosa-17 |
| 600856 | Beckwith-Wiedemann syndrome, 130650 |
| 600857 | Leigh syndrome, 256000 |
| 600882 | Charcot-Marie-Tooth disease, type 2B |
| 600883 | Diabetes mellitus, insulin-dependent, 8 |
| 600884 | Cardiomyopathy, familial dilated 1B |
| 600887 | Endometrial carcinoma |
| 600890 | HELLP syndrome, maternal, of pregnancy |
| 600890 | LCHAD deficiency |
| 600890 | Trifunctional protein deficiency, type 1 |
| 600890 | Fatty liver, acute, of pregnancy |
| 600897 | Cataract, zonular pulverulent-1, 116200 |
| 600899 | Severe combined immunodeficiency, type I, 202500 |
| 600900 | Muscular dystrophy, limb-girdle, type 2E, 604286 |
| 600901 | Fanconi anemia, complementation group E |
| 600917 | Insulin resistance, severe, digenic, 604367 |
| 600919 | Long QT syndrome-4 with sinus bradycardia |
| 600923 | Porphyria variegata, 176200 |
| 600925 | Colon cancer, somatic, 114500 |
| 600937 | Persistent hyperinsulinemic hypoglycemia of infancy, 256450 |
| 600946 | Laron dwarfism, 262500 |
| 600946 | Short stature, autosomal dominant, with normal serum growth |
| | hormone binding protein |
| 600946 | Short stature, idiopathic |
| 600956 | Persistent Mullerian duct syndrome, type II, 261550 |
| 600957 | Persistent Mullerian duct syndrome, type I, 261550 |
| 600958 | Cardiomyopathy, familial hypertrophic, 4, 115197 |
| 600964 | Refsum disease, adult, with increased pipecolicacidemia |
| 600968 | Gitelman syndrome, 263800 |
| 600970 | Deafness, autosomal dominant 22 |
| 600971 | Deafness, autosomal recessive 6 |
| 600975 | Glaucoma 3, primary infantile, B |
| 600977 | Cone dystrophy, progressive |
| 600983 | Hypertension, early-onset, autosomal dominant, with |
| | exacerbation in pregnancy, 605115 |
| 600983 | Pseudohypoaldosteronism type I, autosomal dominant, 177735 |
| 600985 | Ehlers-Danlos-like syndrome, 606408 |
| 600994 | Deafness, autosomal dominant 5 |
| 600995 | Nephrotic syndrome, idiopathic, steroid-resistant |
| 600996 | Arrhythmogenic right ventricular dysplasia-2 |
| 600998 | Bleeding diathesis due to GNAQ deficiency |
| 601007 | Obesity, morbid, with hypogonadism |
| 601011 | Hemiplegic migraine, familial, 141500 |
| 601011 | Spinocerebellar ataxia-6, 183086 |
| 601011 | Cerebellar ataxia, pure |
| 601011 | Episodic ataxia, type 2, 108500 |
| 601015 | Niemann-pick disease, type C2 |
| 601021 | Leukemia, lymphycytic, acute T-cell |
| 601068 | Epilepsy, myoclonic, benign adult familial |
| 601090 | Iridogoniodysgenesis, 601631 |
| 601090 | Iris hypoplasia and glaucoma |
| 601090 | Anterior segment mesenchymal dysgenesis |
| 601090 | Axenfeld anomaly |
| 601090 | Rieger anomaly |
| 601094 | Anterior segment mesenchymal dysgenesis, 107250 |
| 601097 | Neuropathy, recurrent, with pressure palsies, 162500 |
| 601097 | Charcot-Marie-Tooth disease with deafness, 118300 |
| 601097 | Charcot-Marie-Tooth neuropathy-1A, 118220 |
| 601097 | Dejerine-Sottas disease, 145900 |
| 601098 | Charcot-Marie-Tooth disease, type 1C |
| 601105 | Pycnodysostosis, 265800 |
| 601107 | Dubin-Johnson syndrome, 237500 |
| 601130 | Tolbutamide poor metabolizer |
| 601130 | Warfarin sensitivity, 122700 |
| 601145 | Epilepsy, progressive myoclonic 1, 254800 |
| 601154 | Cardiomyopathy, dilated, 1E |
| 601162 | Spastic paraplegia-9 |
| 601199 | Hypocalcemia, autosomal dominant, 601198 |
| 601199 | Hypocalciuric hypercalcemia, type I, 145980 |
| 601199 | Neonatal hyperparathyroidism, 239200 |
| 601202 | Cataract, anterior polar-2 |
| 601208 | Diabetes mellitus, insulin-dependent, 11 |
| 601238 | Cerebellar ataxia, Cayman type |
| 601240 | GAMT deficiency |
| 601253 | Muscular dystrophy, limb-girdle, type IC |
| 601253 | Rippling muscle disease, 606072 |
| 601253 | Creatine phosphokinase, elevated serum, 123320 |
| 601267 | HIV infection, susceptibility/resistence to |
| 601277 | Ichthyosis, lamellar, type 2 |
| 601282 | Muscular dystrophy with epidermolysis bullosa simplex, 226670 |
| 601284 | Hereditary hemorrhagic telangiectasia-2, 600376 |
| 601286 | Cataract, polymorphic congenital |
| 601300 | Pancreatic cancer, somatic |
| 601313 | Polycystic kidney disease, adult type I, 173900 |
| 601318 | Diabetes mellitus, insulin-dependent, 13 |
| 601336 | Glucosidase I deficiency, 606056 |
| 601362 | DiGeorge syndrome/velocardiofacial syndrome complex-2 |
| 601363 | Wilms tumor, type 4 |
| 601367 | Stroke, susceptibility to |
| 601373 | HIV infection, susceptibility/resistance to |
| 601385 | Prostate cancer, susceptibility to, 176807 |
| 601387 | Breast cancer |
| 601388 | Diabetes mellitus, insulin-dependent, 12 |
| 601402 | Leukemia, myeloid, acute |
| 601406 | B-cell non-Hodgkin lymphoma, high-grade |
| 601410 | Diabetes mellitus, transient neonatal |
| 601411 | Muscular dystrophy, limb-girdle, type 2F, 601287 |
| 601411 | Cardiomyopathy, dilated, 1L, 606685 |
| 601412 | Deafness, autosomal dominant 7 |
| 601414 | Retinitis pigmentosa-18 |
| 601458 | Inflammatory bowel disease-2, 266600 |
| 601465 | Mitochondrial DNA-depletion syndrome, hepatocerebral form, |
| | 251880 |
| 601470 | Rapid progression to AIDS from HIV1 infection |
| 601471 | Moebius syndrome-2 |
| 601472 | Charcot-Marie-Tooth neuropathy, type 2D |
| 601487 | Insulin resistance, severe, digenic, 604367 |
| 601487 | Obesity, severe, 601665 |
| 601487 | [Obesity, resistance to] |
| 601487 | Glioblastoma, susceptibility to, 137800 |
| 601487 | Diabetes mellitus, insulin-resistant, with acanthosis nigricans and |
| | hypertension, 604367 |
| 601493 | Cardiomyopathy, dilated 1C |
| 601494 | Cardiomyopathy, familial, dilated-2 |
| 601498 | Peroxisomal biogenesis disorder, complementation group 4 |
| 601498 | Peroxisomal biogenesis disorder, complementation group 6 |
| 601499 | Rieger syndrome, type 2 |
| 601500 | Basal cell carcinoma, sporadic |
| 601517 | Spinocerebellar ataxia-2, 183090 |
| 601542 | Iridogoniodysgenesis syndrome-2, 137600 |
| 601542 | Rieger syndrome, 180500 |
| 601545 | Lissencephaly-1 |
| 601545 | Subcortical laminar heterotopia |
| 601548 | Doyne honeycomb degeneration of retina, 126600 |
| 601556 | Spinocerebellar ataxia-1, 164400 |
| 601566 | Squamous cell carcinoma, head and neck, 601400 |
| 601574 | Chondrosarcoma, extraskeletal myxoid |
| 601583 | Wilms tumor susceptibility-5 |
| 601592 | Myasthenia syndrome, congenital |
| 601596 | Charcot-Marie-Tooth neuropathy, demyelinating |
| 601601 | Char syndrome, 169100 |
| 601604 | Mycobacterial and salmonella infections, susceptibility to |
| 601606 | Trichoepithelioma, multiple familial |
| 601617 | Fundus albipunctatus, 136880 |
| 601620 | Holt-Oram syndrome, 142900 |
| 601621 | Ulnar-mammary syndrome, 181450 |
| 601623 | Angelman syndrome, 105830 |
| 601650 | Paragangliomas, familial nonchromaffin, 2 |
| 601652 | Glaucoma 1A, primary open angle, juvenile-onset, 137750 |
| 601652 | Glaucoma 1A, primary open angle, recessive |
| 601653 | Anterior segment anomalies and cataract |
| 601653 | Branchiootic syndrome |
| 601653 | Branchiootorenal syndrome with cataract, 113650 |
| 601653 | Branchiootorenal syndrome, 113650 |
| 601666 | Diabetes mellitus, insulin-dependent, 15 |
| 601676 | Acute insulin response |
| 601680 | Arthrogryposis multiplex congenita, distal, type 2B |
| 601682 | Glaucoma 1C, primary open angle |
| 601687 | Meesmann corneal dystrophy, 122100 |
| 601690 | Platelet-activating factor acetylhydrolase deficiency |
| 601690 | Asthma and atopy, susceptibility to, 147070 |
| 601691 | Macular dystrophy, age-related, 2, 153800 |
| 601691 | Retinitis pigmentosa-19, 601718 |
| 601691 | Stargardt disease-1, 248200 |
| 601691 | Cone-rod dystrophy 3 |
| 601691 | Fundus flavimaculatus, 248200 |
| 601692 | Corneal dystrophy, Avellino type |
| 601692 | Corneal dystrophy, Groenouw type I, 121900 |
| 601692 | Corneal dystrophy, Reis-Bucklers type, 121900 |
| 601692 | Corneal dystrophy, lattice type I, 122200 |
| 601692 | Corneal dystrophy, lattice type IIIA |
| 601693 | Obesity, susceptibility to |
| 601728 | Lhermitte-Duclos syndrome |
| 601728 | Meningioma, 156100 |
| 601728 | Oligodendroglioma, 137800 |
| 601728 | Bannayan-Riley-Ruvalcaba syndrome, 153480 |
| 601728 | Bannayan-Zonana syndrome, 153480 |
| 601728 | Thyroid carcinoma, follicular, 188470 |
| 601728 | Prostate cancer, susceptibility to, 176807 |
| 601728 | Cowden disease, 158350 |
| 601728 | Endometrial carcinoma |
| 601744 | Systemic lupus erythematosus, susceptibility to, 1, 152700 |
| 601749 | Glomuvenous malformations, 138000 |
| 601757 | Rhizomelic chondrodysplasia punctata, type 1, 215100 |
| 601762 | Non-hodgkin lymphoma, somatic, 605027 |
| 601762 | Autoimmune lymphoproliferative syndrome, type II, 603909 |
| 601768 | Leukemia, acute myeloid |
| 601769 | Osteoporosis, involutional |
| 601769 | Rickets, vitamin D-resistant, 277440 |
| 601771 | Glaucoma 3A, primary infantile, 231300 |
| 601771 | Peters anomaly, 604229 |
| 601785 | Carbohydrate-deficient glycoprotein syndrome, type I, 212065 |
| 601789 | Zellweger syndrome, 214100 |
| 601789 | Adrenoleukodystrophy, neonatal, 202370 |
| 601800 | [Hair color, brown] |
| 601802 | Septooptic dysplasia, 182230 |
| 601814 | Hypomagnesemia-2, renal, 154020 |
| 601825 | Leigh syndrome, 256000 |
| 601837 | LIG4 syndrome, 606593 |
| 601843 | Hypothyroidism, congenital, 274400 |
| 601844 | Pseudohypoaldosteronism type II |
| 601846 | Muscular dystrophy with rimmed vacuoles |
| 601861 | Bare lymphocyte syndrome, type II, complementation group D, |
| | 209920 |
| 601863 | MHC class II deficiency, complementation group C, 209920 |
| 601877 | Left-right axis malformation |
| 601889 | Lymphoma, diffuse large cell |
| 601894 | Glomerulopathy, fibronectin |
| 601900 | Multiple myeloma |
| 601916 | Pancreatic cancer, 260350 |
| 601920 | Tetralogy of Fallot, 187500 |
| 601920 | Deafness, congenital heart defects, and posterior embryotoxon |
| 601920 | Alagille syndrome, 118450 |
| 601928 | Monilethrix, 158000 |
| 601949 | Ataxia, episodic |
| 601949 | Epilepsy, generalized idiopathic, 600669 |
| 601949 | Epilepsy, juvenile myoclonic, 606904 |
| 601969 | Glioblastoma multiforme, 137800 |
| 601969 | Medulloblastoma, 155255 |
| 601975 | Ectodermal dysplasia/skin fragility syndrome, 604536 |
| 601984 | Thyroid carcinoma, papillary, 188550 |
| 601985 | Thyroid papillary carcinoma, 188550 |
| 601990 | Neuroblastoma |
| 601992 | Friedreich ataxia, 229300 |
| 602011 | Pancreatic endocrine tumors |
| 602014 | Hypomagnesemia with secondary hypocalcemia |
| 602018 | Hirschsprung disease, 142623 |
| 602023 | Bartter syndrome, 241200 |
| 602023 | Bartter syndrome, antenatal, 601678 |
| 602025 | Obesity/hyperinsulinism, susceptibility to |
| 602026 | Refsum disease, 266500 |
| 602049 | Neutrophil immunodeficiency syndrome |
| 602063 | Transaldolase deficiency, 606003 |
| 602066 | Convulsions, infantile and paroxysmal choreoathetosis |
| 602067 | Cardiomyopathy, dilated, 1F |
| 602078 | Fibrosis of extraocular muscles, congenital, 2 |
| 602082 | Corneal dystrophy, Thiel-Behnke type |
| 602084 | Endometrial carcinoma |
| 602085 | Postaxial polydactyly, type A2 |
| 602086 | Arrhythmogenic right ventricular dysplasia-3 |
| 602087 | Arrhythmogenic right ventricular dysplasia-4 |
| 602088 | Nephronophthisis, infantile |
| 602089 | Hemangioma, capillary infantile |
| 602096 | Alzheimer disease-5 |
| 602099 | Amytrophic lateral sclerosis-5, juvenile recessive |
| 602104 | Cherubism, 118400 |
| 602109 | Epiphyseal dysplasia, multiple, 5, 607078 |
| 602116 | Glioma |
| 602117 | Prader-Willi syndrome, 176270 |
| 602121 | Deafness, autosomal dominant 1, 124900 |
| 602125 | Encephalopathy, progressive mitochondrial, with proximal |
| | renal |
| | tubulopathy due to cytochrome c oxidase deficiency |
| 602134 | Tremor, familial essential, 2 |
| 602136 | Refsum disease, infantile, 266510 |
| 602136 | Zellweger syndrome-1, 214100 |
| 602136 | Adrenoleukodystrophy, neonatal, 202370 |
| 602141 | Leigh syndrome, 256000 |
| 602146 | Short stature, pituitary and cerebellar defects, and small |
| | sella turcica, 606606 |
| 602153 | Monilethrix, 158000 |
| 602201 | Lipoid proteinosis, 247100 |
| 602216 | Peutz-Jeghers syndrome, 175200 |
| 602221 | Stem-cell leukemia/lymphoma syndrome |
| 602225 | Leber congenital amaurosis, 204000 |
| 602225 | Retinitis pigmentosa, late-onset dominant, 268000 |
| 602225 | Cone-rod retinal dystrophy-2, 120970 |
| 602229 | Waardenburg-Shah syndrome, 277580 |
| 602229 | Waardenburg-Shah syndrome, neurologic variant |
| 602229 | Yemenite deaf-blind hypopigmentation syndrome, 601706 |
| 602232 | Epilepsy, benign neonatal, type 2, 121201 |
| 602235 | Myokymia with neonatal epilepsy, 606437 |
| 602235 | Epilepsy, benign, neonatal, type 1, 121200 |
| 602279 | Oculopharyngeal muscular dystorphy, 164300 |
| 602279 | Oculopharyngeal muscular dystrophy, autosomal recessive, |
| | 257950 |
| 602280 | Retinitis pigmentosa-14, 600132 |
| 602290 | Muscular dystrophy, limb-girdle, type 2H, 254110 |
| 602302 | Atrichia with papular lesions, 209500 |
| 602302 | Alopecia universalis, 203655 |
| 602322 | Dyskeratosis congenita, 127550 |
| 602337 | Robinow syndrome, autosomal recessive, 268310 |
| 602337 | Brachydactyly, type B1, 113000 |
| 602358 | Narcolepsy, 161400 |
| 602360 | AGAT deficiency |
| 602365 | Haim-Munk syndrome, 245010 |
| 602365 | Papillon-Lefevre syndrome, 245000 |
| 602402 | Lymphedema-distichiasis syndrome, 153400 |
| 602403 | Alzheimer disease, susceptibility to |
| 602404 | Parkinson disease, familial, 168600 |
| 602413 | Paragangliomas, familial nonchromaffin, 3, 605373 |
| 602421 | Sweat chloride elevation without CF |
| 602421 | Hypertrypsinemia, neonatal |
| 602421 | Pancreatitis, idiopathic |
| 602421 | Congenital bilateral absence of vas deferens, 277180 |
| 602421 | Cystic fibrosis, 219700 |
| 602429 | Glaucoma 1D, primary open angle |
| 602433 | Amyotrophic lateral sclerosis-4, juvenile dominant |
| 602438 | Cataract, Marner type, 116800 |
| 602438 | Cataract, lamellar, 116800 |
| 602439 | Leukemia, acute myelogenous |
| 602445 | Encephalopathy, familial, with neuroserpin inclusion bodies, |
| | 604218 |
| 602447 | Coronary artery disease, susceptibility to |
| 602452 | Colorectal cancer with chromosomal instability |
| 602460 | Deafness, autosomal dominant 15, 602459 |
| 602476 | Convulsions, familial febrile, 1 |
| 602477 | Convulsions, familial febrile, 2 |
| 602481 | Migraine, familial hemiplegic, 2 |
| 602491 | Hyperlipidemia, familial combined, 1 |
| 602544 | Parkinson disease, juvenile, type 2, 600116 |
| 602566 | Leukemia, chronic lymphatic, susceptibility to, 151400 |
| 602574 | Deafness, autosomal dominant 12, 601842 |
| 602574 | Deafness, autosomal dominant 8, 601543 |
| 602574 | Deafness, autosomal recessive 21, 603629 |
| 602616 | Carbohydrate-deficient glycoprotein syndrome, type II, 212066 |
| 602617 | Bamforth-Lazarus syndrome, 241850 |
| 602629 | Dystonia-6, torsion |
| 602630 | Holoprosencephaly-4, 142946 |
| 602631 | Lung cancer, 211980 |
| 602631 | Rhabdomyosarcoma, 268210 |
| 602631 | Breast cancer, 114480 |
| 602643 | Paget disease, juvenile, 239000 |
| 602666 | Deafness, autosomal recessive 3, 600316 |
| 602667 | Leukemia, acute lymphoblastic |
| 602667 | Nijmegen breakage syndrome, 251260 |
| 602669 | Anterior segment mesenchymal dysgenesis and cataract, 107250 |
| 602669 | Cataract, congenital |
| 602671 | Glycogen storage disease Ib, 232220 |
| 602671 | Glycogen storage disease Ic, 232240 |
| 602685 | Mental retardation, severe, with spasticity and tapetoretinal |
| | degeneration |
| 602686 | Lymphoma, somatic |
| 602686 | Prostate cancer, somatic, 176807 |
| 602690 | Merkel cell carcinoma, somatic |
| 602690 | Paragangliomas, familial central nervous system, 168000 |
| 602690 | Paragangliomas, familial nonchromaffin, 1, with and without |
| | deafness, 168000 |
| 602690 | Pheochromocytoma, 171300 |
| 602690 | Carcinoid tumors, intestinal, 114900 |
| 602694 | Leigh syndrome, 256000 |
| 602694 | Complex I deficiency, 252010 |
| 602700 | Colorectal cancer, 114500 |
| 602716 | Nephrosis-1, congenital, Finnish type, 256300 |
| 602727 | Osteopetrosis, recessive, 259700 |
| 602743 | Wolff-Parkinson-White syndrome, 194200 |
| 602743 | Cardiomyopathy, hypertrophic, with WPW, 600858 |
| 602759 | Prostate cancer, susceptibility to, 176807 |
| 602768 | Spondylocostal dysostosis, autosomal recessive, 1, 277300 |
| 602772 | Retinitis pigmentosa-25 |
| 602773 | Renal cell carcinoma 4 |
| 602782 | Faisalabad histiocytosis |
| 602783 | Spastic paraplegia-7 |
| 602858 | Smith-Lemli-Opitz syndrome, type I, 270400 |
| 602858 | Smith-Lemli-Opitz syndrome, type II, 268670 |
| 602875 | Acromesomelic dysplasia, Maroteaux type |
| 602956 | Fanconi anemia, complementation group G |
| 602966 | Orofacial cleft-2 |
| 602991 | Symphalangism, proximal, 185800 |
| 602991 | Synostoses syndrome, multiple, 1, 186500 |
| 602991 | Tarsal-carpal coalition syndrome, 186570 |
| 603005 | SEMD, Pakistani type |
| 603009 | Miyoshi myopathy, 254130 |
| 603009 | Muscular dystrophy, limb-girdle, type 2B, 253601 |
| 603009 | Myopathy, distal, with anterior tibial onset, 606768 |
| 603010 | Deafness, autosomal recessive 17 |
| 603013 | Schizophrenia, 181500 |
| 603023 | Leukemia, acute lymphoblastic |
| 603030 | Endotoxin hyporesponsiveness |
| 603040 | Nonsmall cell lung cancer |
| 603051 | Rhizomelic chondrodysplasia punctata, type 3, 600121 |
| 603073 | Holoprosencephaly-5 |
| 603075 | Macular degeneration, age-related, 1 |
| 603098 | Deafness, autosomal recessive 13 |
| 603100 | Berardinelli-Seip congenital lipodystrophy-1, 269700 |
| 603113 | Lung cancer, 211980 |
| 603128 | Obesity, severe |
| 603164 | Zellweger syndrome, complementation group G, 214100 |
| 603165 | Dermatitis, atopic |
| 603175 | Schizophrenia, 181500 |
| 603176 | Schizophrenia, 181500 |
| 603178 | Methylmalonate semialdehyde dehydrogenase deficiency |
| 603194 | Meckel syndrome, type 2 |
| 603196 | Meniere disease, 156000 |
| 603196 | Deafness, autosomal dominant 9, 601369 |
| 603200 | MHC class II deficiency, complementation group B, 209920 |
| 603201 | Progressive intrahepatic cholestasis-2, 601847 |
| 603202 | Hypolactasia, adult type, 223100 |
| 603204 | Epilepsy, nocturnal frontal lobe, type 2 |
| 603212 | Cataract, congenital, 604219 |
| 603212 | Cataract, juvenile-onset, 604219 |
| 603221 | Myopia-3 |
| 603233 | Pseudohypoparathyroidism, type IB |
| 603266 | Diabetes mellitus, insulin-dependent, 17 |
| 603273 | Hay-Wells syndrome, 106260 |
| 603273 | ADULT syndrome, 103285 |
| 603273 | Limb-mammary syndrome, 603543 |
| 603273 | Split-hand/foot malformation, type 4, 605289 |
| 603273 | Ectrodactyly, ectodermal dysplasia, and cleft lip/palate |
| | syndrome 3, 604292 |
| 603284 | Cerebral cavernous malformations-2 |
| 603285 | Cerebral cavernous malformations-3 |
| 603288 | Cornea plana congenita, recessive, 217300 |
| 603324 | Deafness, autosomal dominant 2, 600101 |
| 603324 | Deafness, autosomal dominant, with peripheral neuropathy |
| 603324 | Deafness, autosomal recessive |
| 603324 | Erythrokeratodermia variabilis, 133200 |
| 603335 | Kartagener syndrome, 244400 |
| 603335 | Primary ciliary dyskinesia, 242650 |
| 603342 | Schizophrenia, 181500 |
| 603345 | Renal tubular acidosis, proximal, with ocular abnormalities, |
| | 604278 |
| 603358 | GRACILE syndrome |
| 603372 | Graves disease, 275000 |
| 603372 | Hyperthroidism, congenital |
| 603372 | Hypothyroidism, congenital, due to TSH resistance, 275200 |
| 603372 | Thyroid adenoma, hyperfunctioning |
| 603377 | Carnitine deficiency, systemic primary, 212140 |
| 603383 | Glaucoma 1F |
| 603386 | Thyroid carcinoma, nonmedullary, with cell oxyphilia |
| 603400 | Arthropathy, progressive pseudorheumatoid, of childhood, |
| | 208230 |
| 603406 | Thyroid carcinoma, papillary, 188550 |
| 603467 | Fanconi anemia, complementation group F |
| 603470 | Citrullinemia, 215700 |
| 603474 | Anemia, Diamond-Blackfan, 105650 |
| 603490 | XY female |
| 603513 | Spastic cerebral palsy, symmetric |
| 603516 | Spinocerebellar ataxia-10 |
| 603517 | Lymphoma, MALT |
| 603517 | Lymphoma, follicular |
| 603517 | Mesothelioma |
| 603517 | Sezary syndrome |
| 603517 | Colon cancer |
| 603517 | Germ cell tumor |
| 603537 | Deafness, autosomal dominant 2, 600101 |
| 603550 | Deafness, autosomal dominant 10, 601316 |
| 603552 | Hemophagocytic lymphohistiocytosis, familial, 1 |
| 603557 | Charcot-Marie-Tooth disease, type 4B, 601382 |
| 603563 | Spastic paraplegia-8 |
| 603590 | Meningioma |
| 603593 | Lysinuric protein intolerance, 222700 |
| 603612 | Squamous cell carcinoma, head and neck, 601400 |
| 603615 | Lymphoma, non-Hodgkin |
| 603615 | Breast cancer, invasive intraductal |
| 603615 | Colon adenocarcinoma |
| 603644 | Hepatic failure, early onset, and neurologic disorder |
| 603647 | Tubulopathy, encephalopathy, and liver failure due to |
| | complex III deficiency, 606104 |
| 603650 | Bardet-Biedl syndrome 5, 209900 |
| 603673 | Medulloblastoma, 155255 |
| 603673 | Basal cell carcinoma, somatic, 605462 |
| 603678 | Deafness, autosomal recessive 14 |
| 603681 | Deafness, autosomal recessive 9, 601071 |
| 603688 | Prostate cancer-brain cancer susceptibility |
| 603689 | Myopathy, proximal, with early respiratory muscle involvement |
| 603694 | Diabetes mellitus, noninsulin-dependent, 125853 |
| 603707 | Molybdenum cofactor deficiency, type A, 252150 |
| 603711 | Giant cell hepatitis, neonatal, 231100 |
| 603714 | Holoprosencephaly-2, 157170 |
| 603722 | Dysautonomia, familial, 223900 |
| 603758 | Tyrosinemia, type Ib |
| 603776 | Hypercholesterolemia, familial, 3 |
| 603780 | Rothmund-Thomson syndrome, 268400 |
| 603796 | Long QT syndrome-6 |
| 603816 | Hepatocellular carcinoma, 114550 |
| 603824 | Inclusion body myopathy, autosomal recessive, 600737 |
| 603824 | Sialuria, 269921 |
| 603855 | Meconium ileus in cystic fibrosis, susceptibility to |
| 603859 | Citrullinemia, adult-onset type II, 603471 |
| 603859 | Citrullinemia, type II, neonatal-onset, 605814 |
| 603860 | Medullary cystic kidney disease 2 |
| 603861 | Hyperornithinemia-hyperammonemia-homocitrullinemia |
| | syndrome, 238970 |
| 603868 | Griscelli syndrome, 214450 |
| 603904 | Dementia, familial British, 176500 |
| 603904 | Dementia, familial Danish, 117300 |
| 603930 | Molybdenum cofactor deficiency, type C, 252150 |
| 603937 | Retinitis pigmentosa-1, 180100 |
| 603945 | Leukoencephalopathy with vanishing white matter, 603896 |
| 603959 | Hypomagnesemia, primary, 248250 |
| 603964 | Deafness, autosomal dominant 16 |
| 603965 | Glomerulosclerosis, focal segmental, 2 |
| 603967 | Hyperkalemic periodic paralysis, 170500 |
| 603967 | Hypokalemic periodic paralysis, 170400 |
| 603967 | Myotonia congenita, atypical, acetazolamide-responsive, 170500 |
| 603967 | Paramyotonia congenita, 168300 |
| 603967 | Cramps, familial, potassium-aggravated |
| 603968 | Xeroderma pigmentosum, variant type, 278750 |
| 604025 | Colorectal cancer, 114500 |
| 604032 | Wolcott-Rallison syndrome, 226980 |
| 604050 | Lung cancer, 211980 |
| 604050 | Esophageal cancer, 133239 |
| 604054 | Pseudo-Zellweger syndrome, 261510 |
| 604060 | Deafness, autosomal recessive 20 |
| 604061 | Leukemia, acute myeloid, therapy-related |
| 604061 | Ovarian carcinoma |
| 604095 | Ectodermal dysplasia, hypohidrotic, autosomal dominant, |
| | 129490 |
| 604095 | Ectodermal dysplasia, hypohidrotic, autosomal recessive, |
| | 224900 |
| 604103 | Muscular dystrophy, limb-girdle, type 1A, 159000 |
| 604114 | Platelet PLC beta-2 deficiency |
| 604134 | Shulman-Upshaw syndrome, 276850 |
| 604134 | Thrombotic thrombocytopenic purpura, familial, 274150 |
| 604142 | Polycystic lipomembranous osteodysplasia with sclerosing |
| | leukenencephalophathy, 221770 |
| 604144 | Cystinuria, type II |
| 604144 | Cystinuria, type III |
| 604149 | Dystonia, myoclonic, 159900 |
| 604168 | Congenital cataract, facial dysmorphism, and neuropathy |
| | syndrome |
| 604185 | Moebius syndrome-3 |
| 604187 | Spastic paraplegia-10 |
| 604201 | Hepatic fibrosis susceptibility due to Schistosoma mansoni |
| | infection |
| 604210 | Leber congenital amaurosis, 204000 |
| 604210 | Retinitis pigmentosa-12, autosomal recessive, 600105 |
| 604214 | Cerebral cavernous malformations-1, 116860 |
| 604232 | Leber congenital amaurosis, 204000 |
| 604254 | Dyslexia, specific, 3 |
| 604260 | Leukemia, acute promyeloyctic, STAT5B/RARA type |
| 604272 | Cardioencephalomyopathy, fatal infantile, due to cytochrome c |
| | oxidase deficiency, 604377 |
| 604277 | Spastic paraplegia-4, 182601 |
| 604283 | Camptodactyly-arthropathy-coxa vara-pericarditis syndrome, |
| | 208250 |
| 604285 | Hyperoxaluria, primary, type 1, 259900 |
| 604288 | Cardiomyopathy, dilated, 1H |
| 604289 | Lymphoma, non-Hodgkin |
| 604289 | Colon adenocarcinoma |
| 604313 | Galactokinase deficiency with cataracts, 230200 |
| 604316 | Psoriasis, susceptibility to, 177900 |
| 604317 | Microcephaly, autosomal recessive 2 |
| 604321 | Microcephaly, primary autosomal recessive, 4 |
| 604322 | Salla disease, 604369 |
| 604322 | Sialic acid storage disorder, infantile, 269920 |
| 604325 | Spinocerebellar ataxia 12, 604326 |
| 604327 | Ehlers-Danlos syndrome, progeroid form, 130070 |
| 604331 | Nonsmall cell lung cancer |
| 604332 | Leukemia, acute myeloid |
| 604352 | Convulsions, familial febrile, 4 |
| 604356 | Duane retraction syndrome 2 |
| 604360 | Spastic paraplegia-11 |
| 604364 | Epilepsy, partial, with variable foci |
| 604365 | Retinal degeneration, autosomal recessive, prominin-related |
| 604366 | Kartagener syndrome, 244400 |
| 604366 | Primary ciliary dyskinesia, 242650 |
| 604373 | Li-Fraumeni syndrome, 151623 |
| 604373 | Osteosarcoma, somatic, 259500 |
| 604373 | Breast cancer, susceptibility to, 114480 |
| 604384 | Hailey-Hailey disease, 169600 |
| 604386 | Trichorhinophalangeal syndrome, type I, 190350 |
| 604386 | Trichorhinophalangeal syndrome, type III, 190351 |
| 604387 | Nephronophthisis, adolescent |
| 604392 | Leber congenital amaurosis, 604393 |
| 604392 | Retinitis pigmentosa, juvenile |
| 604392 | Cone-rod dystrophy |
| 604395 | Colon cancer, hereditary nonpolypopsis, 114500 |
| 604395 | Colorectal cancer, somatic, 114500 |
| 604400 | Arrhythmogenic right ventricular dysplasia-5 |
| 604401 | Arrhythmogenic right ventricular dysplasia-6 |
| 604403 | Convulsions, familial febrile, 3 |
| 604416 | PAPA syndrome |
| 604418 | Deafness, autosomal dominant 3, 601544 |
| 604418 | Deafness, nonsyndromic neurosensory, digenic |
| 604418 | Ectodermal dysplasia 2, hidrotic, 129500 |
| 604432 | Spinocerebellar ataxia-11 |
| 604433 | Hypokalemic periodic paralysis, 170400 |
| 604443 | Myelodysplastic syndrome |
| 604443 | Myelogenous leukemia, acute |
| 604454 | Welander distal myopathy |
| 604455 | [Sarcosinemia], 268900 |
| 604484 | Neuropathy, hereditary motor and sensory, Okinawa type |
| 604485 | Retinitis pigmentosa, late onset, 268000 |
| 604485 | Enhanced S-cone syndrome, 268100 |
| 604488 | Muscular dystrophy, limb-girdle, type 2G, 601954 |
| 604489 | Alpha-methylacyl-CoA racemase deficiency |
| 604490 | Spastic ataxia, Charlevoix-Saguenay type, 270550 |
| 604515 | Hypoglobulinemia and absent B cells |
| 604537 | Leber congenital amaurosis, 204000 |
| 604539 | Ehlers-Danlos syndrome, type VIIC, 225410 |
| 604559 | Heart block, progressive familial, type I, 113900 |
| 604563 | Charcot-Marie-Tooth disease, type 4B, form 2 |
| 604584 | Hepatocellular cancer, 114550 |
| 604584 | Colorectal cancer, 114500 |
| 604590 | Lymphoma, progression of |
| 604592 | Osteopetrosis, recessive, 259700 |
| 604610 | Bloom syndrome, 210900 |
| 604611 | Werner syndrome, 277700 |
| 604614 | Adrenocorticotropic hormone deficiency, 201400 |
| 604619 | Glioblastoma, somatic, 137800 |
| 604619 | Epilepsy, partial, with auditory features, 600512 |
| 604630 | Obesity, mild, early-onset, 601665 |
| 604638 | Glomerulosclerosis, focal segmental, 1, 603278 |
| 604641 | Diabetes mellitus, noninsulin-dependent, 125853 |
| 604684 | Leukemia, acute myelomonocytic |
| 604717 | Deafness, autosomal dominant 20 |
| 604720 | Hemochromatosis, 604250 |
| 604763 | Leukemia, acute myeloid |
| 604766 | Nephrotic syndrome, steroid-resistant, 600995 |
| 604767 | Esophageal squamous cell carcinoma, 133239 |
| 604777 | Ichthyosis, lamellar, type 3 |
| 604780 | Chanarin-Dorfman syndrome, 275630 |
| 604781 | Ichthyosis, nonlamellar and nonerythrodermic, congenital |
| 604801 | Muscular dystrophy, congenital, 1B |
| 604802 | Huntington disease-like 3 |
| 604804 | Microcephaly, primary autosomal recessive, 3 |
| 604805 | Spastic paraplegia-12 |
| 604809 | Panbronchiolitis, diffuse |
| 604831 | Weyers acrodental dysostosis, 193530 |
| 604831 | Ellis-van Creveld syndrome, 225500 |
| 604863 | Retinal dystrophy, early-onset severe |
| 604896 | McKusick-Kaufman syndrome, 236700 |
| 604896 | Bardet-Biedl syndrome 6, 209900 |
| 604901 | Cirrhosis, North American Indian childhood type |
| 604906 | Schizophrenia, 181500 |
| 604928 | Wolfram syndrome 2 |
| 604933 | Adenomatous polyposis of the colon, susceptibility to, |
| | 175100 |
| 604940 | Colorectal cancer, hereditary nonpolyposis, type 7, 114500 |
| 605010 | Netherton syndrome, 256500 |
| 605010 | Atopy, 147050 |
| 605013 | Microhydranencephaly |
| 605018 | Cylindromatosis, familial, 132700 |
| 605019 | Hypobetalipoproteinemia, familial, 2 |
| 605021 | Epilepsy, myoclonic, infantile |
| 605041 | Spiegler-Brooke syndrome |
| 605073 | Mulibrey nanism, 253250 |
| 605080 | Achromatopsia-3, 262300 |
| 605113 | Hyperlysinemia, 238700 |
| 605113 | Saccharopinuria, 268700 |
| 605131 | Esophageal squamous cell carcinoma, 133239 |
| 605145 | Craniometaphyseal dysplasia, 123000 |
| 605192 | Deafness, autosomal dominant 23 |
| 605193 | Ovarian cancer |
| 605201 | Hypoalphalipoproteinemia, primary |
| 605204 | Dystonia, early-onset atypical, with myoclonic features |
| 605204 | Dystonia-1, torsion, 128100 |
| 605210 | Schizophrenia, 181500 |
| 605218 | Systemic lupus erythematosus, susceptibility to, 2, 152700 |
| 605225 | Inflammatory bowel disease-7, 266600 |
| 605229 | Spastic paraplegia 14, autosomal recessive |
| 605232 | Pseudohypoaldosteronism, type IIC |
| 605238 | Asthma, susceptibility to |
| 605239 | Renal tubular acidosis, distal, autosomal recessive, 602722 |
| 605242 | Usher syndrome, type 1C, 276904 |
| 605242 | Deafness, autosomal recessive 18, 602092 |
| 605244 | Carney complex, type II |
| 605248 | Mucolipidosis IV, 252650 |
| 605257 | Immunodeficiency with hyper-IgM, type 2, 605258 |
| 605259 | Spinocereballar ataxia-13 |
| 605260 | Charcot-Marie-Tooth disease, type 4F |
| 605262 | Neuropathy, hereditary motor and sensory, Lom type, 601455 |
| 605268 | Huntington disease-like 2, 606438 |
| 605284 | Lymphangioleiomyomatosis, 606690 |
| 605284 | Tuberous sclerosis-1, 191100 |
| 605285 | Neuropathy, motor and sensory, Russe type |
| 605290 | Optic atrophy 1, 165500 |
| 605290 | Glaucoma, normal tension, susceptibility to, 606657 |
| 605294 | Macular corneal dystrophy, 217800 |
| 605317 | Speech-language disorder-1, 602081 |
| 605329 | Hypercalciuria, absorptive, 2, 143870 |
| 605352 | Malignant fibrous histiocytoma |
| 605361 | Spinocerebellar ataxia-14 |
| 605362 | Cardiomyopathy, dilated, 1J |
| 605364 | Psoriasis, susceptibility to, 177900 |
| 605367 | Prostate cancer, susceptibility to, 176807 |
| 605370 | Leukemia, juvenile myelomonocytic |
| 605377 | Myotonic dystrophy, 160900 |
| 605378 | Achalasia-addisonianism-alacrimia syndrome, 231550 |
| 605379 | Giant axonal neuropathy-1, 256850 |
| 605380 | Hypophosphatemic rickets, autosomal dominant, 193100 |
| 605380 | Osteomalacia, tumor-induced |
| 605382 | Inclusion body myopathy with Paget disease and frontotemporal |
| | dementia |
| 605387 | Cataract, posterior polar-3 |
| 605388 | Cerebral palsy, ataxic, autosomal recessive |
| 605389 | Hypotrichosis simplex |
| 605392 | Myeloproliferative disorder |
| 605419 | Schizophrenia, 181500 |
| 605420 | Parietal foramina 2, 168500 |
| 605423 | Gonadal dysgenesis, 46XY, partial, with minifascicular |
| | neuropathy, 607080 |
| 605425 | Erythrokeratodermia variabilis with erythema gyratum repens, |
| | 133200 |
| 605428 | Deafness, autosomal recessive 26 |
| 605429 | [Deafness, nonsyndromic, modifier 1] |
| 605441 | Adiponectin deficiency |
| 605446 | Leber congenital amaurosis, 204000 |
| 605459 | Sitosterolemia, 210250 |
| 605460 | Sitosterolemia, 210250 |
| 605463 | Radiation sensitivity/chromosome instability syndrome, |
| | autosomal dominant |
| 605472 | Usher syndrome, type 2C |
| 605480 | Systemic lupus erythematosus, susceptibility to, 3, 152700 |
| 605481 | Microcephaly, primary autosomal recessive, 5 |
| 605511 | Deafness, autosomal recessive 10, congenital, 605316 |
| 605511 | Deafness, autosomal recessive 8, childhood onset, 601072 |
| 605512 | Macular dystrophy, autosomal dominant, chromosome 6-linked, |
| | 600110 |
| 605512 | Stargardt disease 3, 600110 |
| 605514 | Usher syndrome, type 1F, 602083 |
| 605516 | Usher syndrome, type 1D, 601067 |
| 605516 | Deafness, autosomal recessive 12, 601386 |
| 605522 | Acheiropody, 200500 |
| 605526 | Alzheimer disease 6, 104300 |
| 605543 | Parkinson disease 4, autosomal dominant, Lewy body |
| 605544 | Fibromatosis, gingival, 2, 135300 |
| 605549 | Cone-rod dystrophy 8 |
| 605552 | Abdominal obesity-metabolic syndrome |
| 605572 | Abdominal obesity-metabolic syndrome, 605552 |
| 605573 | Pseudohermaphroditism, male, with gynecomastia, 264300 |
| 605582 | Cardiomyopathy, dilated, 1K |
| 605583 | Deafness, autosomal dominant 25 |
| 605588 | Charcot-Marie-Tooth disease, type 2B1 |
| 605589 | Charcot-Marie-Tooth disease, type 2B2 |
| 605597 | Blepharophimosis, epicanthus inversus, and ptosis, type 1, |
| | 110100 |
| 605597 | Blepharophimosis, epicanthus inversus, and ptosis, type 2, |
| | 110100 |
| 605598 | Diabetes mellitus, insulin-dependent, 18 |
| 605608 | Deafness, autosomal recessive 29 |
| 605617 | Split hand/foot malformation type 1 with deafness |
| 605635 | Hyperaldosteronism, familial, type II |
| 605642 | Thyroid carcinoma, papillary, with papillary renal neoplasia |
| 605646 | Pendred syndrome, 274600 |
| 605646 | Deafness, autosomal recessive 4, 600791 |
| 605646 | Enlarged vestibular aqueduct, 603545 |
| 605711 | Multiple mitochondrial dysfunctions syndrome |
| 605712 | Neuropathy, hereditary sensory and autonomic, type 1, 162400 |
| 605725 | Dejerine-Sottas neuropathy, autosomal recessive, 145900 |
| 605726 | Neuropathy, distal hereditary motor, Jerash type |
| 605727 | Otosclerosis-2 |
| 605728 | Cataract, central saccular, with sutural opacities |
| 605738 | Nanophthalmos 2 |
| 605740 | Sclerosteosis, 269500 |
| 605746 | Anisomastia |
| 605747 | Hypercholesterolemia, familial, autosomal recessive, 603813 |
| 605749 | Cataract, autosomal recessive, early-onset, pulverulent |
| 605750 | Exudative vitreoretinopathy-3 |
| 605751 | Convulsions, benign familial infantile, 2 |
| 605769 | Thyroid carcinoma, papillary, 188550 |
| 605779 | Nail dysplasia, isolated congenital |
| 605802 | Hirschsprung disease-mental retardation syndrome without |
| | Hirschsprung disease, 235730 |
| 605802 | Hirschsprung disease-mental retardation syndrome, 235730 |
| 605803 | Dermatitis, atopic, 603165 |
| 605805 | Dermatitis, atopic, 603165 |
| 605809 | Myasthenia gravis, familial infantile, 1, 254210 |
| 605818 | Deafness, autosomal recessive 27 |
| 605820 | Nanoka myopathy |
| 605828 | Epidermodysplasia verruciformis, 226400 |
| 605841 | Narcolepsy, 161400 |
| 605844 | Dermatitis, atopic, 603165 |
| 605845 | Dermatitis, atopic, 603165 |
| 605882 | Breast cancer, early-onset, 114480 |
| 605909 | Parkinson disease, 168600 |
| 605913 | Bleeding disorder, east Texas type |
| 605967 | Acropectoral syndrome |
| 605978 | Choreoacanthocytosis, 200150 |
| 605990 | Nephrolithiasis, uric acid |
| 606002 | Spinocerebellar ataxia, recessive, non-Friedreich type 1 |
| 606012 | Deafness, autosomal dominant 18 |
| 606052 | Convulsions, benign familial infantile, 3 |
| 606068 | Retinitis pigmentosa-28 |
| 606075 | Progressive external ophthalmoplegia with mitochondrial DNA |
| | deletions, 157640 |
| 606077 | Megakaryoblastic leukemia, acute |
| 606078 | Megakaryoblastic leukemia, acute |
| 606082 | Goiter, multinodular, 3 |
| 606118 | Hermansky-Pudlak syndrome, 203300 |
| 606129 | Anemia, Diamond-Blackfan, 105650 |
| 606151 | Bardet-Biedl syndrome 2, 209900 |
| 606157 | Neurodegeneration, pantothenate kinase-associated, 234200 |
| 606158 | Berardinelli-Seip congenital lipodystrophy-2, 269700 |
| 606179 | Aneurysmal bone cysts |
| 606201 | Hearing loss, low-frequency sensorineural, 600965 |
| 606201 | Wolfram syndrome, 222300 |
| 606210 | Muscular dystrophy, rigid spine, 1, 602771 |
| 606215 | Atrioventricular canal defect, 600309 |
| 606217 | Atrioventricular septal defect, 600309 |
| 606224 | Anemia, hemolytic, due to UMPH1 deficiency, 266120 |
| 606240 | Thyroid carcinoma, nonmedullary, 1 |
| 606246 | Endometrial stromal tumors |
| 606262 | Paget disease of bone, 602080 |
| 606263 | Paget disease of bone, 602080 |
| 606271 | Schizophrenia, 181500 |
| 606272 | Cystinosis, late-onset juvenile or adolescent nephropathic, |
| | 219900 |
| 606272 | Cystinosis, nephropathic, 219800 |
| 606272 | Cystinosis, ocular nonnephropathic, 219750 |
| 606282 | Deafness, autosomal dominant 24 |
| 606324 | Parkinson disease, 168600 |
| 606325 | Heterotaxy, visceral |
| 606348 | Inflammatory bowel disease-5, 266600 |
| 606352 | Amyotrophic lateral sclerosis, juvenile, 205100 |
| 606352 | Primary lateral sclerosis, juvenile, 606353 |
| 606364 | Spinocerebellar ataxia 16 |
| 606397 | Usher syndrome, type 3, 276902 |
| 606412 | Bartter syndrome, infantile, with sensorineural deafness, 602522 |
| 606416 | Muckle-Wells syndrome, 191900 |
| 606416 | CINCA syndrome, 607115 |
| 606416 | Cold-induced autoinflammatory syndrome, familial, 120100 |
| 606417 | Glioblastoma, 137800 |
| 606418 | Desmosterolosis, 602398 |
| 606419 | Retinitis pigmentosa-11, 600138 |
| 606439 | Spastic paraplegia-3A, 182600 |
| 606440 | Deafness, autosomal recessive 16, 603720 |
| 606451 | Deafness, autosomal dominant 30 |
| 606454 | Leukoencephalopathy with vanishing white matter, 603896 |
| 606460 | [Longevity], 152430 |
| 606463 | Gaucher disease with cardiovascular calcification, 231005 |
| 606463 | Gaucher disease, 230800 |
| 606521 | Microcephaly, Amish type, 607196 |
| 606530 | Cerebrotendinous xanthomatosis, 213700 |
| 606531 | Asthma, susceptibility to, 600807 |
| 606545 | Ichthyosis, lamellar, 5 |
| 606551 | Esophageal squamous cell carcinoma, 133239 |
| 606566 | Cardiomyopathy, hypertrophic, midventricular, digenic, 192600 |
| 606579 | Systemic lupus erythematosus, vitiligo-related, susceptibility |
| | to, 1 |
| 606580 | 3-methylglutaconicaciduria, type III, 258501 |
| 606585 | Amelogenesis imperfecta 2, hypoplastic local, 104500 |
| 606595 | Charcot-Marie-Tooth disease, type 2F |
| 606596 | Muscular dystrophy, congenital, 1C |
| 606596 | Muscular dystrophy, limb-girdle, type 2I, 607155 |
| 606598 | Neuropathy, axonal, with vocal cord paresis, autosomal |
| | recessive, 214400 |
| 606598 | Charcot-Marie-Tooth neuropathy-4A, 214400 |
| 606622 | Schimke immunoosseous dysplasia, 242900 |
| 606628 | Glycine N-methyltransferase deficiency, 606664 |
| 606643 | [Body mass index], 606641 |
| 606660 | Melanoma, uveal, susceptibility to, 1 |
| 606661 | Melanoma, uveal, susceptibility to, 2 |
| 606674 | Inflammatory bowel disease-6, 266600 |
| 606675 | Inflammatory bowel disease-4, 266600 |
| 606681 | Leukemia, acute myeloid, 601626 |
| 606681 | Sotos syndrome, 117550 |
| 606682 | Hermansky-Pudlak syndrome, 203300 |
| 606693 | Kufor-Rakeb syndrome |
| 606702 | Polycystic kidney and hepatic disease, 263200 |
| 606706 | Deafness, autosomal dominant 36, 606705 |
| 606706 | Deafness, autosomal recessive 7, 600974 |
| 606708 | Split-hand/foot malformation 5, 183600 |
| 606713 | van der Woude syndrome 2 |
| 606718 | Atelosteogenesis II, 256050 |
| 606718 | Achondrogenesis Ib, 600972 |
| 606718 | Diastrophic dysplasia, 222600 |
| 606718 | Epiphyseal dysplasia, multiple, 226900 |
| 606725 | Ceroid-lipofuscinosis, neuronal-6, variant late infantile, 601780 |
| 606759 | Hypothyroidism, congenital, due to DUOX2 deficiency, 607200 |
| 606761 | Malonyl-CoA decarboxylase deficiency, 248360 |
| 606763 | Ciliary diskinesia, primary, 2, 242650 |
| 606765 | Goiter, congenital |
| 606765 | Hyperthyroidism, congenital |
| 606765 | Thyroid hormone organification defect IIA, 274500 |
| 606765 | Total iodide organification defect, 274500 |
| 606781 | Wernicke-Korsakoff syndrome, susceptibility to, 277730 |
| 606787 | Peripheral arterial occlusive disease 1 |
| 606800 | Glycogen storage disease II, 232300 |
| 606811 | Hyperprolinemia, type II, 239510 |
| 606822 | Muscle-eye-brain disease, 253280 |
| 606829 | Friedreich ataxia with retained reflexes, 229300 |
| 606829 | Friedreich ataxia, 229300 |
| 606837 | Breast cancer, 114480 |
| 606844 | Alstrom syndrome, 203800 |
| 606847 | Treacher Collins mandibulofacial dysostosis, 154500 |
| 606850 | Mirror-image polydactyly, 135750 |
| 606854 | Polymicrogyria, bilateral frontoparietal |
| 606856 | Pancreatic cancer, 1, 260350 |
| 606857 | Hemolytic anemia due to gamma-glutamylcysteine synthetase |
| | deficiency, 230450 |
| 606859 | Spastic paraplegia-15 |
| 606860 | Angioedema, hereditary, 106100 |
| 606869 | Tay-Sachs disease, 272800 |
| 606869 | [Hex A pseudodeficiency], 272800 |
| 606869 | GM2-gangliosidosis, several forms, 272800 |
| 606873 | Sandhoff disease, infantile, juvenile, and adult forms, 268800 |
| 606873 | Spinal muscular atrophy, juvenile |
| 606874 | Hirschsprung disease, short-segment, 2 |
| 606875 | Hirschsprung disease, short-segment, 3 |
| 606879 | Phosphoglycerate dehydrogenase deficiency, 601815 |
| 606882 | Wilson disease, 277900 |
| 606885 | Acyl-CoA dehydrogenase, short-chain, deficiency of, 201470 |
| 606890 | Krabbe disease, 245200 |
| 606897 | Chediak-Higashi syndrome, 214500 |
| 606928 | [Bone mineral density variability 3], 601884 |
| 606933 | Waardenburg syndrome/albinism, digenic, 103470 |
| 606933 | Albinism, oculocutaneous, type IA, 203100 |
| 606933 | Albinism, oculocutaneous, type IB, 606952 |
| 606937 | Cerebellar ataxia with mental retardation, optic atrophy, and |
| | skin abnormalities |
| 606938 | Porphyria, congenital erythropoietic, 263700 |
| 606943 | Usher syndrome, type 1G |
| 606945 | Hypercholesterolemia, familial, 143890 |
| 606953 | Galactose epimerase deficiency, 230350 |
| 606967 | Norum disease, 245900 |
| 606967 | Fish-eye disease, 136120 |
| 606970 | Epilepsy, generalized, idiopathic, 600669 |
| 606989 | Myeloperoxidase deficiency, 254600 |
| 606995 | Senior-Loken syndrome 3 |
| 606996 | Senior-Loken syndrome 4 |
| 606999 | Galactosemia, 230400 |
| 607004 | Brachydactyly, type A1, 112500 |
| 607008 | Acyl-CoA dehydrogenase, medium chain, deficiency of, 201450 |
| 607034 | Fibrosis of extraocular muscles, congenital, 3A |
| 607035 | Medulloblastoma, desmoplastic, 155255 |
| 607037 | Peroxisomal bifunctional enzyme deficiency, 261515 |
| 607047 | Machado-Joseph disease, 109150 |
| 607053 | [HDL cholesterol level QTL 2] |
| 607059 | Acrodermatitis enteropathica, 201100 |
| 607060 | Parkinson disease, 168600 |
| 607071 | Mucopolysaccharidosis type IX, 601492 |
| 607083 | Leukemia, acute myeloid, 601626 |
| 607084 | Deafness, autosomal recessive 31 |
| 607085 | Myasthenia gravis with thymus hyperplasia |
| 607086 | Aortic aneurysm, familial thoracic 1 |
| 607087 | Aortic aneurysm, familial thoracic 2 |
| 607088 | Spinal muscular atrophy, chronic distal, autosomal recessive |
| 607093 | Homocystinuria due to MTHFR deficiency, 236250 |
| 607096 | Hypouricemia, renal, 220150 |
| 607107 | Nasopharyngeal carcinoma 1, 161550 |
| 607108 | Keratitis, 148190 |
| 607108 | Aniridia, type II, 106210 |
| 607108 | Peters anomaly, 603807 |
| 607108 | Cataract, congenital, with late-onset corneal dystrophy |
| 607108 | Ectopia pupillae, 129750 |
| 607108 | Eye anomalies, multiplex |
| 607108 | Foveal hypoplasia, isolated, 136520 |
| 607111 | Troyer syndrome, 275900 |
| 607151 | Moyamoya disease 2 |
| 607154 | Allergic rhinitis |
| 607199 | Popliteal pterygium syndrome, 119500 |
| 607199 | van der Woude syndrome, 119300 |

[0086] Polynucleotide and Polypeptide Variants

[0087] The present invention is also directed to variants of the colon or colon cancer associated polynucleotide sequence disclosed in SEQ ID NO: X or the complementary strand thereto, nucleotide sequences encoding the polypeptide of SEQ ID NO: Y, the nucleotide sequence of SEQ ID NO: X encoding the polypeptide sequence as defined in column 7 of Table 1, nucleotide sequences encoding the polypeptide as defined in column 7 of Table 1, the nucleotide sequence as defined in columns 8 and 9 of Table 2, nucleotide sequences encoding the polypeptide encoded by the nucleotide sequence as defined in columns 8 and 9 of Table 2, the cDNA sequence contained in Clone ID NO: Z, and/or nucleotide sequences encoding a polypeptide encoded by the cDNA sequence contained in Clone ID NO: Z.

[0088] The present invention also encompasses variants of the polypeptide sequence disclosed in SEQ ID NO: Y, a polypeptide sequence as defined in column 7 of Table 1, a polypeptide sequence encoded by the polynucleotide sequence in SEQ ID NO: X, a polypeptide sequence encoded by the nucleotide sequence as defined in columns 8 and 9 of Table 2, a polypeptide sequence encoded by the complement of the polynucleotide sequence in SEQ ID NO: X, and/or a polypeptide sequence encoded by the cDNA sequence contained in Clone ID NO: Z.

[0089] “Variant” refers to a polynucleotide or polypeptide differing from the polynucleotide or polypeptide of the present invention, but retaining essential properties thereof. Generally, variants are overall closely similar, and, in many regions, identical to the polynucleotide or polypeptide of the present invention.

[0090] Thus, one aspect of the invention provides an isolated nucleic acid molecule comprising, or alternatively consisting of, a polynucleotide having a nucleotide sequence selected from the group consisting of: (a) a nucleotide sequence described in SEQ ID NO: X or contained in the cDNA sequence of Clone ID NO: Z; (b) a nucleotide sequence in SEQ ID NO: X or the cDNA in Clone ID NO: Z which encodes a mature ovarian associated polypeptide; (c) a nucleotide sequence in SEQ ID NO: X or the cDNA sequence of Clone ID NO: Z, which encodes a biologically active fragment of an ovarian associated polypeptide; (d) a nucleotide sequence in SEQ ID NO: X or the cDNA sequence of Clone ID NO: Z, which encodes an antigenic fragment of an ovarian associated polypeptide; (e) a nucleotide sequence encoding an ovarian associated polypeptide having the complete amino acid sequence of SEQ ID NO: Y or the complete amino acid sequence encoded by the cDNA in Clone ID NO: Z; (f) a nucleotide sequence encoding a mature ovarian associated polypeptide of the amino acid sequence of SEQ ID NO: Y or the amino acid sequence encoded by the cDNA in Clone ID NO: Z; (g) a nucleotide sequence encoding a biologically active fragment of a colon or colon cancer associated polypeptide having the complete amino acid sequence of SEQ ID NO: Y or the complete amino acid sequence encoded by the cDNA in Clone ID NO: Z; (h) a nucleotide sequence encoding an antigenic fragment of an ovarian associated polypeptide having the complete amino acid sequence of SEQ ID NO: Y or the complete amino acid sequence encoded by the cDNA in Clone ID NO: Z; and (i) a nucleotide sequence complementary to any of the nucleotide sequences in (a), (b), (c), (d), (e), (f), (g), or (h), above.

[0091] The present invention is also directed to nucleic acid molecules which comprise, or alternatively consist of, a nucleotide sequence which is at least 80%, 85%, 90%, 95%, 96%, 97%, 98%, 99% or 100%, identical to, for example, any of the nucleotide sequences in (a), (b), (c), (d), (e), (f), (g), (h), or (i) above, the nucleotide coding sequence in SEQ ID NO: X or the complementary strand thereto, the nucleotide coding sequence of the cDNA contained in Clone ID NO: Z or the complementary strand thereto, a nucleotide sequence encoding the polypeptide of SEQ ID NO: Y, a nucleotide sequence encoding a polypeptide sequence encoded by the nucleotide sequence in SEQ ID NO: X, a polypeptide sequence encoded by the complement of the polynucleotide sequence in SEQ ID NO: X, a nucleotide sequence encoding the polypeptide encoded by the cDNA contained in Clone ID NO: Z, the nucleotide coding sequence in SEQ ID NO: X as defined in columns 8 and 9 of Table 2 or the complementary strand thereto, a nucleotide sequence encoding the polypeptide encoded by the nucleotide sequence in SEQ ID NO: X as defined in columns 8 and 9 of Table 2 or the complementary strand thereto, the nucleotide sequence in SEQ ID NO: X encoding the polypeptide sequence as defined in column 7 of Table 1 or the complementary strand thereto, nucleotide sequences encoding a polypeptide as defined in column 7 of Table 1 or the complementary strand thereto, and/or polynucleotide fragments of any of these nucleic acid molecules (e.g., those fragments described herein). Polynucleotides which hybridize to the complement of these nucleic acid molecules under stringent hybridization conditions or alternatively, under lower stringency conditions, are also encompassed by the invention, as are polypeptides encoded by these polynucleotides and nucleic acids.

[0092] In a preferred embodiment, the invention encompasses nucleic acid molecules which comprise, or alternatively, consist of a polynucleotide which hybridizes under stringent hybridization conditions, or alternatively, under lower stringency conditions, to a polynucleotide in (a), (b), (c), (d), (e), (f), (g), (h), or (i) above, as are polypeptides encoded by these polynucleotides. In another preferred embodiment, polynucleotides which hybridize to the complement of these nucleic acid molecules under stringent hybridization conditions or alternatively, under lower stringency conditions, are also encompassed by the invention, as are polypeptides encoded by these polynucleotides.

[0093] In another embodiment, the invention provides a purified protein comprising, or alternatively consisting of, a polypeptide having an amino acid sequence selected from the group consisting of: (a) the complete amino acid sequence of SEQ ID NO: Y or the complete amino acid sequence encoded by the cDNA in Clone ID NO: Z; (b) the amino acid sequence of a mature ovarian associated polypeptide having the amino acid sequence of SEQ ID NO: Y or the amino acid sequence encoded by the cDNA in Clone ID NO: Z; (c) the amino acid sequence of a biologically active fragment of an ovarian associated polypeptide having the complete amino acid sequence of SEQ ID NO: Y or the complete amino acid sequence encoded by the cDNA in Clone ID NO: Z; and (d) the amino acid sequence of an antigenic fragment of an ovarian associated polypeptide having the complete amino acid sequence of SEQ ID NO: Y or the complete amino acid sequence encoded by the cDNA in Clone ID NO: Z.

[0094] The present invention is also directed to proteins which comprise, or alternatively consist of, an amino acid sequence which is at least 80%, 85%, 90%, 95%, 96%, 97%, 98%, 99% or 100%, identical to, for example, any of the amino acid sequences in (a), (b), (c), or (d), above, the amino acid sequence shown in SEQ ID NO: Y, the amino acid sequence encoded by the cDNA contained in Clone ID NO: Z, the amino acid sequence of the polypeptide encoded by the nucleotide sequence in SEQ ID NO: X as defined in columns 8 and 9 of Table 2, the amino acid sequence as defined in column 7 of Table 1, an amino acid sequence encoded by the nucleotide sequence in SEQ ID NO: X, and an amino acid sequence encoded by the complement of the polynucleotide sequence in SEQ ID NO: X. Fragments of these polypeptides are also provided (e.g., those fragments described herein). Further proteins encoded by polynucleotides which hybridize to the complement of the nucleic acid molecules encoding these amino acid sequences under stringent hybridization conditions or alternatively, under lower stringency conditions, are also encompassed by the invention, as are the polynucleotides encoding these proteins.

[0095] By a nucleic acid having a nucleotide sequence at least, for example, 95% “identical” to a reference nucleotide sequence of the present invention, it is intended that the nucleotide sequence of the nucleic acid is identical to the reference sequence except that the nucleotide sequence may include up to five point mutations per each 100 nucleotides of the reference nucleotide sequence encoding the polypeptide. In other words, to obtain a nucleic acid having a nucleotide sequence at least 95% identical to a reference nucleotide sequence, up to 5% of the nucleotides in the reference sequence may be deleted or substituted with another nucleotide, or a number of nucleotides up to 5% of the total nucleotides in the reference sequence may be inserted into the reference sequence. The query sequence may be an entire sequence referred to in Table 1 or 2 as the ORF (open reading frame), or any fragment specified, as described herein.

[0096] As a practical matter, whether any particular nucleic acid molecule or polypeptide is at least 80%, 85%, 90%, 95%, 96%, 97%, 98% or 99% identical to a nucleotide sequence of the present invention can be determined conventionally using known computer programs. A preferred method for determining the best overall match between a-query sequence (a sequence of the present invention) and a subject sequence, also referred to as a global sequence alignment, can be determined using the FASTDB computer program based on the algorithm of Brutlag et al. (Comp. App. Biosci. 6:237-245 (1990)). In a sequence alignment the query and subject sequences are both DNA sequences. An RNA sequence can be compared by converting U's to T's. The result of said global sequence alignment is expressed as percent identity. Preferred parameters used in a FASTDB alignment of DNA sequences to calculate percent identity are: Matrix=Unitary, k-tuple=4, Mismatch Penalty=1, Joining Penalty=30, Randomization Group Length=0, Cutoff Score=1, Gap Penalty=5, Gap Size Penalty 0.05, Window Size=500 or the length of the subject nucleotide sequence, whichever is shorter.

[0097] If the subject sequence is shorter than the query sequence because of 5′ or 3′ deletions, not because of internal deletions, a manual correction must be made to the results. This is because the FASTDB program does not account for 5′ and 3′ truncations of the subject sequence when calculating percent identity. For subject sequences truncated at the 5′ or 3′ ends, relative to the query sequence, the percent identity is corrected by calculating the number of bases of the query sequence that are 5′ and 3′ of the subject sequence, which are not matched/aligned, as a percent of the total bases of the query sequence. Whether a nucleotide is matched/aligned is determined by results of the FASTDB sequence alignment. This percentage is then subtracted from the percent identity, calculated by the above FASTDB program using the specified parameters, to arrive at a final percent identity score. This corrected score is what is used for the purposes of the present invention. Only bases outside the 5′ and 3′ bases of the subject sequence, as displayed by the FASTDB alignment, which are not matched/aligned with the query sequence, are calculated for the purposes of manually adjusting the percent identity score.

[0098] For example, a 90 base subject sequence is aligned to a 100 base query sequence to determine percent identity. The deletions occur at the 5′ end of the subject sequence and therefore, the FASTDB alignment does not show a matched/alignment of the first 10 bases at 5′ end. The 10 unpaired bases represent 10% of the sequence (number of bases at the 5′ and 3′ ends not matched/total number of bases in the query sequence) so 10% is subtracted from the percent identity score calculated by the FASTDB program. If the remaining 90 bases were perfectly matched the final percent identity would be 90%. In another example, a 90 base subject sequence is compared with a 100 base query sequence. This time the deletions are internal deletions so that there are no bases on the 5′ or 3′ of the subject sequence which are not matched/aligned with the query. In this case the percent identity calculated by FASTDB is not manually corrected. Once again, only bases 5′ and 3′ of the subject sequence which are not matched/aligned with the query sequence are manually corrected for. No other manual corrections are to be made for the purposes of the present invention.

[0099] By a polypeptide having an amino acid sequence at least, for example, 95% “identical” to a query amino acid sequence of the present invention, it is intended that the amino acid sequence of the subject polypeptide is identical to the query sequence except that the subject polypeptide sequence may include up to five amino acid alterations per each 100 amino acids of the query amino acid sequence. In other words, to obtain a polypeptide having an amino acid sequence at least 95% identical to a query amino acid sequence, up to 5% of the amino acid residues in the subject sequence may be inserted, deleted, (indels) or substituted with another amino acid. These alterations of the reference sequence may occur at the amino or carboxy terminal positions of the reference amino acid sequence or anywhere between those terminal positions, interspersed either individually among residues in the reference sequence or in one or more contiguous groups within the reference sequence.

[0100] As a practical matter, whether any particular polypeptide is at least 80%, 85%, 90%, 95%, 96%, 97%, 98% or 99% identical to, for instance, the amino acid sequence of a polypeptide referred to in Table 1 (e.g., an amino acid sequence of the polypeptide identified in columns 5 or 6) or Table 2 (e.g., the amino acid sequence encoded by the polynucleotide sequence defined in columns 8 and 9 of Table 2), ) or a fragment thereof, the amino acid sequence of the polypeptide encoded by the nucleotide sequence in SEQ ID NO: X or a fragment thereof, or an amino acid sequence of the polypeptide encoded by cDNA contained in Clone ID NO: Z, or a fragment thereof, can be determined conventionally using known computer programs. A preferred method for determining the best overall match between a query sequence (a sequence of the present invention) and a subject sequence, also referred to as a global sequence alignment, can be determined using the FASTDB computer program based on the algorithm of Brutlag et al. (Comp. App. Biosci.6:237-245 (1990)). In a sequence alignment the query and subject sequences are either both nucleotide sequences or both amino acid sequences. The result of said global sequence alignment is expressed as percent identity. Preferred parameters used in a FASTDB amino acid alignment are: Matrix=PAM 0, k-tuple=2, Mismatch Penalty=1, Joining Penalty=20, Randomization Group Length=0, Cutoff Score=1, Window Size=sequence length, Gap Penalty=5, Gap Size Penalty=0.05, Window Size=500 or the length of the subject amino acid sequence, whichever is shorter.

[0101] If the subject sequence is shorter than the query sequence due to N- or C-terminal deletions, not because of internal deletions, a manual correction must be made to the results. This is because the FASTDB program does not account for N- and C-terminal truncations of the subject sequence when calculating global percent identity. For subject sequences truncated at the N- and C-termini, relative to the query sequence, the percent identity is corrected by calculating the number of residues of the query sequence that are N- and C-terminal of the subject sequence, which are not matched/aligned with a corresponding subject residue, as a percent of the total bases of the query sequence. Whether a residue is matched/aligned is determined by results of the FASTDB sequence alignment. This percentage is then subtracted from the percent identity, calculated by the above FASTDB program using the specified parameters, to arrive at a final percent identity score. This final percent identity score is what is used for the purposes of the present invention. Only residues to the N- and C-termini of the subject sequence, which are not matched/aligned with the query sequence, are considered for the purposes of manually adjusting the percent identity score. That is, only query residue positions outside the farthest N- and C-terminal residues of the subject sequence.

[0102] For example, a 90 amino acid residue subject sequence is aligned with a 100 residue query sequence to determine percent identity. The deletion occurs at the N-terminus of the subject sequence and therefore, the FASTDB alignment does not show a matching/alignment of the first 10 residues at the N-terminus. The 10 unpaired residues represent 10% of the sequence (number of residues at the N- and C-termini not matched/total number of residues in the query sequence) so 10% is subtracted from the percent identity score calculated by the FASTDB program. If the remaining 90 residues were perfectly matched the final percent identity would be 90%. In another example, a 90 residue subject sequence is compared with a 100 residue query sequence. This time the deletions are internal deletions so there are no residues at the N- or C-termini of the subject sequence which are not matched/aligned with the query. In this case the percent identity calculated by FASTDB is not manually corrected. Once again, only residue positions outside the N- and C-terminal ends of the subject sequence, as displayed in the FASTDB alignment, which are not matched/aligned with the query sequence are manually corrected for. No other manual corrections are to be made for the purposes of the present invention.

[0103] The polynucleotide variants of the invention may contain alterations in the coding regions, non-coding regions, or both. Especially preferred are polynucleotide variants containing alterations, which produce silent substitutions, additions, or deletions, but do not alter the properties or activities of the encoded polypeptide. Nucleotide variants produced by silent substitutions due to the degeneracy of the genetic code are preferred. Moreover, polypeptide variants in which less than 50, less than 40, less than 30, less than 20, less than 10, or 5-50, 5-25, 5-10, 1-5, or 1-2 amino acids are substituted, deleted, or added in any combination are also preferred. Polynucleotide variants can be produced for a variety of reasons, e.g., to optimize codon expression for a particular host (change codons in the human mRNA to those preferred by a bacterial host such as E. coli).

[0104] Naturally occurring variants are called “allelic variants,” and refer to one of several alternate forms of a gene occupying a given locus on a chromosome of an organism. (Genes II, Lewin, B., ed., John Wiley & Sons, New York (1985).) These allelic variants can vary at either the polynucleotide and/or polypeptide level and are included in the present invention. Alternatively, non-naturally occurring variants may be produced by mutagenesis techniques or by direct synthesis.

[0105] Using known methods of protein engineering and recombinant DNA technology, variants may be generated to improve or alter the characteristics of the polypeptides of the present invention. For instance, one or more amino acids can be deleted from the N-terminus or C-terminus of the polypeptides of the present invention without substantial loss of biological function. As an example, the authors of Ron et al., J. Biol. Chem. 268: 2984-2988 (1993), reported variant KGF proteins having heparin binding activity even after deleting 3, 8, or 27 amino-terminal amino acid residues. Similarly, Interferon gamma exhibited up to ten times higher activity after deleting 8-10 amino acid residues from the carboxy terminus of this protein. (Dobeli et al., J. Biotechnology 7:199-216 (1988).)

[0106] Moreover, ample evidence demonstrates that variants often retain a biological activity similar to that of the naturally occurring protein. For example, Gayle and coworkers (J. Biol. Chem. 268:22105-22111 (1993)) conducted extensive mutational analysis of human cytokine IL-1a. They used random mutagenesis to generate over 3,500 individual IL-1a mutants that averaged 2.5 amino acid changes per variant over the entire length of the molecule. Multiple mutations were examined at every possible amino acid position. The investigators found that “[m]ost of the molecule could be altered with little effect on either [binding or biological activity].” In fact, only 23 unique amino acid sequences, out of more than 3,500 nucleotide sequences examined, produced a protein that significantly differed in activity from wild-type.

[0107] Furthermore, even if deleting one or more amino acids from the N-terminus or C-terminus of a polypeptide results in modification or loss of one or more biological functions, other biological activities may still be retained. For example, the ability of a deletion variant to induce and/or to bind antibodies which recognize the secreted form will likely be retained when less than the majority of the residues of the secreted form are removed from the N-terminus or C-terminus. Whether a particular polypeptide lacking N- or C-terminal residues of a protein retains such immunogenic activities can readily be determined by routine methods described herein and otherwise known in the art.

[0108] Thus, the invention further includes polypeptide variants which show a functional activity (e.g., biological activity) of the polypeptides of the invention. Such variants include deletions, insertions, inversions, repeats, and substitutions selected according to general rules known in the art so as have little effect on activity.

[0109] The present application is directed to nucleic acid molecules at least 80%, 85%, 90%, 95%, 96%, 97%, 98%, 99% or 100% identical to the nucleic acid sequences disclosed herein, (e.g., encoding a polypeptide having the amino acid sequence of an N and/or C terminal deletion), irrespective of whether they encode a polypeptide having functional activity. This is because even where a particular nucleic acid molecule does not encode a polypeptide having functional activity, one of skill in the art would still know how to use the nucleic acid molecule, for instance, as a hybridization probe or a polymerase chain reaction (PCR) primer. Uses of the nucleic acid molecules of the present invention that do not encode a polypeptide having functional activity include, inter alia, (1) isolating a gene or allelic or splice variants thereof in a cDNA library; (2) in situ hybridization (e.g., “FISH”) to metaphase chromosomal spreads to provide precise chromosomal location of the gene, as described in Verma et al., Human Chromosomes: A Manual of Basic Techniques, Pergamon Press, New York (1988); (3) Northern Blot analysis for detecting mRNA expression in specific tissues (e.g., normal colon or diseased colon tissues); and (4) in situ hybridization (e.g., histochemistry) for detecting mRNA expression in specific tissues (e.g., normal colon or diseased colon tissues).

[0110] Preferred, however, are nucleic acid molecules having sequences at least 80%, 85%, 90%, 95%, 96%, 97%, 98%, 99% or 100% identical to the nucleic acid sequences disclosed herein, which do, in fact, encode a polypeptide having functional activity. By a polypeptide having “functional activity” is meant, a polypeptide capable of displaying one or more known functional activities associated with a full-length (complete) protein of the invention. Such functional activities include, but are not limited to, biological activity, antigenicity [ability to bind (or compete with a polypeptide of the invention for binding) to an anti-polypeptide of the invention antibody], immunogenicity (ability to generate antibody which binds to a specific polypeptide of the invention), ability to form multimers with polypeptides of the invention, and ability to bind to a receptor or ligand for a polypeptide of the invention.

[0111] The functional activity of the polypeptides, and fragments, variants and derivatives of the invention, can be assayed by various methods.

[0112] For example, in one embodiment where one is assaying for the ability to bind or compete with full-length polypeptide of the present invention for binding to an anti-polypeptide of the invention antibody, various immunoassays known in the art can be used, including but not limited to, competitive and non-competitive assay systems using techniques such as radioimmunoassays, ELISA (enzyme linked immunosorbent assay), “sandwich” immunoassays, immunoradiometric assays, gel diffusion precipitation reactions, immunodiffusion assays, in situ immunoassays (using colloidal gold, enzyme or radioisotope labels, for example), western blots, precipitation reactions, agglutination assays (e.g., gel agglutination assays, hemagglutination assays), complement fixation assays, immunofluorescence assays, protein A assays, and immunoelectrophoresis assays, etc. In one embodiment, antibody binding is detected by detecting a label on the primary antibody. In another embodiment, the primary antibody is detected by detecting binding of a secondary antibody or reagent to the primary antibody. In a further embodiment, the secondary antibody is labeled. Many means are known in the art for detecting binding in an immunoassay and are within the scope of the present invention.

[0113] In another embodiment, where a ligand is identified, or the ability of a polypeptide fragment, variant or derivative of the invention to multimerize is being evaluated, binding can be assayed, e.g., by means well-known in the art, such as, for example, reducing and non-reducing gel chromatography, protein affinity chromatography, and affinity blotting. See generally, Phizicky et al., Microbiol. Rev. 59:94-123 (1995). In another embodiment, the ability of physiological correlates of a polypeptide of the present invention to bind to a substrate(s) of the polypeptide of the invention can be routinely assayed using techniques known in the art.

[0114] In addition, assays described herein (see Examples) and otherwise known in the art may routinely be applied to measure the ability of polypeptides of the present invention and fragments, variants and derivatives thereof to elicit polypeptide related biological activity (either in vitro or in vivo). Other methods will be known to the skilled artisan and are within the scope of the invention.

[0115] Of course, due to the degeneracy of the genetic code, one of ordinary skill in the art will immediately recognize that a large number of the nucleic acid molecules having a sequence at least 80%, 85%, 90%, 95%, 96%, 97%, 98%, 99%, or 100% identical to, for example, the nucleic acid sequence of the cDNA contained in Clone ID NO: Z, a nucleic acid sequence referred to in Table 1 (e.g., SEQ ID NO: X), a nucleic acid sequence disclosed in Table 2 (e.g., the nucleic acid sequence delineated in columns 8 and 9) or fragments thereof, will encode polypeptides “having functional activity.” In fact, since degenerate variants of any of these nucleotide sequences all encode the same polypeptide, in many instances, this will be clear to the skilled artisan even without performing the above described comparison assay. It will be further recognized in the art that, for such nucleic acid molecules that are not degenerate variants, a reasonable number will also encode a polypeptide having functional activity. This is because the skilled artisan is fully aware of amino acid substitutions that are either less likely or not likely to significantly effect protein function (e.g., replacing one aliphatic amino acid with a second aliphatic amino acid), as further described below.

[0116] For example, guidance concerning how to make phenotypically silent amino acid substitutions is provided in Bowie et al., “Deciphering the Message in Protein Sequences: Tolerance to Amino Acid Substitutions,” Science 247:1306-1310 (1990), wherein the authors indicate that there are two main strategies for studying the tolerance of an amino acid sequence to change.

[0117] The first strategy exploits the tolerance of amino acid substitutions by natural selection during the process of evolution. By comparing amino acid sequences in different species, conserved amino acids can be identified. These conserved amino acids are likely important for protein function. In contrast, the amino acid positions where substitutions have been tolerated by natural selection indicates that these positions are not critical for protein function. Thus, positions tolerating amino acid substitution could be modified while still maintaining biological activity of the protein.

[0118] The second strategy uses genetic engineering to introduce amino acid changes at specific positions of a cloned gene to identify regions critical for protein function. For example, site directed mutagenesis or alanine-scanning mutagenesis (introduction of single alanine mutations at every residue in the molecule) can be used. See Cunningham et al., Science 244:1081-1085 (1989). The resulting mutant molecules can then be tested for biological activity.

[0119] As the authors state, these two strategies have revealed that proteins are surprisingly tolerant of amino acid substitutions. The authors further indicate which amino acid changes are likely to be permissive at certain amino acid positions in the protein. For example, most buried (within the tertiary structure of the protein) amino acid residues require nonpolar side chains, whereas few features of surface side chains are generally conserved. Moreover, tolerated conservative amino acid substitutions involve replacement of the aliphatic or hydrophobic amino acids Ala, Val, Leu and Ile; replacement of the hydroxyl residues Ser and Thr; replacement of the acidic residues Asp and Glu; replacement of the amide residues Asn and Gln, replacement of the basic residues Lys, Arg, and His; replacement of the aromatic residues Phe, Tyr, and Trp, and replacement of the small-sized amino acids Ala, Ser, Thr, Met, and Gly. Besides conservative amino acid substitutions, variants of the present invention include (i) substitutions with one or more of the non-conserved amino acid residues, where the substituted amino acid residues may or may not be one encoded by the genetic code, or (ii) substitutions with one or more of the amino acid residues having a substituent group, or (iii) fusion of the mature polypeptide with another compound, such as a compound to increase the stability and/or solubility of the polypeptide (for example, polyethylene glycol), or (iv) fusion of the polypeptide with additional amino acids, such as, for example, an IgG Fc fusion region peptide, serum albumin (preferably human serum albumin) or a fragment or variant thereof, or leader or secretory sequence, or a sequence facilitating purification. Such variant polypeptides are deemed to be within the scope of those skilled in the art from the teachings herein.

[0120] For example, polypeptide variants containing amino acid substitutions of charged amino acids with other charged or neutral amino acids may produce proteins with improved characteristics, such as less aggregation. Aggregation of pharmaceutical formulations both reduces activity and increases clearance due to the aggregate's immunogenic activity. See Pinckard et al., Clin. Exp. Immunol. 2:331-340 (1967); Robbins et al., Diabetes 36: 838-845 (1987); Cleland et al., Crit. Rev. Therapeutic Drug Carrier Systems 10:307-377 (1993).

[0121] A further embodiment of the invention relates to polypeptides which comprise the amino acid sequence of a polypeptide having an amino acid sequence which contains at least one amino acid substitution, but not more than 50 amino acid substitutions, even more preferably, not more than 40 amino acid substitutions, still more preferably, not more than 30 amino acid substitutions, and still even more preferably, not more than 20 amino acid substitutions from a polypeptide sequence disclosed herein. Of course it is highly preferable for a polypeptide to have an amino acid sequence which comprises the amino acid sequence of a polypeptide of SEQ ID NO: Y, an amino acid sequence encoded by SEQ ID NO: X, an amino acid sequence encoded by the portion of SEQ ID NO: X as defined in columns 8 and 9 of Table 2, an amino acid sequence encoded by the complement of SEQ ID NO: X, and/or the amino acid sequence encoded by cDNA contained in Clone ID NO: Z which contains, in order of ever-increasing preference, at least one, but not more than 10, 9, 8, 7, 6, 5, 4, 3, 2 or 1 amino acid substitutions.

[0122] In specific embodiments, the polypeptides of the invention comprise, or alternatively, consist of, fragments or variants of a reference amino acid sequence selected from: (a) the amino acid-sequence of SEQ ID NO: Y or fragments thereof (e.g., the mature form and/or other fragments described herein); (b) the amino acid sequence encoded by SEQ ID NO: X or fragments thereof; (c) the amino acid sequence encoded by the complement of SEQ ID NO: X or fragments thereof; (d) the amino acid sequence encoded by the portion of SEQ ID NO: X as defined in columns 8 and 9 of Table 2 or fragments thereof; and (e) the amino acid sequence encoded by cDNA contained in Clone ID NO: Z or fragments thereof; wherein the fragments or variants have 1-5, 5-10, 5-25, 5-50, 10-50 or 50-150, amino acid residue additions, substitutions, and/or deletions when compared to the reference amino acid sequence. In preferred embodiments, the amino acid substitutions are conservative. Polynucleotides encoding these polypeptides are also encompassed by the invention.

[0123] Polynucleotide and Polypeptide Fragments

[0124] The present invention is also directed to polynucleotide fragments of the polynucleotides (nucleic acids) of the invention. In the present invention, a “polynucleotide fragment” refers to a polynucleotide having a nucleic acid sequence which, for example: is a portion of the cDNA contained in Clone ID NO: Z or the complementary strand thereto; is a portion of the polynucleotide sequence encoding the polypeptide encoded by the cDNA contained in Clone ID NO: Z or the complementary strand thereto; is a portion of a polynucleotide sequence encoding the amino acid sequence encoded by the region of SEQ ID NO: X as defined in columns 8 and 9 of Table 2 or the complementary strand thereto; is a portion of the polynucleotide sequence of SEQ ID NO: X as defined in columns 8 and 9 of Table 2 or the complementary strand thereto; is a portion of the polynucleotide sequence in SEQ ID NO: X or the complementary strand thereto; is a polynucleotide sequence encoding a portion of the polypeptide of SEQ ID NO: Y; is a polynucleotide sequence encoding a portion of a polypeptide encoded by SEQ ID NO: X; or is a polynucleotide sequence encoding a portion of a polypeptide encoded by the complement of the polynucleotide sequence in SEQ ID NO: X.

[0125] The polynucleotide fragments of the invention are preferably at least about 15 nt, and more preferably at least about 20 nt, still more preferably at least about 30 nt, and even more preferably, at least about 40 nt, at least about 50 nt, at least about 75 nt, or at least about 150 nt in length. A fragment “at least 20 nt in length,” for example, is intended to include 20 or more contiguous bases from the cDNA sequence contained in Clone ID NO: Z, or the nucleotide sequence shown in SEQ ID NO: X or the complementary stand thereto. In this context “about” includes the particularly recited value or a value larger or smaller by several (5, 4, 3, 2, or 1) nucleotides, at either terminus or at both termini. These nucleotide fragments have uses that include, but are not limited to, as diagnostic probes and primers as discussed herein. Of course, larger fragments (e.g., at least 160, 170, 180, 190, 200, 250, 500, 600, 1000, or 2000 nucleotides in length) are also encompassed by the invention.

[0126] Moreover, representative examples of polynucleotide fragments of the invention, comprise, or alternatively consist of, a sequence from about nucleotide number 1-50, 51-100, 101-150, 151-200, 201-250, 251-300, 301-350, 351-400, 401-450, 451-500, 501-550, 551-600, 651-700, 701-750, 751-800, 800-850, 851-900, 901-950, 951-1000, 1001-1050, 1051-1100, 1101-1150, 1151-1200, 1201-1250, 1251-1300, 1301-1350, 1351-1400, 1401-1450, 1451-1500, 1501-1550, 1551-1600, 1601-1650, 1651-1700, 1701-1750, 1751-1800, 1801-1850, 1851-1900, 1901-1950, 1951-2000, 2001-2050, 2051-2100, 2101-2150, 2151-2200, 2201-2250, 2251-2300, 2301-2350, 2351-2400, 2401-2450, 2451-2500, 2501-2550, 2551-2600, 2601-2650, 2651-2700, 2701-2750, 2751-2800, 2801-2850, 2851-2900, 2901-2950, 2951-3000, 3001-3050, 3051-3100, 3101-3150, 3151-3200, 3201-3250, 3251-3300, 3301-3350, 3351-3400, 3401-3450, 3451-3500, 3501-3550, 3551-3600, 3601-3650, 3651-3700, 3701-3750, 3751-3800, 3801-3850, 3851-3900, 3901-3950, 3951-4000, 4001-4050, 4051-4100, 4101-4150, 4151-4200, 4201-4250, 4251-4300, 4301-4350, 4351-4400, 4401-4450, 4451-4500, 4501-4550, 4551-4600, 4601-4650, 4651-4700, 4701-4750, 4751-4800, 4801-4850, 4851-4900, 4901-4950, 4951-5000, 5001-5050, 5051-5100, 5101-5150, 5151-5200, 5201-5250, 5251-5300, 5301-5350, 5351-5400, 5401-5450, 5451-5500, 5501-5550, 5551-5600, 5601-5650, 5651-5700, 5701-5750, 5751-5800, 5801-5850, 5851-5900, 5901-5950, 5951-6000, 6001-6050, 6051-6100, 6101-6150, 6151-6200, 6201-6250, 6251-6300, 6301-6350, 6351-6400, 6401-6450, 6451-6500, 6501-6550, 6551-6600, 6601-6650, 6651-6700, 6701-6750, 6751-6800, 6801-6850, 6851-6900, 6901-6950, 6951-7000, 7001-7050, 7051-7100, 7101-7150, 7151-7200, 7201-7250, 7251-7300 or 7301 to the end of SEQ ID NO: X, or the complementary strand thereto. In this context “about” includes the particularly recited range or a range larger or smaller by several (5, 4, 3, 2, or 1) nucleotides, at either terminus or at both termini. Preferably, these fragments encode a polypeptide, which has a functional activity (e.g., biological activity). More preferably, these polynucleotides can be used as probes or primers as discussed herein. Polynucleotides which hybridize to one or more of these polynucleotides under stringent hybridization conditions or alternatively, under lower stringency conditions are also encompassed by the invention, as are polypeptides encoded by these polynucleotides.

[0127] Further representative examples of polynucleotide fragments of the invention, comprise, or alternatively consist of, a sequence from about nucleotide number 1-50, 51-100, 101-150, 151-200, 201-250, 251-300, 301-350, 351-400, 401-450, 451-500, 501-550, 551-600, 651-700, 701-750, 751-800, 800-850, 851-900, 901-950, 951-1000, 1001-1050, 1051-1100, 1101-1150, 1151-1200, 1201-1250, 1251-1300, 1301-1350, 1351-1400, 1401-1450, 1451-1500, 1501-1550, 1551-1600, 1601-1650, 1651-1700, 1701-1750, 1751-1800, 1801-1850, 1851-1900, 1901-1950, 1951-2000, 2001-2050, 2051-2100, 2101-2150, 2151-2200, 2201-2250, 2251-2300, 2301-2350, 2351-2400, 2401-2450, 2451-2500, 2501-2550, 2551-2600, 2601-2650, 2651-2700, 2701-2750, 2751-2800, 2801-2850, 2851-2900, 2901-2950, 2951-3000, 3001-3050, 3051-3100, 3101-3150, 3151-3200, 3201-3250, 3251-3300, 3301-3350, 3351-3400, 3401-3450, 3451-3500, 3501-3550, 3551-3600, 3601-3650, 3651-3700, 3701-3750, 3751-3800, 3801-3850, 3851-3900, 3901-3950, 3951-4000, 4001-4050, 4051-4100, 4101-4150, 4151-4200, 4201-4250, 4251-4300, 4301-4350, 4351-4400, 4401-4450, 4451-4500, 4501-4550, 4551-4600, 4601-4650, 4651-4700, 4701-4750, 4751-4800, 4801-4850, 4851-4900, 4901-4950, 4951-5000, 5001-5050, 5051-5100, 5101-5150, 5151-5200, 5201-5250, 5251-5300, 5301-5350, 5351-5400, 5401-5450, 5451-5500, 5501-5550, 5551-5600, 5601-5650, 5651-5700, 5701-5750, 5751-5800, 5801-5850, 5851-5900, 5901-5950, 5951-6000, 6001-6050, 6051-6100, 6101-6150, 6151-6200, 6201-6250, 6251-6300, 6301-6350, 6351-6400, 6401-6450, 6451-6500, 6501-6550, 6551-6600, 6601-6650, 6651-6700, 6701-6750, 6751-6800, 6801-6850, 6851-6900, 6901-6950, 6951-7000, 7001-7050, 7051-7100, 7101-7150, 7151-7200, 7201-7250, 7251-7300 or 7301 to the end of the cDNA sequence contained in Clone ID NO: Z, or the complementary strand thereto. In this context “about” includes the particularly recited range or a range larger or smaller by several (5, 4, 3, 2, or 1) nucleotides, at either terminus or at both termini. Preferably, these fragments encode a polypeptide, which has a functional activity (e.g., biological activity). More preferably, these polynucleotides can be used as probes or primers as discussed herein. Polynucleotides which hybridize to one or more of these polynucleotides under stringent hybridization conditions or alternatively, under lower stringency conditions are also encompassed by the invention, as are polypeptides encoded by these polynucleotides.

[0128] In specific embodiments, polynucleotides of the invention comprise, or alternatively consist of, one, two, three, four, five, six, seven, eight, nine, ten, or more fragments of the polynucleotide sequence of SEQ ID NO: X (e.g., as defined in Table 1) or fragments or variants thereof. Polypeptides encoded by these polynucleotides, other polynucleotides that encode these polypeptides, and antibodies that bind these polypeptides are also encompassed by the invention.

[0129] In further specific embodiments, polynucleotides of the invention comprise, or alternatively consist of, one, two, three, four, five, six, seven, eight, nine, ten, or more fragments of the polynucleotide sequence of SEQ ID NO: X (e.g., as defined in Table 1) or fragments or variants thereof. Polypeptides encoded by these polynucleotides, other polynucleotides that encode these polypeptides, and antibodies that bind these polypeptides are also encompassed by the invention.

[0130] In the present invention, a “polypeptide fragment” refers to an amino acid sequence which is a portion of that contained in SEQ ID NO: Y, a portion of an amino acid sequence encoded by the portion of SEQ ID NO: X as defined in columns 8 and 9 of Table 2, a portion of an amino acid sequence encoded by the polynucleotide sequence of SEQ ID NO: X, a portion of an amino acid sequence encoded by the complement of the polynucleotide sequence in SEQ ID NO: X, and/or a portion of an amino acid sequence encoded by the cDNA contained in Clone ID NO: Z. Protein (polypeptide) fragments may be “free-standing,” or comprised within a larger polypeptide of which the fragment forms a part or region, most preferably as a single continuous region. Representative examples of polypeptide fragments of the invention, include, for example, fragments comprising, or alternatively consisting of, from about amino acid number 1-20, 21-40, 41-60, 61-80, 81-100, 102-120, 121-140, 141-160, 161-180, 181-200, 201-220, 221-240, 241-260, 261-280, 281-300, 301-320, 321-340, 341-360, 361-380, 381-400, 401-420, 421-440, 441-460, 461-480, 481-500, 501-520, 521-540, 541-560, 561-580, 581-600, 601-620, 621-640, 641-660, 661-680, 681-700, 701-720, 721-740, 741-760, 761-780, 781-800, 801-820, 821-840, 841-860, 861-880, 881-900, 901-920, 921-940, 941-960, 961-980, 981-1000, 1001-1020, 1021-1040, 1041-1060, 1061-1080, 1081-1100, 1101-1120, 1121-1140, 1141-1160, 1161-1180, 1181-1200, 1201-1220, 1221-1240, 1241-1260, 1261-1280, 1281-1300, 1301-1320, 1321-1340, 1341-71360, 1361-1380, 1381-1400, 1401-1420, 1421-1440, or 1441 to the end of the coding region. In a preferred embodiment, polypeptide fragments of the invention include, for example, fragments comprising, or alternatively consisting of, from about amino acid number 1-20, 21-40, 41-60, 61-80, 81-100, 102-120, 121-140, 141-160, 161-180, 181-200, 201-220, 221-240, 241-260, 261-280, 281-300, 301-320, 321-340, 341-360, 361-380, 381-400, 401-420, 421-440, 441-460, 461-480, 481-500, 501-520, 521-540, 541-560, 561-580, 581-600, 601-620, 621-640, 641-660, 661-680, 681-700, 701-720, 721-740, 741-760, 761-780, 781-800, 801-820, 821-840, 841-860, 861-880, 881-900, 901-920, 921-940, 941-960, 961-980, 981-1000, 1001-1020, 1021-1040, 1041-1060, 1061-1080, 1081-1100, 1101-1120, 1121-1140, 1141-1160, 1161-1180, 1181-1200, 1201-1220, 1221-1240, 1241-1260, 1261-1280, 1281-1300, 1301-1320, 1321-1340, 1341-1360, 1361-1380, 1381-1400, 1401-1420, 1421-1440, or 1441 to the end of the coding region of SEQ ID NO: Y. Moreover, polypeptide fragments of the invention may be at least about 10, 15, 20, 25, 30, 35, 40, 45, 50, 55, 60, 65, 70, 75, 80, 85, 90, 100, 110, 120, 130, 140, or 150 amino acids in length. In this context “about” includes the particularly recited ranges or values, or ranges or values larger or smaller by several (5, 4, 3, 2, or 1) amino acids, at either extreme or at both extremes. Polynucleotides encoding these polypeptide fragments are also encompassed by the invention.

[0131] Even if deletion of one or more amino acids from the N-terminus of a protein results in modification of loss of one or more biological functions of the protein, other functional activities (e.g., biological activities, ability to multimerize, ability to bind a ligand) may still be retained. For example, the ability of shortened muteins to induce and/or bind to antibodies which recognize the complete or mature forms of the polypeptides generally will be retained when less than the majority of the residues of the complete or mature polypeptide are removed from the N-terminus. Whether a particular polypeptide lacking N-terminal residues of a complete polypeptide retains such immunologic activities can readily be determined by routine methods described herein and otherwise known in the art. It is not unlikely that a mutein with a large number of deleted N-terminal amino acid residues may retain some biological or immunogenic activities. In fact, peptides composed of as few as six amino acid residues may often evoke an immune response.

[0132] Accordingly, polypeptide fragments include the secreted protein as well as the mature form. Further preferred polypeptide fragments include the secreted protein or the mature form having a continuous series of deleted residues from the amino or the carboxy terminus, or both. For example, any number of amino acids, ranging from 1-60, can be deleted from the amino terminus of either the secreted polypeptide or the mature form. Similarly, any number of amino acids, ranging from 1-30, can be deleted from the carboxy terminus of the secreted protein or mature form. Furthermore, any combination of the above amino and carboxy terminus deletions is preferred. Similarly, polynucleotides encoding these polypeptide fragments are also preferred.

[0133] The present invention further provides polypeptides having one or more residues deleted from the amino terminus of the amino acid sequence of a polypeptide disclosed herein (e.g., a polypeptide of SEQ ID NO: Y, a polypeptide encoded by the polynucleotide sequence contained in SEQ ID NO: X or the complement thereof, a polypeptide encoded by the portion of SEQ ID NO: X as defined in columns 8 and 9 of Table 2, and/or a polypeptide encoded by the cDNA contained in Clone ID NO: Z). In particular, N-terminal deletions may be described by the general formula m-q, where q is a whole integer representing the total number of amino acid residues in a polypeptide of the invention (e.g., the polypeptide disclosed in SEQ ID NO: Y, or the polypeptide encoded by the portion of SEQ ID NO: X as defined in columns 8 and 9 of Table 2), and m is defined as any integer ranging from 2 to q-6. Polynucleotides encoding these polypeptides are also encompassed by the invention.

[0134] The present invention further provides polypeptides having one or more residues from the carboxy terminus of the amino acid sequence of a polypeptide disclosed herein (e.g., a polypeptide of SEQ ID NO: Y, a polypeptide encoded by the polynucleotide sequence contained in SEQ ID NO: X, a polypeptide encoded by the portion of SEQ ID NO: X as defined in columns 8 and 9 of Table 2, and/or a polypeptide encoded by the cDNA contained in Clone ID NO: Z). In particular, C-terminal deletions may be described by the general formula 1-n, where n is any whole integer ranging from 6 to q-1, and where n corresponds to the position of amino acid residue in a polypeptide of the invention. Polynucleotides encoding these polypeptides are also encompassed by the invention.

[0135] In addition, any of the above described N- or C-terminal deletions can be combined to produce a N- and C-terminal deleted polypeptide. The invention also provides polypeptides having one or more amino acids deleted from both the amino and the carboxyl termini, which may be described generally as having residues m-n of a polypeptide encoded by SEQ ID NO: X (e.g., including, but not limited to, the preferred polypeptide disclosed as SEQ ID NO: Y and the polypeptide encoded by the portion of SEQ ID NO: X as defined in columns 8 and 9 of Table 2), the cDNA contained in Clone ID NO: Z, and/or the complement thereof, where n and m are integers as described above. Polynucleotides encoding these polypeptides are also encompassed by the invention.

[0136] Also as mentioned above, even if deletion of one or more amino acids from the C-terminus of a protein results in modification of loss of one or more biological functions of the protein, other functional activities (e.g., biological activities, ability to multimerize, ability to bind a ligand) may still be retained. For example the ability of the shortened mutein to induce and/or bind to antibodies which recognize the complete or mature forms of the polypeptide generally will be retained when less than the majority of the residues of the complete or mature polypeptide are removed from the C-terminus. Whether a particular polypeptide lacking C-terminal residues of a complete polypeptide retains such immunologic activities can readily be determined by routine methods described herein and otherwise known in the art. It is not unlikely that a mutein with a large number of deleted C-terminal amino acid residues may retain some biological or immunogenic activities. In fact, peptides composed of as few as six amino acid residues may often evoke an immune response.

[0137] The present application is also directed to proteins containing polypeptides at least 80%, 85%, 90%, 95%, 96%, 97%, 98% or 99% identical to a polypeptide sequence set forth herein. In preferred embodiments, the application is directed to proteins containing polypeptides at least 80%, 85%, 90%, 95%, 96%, 97%, 98% or 99% identical to polypeptides having the amino acid sequence of the specific N- and C-terminal deletions. Polynucleotides encoding these polypeptides are also encompassed by the invention.

[0138] Any polypeptide sequence encoded by, for example, the polynucleotide sequences set forth as SEQ ID NO: X or the complement thereof, (presented, for example, in Tables 1A and 2), or the cDNA contained in Clone ID NO: Z may be analyzed to determine certain preferred regions of the polypeptide. For example, the amino acid sequence of a polypeptide encoded by a polynucleotide sequence of SEQ ID NO: X (e.g., the polypeptide of SEQ ID NO: Y and the polypeptide encoded by the portion of SEQ ID NO: X as defined in columns 8 and 9 of Table 2) or the cDNA contained in Clone ID NO: Z may be analyzed using the default parameters of the DNASTAR computer algorithm (DNASTAR, Inc., 1228 S. Park St., Madison, Wis. 53715 USA; http://www.dnastar.com/).

[0139] Polypeptide regions that may be routinely obtained using the DNASTAR computer algorithm include, but are not limited to, Gamier-Robson alpha-regions, beta-regions, turn-regions, and coil-regions; Chou-Fasman alpha-regions, beta-regions, and turn-regions; Kyte-Doolittle hydrophilic regions and hydrophobic regions; Eisenberg alpha- and beta-amphipathic regions; Karplus-Schulz flexible regions; Emini surface-forming regions; and Jameson-Wolf regions of high antigenic index. Among highly preferred polynucleotides of the invention in this regard are those that encode polypeptides comprising regions that combine several structural features, such as several (e.g., 1, 2, 3 or 4) of the features set out above.

[0140] Additionally, Kyte-Doolittle hydrophilic regions and hydrophobic regions, Emini surface-forming regions, and Jameson-Wolf regions of high antigenic index (i.e., containing four or more contiguous amino acids having an antigenic index of greater than or equal to 1.5, as identified using the default parameters of the Jameson-Wolf program) can routinely be used to determine polypeptide regions that exhibit a high degree of potential for antigenicity. Regions of high antigenicity are determined from data by DNASTAR analysis by choosing values which represent regions of the polypeptide which are likely to be exposed on the surface of the polypeptide in an environment in which antigen recognition may occur in the process of initiation of an immune response.

[0141] Preferred polypeptide fragments of the invention are fragments comprising, or alternatively, consisting of, an amino acid sequence that displays a functional activity (e.g. biological activity) of the polypeptide sequence of which the amino acid sequence is a fragment. By a polypeptide displaying a “functional activity” is meant a polypeptide capable of one or more known functional activities associated with a full-length protein, such as, for example, biological activity, antigenicity, immunogenicity, and/or multimerization, as described herein.

[0142] Other preferred polypeptide fragments are biologically active fragments. Biologically active fragments are those exhibiting activity similar, but not necessarily identical, to an activity of the polypeptide of the present invention. The biological activity of the fragments may include an improved desired activity, or a decreased undesirable activity.

[0143] In preferred embodiments, polypeptides of the invention comprise, or alternatively consist of, one, two, three, four, five or more of the antigenic fragments of the polypeptide of SEQ ID NO: Y, or portions thereof. Polynucleotides encoding these polypeptides are also encompassed by the invention.

[0144] The present invention encompasses polypeptides comprising, or alternatively consisting of, an epitope of: the polypeptide sequence shown in SEQ ID NO: Y; a polypeptide sequence encoded by SEQ ID NO: X or the complementary strand thereto; the polypeptide sequence encoded by the portion of SEQ ID NO: X as defined in columns 8 and 9 of Table 2; the polypeptide sequence encoded by the cDNA contained in Clone ID NO: Z; or the polypeptide sequence encoded by a polynucleotide that hybridizes to the sequence of SEQ ID NO: X, the complement of the sequence of SEQ ID NO: X, the complement of a portion of SEQ ID NO: X as defined in columns 8 and 9 of Table 2, or the cDNA sequence contained in Clone ID NO: Z under stringent hybridization conditions or alternatively, under lower stringency hybridization as defined supra. The present invention further encompasses polynucleotide sequences encoding an epitope of a polypeptide sequence of the invention (such as, for example, the sequence disclosed in SEQ ID NO: X, or a fragment thereof), polynucleotide sequences of the complementary strand of a polynucleotide sequence encoding an epitope of the invention, and polynucleotide sequences which hybridize to the complementary strand under stringent hybridization conditions or alternatively, under lower stringency hybridization conditions defined supra.

[0145] The term “epitopes,” as used herein, refers to portions of a polypeptide having antigenic or immunogenic activity in an animal, preferably a mammal, and most preferably in a human. In a preferred embodiment, the present invention encompasses a polypeptide comprising an epitope, as well as the polynucleotide encoding this polypeptide. An “immunogenic epitope,” as used herein, is defined as a portion of a protein that elicits an antibody response in an animal, as determined by any method known in the art, for example, by the methods for generating antibodies described infra. (See, for example, Geysen et al., Proc. Natl. Acad. Sci. USA 81:3998-4002 (1983)). The term “antigenic epitope,” as used herein, is defined as a portion of a protein to which an antibody can immunospecifically bind its antigen as determined by any method well known in the art, for example, by the immunoassays described herein. Immunospecific binding excludes non-specific binding but does not necessarily exclude cross-reactivity with other antigens. Antigenic epitopes need not necessarily be immunogenic.

[0146] Fragments, which function as epitopes may be produced by any conventional means. (See, e.g., Houghten, R. A., Proc. Natl. Acad. Sci. USA 82:5131-5135 (1985) further described in U.S. Pat. No. 4,631,211.)

[0147] In the present invention, antigenic epitopes preferably contain a sequence of at least 4, at least 5, at least 6, at least 7, more preferably at least 8, at least 9, at least 10, at least 11, at least 12, at least 13, at least 14, at least 15, at least 20, at least 25, at least 30, at least 40, at least 50, and, most preferably, between about 15 to about 30 amino acids. Preferred polypeptides comprising immunogenic or antigenic epitopes are at least 10, 15, 20, 25, 30, 35, 40, 45, 50, 55, 60, 65, 70, 75, 80, 85, 90, 95, or 100 amino acid residues in length. Additional non-exclusive preferred antigenic epitopes include the antigenic epitopes disclosed herein, as well as portions thereof. Antigenic epitopes are useful, for example, to raise antibodies, including monoclonal antibodies, that specifically bind the epitope. Preferred antigenic epitopes include the antigenic epitopes disclosed herein, as well as any combination of two, three, four, five or more of these antigenic epitopes. Antigenic epitopes can be used as the target molecules in immunoassays. (See, for instance, Wilson et al., Cell 37:767-778 (1984); Sutcliffe et al., Science 219:660-666 (1983)).

[0148] Non-limiting examples of epitopes of polypeptides that can be used to generate antibodies of the invention include a polypeptide comprising, or alternatively consisting of, at least one, two, three, four, five, six or more of the portion(s) of SEQ ID NO: Y specified in column 7 of Table 1. These polypeptide fragments have been determined to bear antigenic epitopes of the proteins of the invention by the analysis of the Jameson-Wolf antigenic index, which is included in the DNAStar suite of computer programs. By “comprise” it is intended that a polypeptide contains at least one, two, three, four, five, six or more of the portion(s) of SEQ ID NO: Y shown in column 7 of Table 1, but it may contain additional flanking residues on either the amino or carboxyl termini of the recited portion. Such additional flanking sequences are preferably sequences naturally found adjacent to the portion; i.e., contiguous sequence shown in SEQ ID NO: Y. The flanking sequence may, however, be sequences from a heterolgous polypeptide, such as from another protein described herein or from a heterologous polypeptide not described herein. In particular embodiments, epitope portions of a polypeptide of the invention comprise one, two, three, or more of the portions of SEQ ID NO: Y shown in column 7 of Table 1. Polynucleotides encoding these polypeptides are also encompassed by the invention.

[0149] Similarly, immunogenic epitopes can be used, for example, to induce antibodies according to methods well known in the art. See, for instance, Sutcliffe et al., supra; Wilson et al., supra; Chow et al., Proc. Natl. Acad. Sci. USA 82:910-914; and Bittle et al., J. Gen. Virol. 66:2347-2354 (1985). Preferred immunogenic epitopes include the immunogenic epitopes disclosed herein, as well as any combination of two, three, four, five or more of these immunogenic epitopes. The polypeptides comprising one or more immunogenic epitopes may be presented for eliciting an antibody response together with a carrier protein, such as an albumin, to an animal system (such as rabbit or mouse), or, if the polypeptide is of sufficient length (at least about 25 amino acids), the polypeptide may be presented without a carrier. However, immunogenic epitopes comprising as few as 8 to 10 amino acids have been shown to be sufficient to raise antibodies capable of binding to, at the very least, linear epitopes in a denatured polypeptide (e.g., in Western blotting).

[0150] Epitope-bearing polypeptides of the present invention may be used to induce antibodies according to methods well known in the art including, but not limited to, in vivo immunization, in vitro immunization, and phage display methods. See, e.g., Sutcliffe et al., supra; Wilson et al., supra, and Bittle et al., J. Gen. Virol., 66:2347-2354 (1985). If in vivo immunization is used, animals may be immunized with free peptide; however, anti-peptide antibody titer may be boosted by coupling the peptide to a macromolecular carrier, such as keyhole limpet hemacyanin (KLH) or tetanus toxoid. For instance, peptides containing cysteine residues may be coupled to a carrier using a linker such as maleimidobenzoyl-N-hydroxysuccinimide ester (MBS), while other peptides may be coupled to carriers using a more general linking agent such as glutaraldehyde. Animals such as rabbits, rats and mice are immunized with either free or carrier-coupled peptides, for instance, by intraperitoneal and/or intradermal injection of emulsions containing about 100 μg of peptide or carrier protein and Freund's adjuvant or any other adjuvant known for stimulating an immune response. Several booster injections may be needed, for instance, at intervals of about two weeks, to provide a useful titer of anti-peptide antibody which can be detected, for example, by ELISA assay using free peptide adsorbed to a solid surface. The titer of anti-peptide antibodies in serum from an immunized animal may be increased by selection of anti-peptide antibodies, for instance, by adsorption to the peptide on a solid support and elution of the selected antibodies according to methods well known in the art.

[0151] As one of skill in the art will appreciate, and as discussed above, the polypeptides of the present invention (e.g., those comprising an immunogenic or antigenic epitope) can be fused to heterologous polypeptide sequences. For example, polypeptides of the present invention (including fragments or variants thereof), may be fused with the constant domain of immunoglobulins (IgA, IgE, IgG, IgM), or portions thereof (CH1, CH2, CH3, or any combination thereof and portions thereof, resulting in chimeric polypeptides. By way of another non-limiting example, polypeptides and/or antibodies of the present invention (including fragments or variants thereof) may be fused with albumin (including but not limited to recombinant human serum albumin or fragments or variants thereof (see, e.g., U.S. Pat. No. 5,876,969, issued Mar. 2, 1999, EP Patent 0 413 622, and U.S. Pat. No. 5,766,883, issued Jun. 16, 1998, herein incorporated by reference in their entirety)). In a preferred embodiment, polypeptides and/or antibodies of the present invention (including fragments or variants thereof) are fused with the mature form of human serum albumin (i.e., amino acids 1-585 of human serum albumin as shown in FIGS. 1 and 2 of EP Patent 0 322 094) which is herein incorporated by reference in its entirety. In another preferred embodiment, polypeptides and/or antibodies of the present invention (including fragments or variants thereof) are fused with polypeptide fragments comprising, or alternatively consisting of, amino acid residues 1-z of human serum albumin, where z is an integer from 369 to 419, as described in U.S. Pat. No. 5,766,883 herein incorporated by reference in its entirety. Polypeptides and/or antibodies of the present invention (including fragments or variants thereof) may be fused to either the N- or C-terminal end of the heterologous protein (e.g., immunoglobulin Fc polypeptide or human serum albumin polypeptide). Polynucleotides encoding fusion proteins of the invention are also encompassed by the invention.

[0152] Such fusion proteins as those described above may facilitate purification and may increase half-life in vivo. This has been shown for chimeric proteins consisting of the first two domains of the human CD4-polypeptide and various domains of the constant regions of the heavy or light chains of mammalian immunoglobulins. See, e.g., EP 394,827; Traunecker et al., Nature, 331:84-86 (1988). Enhanced delivery of an antigen across the epithelial barrier to the immune system has been demonstrated for antigens (e.g., insulin) conjugated to an FcRn binding partner such as IgG or Fe fragments (see, e.g., PCT Publications WO 96/22024 and WO 99/04813). IgG Fusion proteins that have a disulfide-linked dimeric structure due to the IgG portion desulfide bonds have also been found to be more efficient in binding and neutralizing other molecules than monomeric polypeptides or fragments thereof alone. See, e.g., Fountoulakis et al., J. Biochem., 270:3958-3964 (1995). Nucleic acids encoding the above epitopes can also be recombined with a gene of interest as an epitope tag (e.g., the hemagglutinin (HA) tag or flag tag) to aid in detection and purification of the expressed polypeptide. For example, a system described by Janknecht et al. allows for the ready purification of non-denatured fusion proteins expressed in human cell lines (Janknecht et al., 1991, Proc. Natl. Acad. Sci. USA 88:8972-897). In this system, the gene of interest is subcloned into a vaccinia recombination plasmid such that the open reading frame of the gene is translationally fused to an amino-terminal tag consisting of six histidine residues. The tag serves as a matrix binding domain for the fusion protein. Extracts from cells infected with the recombinant vaccinia virus are loaded onto Ni2+ nitriloacetic acid-agarose column and histidine-tagged proteins can be selectively eluted with imidazole-containing buffers.

[0153] Fusion Proteins

[0154] Any polypeptide of the present invention can be used to generate fusion proteins. For example, the polypeptide of the present invention, when fused to a second protein, can be used as an antigenic tag. Antibodies raised against the polypeptide of the present invention can be used to indirectly detect the second protein by binding to the polypeptide. Moreover, because secreted proteins target cellular locations based on trafficking signals, polypeptides of the present invention which are shown to be secreted can be used as targeting molecules once fused to other proteins.

[0155] Examples of domains that can be fused to polypeptides of the present invention include not only heterologous signal sequences, but also other heterologous functional regions. The fusion does not necessarily need to be direct, but may occur through linker sequences.

[0156] In certain preferred embodiments, proteins of the invention are fusion proteins comprising an amino acid sequence that is an N and/or C-terminal deletion of a polypeptide of the invention. In preferred embodiments, the invention is directed to a fusion protein comprising an amino acid sequence that is at least 80%, 85%, 90%, 95%, 96%, 97%, 98% or 99% identical to a polypeptide sequence of the invention. Polynucleotides encoding these proteins are also encompassed by the invention.

[0157] Moreover, fusion proteins may also be engineered to improve characteristics of the peptide of the present invention. For instance, a region of additional amino acids, particularly charged amino acids, may be added to the N-terminus of the polypeptide to improve stability and persistence during purification from the host cell or subsequent handling and storage. Also, peptide moieties may be added to the polypeptide to facilitate purification. Such regions may be removed prior to final preparation of the polypeptide. The addition of peptide moieties to facilitate handling of polypeptides is familiar and routine techniques in the art.

[0158] As one of skill in the art will appreciate that, as discussed above, polypeptides of the present invention, and epitope-bearing fragments thereof, can be combined with heterologous polypeptide sequences. For example, the polypeptides of the present invention may be fused with heterologous polypeptide sequences, for example, the polypeptides of the present invention may be fused with the constant domain of immunoglobulins (IgA, IgE, IgG, IgM) or portions thereof (CH1, CH2, CH3, and any combination thereof, including both entire domains and portions thereof), or albumin (including, but not limited to, native or recombinant human albumin or fragments or variants thereof (see, e.g., U.S. Pat. No. 5,876,969, issued Mar. 2, 1999, EP Patent 0 413 622, and U.S. Pat. No. 5,766,883, issued Jun. 16, 1998, herein incorporated by reference in their entirety)), resulting in chimeric polypeptides. For example, EP-A-O 464 533 (Canadian counterpart 2045869) discloses fusion proteins comprising various portions of constant region of immunoglobulin molecules together with another human protein or part thereof. In many cases, the Fc part in a fusion protein is beneficial in therapy and diagnosis, and thus can result in, for example, improved pharmacokinctic properties (EP-A 0232 262). Alternatively, deleting the Fc part after the fusion protein has been expressed, detected, and purified, would be desired. For example, the Fc portion may hinder therapy and diagnosis if the fusion protein is used as an antigen for immunizations. In drug discovery, for example, human proteins, such as hIL-5, have been fused with Fc portions for the purpose of high-throughput screening assays to identify antagonists of hIL-5. See, D. Bennett et al., J. Molecular Recognition 8:52-58 (1995); K. Johanson et al., J. Biol. Chem. 270:9459-9471 (1995).

[0159] Moreover, the polypeptides of the present invention can be fused to marker sequences, such as a polypeptide, which facilitates purification of the fused polypeptide. In preferred embodiments, the marker amino acid sequence is a hexa-histidine peptide, such as the tag provided in a pQE vector (QIAGEN, Inc., 9259 Eton Avenue, Chatsworth, Calif., 91311), among others, many of which are commercially available. As described in Gentz et al., Proc. Natl. Acad. Sci. USA 86:821-824 (1989), for instance, hexa-histidine provides for convenient purification of the fusion protein. Another peptide tag useful for purification, the “HA” tag, corresponds to an epitope derived from the influenza hemagglutinin protein (Wilson et al., Cell 37:767 (1984).)

[0160] Additional fusion proteins of the invention may be generated through the techniques of gene-shuffling, motif-shuffling, exon-shuffling, and/or codon-shuffling (collectively referred to as “DNA shuffling”), briefly described below, and further described herein. DNA shuffling may be employed to modulate the activities of polypeptides of the invention, such methods can be used to generate polypeptides with altered activity, as well as agonists and antagonists of the polypeptides. See, generally, U.S. Pat. Nos. 5,605,793; 5,811,238; 5,830,721; 5,834,252; and 5,837,458, and Patten et al., Curr. Opinion Biotechnol. 8:724-33 (1997); Harayama, Trends Biotechnol. 16(2):76-82 (1998); Hansson et al., J. Mol. Biol. 287:265-76 (1999); and Lorenzo and Blasco, Biotechniques 24(2):308-13 (1998); each of these patents and publications are hereby incorporated by reference in its entirety). In a preferred embodiment, one or more components, motifs, sections, parts, domains, fragments, etc., of a polynucleotide encoding a polypeptide of the invention may be recombined with one or more components, motifs, sections, parts, domains, fragments, etc., of one or more heterologous molecules encoding a heterologous polypeptide.

[0161] Thus, any of these above fusions can be engineered using the polynucleotides or the polypeptides of the present invention.

[0162] Recombinant and Synthetic Production of Polypeptides of the Invention

[0163] The present invention also relates to vectors containing the polynucleotide of the present invention, host cells, and the production of polypeptides by synthetic and recombinant techniques. The vector may be, for example, a phage, plasmid, viral, or retroviral vector. Retroviral vectors may be replication competent or replication defective. In the latter case, viral propagation generally will occur only in complementing host cells.

[0164] The polynucleotides of the invention may be joined to a vector containing a selectable marker for propagation in a host. Generally, a plasmid vector is introduced in a precipitate, such as a calcium phosphate precipitate, or in a complex with a charged lipid. If the vector is a virus, it may be packaged in vitro using an appropriate packaging cell line and then transduced into host cells.

[0165] The polynucleotide insert should be operatively linked to an appropriate promoter, such as the phage lambda PL promoter, the E. coli lac, try, phoa and tac promoters, the SV40 early and late promoters and promoters of retroviral LTRs, to name a few. Other suitable promoters will be known to the skilled artisan. The expression constructs will further contain sites for transcription initiation, termination, and, in the transcribed region, a ribosome binding site for translation. The coding portion of the transcripts expressed by the constructs will preferably include a translation initiating codon at the beginning and a termination codon (UAA, UGA or UAG) appropriately positioned at the end of the polypeptide to be translated.

[0166] As indicated, the expression vectors will preferably include at least one selectable marker. Such markers include dihydrofolate reductase, G418 or neomycin resistance, glutamine synthase, for eukaryotic cell culture and tetracycline, kanamycin or ampicillin resistance genes for culturing in E. coli and other bacteria. Representative examples of appropriate hosts include, but are not limited to, bacterial cells, such as E. coli, Streptomyces and Salmonella typhimurium cells; fungal cells, such as yeast cells (e.g., Saccharomyces cerevisiae or Pichia pastoris (ATCC Accession No. 201178)); insect cells such as Drosophila S2 and Spodoptera Sf9 cells; animal cells such as CHO, COS, 293, NSO and Bowes melanoma cells; and plant cells. Appropriate culture mediums and conditions for the above-described host cells are known in the art.

[0167] Among vectors preferred for use in bacteria include pQE70, pQE60 and pQE-9, available from QIAGEN, Inc.; pBluescript vectors, Phagescript vectors, pNH8A, pNH16a, pNH18A, pNH46A, available from Stratagene Cloning Systems, Inc.; and ptrc99a, pKK223-3, pKK233-3, pDR540, pRIT5 available from Pharmacia Biotech, Inc. Among preferred eukaryotic vectors are pWLNEO, pSV2CAT, pOG44, pXT1 and pSG available from Stratagene; and pSVK3, pBPV, pMSG and pSVL available from Pharmacia. Preferred expression vectors for use in yeast systems include, but are not limited to pYES2, pYD1, pTEF1/Zeo, pYES2/GS, pPICZ, pGAPZ, pGAPZalph, pPIC9, pPIC3.5, pHIL-D2, pHIL-S1, pPIC3.5K, pPIC9K, and PAO815 (all available from Invitrogen, Carlsbad, Calif.). Other suitable vectors will be readily apparent to the skilled artisan.

[0168] Vectors which use glutamine synthase (GS) or DHFR as the selectable markers can be amplified in the presence of the drugs methionine sulphoximine or methotrexate, respectively. An advantage of glutamine synthase based vectors is the availabilty of cell lines (e.g., the murine myeloma cell line, NSO) which are glutamine synthase negative. Glutamine synthase expression systems can also function in glutamine synthase expressing cells (e.g., Chinese Hamster Ovary (CHO) cells) by providing additional inhibitor to prevent the functioning of the endogenous gene. A glutamine synthase expression system and components thereof are detailed in PCT publications: WO87/04462; WO86/05807; WO89/01036; WO89/10404; and WO91/06657 which are hereby incorporated in their entireties by reference herein. Additionally, glutamine synthase expression vectors can be obtained from Lonza Biologics, Inc. (Portsmouth, N.H.). Expression and production of monoclonal antibodies using a GS expression system in murine myeloma cells is described in Bebbington et al., Bio/technology 10:169(1992) and in Biblia and Robinson Biotechnol. Prog. 11:1 (1995) which are herein incorporated by reference.

[0169] The present invention also relates to host cells containing the above-described vector constructs described herein, and additionally encompasses host cells containing nucleotide sequences of the invention that are operably associated with one or more heterologous control regions (e.g., promoter and/or enhancer) using techniques known of in the art. The host cell can be a higher eukaryotic cell, such as a mammalian cell (e.g., a human derived cell), or a lower eukaryotic cell, such as a yeast cell, or the host cell can be a prokaryotic cell, such as a bacterial cell. A host strain may be chosen, which modulates the expression of the inserted gene sequences, or modifies and processes the gene product in the specific fashion desired. Expression from certain promoters can be elevated in the presence of certain inducers; thus expression of the genetically engineered polypeptide may be controlled. Furthermore, different host cells have characteristics and specific mechanisms for the translational and post-translational processing and modification (e.g., phosphorylation, cleavage) of proteins. Appropriate cell lines can be chosen to ensure the desired modifications and processing of the foreign protein expressed.

[0170] Introduction of the nucleic acids and nucleic acid constructs of the invention into the host cell can be effected by calcium phosphate transfection, DEAE-dextran mediated transfection, cationic lipid-mediated transfection, electroporation, transduction, infection, or other methods. Such methods are described in many standard laboratory manuals, such as Davis et al., Basic Methods In Molecular Biology (1986). It is specifically contemplated that the polypeptides of the present invention may in fact be expressed by a host cell lacking a recombinant vector.

[0171] In addition to encompassing host cells containing the vector constructs discussed herein, the invention also encompasses primary, secondary, and immortalized host cells of vertebrate origin, particularly mammalian origin, that have been engineered to delete or replace endogenous genetic material (e.g., ovarian antigen coding sequence), and/or to include genetic material (e.g., heterologous polynucleotide sequences) that is operably associated with ovarian associated polynucleotides of the invention, and which activates, alters, and/or amplifies endogenous ovarian associated polynucleotides. For example, techniques known in the art may be used to operably associate heterologous control regions (e.g., promoter and/or enhancer) and endogenous ovarian associated polynucleotide sequences via homologous recombination (see, e.g., U.S. Pat. No. 5,641,670, issued Jun. 24, 1997; International Publication Number WO 96/29411; International Publication Number WO 94/12650; Koller et al., Proc. Natl. Acad. Sci. USA 86:8932-8935 (1989); and Zijlstra et al., Nature 342:435-438 (1989), the disclosures of each of which are incorporated by reference in their entireties).

[0172] Polypeptides of the present invention can also be recovered from: products purified from natural sources, including bodily fluids, tissues and cells, whether directly isolated or cultured; products of chemical synthetic procedures; and products produced by recombinant techniques from a prokaryotic or eukaryotic host, including, for example, bacterial, yeast, higher plant, insect, and mammalian cells. Depending upon the host employed in a recombinant production procedure, the polypeptides of the present invention may be glycosylated or may be non-glycosylated. In addition, polypeptides of the invention may also include an initial modified methionine residue, in some cases as a result of host-mediated processes. Thus, it is well known in the art that the N-terminal methionine encoded by the translation initiation codon generally is removed with high efficiency from any protein after translation in all eukaryotic cells. While the N-terminal methionine on most proteins also is efficiently removed in most prokaryotes, for some proteins, this prokaryotic removal process is inefficient, depending on the nature of the amino acid to which the N-terminal methionine is covalently linked.

[0173] In one embodiment, the yeast Pichia pastoris is used to express polypeptides of the invention in a eukaryotic system. Pichia pastoris is a methylotrophic yeast which can metabolize methanol as its sole carbon source. A main step in the methanol metabolization pathway is the oxidation of methanol to formaldehyde using O₂. This reaction is catalyzed by the enzyme alcohol oxidase. In order to metabolize methanol as its sole carbon source, Pichia pastoris must generate high levels of alcohol oxidase due, in part, to the relatively low affinity of alcohol oxidase for O₂. Consequently, in a growth medium depending on methanol as a main carbon source, the promoter region of one of the two alcohol oxidase genes (AOX1) is highly active. In the presence of methanol, alcohol oxidase produced from the AOX1 gene comprises up to approximately 30% of the total soluble protein in Pichia pastoris. See, Ellis, S. B., et al., Mol. Cell. Biol. 5:1111-21 (1985); Koutz, P. J, et al., Yeast 5:167-77 (1989); Tschopp, J. F., et al., Nucl. Acids Res. 15:3859-76 (1987). Thus, a heterologous coding sequence, such as, for example, a polynucleotide of the present invention, under the transcriptional regulation of all or part of the AOX1 regulatory sequence is expressed at exceptionally high levels in Pichia yeast grown in the presence of methanol.

[0174] In one example, the plasmid vector pPIC9K is used to express DNA encoding a polypeptide of the invention, as set forth herein, in a Pichea yeast system essentially as described in “Pichia Protocols: Methods in Molecular Biology,” D. R. Higgins and J. Cregg, eds. The Humana Press, Totowa, N.J., 1998. This expression vector allows expression and secretion of a polypeptide of the invention by virtue of the strong AOX1 promoter linked to the Pichia pastoris alkaline phosphatase (PHO) secretory signal peptide (i.e., leader) located upstream of a multiple cloning site.

[0175] Many other yeast vectors could be used in place of pPIC9K, such as, pYES2, pYD1, pTEF1/Zeo, pYES2/GS, pPICZ, pGAPZ, pGAPZalpha, pPIC9, pPIC3.5, pHIL-D2, pHIL-S1, pPIC3.5K, and PAO815, as one skilled in the art would readily appreciate, as long as the proposed expression construct provides appropriately located signals for transcription, translation, secretion (if desired), and the like, including an in-frame AUG as required.

[0176] In another embodiment, high-level expression of a heterologous coding sequence, such as, for example, a polynucleotide of the present invention, may be achieved by cloning the heterologous polynucleotide of the invention into an expression vector such as, for example, pGAPZ or pGAPZalpha, and growing the yeast culture in the absence of methanol.

[0177] In addition to encompassing host cells containing the vector constructs discussed herein, the invention also encompasses primary, secondary, and immortalized host cells of vertebrate origin, particularly mammalian origin, that have been engineered to delete or replace endogenous genetic material (e.g., coding sequence), and/or to include genetic material (e.g., heterologous polynucleotide sequences) that is operably associated with polynucleotides of the invention, and which activates, alters, and/or amplifies endogenous polynucleotides. For example, techniques known in the art may be used to operably associate heterologous control regions (e.g., promoter and/or enhancer) and endogenous polynucleotide sequences via homologous recombination (see, e.g., U.S. Pat. No. 5,641,670, issued Jun. 24, 1997; International Publication No. WO 96/29411, published Sep. 26, 1996; International Publication No. WO 94/12650, published Aug. 4, 1994; Koller et al., Proc. Natl. Acad. Sci. USA 86:8932-8935 (1989); and Zijlstra et al., Nature 342:435-438 (1989), the disclosures of each of which are incorporated by reference in their entireties).

[0178] In addition, polypeptides of the invention can be chemically synthesized using techniques known in the art (e.g., see Creighton, 1983, Proteins: Structures and Molecular Principles, W. H. Freeman & Co., N.Y., and Hunkapiller et al., Nature, 310:105-111 (1984)). For example, a polypeptide corresponding to a fragment of a polypeptide can be synthesized by use of a peptide synthesizer. Furthermore, if desired, nonclassical amino acids or chemical amino acid analogs can be introduced as a substitution or addition into the polypeptide sequence. Non-classical amino acids include, but are not limited to, to the D-isomers of the common amino acids, 2,4-diaminobutyric acid, a-amino isobutyric acid, 4-aminobutyric acid, Abu, 2-amino butyric acid, g-Abu, e-Ahx, 6-amino hexanoic acid, Aib, 2-amino isobutyric acid, 3-amino propionic acid, ornithine, norleucine, norvaline, hydroxyproline, sarcosine, citrulline, homocitrulline, cysteic acid, t-butylglycine, t-butylalanine, phenylglycine, cyclohexylalanine, b-alanine, fluoro-amino acids, designer amino acids such as b-methyl amino acids, Ca-methyl amino acids, Na-methyl amino acids, and amino acid analogs in general. Furthermore, the amino acid can be D (dextrorotary) or L (levorotary).

[0179] The invention encompasses polypeptides of the present invention which are differentially modified during or after translation, e.g., by glycosylation, acetylation, phosphorylation, amidation, derivatization by known protecting/blocking groups, proteolytic cleavage, linkage to an antibody molecule or other cellular ligand, etc. Any of numerous chemical modifications may be carried out by known techniques, including but not limited, to specific chemical cleavage by cyanogen bromide, trypsin, chymotrypsin, papain, V8 protease, NaBH₄; acetylation, formylation, oxidation, reduction; metabolic synthesis in the presence of tunicamycin; etc.

[0180] Additional post-translational modifications encompassed by the invention include, for example, e.g., N-linked or O-linked carbohydrate chains, processing of N-terminal or C-terminal ends), attachment of chemical moieties to the amino acid backbone, chemical modifications of N-linked or O-linked carbohydrate chains, and addition or deletion of an N-terminal methionine residue as a result of procaryotic host cell expression. The polypeptides may also be modified with a detectable label, such as an enzymatic, fluorescent, isotopic or affinity label to allow for detection and isolation of the protein.

[0181] Examples of suitable enzymes include horseradish peroxidase, alkaline phosphatase, beta-galactosidase, or acetylcholinesterase; examples of suitable prosthetic group complexes include streptavidin/biotin and avidin/biotin; examples of suitable fluorescent materials include umbelliferone, fluorescein, fluorescein isothiocyanate, rhodamine, dichlorotriazinylamine fluorescein, dansyl chloride or phycoerythrin; an example of a luminescent material includes luminol; examples of bioluminescent materials include luciferase, luciferin, and aequorin; and examples of suitable radioactive material include iodine (¹²¹I, ¹²³I, ¹²⁵I, ¹³¹I), carbon (¹⁴C), sulfur (³⁵S), tritium (³H), indium (¹¹¹In, ¹¹²In, ^{113m}In, ^{115m}In), technetium (⁹⁹Tc,^{99m}Tc), thallium (²⁰¹Ti), gallium (⁶⁸Ga, ⁶⁷Ga), palladium (¹⁰³Pd), molybdenum (⁹⁹Mo), xenon (¹³³Xe), fluorine (¹⁸F), ¹⁵³Sm, ¹⁷⁷Lu, ¹⁵⁹Gd, ¹⁴⁹Pm, ¹⁴⁰La, ¹⁷⁵Yb , ¹⁶⁶Ho, ⁹⁰y, ⁴⁷Sc, ¹⁸⁶Re, ¹⁸⁸Re, ¹⁴²Pr, ¹⁰⁵Rh, and ⁹⁷Ru.

[0182] In specific embodiments, a polypeptide of the present invention or fragment or variant thereof is attached to macrocyclic chelators that associate with radiometal ions, including but not limited to, ¹⁷⁷Lu, ⁹⁰Y, ¹⁶⁶Ho, and ¹⁵³Sm, to polypeptides. In a preferred embodiment, the radiometal ion associated with the macrocyclic chelators is ¹¹¹In. In another preferred embodiment, the radiometal ion associated with the macrocyclic chelator is ⁹⁰Y. In specific embodiments, the macrocyclic chelator is 1,4,7,10-tetraazacyclododecane-N,N′,N″,N′″-tetraacetic acid (DOTA). In other specific embodiments, DOTA is attached to an antibody of the invention or fragment thereof via a linker molecule. Examples of linker molecules useful for conjugating DOTA to a polypeptide are commonly known in the art—see, for example, DeNardo et al., Clin Cancer Res. 4(10):2483-90 (1998); Peterson et al., Bioconjug. Chem. 10(4):553-7 (1999); and Zimmerman et al, Nucl. Med. Biol. 26(8):943-50 (1999); which are hereby incorporated by reference in their entirety.

[0183] As mentioned, the ovarian associated proteins of the invention may be modified by either natural processes, such as posttranslational processing, or by chemical modification techniques which are well known in the art. It will be appreciated that the same type of modification may be present in the same or varying degrees at several sites in a given ovarian associated polypeptide. Ovarian associated polypeptides may be branched, for example, as a result of ubiquitination, and they may be cyclic, with or without branching. Cyclic, branched, and branched cyclic ovarian associated polypeptides may result from posttranslation natural processes or may be made by synthetic methods. Modifications include acetylation, acylation, ADP-ribosylation, amidation, covalent attachment of flavin, covalent attachment of a heme moiety, covalent attachment of a nucleotide or nucleotide derivative, covalent attachment of a lipid or lipid derivative, covalent attachment of phosphotidylinositol, cross-linking, cyclization, disulfide bond formation, demethylation, formation of covalent cross-links, formation of cysteine, formation of pyroglutamate, formylation, gamma-carboxylation, glycosylation, GPI anchor formation, hydroxylation, iodination, methylation, myristoylation, oxidation, pegylation, proteolytic processing, phosphorylation, prenylation, racemization, selenoylation, sulfation, transfer-RNA mediated addition of amino acids to proteins such as arginylation, and ubiquitination. (See, for instance, PROTEINS—STRUCTURE AND MOLECULAR PROPERTIES, 2nd Ed., T. E. Creighton, W. H. Freeman and Company, New York (1993); POSTTRANSLATIONAL COVALENT MODIFICATION OF PROTEINS, B. C. Johnson, Ed., Academic Press, New York, pgs. 1-12 (1983); Seifter et al., Meth. Enzymol. 182:626-646 (1990); Rattan et al., Ann. N.Y. Acad. Sci. 663:48-62 (1992)).

[0184] Also provided by the invention are chemically modified derivatives of the polypeptides of the invention which may provide additional advantages such as increased solubility, stability and circulating time of the polypeptide, or decreased immunogenicity (see U.S. Pat. No. 4,179,337). The chemical moieties for derivitization may be selected from water soluble polymers such as polyethylene glycol, ethylene glycol/propylene glycol copolymers, carboxymethylcellulose, dextran, polyvinyl alcohol and the like. The polypeptides may be modified at random positions within the molecule, or at predetermined positions within the molecule and may include one, two, three or more attached chemical moieties.

[0185] The polymer may be of any molecular weight, and may be branched or unbranched. For polyethylene glycol, the preferred molecular weight is between about 1 kDa and about 100 kDa (the term “about” indicating that in preparations of polyethylene glycol, some molecules will weigh more, some less, than the stated molecular weight) for ease in handling and manufacturing. Other sizes may be used, depending on the desired therapeutic profile (e.g., the duration of sustained release desired, the effects, if any on biological activity, the ease in handling, the degree or lack of antigenicity and other known effects of the polyethylene glycol to a therapeutic protein or analog). For example, the polyethylene glycol may have an average molecular weight of about 200, 500, 1000, 1500, 2000, 2500, 3000, 3500, 4000, 4500, 5000, 5500, 6000, 6500, 7000, 7500, 8000, 8500, 9000, 9500, 10,000, 10,500, 11,000, 11,500, 12,000, 12,500, 13,000, 13,500, 14,000, 14,500, 15,000, 15,500, 16,000, 16,500, 17,000, 17,500, 18,000, 18,500, 19,000, 19,500, 20,000, 25,000, 30,000, 35,000, 40,000, 50,000, 55,000, 60,000, 65,000, 70,000, 75,000, 80,000, 85,000, 90,000, 95,000, or 100,000 kDa.

[0186] As noted above, the polyethylene glycol may have a branched structure. Branched polyethylene glycols are described, for example, in U.S. Pat. No. 5,643,575; Morpurgo et al., Appl. Biochem. Biotechnol. 56:59-72 (1996); Vorobjev et al., Nucleosides Nucleotides 18:2745-2750 (1999); and Caliceti et al., Bioconjug. Chem. 10:638-646 (1999), the disclosures of each of which are incorporated herein by reference.

[0187] The polyethylene glycol molecules (or other chemical moieties) should be attached to the protein with consideration of effects on functional or antigenic domains of the protein. There are a number of attachment methods available to those skilled in the art, such as, for example, the method disclosed in EP 0 401 384 (coupling PEG to G-CSF), herein incorporated by reference; see also Malik et al., Exp. Hematol. 20:1028-1035 (1992), reporting pegylation of GM-CSF using tresyl chloride. For example, polyethylene glycol may be covalently bound through amino acid residues via a reactive group, such as a free amino or carboxyl group. Reactive groups are those to which an activated polyethylene glycol molecule may be bound. The amino acid residues having a free amino group may include lysine residues and the N-terminal amino acid residues; those having a free carboxyl group may include aspartic acid residues glutamic acid residues and the C-terminal amino acid residue. Sulfhydryl groups may also be used as a reactive group for attaching the polyethylene glycol molecules. Preferred for therapeutic purposes is attachment at an amino group, such as attachment at the N-terminus or lysine group.

[0188] As suggested above, polyethylene glycol may be attached to proteins via linkage to any of a number of amino acid residues. For example, polyethylene glycol can be linked to proteins via covalent bonds to lysine, histidine, aspartic acid, glutamic acid, or cysteine residues. One or more reaction chemistries may be employed to attach polyethylene glycol to specific amino acid residues (e.g., lysine, histidine, aspartic acid, glutamic acid, or cysteine) of the protein or to more than one type of amino acid residue (e.g., lysine, histidine, aspartic acid, glutamic acid, cysteine and combinations thereof) of the protein.

[0189] One may specifically desire proteins chemically modified at the N-terminus. Using polyethylene glycol as an illustration of the present composition, one may select from a variety of polyethylene glycol molecules (by molecular weight, branching, etc.), the proportion of polyethylene glycol molecules to protein (polypeptide) molecules in the reaction mix, the type of pegylation reaction to be performed, and the method of obtaining the selected N-terminally pegylated protein. The method of obtaining the N-terminally pegylated preparation (i.e., separating this moiety from other monopegylated moieties if necessary) may be by purification of the N-terminally pegylated material from a population of pegylated protein molecules. Selective proteins chemically modified at the N-terminus modification may be accomplished by reductive alkylation which exploits differential reactivity of different types of primary amino groups (lysine versus the N-terminal) available for derivatization in a particular protein. Under the appropriate reaction conditions, substantially selective derivatization of the protein at the N-terminus with a carbonyl group containing polymer is achieved.

[0190] As indicated above, pegylation of the proteins of the invention may be accomplished by any number of means. For example, polyethylene glycol may be attached to the protein either directly or by an intervening linker. Linkerless systems for attaching polyethylene glycol to proteins are described in Delgado et al., Crit. Rev. Thera. Drug Carrier Sys. 9:249-304 (1992); Francis et al., Intern. J. of Hematol. 68:1-18 (1998); U.S. Pat. No. 4,002,531; U.S. Pat. No. 5,349,052; WO 95/06058; and WO 98/32466, the disclosures of each of which are incorporated herein by reference.

[0191] One system for attaching polyethylene glycol directly to amino acid residues of proteins without an intervening linker employs tresylated MPEG, which is produced by the modification of monmethoxy polyethylene glycol (MPEG) using tresylchloride (ClSO₂CH₂CF₃). Upon reaction of protein with tresylated MPEG, polyethylene glycol is directly attached to amine groups of the protein. Thus, the invention includes protein-polyethylene glycol conjugates produced by reacting proteins of the invention with a polyethylene glycol molecule having a 2,2,2-trifluoreothane sulphonyl group.

[0192] Polyethylene glycol can also be attached to proteins using a number of different intervening linkers. For example, U.S. Pat. No. 5,612,460, the entire disclosure of which is incorporated herein by reference, discloses urethane linkers for connecting polyethylene glycol to proteins. Protein-polyethylene glycol conjugates wherein the polyethylene glycol is attached to the protein by a linker can also be produced by reaction of proteins with compounds such as MPEG-succinimidylsuccinate, MPEG activated with 1,1′-carbonyldiimidazole, MPEG-2,4,5-trichloropenylcarbonate, MPEG-p-nitrophenolcarbonate, and various MPEG-succinate derivatives. A number of additional polyethylene glycol derivatives and reaction chemistries for attaching polyethylene glycol to proteins are described in International Publication No. WO 98/32466, the entire disclosure of which is incorporated herein by reference. Pegylated protein products produced using the reaction chemistries set out herein are included within the scope of the invention.

[0193] The number of polyethylene glycol moieties attached to each protein of the invention (i.e., the degree of substitution) may also vary. For example, the pegylated proteins of the invention may be linked, on average, to 1, 2, 3, 4, 5, 6, 7, 8, 9, 10, 12, 15, 17, 20, or more polyethylene glycol molecules. Similarly, the average degree of substitution within ranges such as 1-3, 2-4, 3-5, 4-6, 5-7, 6-8, 7-9, 8-10, 9-11, 10-12, 11-13, 12-14, 13-15, 14-16, 15-17, 16-18, 17-19, or 18-20 polyethylene glycol moieties per protein molecule. Methods for determining the degree of substitution are discussed, for example, in Delgado et al., Crit. Rev. Thera. Drug Carrier Sys. 9:249-304 (1992).

[0194] The ovarian associated polypeptides of the invention can be recovered and purified from chemical synthesis and recombinant cell cultures by standard methods which include, but are not limited to, ammonium sulfate or ethanol precipitation, acid extraction, anion or cation exchange chromatography, phosphocellulose chromatography, hydrophobic interaction chromatography, affinity chromatography, hydroxylapatite chromatography and lectin chromatography. Most preferably, high performance liquid chromatography (“HPLC”) is employed for purification. Well known techniques for refolding protein may be employed to regenerate active conformation when the polypeptide is denatured during isolation and/or purification.

[0195] Ovarian associated polynucleotides and polypeptides may be used in accordance with the present invention for a variety of applications, particularly those that make use of the chemical and biological properties of ovarian associated antigens. Among these are applications in the detection, prevention, diagnosis and/or treatment of diseases associated with the ovaries and/or breast, including, but not limited to, neoplastic disorders (e.g., ovarian Krukenberg tumor, malignant mixed Mullerian tumors, and/or as described under “Hyperproliferative Disorders” below), infectious diseases (e.g., mastitis, oophoritis, and/or as described under “Infectious Diseases” below), and inflammatory diseases (e.g., abcesses and/or as described under “Immune Disorders” below) and as described in “Reproductive System Disorders” below. Additional applications relate to diagnosis and to treatment of disorders of cells, tissues and organisms. These aspects of the invention are discussed further below.

[0196] In a preferred embodiment, polynucleotides expressed in a particular tissue type are used to detect, diagnose, treat, prevent and/or prognose disorders associated with the tissue type.

[0197] The polypeptides of the invention may be in monomers or multimers (i.e., dimers, trimers, tetramers and higher multimers). Accordingly, the present invention relates to monomers and multimers of the polypeptides of the invention, their preparation, and compositions (preferably, Therapeutics) containing them. In specific embodiments, the polypeptides of the invention are monomers, dimers, trimers or tetramers. In additional embodiments, the multimers of the invention are at least dimers, at least trimers, or at least tetramers.

[0198] Multimers encompassed by the invention may be homomers or heteromers. As used herein, the term homomer refers to a multimer containing only polypeptides corresponding to a protein of the invention (e.g., the amino acid sequence of SEQ ID NO: Y, an amino acid sequence encoded by SEQ ID NO: X or the complement of SEQ ID NO: X, the amino acid sequence encoded by the portion of SEQ ID NO: X as defined in columns 8 and 9 of Table 2, and/or an amino acid sequence encoded by cDNA contained in Clone ID NO: Z (including fragments, variants, splice variants, and fusion proteins, corresponding to these as described herein)). These homomers may contain polypeptides having identical or different amino acid sequences. In a specific embodiment, a homomer of the invention is a multimer containing only polypeptides having an identical amino acid sequence. In another specific embodiment, a homomer of the invention is a multimer containing polypeptides having different amino acid sequences. In specific embodiments, the multimer of the invention is a homodimer (e.g., containing two polypeptides having identical or different amino acid sequences) or a homotrimer (e.g., containing three polypeptides having identical and/or different amino acid sequences). In additional embodiments, the homomeric multimer of the invention is at least a homodimer, at least a homotrimer, or at least a homotetramer.

[0199] As used herein, the term heteromer refers to a multimer containing two or more heterologous polypeptides (i.e., polypeptides of different proteins) in addition to the polypeptides of the invention. In a specific embodiment, the multimer of the invention is a heterodimer, a heterotrimer, or a heterotetramer. In additional embodiments, the heteromeric multimer of the invention is at least a heterodimer, at least a heterotrimer, or at least a heterotetramer.

[0200] Multimers of the invention may be the result of hydrophobic, hydrophilic, ionic and/or covalent associations and/or may be indirectly linked by, for example, liposome formation. Thus, in one embodiment, multimers of the invention, such as, for example, homodimers or homotrimers, are formed when polypeptides of the invention contact one another in solution. In another embodiment, heteromultimers of the invention, such as, for example, heterotrimers or heterotetramers, are formed when polypeptides of the invention contact antibodies to the polypeptides of the invention (including antibodies to the heterologous polypeptide sequence in a fusion protein of the invention) in solution. In other embodiments, multimers of the invention are formed by covalent associations with and/or between the polypeptides of the invention. Such covalent associations may involve one or more amino acid residues contained in the polypeptide sequence (e.g., that recited in SEQ ID NO: Y, encoded by the portion of SEQ ID NO: X as defined in columns 8 and 9 of Table 2, and/or encoded by the cDNA contained in Clone ID NO: Z). In one instance, the covalent associations are cross-linking between cysteine residues located within the polypeptide sequences which interact in the native (i.e., naturally occurring) polypeptide. In another instance, the covalent associations are the consequence of chemical or recombinant manipulation. Alternatively, such covalent associations may involve one or more amino acid residues contained in the heterologous polypeptide sequence in a fusion protein. In one example, covalent associations are between the heterologous sequence contained in a fusion protein of the invention (see, e.g., U.S. Pat. No. 5,478,925). In a specific example, the covalent associations are between the heterologous sequence contained in a Fc fusion protein of the invention (as described herein). In another specific example, covalent associations of fusion proteins of the invention are between heterologous polypeptide sequence from another protein that is capable of forming covalently associated multimers, such as for example, osteoprotegerin (see, e.g., International Publication NO: WO 98/49305, the contents of which are herein incorporated by reference in its entirety). In another embodiment, two or more polypeptides of the invention are joined through peptide linkers. Examples include those peptide linkers described in U.S. Pat. No. 5,073,627 (hereby incorporated by reference). Proteins comprising multiple polypeptides of the invention separated by peptide linkers may be produced using conventional recombinant DNA technology.

[0201] Another method for preparing multimer polypeptides of the invention involves use of polypeptides of the invention fused to a leucine zipper or isoleucine zipper polypeptide sequence. Leucine zipper and isoleucine zipper domains are polypeptides that promote multimerization of the proteins in which they are found. Leucine zippers were originally identified in several DNA-binding proteins (Landschulz et al., Science 240:1759, (1988)), and have since been found in a variety of different proteins. Among the known leucine zippers are naturally occurring peptides and derivatives thereof that dimerize or trimerize. Examples of leucine zipper domains suitable for producing soluble multimeric proteins of the invention are those described in PCT application WO 94/10308, hereby incorporated by reference. Recombinant fusion proteins comprising a polypeptide of the invention fused to a polypeptide sequence that dimerizes or trimerizes in solution are expressed in suitable host cells, and the resulting soluble multimeric fusion protein is recovered from the culture supernatant using techniques known in the art.

[0202] Trimeric polypeptides of the invention may offer the advantage of enhanced biological activity. Preferred leucine zipper moieties and isoleucine moieties are those that preferentially form trimers. One example is a leucine zipper derived from lung surfactant protein D (SPD), as described in Hoppe et al. (FEBS Letters 344:191, (1994)) and in U.S. patent application Ser. No. 08/446,922, hereby incorporated by reference. Other peptides derived from naturally occurring trimeric proteins may be employed in preparing trimeric polypeptides of the invention.

[0203] In another example, proteins of the invention are associated by interactions between Flag® polypeptide sequence contained in fusion proteins of the invention containing Flag® polypeptide sequence. In a further embodiment, proteins of the invention are associated by interactions between heterologous polypeptide sequence contained in Flag® fusion proteins of the invention and anti-Flag® antibody.

[0204] The multimers of the invention may be generated using chemical techniques known in the art. For example, polypeptides desired to be contained in the multimers of the invention may be chemically cross-linked using linker molecules and linker molecule length optimization techniques known in the art (see, e.g., U.S. Pat. No. 5,478,925, which is herein incorporated by reference in its entirety). Additionally, multimers of the invention may be generated using techniques known in the art to form one or more inter-molecule cross-links between the cysteine residues located within the sequence of the polypeptides desired to be contained in the multimer (see, e.g., U.S. Pat. No. 5,478,925, which is herein incorporated by reference in its entirety). Further, polypeptides of the invention may be routinely modified by the addition of cysteine or biotin to the C-terminus or N-terminus of the polypeptide and techniques known in the art may be applied to generate multimers containing one or more of these modified polypeptides (see, e.g., U.S. Pat. No. 5,478,925, which is herein incorporated by reference in its entirety). Additionally, techniques known in the art may be applied to generate liposomes containing the polypeptide components desired to be contained in the multimer of the invention (see, e.g., U.S. Pat. No. 5,478,925, which is herein incorporated by reference in its entirety).

[0205] Alternatively, multimers of the invention may be generated using genetic engineering techniques known in the art. In one embodiment, polypeptides contained in multimers of the invention are produced recombinantly using fusion protein technology described herein or otherwise known in the art (see, e.g., U.S. Pat. No. 5,478,925, which is herein incorporated by reference in its entirety). In a specific embodiment, polynucleotides coding for a homodimer of the invention are generated by ligating a polynucleotide sequence encoding a polypeptide of the invention to a sequence encoding a linker polypeptide and then further to a synthetic polynucleotide encoding the translated product of the polypeptide in the reverse orientation from the original C-terminus to the N-terminus (lacking the leader sequence) (see, e.g., U.S. Pat. No. 5,478,925, which is herein incorporated by reference in its entirety). In another embodiment, recombinant techniques described herein or otherwise known in the art are applied to generate recombinant polypeptides of the invention which contain a transmembrane domain (or hydrophobic or signal peptide) and which can be incorporated by membrane reconstitution techniques into liposomes (see, e.g., U.S. Pat. No. 5,478,925, which is herein incorporated by reference in its entirety).

[0206] Antibodies

[0207] Further polypeptides of the invention relate to antibodies and T-cell antigen receptors (TCR) which immunospecifically bind a polypeptide, polypeptide fragment, or variant of the invention (e.g., a polypeptide or fragment or variant of the amino acid sequence of SEQ ID NO: Y or a polypeptide encoded by the cDNA contained in Clone ID NO: Z, and/or an epitope, of the present invention) as determined by immunoassays well known in the art for assaying specific antibody-antigen binding. Antibodies of the invention include, but are not limited to, polyclonal, monoclonal, multispecific, human, humanized or chimeric antibodies, single chain antibodies, Fab fragments, F(ab′) fragments, fragments produced by a Fab expression library, anti-idiotypic (anti-Id) antibodies (including, e.g., anti-Id antibodies, to antibodies of the invention), intracellularly-made antibodies (i.e., intrabodies), and epitope-binding fragments of any of the above. The term “antibody,” as used herein, refers to immunoglobulin molecules and immunologically active portions of immunoglobulin molecules, i.e., molecules that contain an antigen binding site that immunospecifically binds an antigen. The immunoglobulin molecules of the invention can be of any type (e.g., IgG, IgE, IgM, IgD, IgA and IgY), class (e.g., IgG1, IgG2, IgG3, IgG4, IgA1 and IgA2) or subclass of immunoglobulin molecule. In preferred embodiments, the immunoglobulin molecules of the invention are IgG1. In other preferred embodiments, the immunoglobulin molecules of the invention are IgG4.

[0208] Most preferably the antibodies are human antigen-binding antibody fragments of the present invention and include, but are not limited to, Fab, Fab′ and F(ab′)2, Fd, single-chain Fvs (scFv), single-chain antibodies, disulfide-linked Fvs (sdFv) and fragments comprising either a VL or VH domain. Antigen-binding antibody fragments, including single-chain antibodies, may comprise the variable region(s) alone or in combination with the entirety or a portion of the following: hinge region, CH1, CH2, and CH3 domains. Also included in the invention are antigen-binding fragments also comprising any combination of variable region(s) with a hinge region, CH1, CH2, and CH3 domains. The antibodies of the invention may be from any animal origin including birds and mammals. Preferably, the antibodies are human, murine (e.g., mouse and rat), donkey, ship rabbit, goat, guinea pig, camel, horse, or chicken. As used herein, “human” antibodies include antibodies having the amino acid sequence of a human immunoglobulin and include antibodies isolated from human immunoglobulin libraries or from animals transgenic for one or more human immunoglobulin and that do not express endogenous immunoglobulins, as described infra and, for example in, U.S. Pat. No. 5,939,598 by Kucherlapati et al.

[0209] The antibodies of the present invention may be monospecific, bispecific, trispecific or of greater multispecificity. Multispecific antibodies may be specific for different epitopes of a polypeptide of the present invention or may be specific for both a polypeptide of the present invention as well as for a heterologous epitope, such as a heterologous polypeptide or solid support material. See, e.g., PCT publications WO 93/17715; WO 92/08802; WO 91/00360; WO 92/05793; Tutt, et al., J. Immunol. 147:60-69 (1991); U.S. Pat. Nos. 4,474,893; 4,714,681; 4,925,648; 5,573,920; 5,601,819; Kostelny et al., J. Immunol. 148:1547-1553 (1992).

[0210] Antibodies of the present invention may be described or specified in terms of the epitope(s) or portion(s) of a polypeptide of the present invention which they recognize or specifically bind. The epitope(s) or polypeptide portion(s) may be specified as described herein, e.g., by N-terminal and C-terminal positions, or by size in contiguous amino acid residues, or listed in the Tables and Figures. Preferred epitopes of the invention include those shown in column 7 of Table 1, as well as polynucleotides that encode these epitopes. Antibodies, which specifically bind any epitope or polypeptide of the present invention may also be excluded. Therefore, the present invention includes antibodies that specifically bind polypeptides of the present invention, and allows for the exclusion of the same.

[0211] Antibodies of the present invention may also be described or specified in terms of their cross-reactivity. Antibodies that do not bind any other analog, ortholog, or homolog of a polypeptide of the present invention are included. Antibodies that bind polypeptides with at least 95%, at least 90%, at least 85%, at least 80%, at least 75%, at least 70%, at least 65%, at least 60%, at least 55%, and at least 50% identity (as calculated using methods known in the art and described herein) to a polypeptide of the present invention are also included in the present invention. In specific embodiments, antibodies of the present invention cross-react with murine, rat and/or rabbit homologs of human proteins and the corresponding epitopes thereof. Antibodies that do not bind polypeptides with less than 95%, less than 90%, less than 85%, less than 80%, less than 75%, less than 70%, less than 65%, less than 60%, less than 55%, and less than 50% identity (as calculated using methods known in the art and described herein) to a polypeptide of the present invention are also included in the present invention. In a specific embodiment, the above-described cross-reactivity is with respect to any single specific antigenic or immunogenic polypeptide, or combination(s) of 2, 3, 4, 5, or more of the specific antigenic and/or immunogenic polypeptides disclosed herein. Further included in the present invention are antibodies which bind polypeptides encoded by polynucleotides which hybridize to a polynucleotide of the present invention under stringent hybridization conditions (as described herein). Antibodies of the present invention may also be described or specified in terms of their binding affinity to a polypeptide of the invention. Preferred binding affinities include those with a dissociation constant or Kd less than 5×10⁻² M, 10⁻² M, 5×10⁻³ M, 10⁻³ M, 5×10⁻⁴ M, 10⁻⁴ M, 5×10⁻⁵ M, 10⁻⁵ M, 5×10⁻⁶ M, 10⁻⁶ M, 5×10⁻⁷ M, 10⁷ M, 5×10⁻⁸ M, 10⁻⁸ M, 5×10⁻⁹ M, 10⁻⁹ M, 5×10⁻¹⁰ M, 10⁻¹⁰ M, 5×10⁻¹¹ M, 10⁻¹¹ M, 5×10⁻¹² M, 10⁻¹² M, 5×10⁻¹³ M, 10⁻¹³ M, 5×10⁻¹⁴ M, 10⁻¹⁴ M, 5×10⁻¹⁵ M, or 10⁻¹⁵ M.

[0212] The invention also provides antibodies that competitively inhibit binding of an antibody to an epitope of the invention as determined by any method known in the art for determining competitive binding, for example, the immunoassays described herei-n. In preferred embodiments, the antibody competitively inhibits binding to the epitope by at least 95%, at least 90%, at least 85 %, at least 80%, at least 75%, at least 70%, at least 60%, or at least 50%.

[0213] Antibodies of the present invention may act as agonists or antagonists of the polypeptides of the present invention. For example, the present invention includes antibodies which disrupt the receptor/ligand interactions with the polypeptides of the invention either partially or fully. Preferably, antibodies of the present invention bind an antigenic epitope disclosed herein, or a portion thereof. The invention features both receptor-specific antibodies and ligand-specific antibodies. The invention also features receptor-specific antibodies, which do not prevent ligand binding but prevent receptor activation. Receptor activation (i.e., signaling) may be determined by techniques described herein or otherwise known in the art. For example, receptor activation can be determined by detecting the phosphorylation (e.g., tyrosine or serine/threonine) of the receptor or its substrate by immunoprecipitation followed by western blot analysis (for example, as described supra). In specific embodiments, antibodies are provided that inhibit ligand activity or receptor activity by at least 95%, at least 90%, at least 85%, at least 80%, at least 75%, at least 70%, at least 60%, or at least 50% of the activity in absence of the antibody.

[0214] The invention also features receptor-specific antibodies which both prevent ligand binding and receptor activation as well as antibodies that recognize the receptor-ligand complex, and, preferably, do not specifically recognize the unbound receptor or the unbound ligand. Likewise, included in the invention are neutralizing antibodies which bind the ligand and prevent binding of the ligand to the receptor, as well as antibodies which bind the ligand, thereby preventing receptor activation, but do not prevent the ligand from binding the receptor. Further included in the invention are antibodies, which activate the receptor. These antibodies may act as receptor agonists, i.e., potentiate or activate either all or a subset of the biological activities of the ligand-mediated receptor activation, for example, by inducing dimerization of the receptor. The antibodies may be specified as agonists, antagonists or inverse agonists for biological activities comprising the specific biological activities of the peptides of the invention disclosed herein. The above antibody agonists can be made using methods known in the art. See, e.g., PCT publication WO 96/40281; U.S. Pat. No. 5,811,097; Deng et al., Blood 92(6):1981-1988 (1998); Chen et al., Cancer Res. 58(16):3668-3678 (1998); Harrop et al., J. Immunol. 161(4):1786-1794 (1998); Zhu et al., Cancer Res. 58(15):3209-3214 (1998); Yoon et al., J. Immunol. 160(7):3170-3179 (1998); Prat et al., J. Cell. Sci. 111(Pt2):237-247 (1998); Pitard et al., J. Immunol. Methods 205(2):177-190 (1997); Liautard et al., Cytokine 9(4):233-241 (1997); Carlson et al., J. Biol. Chem. 272(17):11295-11301 (1997); Taryman et al., Neuron 14(4):755-762 (1995); Muller et al., Structure 6(9):1153-1167 (1998); Bartunek et al., Cytokine 8(1):14-20 (1996) (which are all incorporated by reference herein in their entireties).

[0215] Antibodies of the present invention may be used, for example, to purify, detect, and target the polypeptides of the present invention, including both in vitro and in vivo diagnostic and therapeutic methods. For example, the antibodies have utility in immunoassays for qualitatively and quantitatively measuring levels of the polypeptides of the present invention in biological samples. See, e.g., Harlow et al., Antibodies: A Laboratory Manual, (Cold Spring Harbor Laboratory Press, 2nd ed. 1988); incorporated by reference herein in its entirety.

[0216] As discussed in more detail below, the antibodies of the present invention may be used either alone or in combination with other compositions. The antibodies may further be recombinantly fused to a heterologous polypeptide at the N- or C-terminus or chemically conjugated (including covalent and non-covalent conjugations) to polypeptides or other compositions. For example, antibodies of the present invention may be recombinantly fused or conjugated to molecules useful as labels in detection assays and effector molecules such as heterologous polypeptides, drugs, radionuclides, or toxins. See, e.g., PCT publications WO 92/08495; WO 91/14438; WO 89/12624; U.S. Pat. No. 5,314,995; and EP 396,387; the disclosures of which are incorporated herein by reference in their entireties.

[0217] The antibodies of the invention include derivatives that are modified, i.e., by the covalent attachment of any type of molecule to the antibody such that covalent attachment does not prevent the antibody from generating an anti-idiotypic response. For example, but not by way of limitation, the antibody derivatives include antibodies that have been modified, e.g., by glycosylation, acetylation, pegylation, phosphylation, amidation, derivatization by known protecting/blocking groups, proteolytic cleavage, linkage to a cellular ligand or other protein, etc. Any of numerous chemical modifications may be carried out by known techniques, including, but not limited to specific chemical cleavage, acetylation, formylation, metabolic synthesis of tunicamycin, etc. Additionally, the derivative may contain one or more non-classical amino acids.

[0218] The antibodies of the present invention may be generated by any suitable method known in the art. Polyclonal antibodies to an antigen-of-interest can be produced by various procedures well known in the art. For example, a polypeptide of the invention can be administered to various host animals including, but not limited to, rabbits, mice, rats, etc. to induce the production of sera containing polyclonal antibodies specific for the antigen. Various adjuvants may be used to increase the immunological response, depending on the host species, and include but are not limited to, Freund's (complete and incomplete), mineral gels such as aluminum hydroxide, surface active substances such as lysolecithin, pluronic polyols, polyanions, peptides, oil emulsions, keyhole limpet hemocyanins, dinitrophenol, and potentially useful human adjuvants such as BCG (bacille Calmette-Guerin) and corynebacterium parvum. Such adjuvants are also well known in the art.

[0219] Monoclonal antibodies can be prepared using a wide variety of techniques known in the art including the use of hybridoma, recombinant, and phage display technologies, or a combination thereof. For example, monoclonal antibodies can be produced using hybridoma techniques including those known -in the art and taught, for example, in Harlow et al., Antibodies: A Laboratory Manual, (Cold Spring Harbor Laboratory Press, 2nd ed. 1988); Hammerling, et al., in: Monoclonal Antibodies and T-Cell Hybridomas 563-681 (Elsevier, N.Y., 1981) (said references incorporated by reference in their entireties). The term “monoclonal antibody” as used herein is not limited to antibodies produced through hybridoma technology. The term “monoclonal antibody” refers to an antibody that is derived from a single clone, including any eukaryotic, prokaryotic, or phage clone, and not the method by which it is produced.

[0220] Methods for producing and screening for specific antibodies using hybridoma technology are routine and well known in the art and are discussed in detail in the Examples. In a non-limiting example, mice can be immunized with a polypeptide of the invention or a cell expressing such peptide. Once an immune response is detected, e.g., antibodies specific for the antigen are detected in the mouse serum, the mouse spleen is harvested and splenocytes isolated. The splenocytes are then fused by well known techniques to any suitable myeloma cells, for example cells from cell line SP20 available from the ATCC. Hybridomas are selected and cloned by limited dilution. The hybridoma clones are then assayed by methods known in the art for cells that secrete antibodies capable of binding a polypeptide of the invention. Ascites fluid, which generally contains high levels of antibodies, can be generated by immunizing mice with positive hybridoma clones.

[0221] Accordingly, the present invention provides methods of generating monoclonal antibodies as well as antibodies produced by the method comprising culturing a hybridoma cell secreting an antibody of the invention wherein, preferably, the hybridoma is generated by fusing splenocytes isolated from a mouse immunized with an antigen of the invention with myeloma cells and then screening the hybridomas resulting from the fusion for hybridoma clones that secrete an antibody able to bind a polypeptide of the invention.

[0222] Another well known method for producing both polyclonal and monoclonal human B cell lines is transformation using Epstein Barr Virus (EBV). Protocols for generating EBV-transformed B cell lines are commonly known in the art, such as, for example, the protocol outlined in Chapter 7.22 of Current Protocols in Immunology, Coligan et al., Eds., 1994, John Wiley & Sons, NY, which is hereby incorporated in its entirety by reference herein. The source of B cells for transformation-is commonly human peripheral blood, but B cells for transformation may also be derived from other sources including, but not limited to, lymph nodes, tonsil, spleen, tumor tissue, and infected tissues. Tissues are generally made into single cell suspensions prior to EBV transformation. Additionally, steps may be taken to either physically remove or inactivate T cells (e.g., by treatment with cyclosporin A) in B cell-containing samples, because T cells from individuals seropositive for anti-EBV antibodies can suppress B cell immortalization by EBV.

[0223] In general, the sample containing human B cells is innoculated with EBV, and cultured for 3-4 weeks. A typical source of EBV is the culture supernatant of the B95-8 cell line (ATCC #VR-1492). Physical signs of EBV transformation can generally be seen towards the end of the 3-4 week culture period. By phase-contrast microscopy, transformed cells may appear large, clear, hairy and tend to aggregate in tight clusters of cells. Initially, EBV lines are generally polyclonal. However, over prolonged periods of cell cultures, EBV lines may become monoclonal or polyclonal as a result of the selective outgrowth of particular B cell clones. Alternatively, polyclonal EBV transformed lines may be subcloned (e.g., by limiting dilution culture) or fused with a suitable fusion partner and plated at limiting dilution to obtain monoclonal B cell lines. Suitable fusion partners for EBV transformed cell lines include mouse myeloma cell lines (e.g., SP2/0, X63-Ag8.653), heteromyeloma cell lines (human×mouse; e.g, SPAM-8, SBC-H20, and CB-F7), and human cell lines (e.g., GM 1500, SKO-007, RPMI 8226, and KR-4). Thus, the present invention also provides a method of generating polyclonal or monoclonal human antibodies against polypeptides of the invention or fragments thereof, comprising EBV-transformation of human B cells.

[0224] Antibody fragments, which recognize specific epitopes may be generated by known techniques. For example, Fab and F(ab′)2 fragments of the invention may be produced by proteolytic cleavage of immunoglobulin molecules, using enzymes such as papain (to produce Fab fragments) or pepsin (to produce F(ab′)2 fragments). F(ab′)2 fragments contain the variable region, the light chain constant region and the CH1 domain of the heavy chain. For example, the antibodies of the present invention can also be generated using various phage display methods known in the art and as discussed in detail in the Examples (e.g., Example 10). In phage display methods, functional antibody domains are displayed on the surface of phage particles, which carry the polynucleotide sequences encoding them. In a particular embodiment, such phage can be utilized to display antigen binding domains expressed from a repertoire or combinatorial antibody library (e.g., human or murine). Phage expressing an antigen binding domain that binds the antigen of interest can be selected or identified with antigen, e.g., using labeled antigen or antigen bound or captured to a solid surface or bead. Phage used in these methods are typically filamentous phage including fd and M13 binding domains expressed from phage with Fab, Fv or disulfide stabilized Fv antibody domains recombinantly fused to either the phage gene III or gene VIII protein. Examples of phage display methods that can be used to make the antibodies of the present invention include those disclosed in Brinkman et al., J. Immunol. Methods 182:41-50 (1995); Ames et al., J. Immunol. Methods 184:177-186 (1995); Kettleborough et al., Eur. J. Immunol. 24:952-958 (1994); Persic et al., Gene 187 9-18 (1997); Burton et al., Advances in Immunology 57:191-280 (1994); PCT application No. PCT/GB91/01134; PCT publications WO 90/02809; WO 91/10737; WO 92/01047; WO 92/18619; WO 93/11236; WO 95/15982; WO 95/20401; and U.S. Pat. Nos. 5,698,426; 5,223,409; 5,403,484; 5,580,717; 5,427,908; 5,750,753; 5,821,047; 5,571,698; 5,427,908; 5,516,637; 5,780,225; 5,658,727; 5,733,743 and 5,969,108; each of which is incorporated herein by reference in its entirety.

[0225] As described in the above references, after phage selection, the antibody coding regions from the phage can be isolated and used to generate whole antibodies, including human antibodies, or any other desired antigen binding fragment, and expressed in any desired host, including mammalian cells, insect cells, plant cells, yeast, and bacteria, e.g., as described in detail below. For example, techniques to recombinantly produce Fab, Fab′ and F(ab′)2 fragments can also be employed using methods known in the art such as those disclosed in PCT publication WO 92/22324; Mullinax et al., BioTechniques 12(6):864-869 (1992); and Sawai et al., AJRI 34:26-34 (1995); and Better et al., Science 240:1041-1043 (1988) (said references incorporated by reference in their entireties).

[0226] Examples of techniques which can be used to produce single-chain Fvs and antibodies include those described in U.S. Pat. Nos. 4,946,778 and 5,258,498; Huston et al., Methods in Enzymology 203:46-88 (1991); Shu et al., PNAS 90:7995-7999 (1993); and Skerra et al., Science 240:1038-1040 (1988). For some uses, including in vivo use of antibodies in humans and in vitro detection assays, it may be preferable to use chimeric, humanized, or human antibodies. A chimeric antibody is a molecule in which different portions of the antibody are derived from different animal species, such as antibodies having a variable region derived from a murine monoclonal antibody and a human immunoglobulin constant region. Methods for producing chimeric antibodies are known in the art. See e.g., Morrison, Science 229:1202 (1985); Oi et al., BioTechniques 4:214 (1986); Gillies et al., (1989) J. Immunol. Methods 125:191-202; U.S. Pat. Nos. 5,807,715; 4,816,567; and 4,816397, which are incorporated herein by reference in their entirety. Humanized antibodies are antibody molecules from non-human species antibody that binds the desired antigen having one or more complementarity determining regions (CDRs) from the non-human species and a framework regions from a human immunoglobulin molecule. Often, framework residues in the human framework regions will be substituted with the corresponding residue from the CDR donor antibody to alter, preferably improve, antigen binding. These framework substitutions are identified by methods well known in the art, e.g., by modeling of the interactions of the CDR and framework residues to identify framework residues important for antigen binding and sequence comparison to identify unusual framework residues at particular positions. (See, e.g., Queen et al., U.S. Pat. No. 5,585,089; Riechmann et al., Nature 332:323 (1988), which are incorporated herein by reference in their entireties.) Antibodies can be humanized using a variety of techniques known in the art including, for example, CDR-grafting (EP 239,400; PCT publication WO 91/09967; U.S. Pat. Nos. 5,225,539; 5,530,101; and 5,585,089), veneering or resurfacing (EP 592,106; EP 519,596; Padlan, Molecular Immunology 28(4/5):489-498 (1991); Studnicka et al., Protein Engineering 7(6):805-814 (1994); Roguska. et al., PNAS 91:969-973 (1994)), and chain shuffling (U.S. Pat. No. 5,565,332).

[0227] Completely human antibodies are particularly desirable for therapeutic treatment of human patients. Human antibodies can be made by a variety of methods known in the art including phage display methods described above using antibody libraries derived from human immunoglobulin sequences. See also, U.S. Pat. Nos. 4,444,887 and 4,716,111; and PCT publications WO 98/46645, WO 98/50433, WO 98/24893, WO 98/16654, WO 96/34096, WO 96/33735, and WO 91/10741; each of which is incorporated herein by reference in its entirety.

[0228] Human antibodies can also be produced using transgenic mice which are incapable of expressing functional endogenous immunoglobulins, but which can express human immunoglobulin genes. For example, the human heavy and light chain immunoglobulin gene complexes may be introduced randomly or by homologous recombination into mouse embryonic stem cells. Alternatively, the human variable region, constant region, and diversity region may be introduced into mouse embryonic stem cells in addition to the human heavy and light chain genes. The mouse heavy and light chain immunoglobulin genes may be rendered non-functional separately or simultaneously with the introduction of human immunoglobulin loci by homologous recombination. In particular, homozygous deletion of the JH region prevents endogenous antibody production. The modified embryonic stem cells are expanded and microinjected into blastocysts to produce chimeric mice. The chimeric mice are then bred to produce homozygous offspring, which express human antibodies. The transgenic mice are immunized in the normal fashion with a selected antigen, e.g., all or a portion of a polypeptide of the invention. Monoclonal antibodies directed against the antigen can be obtained from the immunized, transgenic mice using conventional hybridoma technology. The human immunoglobulin transgenes harbored by the transgenic mice rearrange during B cell differentiation, and subsequently undergo class switching and somatic mutation. Thus, using such a technique, it is possible to produce therapeutically useful IgG, IgA, IgM and IgE antibodies. For an overview of this technology for producing human antibodies, see Lonberg and Huszar, Int. Rev. Immunol. 13:65-93 (1995). For a detailed discussion of this technology for producing human antibodies and human monoclonal antibodies and protocols for producing such antibodies, see, e.g., PCT publications WO 98/24893; WO 92/01047; WO 96/34096; WO 96/33735; European Patent No. 0 598 877; U.S. Pat. Nos. 5,413,923; 5,625,126; 5,633,425; 5,569,825; 5,661,016; 5,545,806; 5,814,318; 5,885,793; 5,916,771; 5,939,598; 6,075,181 and 6,114,598, which are incorporated by reference herein in their entirety. In addition, companies such as Abgenix, Inc. (Freemont, Calif.) and Genpharm (San Jose, Calif.) can be engaged to provide human antibodies directed against a selected antigen using technology similar to that described above.

[0229] Completely human antibodies which recognize a selected epitope can be generated using a technique referred to as “guided selection.” In this approach a selected non-human monoclonal antibody, e.g., a mouse antibody, is used to guide the selection of a completely human antibody recognizing the same epitope. (Jespers et al., Bio/technology 12:899-903 (1988)).

[0230] Further, antibodies to the polypeptides of the invention can, in turn, be utilized to generate anti-idiotype antibodies that “mimic” polypeptides of the invention using techniques well known to those skilled in the art. (See, e.g., Greenspan & Bona, FASEB J. 7(5):437-444; (1989) and Nissinoff, J. Immunol. 147(8):2429-2438 (1991)). For example, antibodies which bind to and competitively inhibit polypeptide multimerization and/or binding of a polypeptide of the invention to a ligand can be used to generate anti-idiotypes that “mimic” the polypeptide multimerization and/or binding domain and, as a consequence, bind to and neutralize polypeptide and/or its ligand. Such neutralizing anti-idiotypes or Fab fragments of such anti-idiotypes can be used in therapeutic regimens to neutralize polypeptide ligand/receptor. For example, such anti-idiotypic antibodies can be used to bind a polypeptide of the invention and/or to bind its ligand(s)/receptor(s), and thereby block its biological activity. Alternatively, antibodies which bind to and enhance polypeptide multimerization and/or binding, and/or receptor/ligand multimerization, binding and/or signaling can be used to generate anti-idiotypes that function as agonists of a polypeptide of the invention and/or its ligand/receptor. Such agonistic anti-idiotypes or Fab fragments of such anti-idiotypes can be used in therapeutic regimens as agonists of the polypeptides of the invention or its ligand(s)/receptor(s). For example, such anti-idiotypic antibodies can be used to bind a polypeptide of the invention and/or to bind its ligand(s)/receptor(s), and thereby promote or enhance its biological activity.

[0231] Intrabodies of the invention can be produced using methods known in the art, such as those disclosed and reviewed in Chen et al., Hum. Gene Ther. 5:595-601 (1994); Marasco, W. A., Gene Ther. 4:11-15 (1997); Rondon and Marasco, Annu. Rev. Microbiol. 51:257-283 (1997); Proba et al., J. Mol. Biol. 275:245-253 (1998); Cohen et al., Oncogene 17:2445-2456 (1998); Ohage and Steipe, J. Mol. Biol. 291:1119-1128 (1999); Ohage et al., J. Mol. Biol. 291:1129-1134 (1999); Wirtz and Steipe, Protein Sci. 8:2245-2250 (1999); Zhu et al., J. Immunol. Methods 231:207-222 (1999); and references cited therein.

[0232] Polynucleotides Encoding Antibodies

[0233] The invention further provides polynucleotides comprising a nucleotide sequence encoding an antibody of the invention and fragments thereof. The invention also encompasses polynucleotides that hybridize under stringent or alternatively, under lower stringency hybridization conditions, e.g., as defined supra, to polynucleotides that encode an antibody, preferably, that specifically binds to a polypeptide of the invention, preferably, an antibody that binds to a polypeptide having the amino acid sequence of SEQ ID NO: Y, to a polypeptide encoded by a portion of SEQ ID NO: X as defined in columns 8 and 9 of Table 2, and/or to a polypeptide encoded by the cDNA contained in Clone ID NO: Z.

[0234] The polynucleotides may be obtained, and the nucleotide sequence of the polynucleotides determined, by any method known in the art. For example, if the nucleotide sequence of the antibody is known, a polynucleotide encoding the antibody may be assembled from chemically synthesized oligonucleotides (e.g., as described in Kutmeier et al., BioTechniques 17:242 (1994)), which, briefly, involves the synthesis of overlapping oligonucleotides containing portions of the sequence encoding the antibody, annealing and ligating of those oligonucleotides, and then amplification of the ligated oligonucleotides by PCR.

[0235] Alternatively, a polynucleotide encoding an antibody may be generated from nucleic acid from a suitable source. If a clone containing a nucleic acid encoding a particular antibody is not available, but the sequence of the antibody molecule is known, a nucleic acid encoding the immunoglobulin may be chemically synthesized or obtained from a suitable source (e.g., an antibody cDNA library, or a cDNA library generated from, or nucleic acid, preferably poly A+ RNA, isolated from, any tissue or cells expressing the antibody, such as hybridoma cells selected to express an antibody of the invention) by PCR amplification using synthetic primers hybridizable to the 3′ and 5′ ends of the sequence or by cloning using an oligonucleotide probe specific for the particular gene sequence to identify, e.g., a cDNA clone from a cDNA library that encodes the antibody. Amplified nucleic acids generated by PCR may then be cloned into replicable cloning vectors using any method well known in the art.

[0236] Once the nucleotide sequence and corresponding amino acid sequence of the antibody is determined, the nucleotide sequence of the antibody may be manipulated using methods well known in the art for the manipulation of nucleotide sequences, e.g., recombinant DNA techniques, site directed mutagenesis, PCR, etc. (see, for example, the techniques described in Sambrook et al., 1990, Molecular Cloning, A Laboratory Manual, 2d Ed., Cold Spring Harbor Laboratory, Cold Spring Harbor, N.Y. and Ausubel et al., eds., 1998, Current Protocols in Molecular Biology, John Wiley & Sons, NY, which are both incorporated by reference herein in their entireties ), to generate antibodies having a different amino acid sequence, for example to create amino acid substitutions, deletions, and/or insertions.

[0237] In a specific embodiment, the amino acid sequence of the heavy and/or light chain variable domains may be inspected to identify the sequences of the complementarity determining regions (CDRs) by methods that are well know in the art, e.g., by comparison to known amino acid sequences of other heavy and light chain variable regions to determine the regions of sequence hypervariability. Using routine recombinant DNA techniques, one or more of the CDRs may be inserted within framework regions, e.g., into human framework regions to humanize a non-human antibody, as described supra. The framework regions may be naturally occurring or consensus framework regions, and preferably human framework regions (see, e.g., Chothia et al., J. Mol. Biol. 278: 457-479 (1998) for a listing of human framework regions). Preferably, the polynucleotide generated by the combination of the framework regions and CDRs encodes an antibody that specifically binds a polypeptide of the invention. Preferably, as discussed supra, one or more amino acid substitutions may be made within the framework regions, and, preferably, the amino acid substitutions improve binding of the antibody to its antigen. Additionally, such methods may be used to make amino acid substitutions or deletions of one or more variable region cysteine residues participating in an intrachain disulfide bond to generate antibody molecules lacking one or more intrachain disulfide bonds. Other alterations to the polynucleotide are encompassed by the present invention and within the skill of the art.

[0238] In addition, techniques developed for the production of “chimeric antibodies” (Morrison et al., Proc. Natl. Acad. Sci. 81:851-855 (1984); Neuberger et al., Nature 312:604-608 (1984); Takeda et al., Nature 314:452-454 (1985)) by splicing genes from a mouse antibody molecule of appropriate antigen specificity together with genes from a human antibody molecule of appropriate biological activity can be used. As described supra, a chimeric antibody is a molecule in which different portions are derived from different animal species, such as those having a variable region derived from a murine mAb and a human immunoglobulin constant region, e.g., humanized antibodies.

[0239] Alternatively, techniques described for the production of single chain antibodies (U.S. Pat. No. 4,946,778; Bird, Science 242:423-42 (1988); Huston et al., Proc. Natl. Acad. Sci. USA 85:5879-5883 (1988); and Ward et al., Nature 334:544-54 (1989)) can be adapted to produce single chain antibodies. Single chain antibodies are formed by linking the heavy and light chain fragments of the Fv region via an amino acid bridge, resulting in a single chain polypeptide. Techniques for the assembly of functional Fv fragments in E. coli may also be used (Skerra et al., Science 242:1038-1041 (1988)).

[0240] Methods of Producing Antibodies

[0241] The antibodies of the invention can be produced by any method known in the art for the synthesis of antibodies, in particular, by chemical synthesis or preferably, by recombinant expression techniques. Methods of producing antibodies include, but are not limited to, hybridoma technology, EBV transformation, and other methods discussed herein as well as through the use recombinant DNA technology, as discussed below.

[0242] Recombinant expression of an antibody of the invention, or fragment, derivative or analog thereof, (e.g., a heavy or light chain of an antibody of the invention or a single chain antibody of the invention), requires construction of an expression vector containing a polynucleotide that encodes the antibody. Once a polynucleotide encoding an antibody molecule or a heavy or light chain of an antibody, or portion thereof (preferably containing the heavy or light chain variable domain), of the invention has been obtained, the vector for the production of the antibody molecule may be produced by recombinant DNA technology using techniques well known in the art. Thus, methods for preparing a protein by expressing a polynucleotide containing an antibody encoding nucleotide sequence are described herein. Methods which are well known to those skilled in the art can be used to construct expression vectors containing antibody coding sequences and appropriate transcriptional and translational control signals. These methods include, for example, in vitro recombinant DNA techniques, synthetic techniques, and in vivo genetic recombination. The invention, thus, provides replicable vectors comprising a nucleotide sequence encoding an antibody molecule of the invention, or a heavy or light chain thereof, or a heavy or light chain variable domain, operably linked to a promoter. Such vectors may include the nucleotide sequence encoding the constant region of the antibody molecule (see, e.g., PCT Publication WO 86/05807; PCT Publication WO 89/01036; and U.S. Pat. No. 5,122,464) and the variable domain of the antibody may be cloned into such a vector for expression of the entire heavy or light chain.

[0243] The expression vector is transferred to a host cell by conventional techniques and the transfected cells are then cultured by conventional techniques to produce an antibody of the invention. Thus, the invention includes host cells containing a polynucleotide encoding an antibody of the invention, or a heavy or light chain thereof, or a single chain antibody of the invention, operably linked to a heterologous promoter. In preferred embodiments for the expression of double-chained antibodies, vectors encoding both the heavy and light chains may be co-expressed in the host cell for expression of the entire immunoglobulin molecule, as detailed below.

[0244] A variety of host-expression vector systems may be utilized to express the antibody molecules of the invention. Such host-expression systems represent vehicles by which the coding sequences of interest may be produced and subsequently purified, but also represent cells which may, when transformed or transfected with the appropriate nucleotide coding sequences, express an antibody molecule of the invention in situ. These include but are not limited to microorganisms such as bacteria (e.g., E. coli, B. subtilis) transformed with recombinant bacteriophage DNA, plasmid DNA or cosmid DNA expression vectors containing antibody coding sequences; yeast (e.g., Saccharomyces, Pichia) transformed with recombinant yeast expression vectors containing antibody coding sequences; insect cell systems infected with recombinant virus expression vectors (e.g., baculovirus) containing antibody coding sequences; plant cell systems infected with recombinant virus expression vectors (e.g., cauliflower mosaic virus, CaMV; tobacco mosaic virus, TMV) or transformed with recombinant plasmid expression vectors (e.g., Ti plasmid) containing antibody coding sequences; or mammalian cell systems (e.g., COS, CHO, BHK, 293, 3T3 cells) harboring recombinant expression constructs containing promoters derived from the genome of mammalian cells (e.g., metallothionein promoter) or from mammalian viruses (e.g., the adenovirus late promoter; the vaccinia virus 7.5K promoter). Preferably, bacterial cells such as Escherichia coli, and more preferably, eukaryotic cells, especially for the expression of whole recombinant antibody molecule, are used for the expression of a recombinant antibody molecule. For example, mammalian cells such as Chinese hamster ovary cells (CHO), in conjunction with a vector such as the major intermediate early gene promoter element from human cytomegalovirus is an effective expression system for antibodies (Foecking et al., Gene 45:101 (1986); Cockett et al., Bio/Technology 8:2 (1990)).

[0245] In bacterial systems, a number of expression vectors may be advantageously selected depending upon the use intended for the antibody molecule being expressed. For example, when a large quantity of such a protein is to be produced, for the generation of phannaceutical compositions of an antibody molecule, vectors which direct the expression of high levels of fusion protein products that are readily purified may be desirable. Such vectors include, but are not limited, to the E. coli expression vector pUR278 (Ruther et al., EMBO J. 2:1791 (1983)), in which the antibody coding sequence may be ligated individually into the vector in frame with the lac Z coding region so that a fusion protein is produced; pIN vectors (Inouye & Inouye, Nucleic Acids Res. 13:3101-3109 (1985); Van Heeke & Schuster, J. Biol. Chem. 24:5503-5509 (1989)); and the like. pGEX vectors may also be used to express foreign polypeptides as fusion proteins with glutathione S-transferase (GST). In general, such fusion proteins are soluble and can easily be purified from lysed cells by adsorption and binding to matrix glutathione-agarose beads followed by elution in the presence of free glutathione. The pGEX vectors are designed to include thrombin or factor Xa protease cleavage sites so that the cloned target gene product can be released from the GST moiety.

[0246] In an insect system, Autographa califomica nuclear polyhedrosis virus (AcNPV) is used as a vector to express foreign genes. The virus grows in Spodoptera frugiperda cells. The antibody coding sequence may be cloned individually into non-essential regions (for example the polyhedrin gene) of the virus and placed under control of an AcNPV promoter (for example the polyhedrin promoter).

[0247] In mammalian host cells, a number of viral-based expression systems may be utilized. In cases where an adenovirus is used as an expression vector, the antibody coding sequence of interest may be ligated to an adenovirus transcription/translation control complex, e.g., the late promoter and tripartite leader sequence. This chimeric gene may then be inserted in the adenovirus genome by in vitro or in vivo recombination. Insertion in a non-essential region of the viral genome (e.g., region E1 or E3) will result in a recombinant virus that is viable and capable of expressing the antibody molecule in infected hosts. (e.g., see Logan & Shenk, Proc. Natl. Acad. Sci. USA 81:355-359 (1984)). Specific initiation signals may also be required for efficient translation of inserted antibody coding sequences. These signals include the ATG initiation codon and adjacent sequences. Furthermore, the initiation codon must be in phase with the reading frame of the desired coding sequence to ensure translation of the entire insert. These exogenous translational control signals and initiation codons can be of a variety of origins, both natural and synthetic. The efficiency of expression may be enhanced by the inclusion of appropriate transcription enhancer elements, transcription terminators, etc. (see Bittner et al., Methods in Enzymol. 153:51-544 (1987)).

[0248] In addition, a host cell strain may be chosen which modulates the expression of the inserted sequences, or modifies and processes the gene product in the specific fashion desired. Such modifications (e.g., glycosylation) and processing (e.g., cleavage) of protein products may be important for the function of the protein. Different host cells have characteristic and specific mechanisms for the post-translational processing and modification of proteins and gene products. Appropriate cell lines or host systems can be chosen to ensure the correct modification and processing of the foreign protein expressed. To this end, eukaryotic host cells which possess the cellular machinery for proper processing of the primary transcript, glycosylation, and phosphorylation of the gene product may be used. Such mammalian host cells include but are not limited to CHO, VERY, BHK, Hela, COS, MDCK, 293, 3T3, WI38, and in particular, breast cancer cell lines such as, for example, BT483, Hs578T, HTB2, BT20 and T47D, and normal mammary gland cell line such as, for example, CRL7030 and Hs578Bst.

[0249] For long-term, high-yield production of recombinant proteins, stable expression is preferred. For example, cell lines, which stably express the antibody molecule may be engineered. Rather than using expression vectors which contain viral origins of replication, host cells can be transformed with DNA controlled by appropriate expression control elements (e.g., promoter, enhancer, sequences, transcription terminators, polyadenylation sites, etc.), and a selectable marker. Following the introduction of the foreign DNA, engineered cells may be allowed to grow for 1-2 days in an enriched media, and then are switched to a selective media. The selectable marker in the recombinant plasmid confers resistance to the selection and allows cells to stably integrate the plasmid into their chromosomes and grow to form foci which in turn can be cloned and expanded into cell lines. This method may advantageously be used to engineer cell lines, which express the antibody molecule. Such engineered cell lines may be particularly useful in screening and evaluation of compounds that interact directly or indirectly with the antibody molecule.

[0250] A number of selection systems may be used, including but not limited to the herpes simplex virus thymidine kinase (Wigler et al., Cell 11:223 (1977)), hypoxanthine-guanine phosphoribosyltransferase (Szybalska & Szybalski, Proc. Natl. Acad. Sci. USA 48:202 (1992)), and adenine phosphoribosyltransferase (Lowy et al., Cell 22:817 (1980)) genes can be employed in tk-, hgprt- or aprt-cells, respectively. Also, antimetabolite resistance can be used as the basis of selection for the following genes: dhfr, which confers resistance to methotrexate (Wigler et al., Natl. Acad. Sci. USA 77:357 (1980); O'Hare et al., Proc. Natl. Acad. Sci. USA 78:1527 (1981)); gpt, which confers resistance to mycophenolic acid (Mulligan & Berg, Proc. Natl. Acad. Sci. USA 78:2072 (1981)); neo, which confers resistance to the aminoglycoside G-418 Clinical Pharmacy 12:488-505; Wu and Wu, Biotherapy 3:87-95 (1991); Tolstoshev, Ann. Rev. Pharmacol. Toxicol. 32:573-596 (1993); Mulligan, Science 260:926-932 (1993); and Morgan and Anderson, Ann. Rev. Biochem. 62:191-217 (1993); TIB TECH 11(5):155-215 (1993)); and hygro, which confers resistance to hygromycin (Santerre et al., Gene 30:147 (1984)). Methods commonly known in the art of recombinant DNA technology may be routinely applied to select the desired recombinant clone, and such methods are described, for example, in Ausubel et al. (eds.), Current Protocols in Molecular Biology, John Wiley & Sons, NY (1993); Kriegler, Gene Transfer and Expression, A Laboratory Manual, Stockton Press, NY (1990); and in Chapters 12 and 13, Dracopoli et al. (eds), Current Protocols in Human Genetics, John Wiley & Sons, NY (1994); Colberre-Garapin et al., J. Mol. Biol. 150:1 (1981), which are incorporated by reference herein in their entireties.

[0251] The expression levels of an antibody molecule can be increased by vector amplification (for a review, see Bebbington and Hentschel, The use of vectors based on gene amplification for the expression of cloned genes in mammalian cells in DNA cloning, Vol.3. (Academic Press, New York, 1987)). When a marker in the vector system expressing antibody is amplifiable, increase in the level of inhibitor present in culture of host cell will increase the number of copies of the marker gene. Since the amplified region is associated with the antibody gene, production of the antibody will also increase (Crouse et al., Mol. Cell. Biol. 3:257 (1983)).

[0252] Vectors, which use glutamine synthase (GS) or DHFR as the selectable markers can be amplified in the presence of the drugs methionine sulphoximine or methotrexate, respectively. An advantage of glutamine synthase based vectors are the availabilty of cell lines (e.g., the murine myeloma cell line, NSO) which are glutamine synthase negative. Glutamine synthase expression systems can also function in glutamine synthase expressing cells (e.g., Chinese Hamster Ovary (CHO) cells) by providing additional inhibitor to prevent the functioning of the endogenous gene. A glutamine synthase expression system and components thereof are detailed in PCT publications: WO87/04462; WO86/05807; WO89/01036; WO89/10404; and WO91/06657, which are incorporated in their entireties by reference herein. Additionally, glutamine synthase expression vectors that may be used according to the present invention are commercially available from suplliers, including, for example Lonza Biologics, Inc. (Portsmouth, N.H.). Expression and production of monoclonal antibodies using a GS expression system in murine myeloma cells is described in Bebbington et al., Bio/technology 10:169(1992) and in Biblia and Robinson Biotechnol. Prog. 11:1 (1995) which are incorporated in their entirities by reference herein.

[0253] The host cell may be co-transfected with two expression vectors of the invention, the first vector encoding a heavy chain derived polypeptide and the second vector encoding a light chain derived polypeptide. The two vectors may contain identical selectable markers, which enable equal expression of heavy and light chain polypeptides. Alternatively, a single vector may be used which encodes, and is capable of expressing, both heavy and light chain polypeptides. In such situations, the light chain should be placed before the heavy chain to avoid an excess of toxic free heavy chain (Proudfoot, Nature 322:52 (1986); Kohler, Proc. Natl. Acad. Sci. USA 77:2197 (1980)). The coding sequences for the heavy and light chains may comprise cDNA or genomic DNA.

[0254] Once an antibody molecule of the invention has been produced by an animal, chemically synthesized, or recombinantly expressed, it may be purified by any method known in the art for purification of an immunoglobulin molecule, for example, by chromatography (e.g., ion exchange, affinity, particularly by affinity for the specific antigen after Protein A, and sizing column chromatography), centrifigation, differential solubility, or by any other standard technique for the purification of proteins. In addition, the antibodies of the present invention or fragments thereof can be fused to heterologous polypeptide sequences described herein or otherwise known in the art, to facilitate purification.

[0255] The present invention encompasses antibodies recombinantly fused or chemically conjugated (including both covalently and non-covalently conjugations) to a polypeptide (or portion thereof, preferably at least 10, 20, 30, 40, 50, 60, 70, 80, 90 or 100 amino acids of the polypeptide) of the present invention to generate fusion proteins. The fusion does not necessarily need to be direct, but may occur through linker sequences. The antibodies may be specific for antigens other than polypeptides (or portion thereof, preferably at least 10, 20, 30, 40, 50, 60, 70, 80, 90 or 100 amino acids of the polypeptide) of the present invention. For example, antibodies may be used to target the polypeptides of the present invention to particular cell types, either in vitro or in vivo, by fusing or conjugating the polypeptides of the present invention to antibodies specific for particular cell surface receptors. Antibodies fused or conjugated to the polypeptides of the present invention may also be used in in vitro immunoassays and purification methods using methods known in the art. See e.g., Harbor et al., supra, and PCT publication WO 93/21232; EP 439,095; Naramura et al., Immunol. Lett. 39:91-99 (1994); U.S. Pat. 5,474,981; Gillies et al., PNAS 89:1428-1432 (1992); Fell et al., J. Immunol. 146:2446-2452 (1991), which are incorporated by reference in their entireties.

[0256] The present invention further includes compositions comprising the polypeptides of the present invention fused or conjugated to antibody domains other than the variable regions. For example, the polypeptides of the present invention may be fused or conjugated to an antibody Fc region, or portion thereof. The antibody portion fused to a polypeptide of the present invention may comprise the constant region, hinge region, CH1 domain, CH2 domain, and CH3 domain or any combination of whole domains or portions thereof The polypeptides may also be fused or conjugated to the above antibody portions to form multimers. For example, Fc portions fused to the polypeptides of the present invention can form dimers through disulfide bonding between the Fc portions. Higher multimeric forms can be made by fusing the polypeptides to portions of IgA and IgM. Methods for fusing or conjugating the polypeptides of the present invention to antibody portions are known in the art. See, e.g., U.S. Pat. Nos. 5,336,603; 5,622,929; 5,359,046; 5,349,053; 5,447,851; 5,112,946; EP 307,434; EP 367,166; PCT publications WO 96/04388; WO 91/06570; Ashkenazi et al., Proc. Natl. Acad. Sci. USA 88:10535-10539 (1991); Zheng et al., J. Immunol. 154:5590-5600 (1995); and Vil et al., Proc. Natl. Acad. Sci. USA 89:11337-11341 (1992) (said references incorporated by reference in their entireties).

[0257] As discussed, supra, the polypeptides corresponding to a polypeptide, polypeptide fragment, or a variant of SEQ ID NO: Y may be fused or conjugated to the above antibody portions to increase the in vivo half life of the polypeptides or for use in immunoassays using methods known in the art. Further, the polypeptides corresponding to SEQ ID NO: Y may be fused or conjugated to the above antibody portions to facilitate purification. One reported example describes chimeric proteins consisting of the first two domains of the human CD4-polypeptide and various domains of the constant regions of the heavy or light chains of mammalian immunoglobulins. See EP 394,827; Traunecker et al., Nature 331:84-86 (1988). The polypeptides of the present invention fused or conjugated to an antibody having disulfide-linked dimeric structures (due to the IgG) may also be more efficient in binding and neutralizing other molecules, than the monomeric secreted protein or protein fragment alone. See, for example, Fountoulakis et al., J. Biochem. 270:3958-3964 (1995). In many cases, the Fe part in a fusion protein is beneficial in therapy and diagnosis, and thus can result in, for example, improved pharmacokinetic properties. See, for example, EP A 232,262. Alternatively, deleting the Fc part after the fusion protein has been expressed, detected, and purified, would be desired. For example, the Fe portion may hinder therapy and diagnosis if the fusion protein is used as an antigen for immunizations. In drug discovery, for example, human proteins, such as hIL-5, have been fused with Fe portions for the purpose of high-throughput screening assays to identify antagonists of hIL-5. (See, Bennett et al., J. Molecular Recognition 8:52-58 (1995); Johanson et al., J. Biol. Chem. 270:9459-9471 (1995)).

[0258] Moreover, the antibodies or fragments thereof of the present invention can be fused to marker sequences, such as a peptide to facilitate purification. In preferred embodiments, the marker amino acid sequence is a hexa-histidine peptide, such as the tag provided in a pQE vector (QIAGEN, Inc., 9259 Eton Avenue, Chatsworth, Calif., 91311), among others, many of which are commercially available. As described in Gentz et al., Proc. Natl. Acad. Sci. USA 86:821-824 (1989), for instance, hexa-histidine provides for convenient purification of the fusion protein. Other peptide tags useful for purification include, but are not limited to, the “HA” tag, which corresponds to an epitope derived from the influenza hemagglutinin protein (Wilson et al., Cell 37:767 (1984)) and the “flag” tag.

[0259] The present invention further encompasses antibodies or fragments thereof conjugated to a diagnostic or therapeutic agent. The antibodies can be used diagnostically to, for example, monitor the development or progression of a tumor as part of a clinical testing procedure to, e.g., determine the efficacy of a given treatment regimen. Detection can be facilitated by coupling the antibody to a detectable substance. Examples of detectable substances include various enzymes, prosthetic groups, fluorescent materials, luminescent materials, bioluminescent materials, radioactive materials, positron emitting metals using various positron emission tomographies, and nonradioactive paramagnetic metal ions. The detectable substance may be coupled or conjugated either directly to the antibody (or fragment thereof) or indirectly, through an intermediate (such as, for example, a linker known in the art) using techniques known in the art. See, for example, U.S. Pat. No. 4,741,900 for metal ions which can be conjugated to antibodies for use as diagnostics according to the present invention.

[0260] Further, an antibody or fragment thereof may be conjugated to a therapeutic moiety such as a cytotoxin, e.g., a cytostatic or cytocidal agent, a therapeutic agent or a radioactive metal ion, e.g., alpha-emitters such as, for example, 213Bi. A cytotoxin or cytotoxic agent includes any agent that is detrimental to cells. Examples include paclitaxol, cytochalasin B, gramicidin D, ethidium bromide, emetine, mitomycin, etoposide, tenoposide, vincristine, vinblastine, colchicin, doxorubicin, daunorubicin, dihydroxy anthracin dione, mitoxantrone, mithramycin, actinomycin D, 1-dehydrotestosterone, glucocorticoids, procaine, tetracaine, lidocaine, propranolol, and puromycin and analogs or homologs thereof. Therapeutic agents include, but are not limited to, antimetabolites (e.g., methotrexate, 6-mercaptopurine, 6-thioguanine, cytarabine, 5-fluorouracil decarbazine), alkylating agents (e.g., mechlorethamine, thioepa chlorambucil, melphalan, carmustine (BSNU) and lomustine (CCNU), cyclothosphamide, busulfan, dibromomannitol, streptozotocin, mitomycin C, and cis-dichlorodiamine platinum (II) (DDP) cisplatin), anthracyclines (e.g., daunorubicin (formerly daunomycin) and doxorubicin), antibiotics (e.g., dactinomycin (formerly actinomycin), bleomycin, mithramycin, and anthramycin (AMC)), and anti-mitotic agents (e.g., vincristine and vinblastine).

[0261] The conjugates of the invention can be used for modifying a given biological response, the therapeutic agent or drug moiety is not to be construed as limited to classical chemical therapeutic agents. For example, the drug moiety may be a protein or polypeptide possessing a desired biological activity. Such proteins may include, for example, a toxin such as abrin, ricin A, pseudomonas exotoxin, or diphtheria toxin; a protein such as tumor necrosis factor, a-interferon, β-interferon, nerve growth factor, platelet derived growth factor, tissue plasminogen activator, an apoptotic agent, e.g., TNF-alpha, TNF-beta, AIM I (See, International Publication No. WO 97/33899), AIM II (See, International Publication No. WO 97/34911), Fas Ligand (Takahashi et al., Int. Immunol., 6:1567-1574 (1994)), VEGI (See, International Publication No. WO 99/23105), a thrombotic agent or an anti-angiogenic agent, e.g., angiostatin or endostatin; or, biological response modifiers such as, for example, lymphokines, interleukin-1 (“IL-1”), interleukin-2 (“IL-2”), interleukin-6 (“IL-6”), granulocyte macrophage colony stimulating factor (“GM-CSF”), granulocyte colony stimulating factor (“G-CSF”), or other growth factors.

[0262] Antibodies may also be attached to solid supports, which are particularly useful for immunoassays or purification of the target antigen. Such solid supports include, but are not limited to, glass, cellulose, polyacrylamide, nylon, polystyrene, polyvinyl chloride or polypropylene.

[0263] Techniques for conjugating such therapeutic moiety to antibodies are well known. See, for example, Arnon et al., “Monoclonal Antibodies For Immunotargeting Of Drugs In Cancer Therapy”, in Monoclonal Antibodies And Cancer Therapy, Reisfeld et al. (eds.), pp. 243-56 (Alan R. Liss, Inc. 1985); Hellstrom et al., “Antibodies For Drug Delivery”, in Controlled Drug Delivery (2nd Ed.), Robinson et al. (eds.), pp. 623-53 (Marcel Dekker, Inc. 1987); Thorpe, “Antibody Carriers Of Cytotoxic Agents In Cancer Therapy: A Review”, in Monoclonal Antibodies '84: Biological And Clinical Applications, Pinchera et al. (eds.), pp. 475-506 (1985); “Analysis, Results, And Future Prospective Of The Therapeutic Use Of Radiolabeled Antibody In Cancer Therapy”, in Monoclonal Antibodies For Cancer Detection And Therapy, Baldwin et al. (eds.), pp. 303-16 (Academic Press 1985), and Thorpe et al., “The Preparation And Cytotoxic Properties Of Antibody-Toxin Conjugates”, Immunol. Rev. 62:119-58 (1982).

[0264] Alternatively, an antibody can be conjugated to a second antibody to form an antibody heteroconjugate as described by Segal in U.S. Pat. No. 4,676,980, which is incorporated herein by reference in its entirety.

[0265] An antibody, with or without a therapeutic moiety conjugated to it, administered alone or in combination with cytotoxic factor(s) and/or cytokine(s) can be used as a therapeutic.

[0266] Immunophenotyping

[0267] The antibodies of the invention may be utilized for immunophenotyping of cell lines and biological samples. Translation products of the genes of the present invention may be useful as cell specific markers, or more specifically as cellular markers that are differentially expressed at various stages of differentiation and/or maturation of particular cell types. Monoclonal antibodies directed against a specific epitope, or combination of epitopes, will allow for the screening of cellular populations expressing the marker. Various techniques can be utilized using monoclonal antibodies to screen for cellular populations expressing the marker(s), and include magnetic separation using antibody-coated magnetic beads, “panning” with antibody attached to a solid matrix (i.e., plate), and flow cytometry (See, e.g., U.S. Pat. 5,985,660; and Morrison et al., Cell, 96:737-49 (1999)).

[0268] These techniques allow for the screening of particular populations of cells, such as might be found with hematological malignancies (i.e. minimal residual disease (MRD) in acute leukemic patients) and “non-self” cells in transplantations to prevent Graft-versus-Host Disease (GVHD). Alternatively, these techniques allow for the screening of hematopoietic stem and progenitor cells capable of undergoing proliferation and/or differentiation, as might be found in human umbilical cord blood.

[0269] Assays For Antibody Binding

[0270] The antibodies of the invention may be assayed for immunospecific binding by any method known in the art. The immunoassays which can be used include but are not limited to competitive, and non-competitive assay systems using techniques such as western blots, radioimmunoassays, ELISA (enzyme linked immunosorbent assay), “sandwich” immunoassays, immunoprecipitation assays, precipitin reactions, gel diffusion precipitin reactions, immunodiffusion assays, agglutination assays, complement-fixation assays, immunoradiometric assays, fluorescent immunoassays, and protein A immunoassays, to name but a few. Such assays are routine and well known in the art (see, e.g., Ausubel et al, eds, 1994, Current Protocols in Molecular Biology, Vol. 1, John Wiley & Sons, Inc., New York, which is incorporated by reference herein in its entirety). Exemplary immunoassays are described briefly below (but are not intended by way of limitation).

[0271] Immunoprecipitation protocols generally comprise lysing a population of cells in a lysis buffer such as RIPA buffer (1% NP-40 or Triton X-100, 1% sodium deoxycholate, 0.1% SDS, 0.15 M NaCl, 0.01 M sodium phosphate at pH 7.2, 1% Trasylol) supplemented with protein phosphatase and/or protease inhibitors (e.g., EDTA, PMSF, aprotinin, sodium vanadate), adding the antibody of interest to the cell lysate, incubating for a period of time (e.g., 1-4 hours) at 4° C., adding protein A and/or protein G sepharose beads to the cell lysate, incubating for about an hour or more at 4° C., washing the beads in lysis buffer and resuspending the beads in SDS/sample buffer. The ability of the antibody of interest to immunoprecipitate a particular antigen can be assessed by, e.g., western blot analysis. One of skill in the art would be knowledgeable as to the parameters that can be modified to increase the binding of the antibody to an antigen and decrease the background (e.g., pre-clearing the cell lysate with sepharose beads). For further discussion regarding immunoprecipitation protocols see, e.g., Ausubel et al., eds., (1994), Current Protocols in Molecular Biology, Vol. 1, John Wiley & Sons, Inc., New York, section 10.16.1.

[0272] Western blot analysis generally comprises preparing protein samples, electrophoresis of the protein samples in a polyacrylamide gel (e.g., 8%-20% SDS-PAGE depending on the molecular weight of the antigen), transferring the protein sample from the polyacrylamide gel to a membrane such as nitrocellulose, PVDF or nylon, blocking the membrane in blocking solution (e.g., PBS with 3% BSA or non-fat milk), washing the membrane in washing buffer (e.g., PBS-Tween 20), blocking the membrane with primary antibody (the antibody of interest) diluted in blocking buffer, washing the membrane in washing buffer, blocking the membrane with a secondary antibody (which recognizes the primary antibody, e.g., an anti-human antibody) conjugated to an enzymatic substrate (e.g., horseradish peroxidase or alkaline phosphatase) or radioactive molecule (e.g., 32P or 125I) diluted in blocking buffer, washing the membrane in wash buffer, and detecting the presence of the antigen. One of skill in the art would be knowledgeable as to the parameters that can be modified to increase the signal detected and to reduce the background noise. For further discussion regarding western blot protocols see, e.g., Ausubel et al., eds., (1994), Current Protocols in Molecular Biology, Vol. 1, John Wiley & Sons, Inc., New York, section 10.8.1.

[0273] ELISAs comprise preparing antigen, coating the well of a 96 well microtiter plate with the antigen, adding the antibody of interest conjugated to a detectable compound such as an enzymatic substrate (e.g., horseradish peroxidase or alkaline phosphatase) to the well and incubating for a period of time, and detecting the presence of the antigen. In ELISAs the antibody of interest does not have to be conjugated to a detectable compound; instead, a second antibody (which recognizes the antibody of interest) conjugated to a detectable compound may be added to the well. Further, instead of coating the well with the antigen, the antibody may be coated to the well. In this case, a second antibody conjugated to a detectable compound may be added following the addition of the antigen of interest to the coated well. One of skill in the art would be knowledgeable as to the parameters that can be modified to increase the signal detected as well as other variations of ELISAs known in the art. For further discussion regarding ELISAs see, e.g., Ausubel et al., eds, (1994), Current Protocols in Molecular Biology, Vol. 1, John Wiley & Sons, Inc., New York, section 11.2.1.

[0274] The binding affinity of an antibody to an antigen and the off-rate of an antibody-antigen interaction can be determined by competitive binding assays. One example of a competitive binding assay is a radioimmunoassay comprising the incubation of labeled antigen (e.g., 3H or 125I) with the antibody of interest in the presence of increasing amounts of unlabeled antigen, and the detection of the antibody bound to the labeled antigen. The affinity of the antibody of interest for a particular antigen and the binding off-rates can be determined from the data by scatchard plot analysis. Competition with a second antibody can also be determined using radioimmunoassays. In this case, the antigen is incubated with antibody of interest conjugated to a labeled compound (e.g., 3H or 125I) in the presence of increasing amounts of an unlabeled second antibody.

[0275] Antibodies of the invention may be characterized using immunocytochemisty methods on cells (e.g., mammalian cells, such as CHO cells) transfected with a vector enabling the expression of an ovarian antigen or with vector alone using techniques commonly known in the art. Antibodies that bind ovarian antigen transfected cells, but not vector-only transfected cells, are ovarian antigen specific.

[0276] Therapeutic Uses

[0277] The present invention is further directed to antibody-based therapies which involve administering antibodies of the invention to an animal, preferably a mammal, and most preferably a human, patient for treating one or more of the disclosed diseases, disorders, or conditions. Therapeutic compounds of the invention include, but are not limited to, antibodies of the invention (including fragments, analogs and derivatives thereof as described herein) and nucleic acids encoding antibodies of the invention (including fragments, analogs and derivatives thereof and anti-idiotypic antibodies as described herein). The antibodies of the invention can be used to treat, inhibit or prevent diseases, disorders or conditions associated with aberrant expression and/or activity of a polypeptide of the invention, including, but not limited to, any one or more of the diseases, disorders, or conditions described herein. The treatment and/or prevention of diseases, disorders, or conditions associated with aberrant expression and/or activity of a polypeptide of the invention includes, but is not limited to, alleviating symptoms associated with those diseases, disorders or conditions. Antibodies of the invention may be provided in pharmaceutically acceptable compositions as known in the art or as described herein.

[0278] In a specific and preferred embodiment, the present invention is directed to antibody-based therapies which involve administering antibodies of the invention to an animal, preferably a mammal, and most preferably a human, patient for treating one or more of the diseases, disorders, or conditions of the ovaries and/or breast, including, but not limited to, neoplastic disorders (e.g., ovarian Krukenberg tumor, malignant mixed Mullerian tumors, and/or as described under “Hyperproliferative Disorders” below), infectious diseases (e.g., mastitis, oophoritis, and/or as described under “Infectious Diseases” below), and inflammatory diseases (e.g., abcesses and/or as described under “Immune Disorders” below) and as described in “Reproductive System Disorders” below. Therapeutic compounds of the invention include, but are not limited to, antibodies of the invention (e.g., antibodies directed to the full length protein expressed on the cell surface of a mammalian cell; antibodies directed to an epitope of a colon cancer associated polypeptide of the invention (such as, a linear epitope (shown in Table 1, column 7) or a conformational epitope), including fragments, analogs and derivatives thereof as described herein) and nucleic acids encoding antibodies of the invention (including fragments, analogs and derivatives thereof and anti-idiotypic antibodies as described herein). The antibodies of the invention can be used to treat, inhibit or prevent diseases, disorders or conditions associated with aberrant expression and/or activity of a polypeptide of the invention, including, but not limited to, any one or more of the diseases, disorders, or conditions of the ovaries and/or breast, particularly ovarian and/or breast cancer, described herein. The treatment and/or prevention of diseases, disorders, or conditions of the ovaries and/or breast that are associated with aberrant expression and/or activity of a polypeptide of the invention includes, but is not limited to, alleviating symptoms associated with those diseases, disorders or conditions. Antibodies of the invention may be provided in pharmaceutically acceptable compositions as known in the art or as described herein.

[0279] A summary of the ways in which the antibodies of the present invention may be used therapeutically includes binding polynucleotides or polypeptides of the present invention locally or systemically in the body or by direct cytotoxicity of the antibody, e.g. as mediated by complement (CDC) or by effector cells (ADCC). Some of these approaches are described in more detail below. Armed with the teachings provided herein, one of ordinary skill in the art will know how to use the antibodies of the present invention for diagnostic, monitoring or therapeutic purposes without undue experimentation.

[0280] The antibodies of this invention may be advantageously utilized in combination with other monoclonal or chimeric antibodies, or with lymphokines or hematopoietic growth factors (such as, e.g., IL-2, IL-3 and IL-7), for example, which serve to increase the number or activity of effector cells which interact with the antibodies.

[0281] The antibodies of the invention may be administered alone or in combination with other types of treatments (e.g., radiation therapy, chemotherapy, hormonal therapy, immunotherapy and anti-tumor agents). Generally, administration of products of a species origin or species reactivity (in the case of antibodies) that is the same species as that of the patient is preferred. Thus, in a preferred embodiment, human antibodies, fragments derivatives, analogs, or nucleic acids, are administered to a human patient for therapy or prophylaxis.

[0282] It is preferred to use high affinity and/or potent in vivo inhibiting and/or neutralizing antibodies against polypeptides or polynucleotides of the present invention, fragments or regions thereof, for both immunoassays directed to and therapy of disorders related to polynucleotides or polypeptides, including fragments thereof, of the present invention. Such antibodies, fragments, or regions, will preferably have an affinity for polynucleotides or polypeptides of the invention, including fragments thereof. Preferred binding affinities include those with a dissociation constant or Kd less than 5×10⁻² M, 10⁻² M, 5×10⁻³ M, 10⁻³ M, 5×10⁻⁴ M, 10⁻⁴ M, 5×10⁻⁵ M, 10⁻⁵ M, 5×10⁻⁶ M, 10⁻⁶ M, 5×10⁻⁷ M, 10⁻⁷ M, 5×10⁻⁸ M, 10⁻⁸ M, 5×10⁻⁹ M, 10⁻⁹ M, 5×10⁻¹⁰ M, 10⁻¹⁰ M, 5×10⁻¹¹ M, 10⁻¹¹ M, 5×10⁻¹² M, 10⁻¹² M, 5×10⁻¹³ M, 10⁻¹³ M, 5×10⁻¹⁴ M, 10⁻¹⁴ M, 5×10⁻¹⁵ M, and 10⁻¹⁵ M.

[0283] Gene Therapy

[0284] In a specific embodiment, nucleic acids comprising sequences encoding antibodies or functional derivatives thereof, are administered to treat, inhibit or prevent a disease or disorder associated with aberrant expression and/or activity of a polypeptide of the invention, by way of gene therapy. Gene therapy refers to therapy performed by the administration to a subject of an expressed or expressible nucleic acid. In this embodiment of the invention, the nucleic acids produce their encoded protein that mediates a therapeutic effect.

[0285] Any of the methods for gene therapy available in the art can be used according to the present invention. Exemplary methods are described below.

[0286] For general reviews of the methods of gene therapy, see Goldspiel et al., Clinical Pharmacy 12:488-505 (1993); Wu and Wu, Biotherapy 3:87-95 (1991); Tolstoshev, Ann. Rev. Pharmacol. Toxicol. 32:573-596 (1993); Mulligan, Science 260:926-932 (1993); and Morgan and Anderson, Ann. Rev. Biochem. 62:191-217 (1993); May, TIBTECH 11(5):155-215 (1993). Methods commonly known in the art of recombinant DNA technology which can be used are described in Ausubel et al. (eds.), Current Protocols in Molecular Biology, John Wiley & Sons, NY (1993); and Kriegler, Gene Transfer and Expression, A Laboratory Manual, Stockton Press, NY (1990).

[0287] In a preferred embodiment, the compound comprises nucleic acid sequences encoding an antibody, said nucleic acid sequences being part of expression vectors that express the antibody or fragments or chimeric proteins or heavy or light chains thereof in a suitable host. In particular, such nucleic acid sequences have promoters operably linked to the antibody coding region, said promoter being inducible or constitutive, and, optionally, tissue-specific. In another particular embodiment, nucleic acid molecules are used in which the antibody coding sequences and any other desired sequences are flanked by regions that promote homologous recombination at a desired site in the genome, thus providing for intrachromosomal expression of the antibody encoding nucleic acids (Koller and Smithies, Proc. Natl. Acad. Sci. USA 86:8932-8935 (1989); Zijlstra et al., Nature 342:435-438 (1989). In specific embodiments, the expressed antibody molecule is a single chain antibody; alternatively, the nucleic acid sequences include sequences encoding both the heavy and light chains, or fragments thereof, of the antibody.

[0288] Delivery of the nucleic acids into a patient may be either direct, in which case the patient is directly exposed to the nucleic acid or nucleic acid-carrying vectors, or indirect, in which case, cells are first transformed with the nucleic acids in vitro, then transplanted into the patient. These two approaches are known, respectively, as in vivo or ex vivo gene therapy.

[0289] In a specific embodiment, the nucleic acid sequences are directly administered in vivo, where it is expressed to produce the encoded product. This can be accomplished by any of numerous methods known in the art, e.g., by constructing them as part of an appropriate nucleic acid expression vector and administering it so that they become intracellular, e.g., by infection using defective or attenuated retrovirals or other viral vectors (see U.S. Pat. No. 4,980,286), or by direct injection of naked DNA, or by use of microparticle bombardment (e.g., a gene gun; Biolistic, Dupont), or coating with lipids or cell-surface receptors or transfecting agents, encapsulation in liposomes, microparticles, or microcapsules, or by administering them in linkage to a peptide which is known to enter the nucleus, by administering it in linkage to a ligand subject to receptor-mediated endocytosis (see, e.g., Wu and Wu, J. Biol. Chem. 262:4429-4432 (1987)) (which can be used to target cell types specifically expressing the receptors), etc. In another embodiment, nucleic acid-ligand complexes can be formed in which the ligand comprises a fusogenic viral peptide to disrupt endosomes, allowing the nucleic acid to avoid lysosomal degradation. In yet another embodiment, the nucleic acid can be targeted in vivo for cell specific uptake and expression, by targeting a specific receptor (see, e.g., PCT Publications WO 92/06180; WO 92/22635; WO 92/20316; WO 93/14188, WO 93/20221). Alternatively, the nucleic acid can be introduced intracellularly and incorporated within host cell DNA for expression, by homologous recombination (Koller and Smithies, Proc. Natl. Acad. Sci. USA 86:8932-8935 (1989); Zijlstra et al., Nature 342:435-438 (1989)).

[0290] In a specific embodiment, viral vectors that contains nucleic acid sequences encoding an antibody of the invention are used. For example, a retroviral vector can be used (see Miller et al., Meth. Enzymol. 217:581-599 (1993)). These retroviral vectors contain the components necessary for the correct packaging of the viral genome and integration into the host cell DNA. The nucleic acid sequences encoding the antibody to be used in gene therapy are cloned into one or more vectors, which facilitates delivery of the gene into a patient. More detail about retroviral vectors can be found in Boesen et al., Biotherapy 6:291-302 (1994), which describes the use of a retroviral vector to deliver the mdr1 gene to hematopoietic stem cells in order to make the stem cells more resistant to chemotherapy. Other references illustrating the use of retroviral vectors in gene therapy are: Clowes et al., J. Clin. Invest. 93:644-651 (1994); Kiem et al., Blood 83:1467-1473 (1994); Salmons and Gunzberg, Human Gene Therapy 4:129-141 (1993); and Grossman and Wilson, Cuff. Opin. in Genetics and Devel. 3:110-114 (1993).

[0291] Adenoviruses are other viral vectors that can be used in gene therapy. Adenoviruses are especially attractive vehicles for delivering genes to respiratory epithelia. Adenoviruses naturally infect respiratory epithelia where they cause a mild disease. Other targets for adenovirus-based delivery systems are liver, the central nervous system, endothelial cells, and muscle. Adenoviruses have the advantage of being capable of infecting non-dividing cells. Kozarsky and Wilson, Current Opinion in Genetics and Development 3:499-503 (1993) present a review of adenovirus-based gene therapy. Bout et al., Human Gene Therapy 5:3-10 (1994) demonstrated the use of adenovirus vectors to transfer genes to the respiratory epithelia of rhesus monkeys. Other instances of the use of adenoviruses in gene therapy can be found in Rosenfeld et al., Science 252:431-434 (1991); Rosenfeld et al., Cell 68:143-155 (1992); Mastrangeli et al., J. Clin. Invest. 91:225-234 (1993); PCT Publication W094/12649; and Wang, et al., Gene Therapy 2:775-783 (1995). In a preferred embodiment, adenovirus vectors are used.

[0292] Adeno-associated virus (AAV) has also been proposed for use in gene therapy (Walsh et al., Proc. Soc. Exp. Biol. Med. 204:289-300 (1993); U.S. Pat. No. 5,436,146).

[0293] Another approach to gene therapy involves transferring a gene to cells in tissue culture by such methods as electroporation, lipofection, calcium phosphate mediated transfection, or viral infection. Usually, the method of transfer includes the transfer of a selectable marker to the cells. The cells are then placed under selection to isolate those cells that have taken up and are expressing the transferred gene. Those cells are then delivered to a patient.

[0294] In this embodiment, the nucleic acid is introduced into a cell prior to administration in vivo of the resulting recombinant cell. Such introduction can be carried out by any method known in the art, including but not limited to transfection, electroporation, microinjection, infection with a viral or bacteriophage vector containing the nucleic acid sequences, cell fusion, chromosome-mediated gene transfer, microcell-mediated gene transfer, spheroplast fusion, etc. Numerous techniques are known in the art for the introduction of foreign genes into cells (see, e.g., Loeffler and Behr, Meth. Enzymol. 217:599-618 (1993); Cohen et al., Meth. Enzymol. 217:618-644 (1993); Cline, Pharmac. Ther. 29:69-92m (1985) and may be used in accordance with the present invention, provided that the necessary developmental and physiological functions of the recipient cells are not disrupted. The technique should provide for the stable transfer of the nucleic acid to the cell, so that the nucleic acid is expressible by the cell and preferably heritable and expressible by its cell progeny.

[0295] The resulting recombinant cells can be delivered to a patient by various methods known in the art. Recombinant blood cells (e.g., hematopoietic stem or progenitor cells) are preferably administered intravenously. The amount of cells envisioned for use depends on the desired effect, patient state, etc., and can be determined by one skilled in the art.

[0296] Cells into which a nucleic acid can be introduced for purposes of gene therapy encompass any desired, available cell type, and include but are not limited to epithelial cells, endothelial cells, keratinocytes, fibroblasts, muscle cells, hepatocytes; blood cells such as T lymphocytes, B lymphocytes, monocytes, macrophages, neutrophils, eosinophils, megakaryocytes, granulocytes; various stem or progenitor cells, in particular hematopoietic stem or progenitor cells, e.g., as obtained from bone marrow, umbilical cord blood, peripheral blood, fetal liver, etc.

[0297] In a preferred embodiment, the cell used for gene therapy is autologous to the patient.

[0298] In an embodiment in which recombinant cells are used in gene therapy, nucleic acid sequences encoding an antibody are introduced into the cells such that they are expressible by the cells or their progeny, and the recombinant cells are then administered in vivo for therapeutic effect. In a specific embodiment, stem or progenitor cells are used. Any stem and/or progenitor cells which can be isolated and maintained in vitro can potentially be used in accordance with this embodiment of the present invention (see e.g. PCT Publication WO 94/08598; Stemple and Anderson, Cell 71:973-985 (1992); Rheinwald, Meth. Cell Bio. 21A:229 (1980); and Pittelkow and Scott, Mayo Clinic Proc. 61:771 (1986)).

[0299] In a specific embodiment, the nucleic acid to be introduced for purposes of gene therapy comprises an inducible promoter operably linked to the coding region, such that expression of the nucleic acid is controllable by the presence or absence of an appropriate inducer of transcription.

[0300] Demonstration of Therapeutic or Prophylactic Activity

[0301] The compounds or pharmaceutical compositions of the invention are preferably tested in vitro, and then in vivo for the desired therapeutic or prophylactic activity, prior to use in humans. For example, in vitro assays to demonstrate the therapeutic or prophylactic utility of a compound or pharmaceutical composition include, the effect of a compound on a cell line or a patient tissue sample. The effect of the compound or composition on the cell line and/or tissue sample can be determined utilizing techniques known to those of skill in the art including, but not limited to, rosette formation assays and cell lysis assays. In accordance with the invention, in vitro assays which can be used to determine whether administration of a specific compound is indicated, include in vitro cell culture assays in which a patient tissue sample is grown in culture, and exposed to or otherwise administered a compound, and the effect of such compound upon the tissue sample is observed.

[0302] Therapeutic/Prophylactic Administration and Composition

[0303] The invention provides methods of treatment, inhibition and prophylaxis by administration to a subject of an effective amount of a compound or pharmaceutical composition of the invention, preferably a polypeptide or antibody of the invention. In a preferred embodiment, the compound is substantially purified (e.g., substantially free from substances that limit its effect or produce undesired side-effects). The subject is preferably an animal, including but not limited to animals such as cows, pigs, horses, chickens, cats, dogs, etc., and is preferably a mammal, and most preferably human.

[0304] Formulations and methods of administration that can be employed when the compound comprises a nucleic acid or an immunoglobulin are described above; additional appropriate formulations and routes of administration can be selected from among those described herein below.

[0305] Various delivery systems are known and can be used to administer a compound of the invention, e.g., encapsulation in liposomes, microparticles, microcapsules, recombinant cells capable of expressing the compound, receptor-mediated endocytosis (see, e.g., Wu and Wu, J. Biol. Chem. 262:4429-4432 (1987)), construction of a nucleic acid as part of a retroviral or other vector, etc. Methods of introduction include but are not limited to intradermal, intramuscular, intraperitoneal, intravenous, subcutaneous, intranasal, epidural, and oral routes. The compounds or compositions may be administered by any convenient route, for example by infusion or bolus injection, by absorption through epithelial or mucocutaneous linings (e.g., oral mucosa, rectal and intestinal mucosa, etc.) and may be administered together with other biologically active agents. Administration can be systemic or local. In addition, it may be desirable to introduce the pharmaceutical compounds or compositions of the invention into the central nervous system by any suitable route, including intraventricular and intrathecal injection; intraventricular injection may be facilitated by an intraventricular catheter, for example, attached to a reservoir, such as an Ommaya reservoir. Pulmonary administration can also be employed, e.g., by use of an inhaler or nebulizer, and formulation with an aerosolizing agent.

[0306] In a specific embodiment, it may be desirable to administer the pharmaceutical compounds or compositions of the invention locally to the area in need of treatment; this may be achieved by, for example, and not by way of limitation, local infusion during surgery, topical application, e.g., in conjunction with a wound dressing after surgery, by injection, by means of a catheter, by means of a suppository, or by means of an implant, said implant being of a porous, non-porous, or gelatinous material, including membranes, such as sialastic membranes, or fibers. Preferably, when administering a protein, including an antibody, of the invention, care must be taken to use materials to which the protein does not absorb.

[0307] In another embodiment, the compound or composition can be delivered in a vesicle, in particular a liposome (see Langer, Science 249:1527-1533 (1990); Treat et al., in Liposomes in the Therapy of Infectious Disease and Cancer, Lopez-Berestein and Fidler (eds.), Liss, N.Y., pp. 353-365 (1989); Lopez-Berestein, ibid., pp. 317-327; see generally ibid.)

[0308] In yet another embodiment, the compound or composition can be delivered in a controlled release system. In one embodiment, a pump may be used (see Langer, supra; Sefton, CRC Crit. Ref. Biomed. Eng. 14:201 (1987); Buchwald et al., Surgery 88:507 (1980); Saudek et al., N. Engl. J. Med. 321:574 (1989)). In another embodiment, polymeric materials can be used (see Medical Applications of Controlled Release, Langer and Wise (eds.), CRC Pres., Boca Raton, Fla. (1974); Controlled Drug Bioavailability, Drug Product Design and Performance, Smolen and Ball (eds.), Wiley, New York (1984); Ranger and Peppas, J., Macromol. Sci. Rev. Macromol. Chem. 23:61 (1983); see also Levy et al., Science 228:190 (1985); During et al., Ann. Neurol. 25:351 (1989); Howard et al., J.Neurosurg. 71:105 (1989)). In yet another embodiment, a controlled release system can be placed in proximity of the therapeutic target, e.g., the brain, thus requiring only a fraction of the systemic dose (see, e.g., Goodson, in Medical Applications of Controlled Release, supra, vol. 2, pp. 115-138 (1984)).

[0309] Other controlled release systems are discussed in the review by Langer (Science 249:1527-1533 (1990)).

[0310] In a specific embodiment where the compound of the invention is a nucleic acid encoding a protein, the nucleic acid can be administered in vivo to promote expression of its encoded protein, by constructing it as part of an appropriate nucleic acid expression vector and administering it so that it becomes intracellular, e.g., by use of a retroviral vector (see U.S. Pat. No. 4,980,286), or by direct injection, or by use of microparticle bombardment (e.g., a gene gun; Biolistic, Dupont), or coating with lipids or cell-surface receptors or transfecting agents, or by administering it in linkage to a homeobox-like peptide which is known to enter the nucleus (see e.g., Joliot et al., Proc. Natl. Acad. Sci. USA 88:1864-1868 (1991)), etc. Alternatively, a nucleic acid can be introduced intracellularly and incorporated within host cell DNA for expression, by homologous recombination.

[0311] The present invention also provides pharmaceutical compositions. Such compositions comprise a therapeutically effective amount of a compound, and a pharmaceutically acceptable carrier. In a specific embodiment, the term “pharmaceutically acceptable” means approved by a regulatory agency of the Federal or a state government or listed in the U.S. Pharmacopeia or other generally recognized pharmacopeia for use in animals, and more particularly in humans. The term “carrier” refers to a diluent, adjuvant, excipient, or vehicle with which the therapeutic is administered. Such pharmaceutical carriers can be sterile liquids, such as water and oils, including those of petroleum, animal, vegetable or synthetic origin, such as peanut oil, soybean oil, mineral oil, sesame oil and the like. Water is a preferred carrier when the pharmaceutical composition is administered intravenously. Saline solutions and aqueous dextrose and glycerol solutions can also be employed as liquid carriers, particularly for injectable solutions. Suitable pharmaceutical excipients include starch, glucose, lactose, sucrose, gelatin, malt, rice, flour, chalk, silica gel, sodium stearate, glycerol monostearate, talc, sodium chloride, dried skim milk, glycerol, propylene, glycol, water, ethanol and the like. The composition, if desired, can also contain minor amounts of wetting or emulsifying agents, or pH buffering agents. These compositions can take the form of solutions, suspensions, emulsion, tablets, pills, capsules, powders, sustained-release formulations and the like. The composition can be formulated as a suppository, with traditional binders and carriers such as triglycerides. Oral formulation can include standard carriers such as pharmaceutical grades of mannitol, lactose, starch, magnesium stearate, sodium saccharine, cellulose, magnesium carbonate, etc. Examples of suitable pharmaceutical carriers are described in “Remington's Pharmaceutical Sciences” by E. W. Martin. Such compositions will contain a therapeutically effective amount of the compound, preferably in purified form, together with a suitable amount of carrier so as to provide the form for proper administration to the patient. The formulation should suit the mode of administration.

[0312] In a preferred embodiment, the composition is formulated in accordance with routine procedures as a pharmaceutical composition adapted for intravenous administration to human beings. Typically, compositions for intravenous administration are solutions in sterile isotonic aqueous buffer. Where necessary, the composition may also include a solubilizing agent and a local anesthetic such as lignocaine to ease pain at the site of the injection. Generally, the ingredients are supplied either separately or mixed together in unit dosage form, for example, as a dry lyophilized powder or water free concentrate in a hermetically sealed container such as an ampoule or sachette indicating the quantity of active agent. Where the composition is to be administered by infusion, it can be dispensed with an infusion bottle containing sterile pharmaceutical grade water or saline. Where the composition is administered by injection, an ampoule of sterile water for injection or saline can be provided so that the ingredients may be mixed prior to administration.

[0313] The compounds of the invention can be formulated as neutral or salt forms. Pharmaceutically acceptable salts include those formed with anions such as those derived from hydrochloric, phosphoric, acetic, oxalic, tartaric acids, etc., and those formed with cations such as those derived from sodium, potassium, ammonium, calcium, ferric hydroxides, isopropylamine, triethylamine, 2-ethylamino ethanol, histidine, procaine, etc.

[0314] The amount of the compound of the invention, which will be effective in the treatment, inhibition and prevention of a disease or disorder associated with aberrant expression and/or activity of a polypeptide of the invention can be determined by standard clinical techniques. In addition, in vitro assays may optionally be employed to help identify optimal dosage ranges. The precise dose to be employed in the formulation will also depend on the route of administration, and the seriousness of the disease or disorder, and should be decided according to the judgment of the practitioner and each patient's circumstances. Effective doses may be extrapolated from dose-response curves derived from in vitro or animal model test systems.

[0315] For antibodies, the dosage administered to a patient is typically 0.1 mg/kg to 100 mg/kg of the patient's body weight. Preferably, the dosage administered to a patient is between 0.1 mg/kg and 20 mg/kg of the patient's body weight, more preferably 1 mg/kg to 10 mg/kg of the patient's body weight. Generally, human antibodies have a longer half-life within the human body than antibodies from other species due to the immune response to the foreign polypeptides. Thus, lower dosages of human antibodies and less frequent administration is often possible. Further, the dosage and frequency of administration of antibodies of the invention may be reduced by enhancing uptake and tissue penetration (e.g., into the brain) of the antibodies by modifications such as, for example, lipidation.

[0316] The invention also provides a pharmaceutical pack or kit comprising one or more containers filled with one or more of the ingredients of the pharmaceutical compositions of the invention. Optionally associated with such container(s) can be a notice in the form prescribed by a governmental agency regulating the manufacture, use or sale of pharmaceuticals or biological products, which notice reflects approval by the agency of manufacture, use or sale for human administration.

[0317] Diagnosis and Imaging

[0318] Labeled antibodies, and derivatives and analogs thereof, which specifically bind to a polypeptide of interest can be used for diagnostic purposes to detect, diagnose, or monitor diseases, disorders, and/or conditions associated with the aberrant expression and/or activity of a polypeptide of the invention. The invention provides for the detection of aberrant expression of a polypeptide of interest, comprising (a) assaying the expression of the polypeptide of interest in cells or body fluid of an individual using one or more antibodies specific to the polypeptide interest and (b) comparing the level of gene expression with a standard gene expression level, whereby an increase or decrease in the assayed polypeptide gene expression level compared to the standard expression level is indicative of aberrant expression.

[0319] The invention provides a diagnostic assay for diagnosing a ovarian and/or breast disorder, comprising (a) assaying the expression of the polypeptide of interest in cells or body fluid of an individual using one or more antibodies specific to the polypeptide interest and (b) comparing the level of gene expression with a standard gene expression level, whereby an increase or decrease in the assayed polypeptide gene expression level compared to the standard expression level is indicative of a particular disorder. With respect to cancer, the presence of a relatively high amount of transcript in biopsied tissue from an individual may indicate a predisposition for the development of the disease, or may provide a means for detecting the disease prior to the appearance of actual clinical symptoms. A more definitive diagnosis of this type may allow health professionals to employ preventative measures or aggressive treatment earlier thereby preventing the development or further progression of the cancer.

[0320] Antibodies of the invention can be used to assay protein levels in a biological sample using classical immunohistological methods known to those of skill in the art (e.g., see Jalkanen et al., J. Cell. Biol. 101:976-985 (1985); Jalkanen et al., J. Cell. Biol. 105:3087-3096 (1987)). Other antibody-based methods useful for detecting protein gene expression include immunoassays, such as the enzyme linked immunosorbent assay (ELISA) and the radioimmunoassay (RIA). Suitable antibody assay labels are known in the art and include enzyme labels, such as, glucose oxidase; radioisotopes, such as iodine (125I, 121I), carbon (14C), sulfur (35S), tritium (3H), indium (112In), and technetium (99Tc); luminescent labels, such as luminol; and fluorescent labels, such as fluorescein and rhodamine, and biotin.

[0321] One facet of the invention is the detection and diagnosis of a disease or disorder associated with aberrant expression of a polypeptide of interest in an animal, preferably a mammal and most preferably a human. A preferred embodiment of the invention is the detection and diagnosis of a disease or disorder of the ovaries and/or breast that is associated with aberrant expression of an ovarian antigen in an animal, preferably a mammal and most preferably a human. In one embodiment, diagnosis comprises: a) administering (for example, parenterally, subcutaneously, or intraperitoneally) to a subject an effective amount of a labeled molecule which specifically binds to the polypeptide of interest; b) waiting for a time interval following the administering for permitting the labeled molecule to preferentially concentrate at sites in the subject where the polypeptide is expressed (and for unbound labeled molecule to be cleared to background level); c) determining background level; and d) detecting the labeled molecule in the subject, such that detection of labeled molecule above the background level indicates that the subject has a particular disease or disorder associated with aberrant expression of the polypeptide of interest. Background level can be determined by various methods including, comparing the amount of labeled molecule detected to a standard value previously determined for a particular system.

[0322] It will be understood in the art that the size of the subject and the imaging system used will determine the quantity of imaging moiety needed to produce diagnostic images. In the case of a radioisotope moiety, for a human subject, the quantity of radioactivity injected will normally range from about 5 to 20 millicuries of 99mTc. The labeled antibody or antibody fragment will then preferentially accumulate at the location of cells which contain the specific protein. In vivo tumor imaging is described in S. W. Burchiel et al., “Immunopharmacokinetics of Radiolabeled Antibodies and Their Fragments.” (Chapter 13 in Tumor Imaging: The Radiochemical Detection of Cancer, S. W. Burchiel and B. A. Rhodes, eds., Masson Publishing Inc. (1982)).

[0323] Depending on several variables, including the type of label used and the mode of administration, the time interval following the administration for permitting the labeled molecule to preferentially concentrate at sites in the subject and for unbound labeled molecule to be cleared to background level is 6 to 48 hours or 6 to 24 hours or 6 to 12 hours. In another embodiment the time interval following administration is 5 to 20 days or 5 to 10 days.

[0324] In an embodiment, monitoring of the disease or disorder is carried out by repeating the method for diagnosing the disease or disorder, for example, one month after initial diagnosis, six months after initial diagnosis, one year after initial diagnosis, etc.

[0325] Presence of the labeled molecule can be detected in the patient using methods known in the art for in vivo scanning. These methods depend upon the type of label used. Skilled artisans will be able to determine the appropriate method for detecting a particular label. Methods and devices that may be used in the diagnostic methods of the invention include, but are not limited to, computed tomography (CT), whole body scan such as position emission tomography (PET), magnetic resonance imaging (MRI), and sonography.

[0326] In a specific embodiment, the molecule is labeled with a radioisotope and is detected in the patient using a radiation responsive surgical instrument (Thurston et al., U.S. Pat. No. 5,441,050). In another embodiment, the molecule is labeled with a fluorescent compound and is detected in the patient using a fluorescence responsive scanning instrument. In another embodiment, the molecule is labeled with a positron emitting metal and is detected in the patent using positron emission-tomography. In yet another embodiment, the molecule is labeled with a paramagnetic label and is detected in a patient using magnetic resonance imaging (MRI).

[0327] Kits

[0328] The present invention provides kits that can be used in the above methods. In one embodiment, a kit comprises an antibody of the invention, preferably a purified antibody, in one or more containers. In a specific embodiment, the kits of the present invention contain a substantially isolated polypeptide comprising an epitope which is specifically immunoreactive with an antibody included in the kit. Preferably, the kits of the present invention further comprise a control antibody which does not react with the polypeptide of interest. In another specific embodiment, the kits of the present invention contain a means for detecting the binding of an antibody to a polypeptide of interest (e.g., the antibody may be conjugated to a detectable substrate such as a fluorescent compound, an enzymatic substrate, a radioactive compound or a luminescent compound, or a second antibody which recognizes the first antibody may be conjugated to a detectable substrate).

[0329] In another specific embodiment of the present invention, the kit is a diagnostic kit for use in screening serum containing antibodies specific against proliferative and/or cancerous polynucleotides and polypeptides. Such a kit may include a control antibody that does not react with the polypeptide of interest. Such a kit may include a substantially isolated polypeptide antigen comprising an epitope, which is specifically immunoreactive with at least one anti-polypeptide antigen antibody. Further, such a kit includes means for detecting the binding of said antibody to the antigen (e.g., the antibody may be conjugated to a fluorescent compound such as fluorescein or rhodamine, which can be detected by flow cytometry). In specific embodiments, the kit may include a recombinantly produced or chemically synthesized polypeptide antigen. The polypeptide antigen of the kit may also be attached to a solid support.

[0330] In a more specific embodiment the detecting means of the above-described kit includes a solid support to which said polypeptide antigen is attached. Such a kit may also include a non-attached reporter-labeled anti-human antibody. In this embodiment, binding of the antibody to the polypeptide antigen can be detected by binding of the said reporter-labeled antibody.

[0331] In an additional embodiment, the invention includes a diagnostic kit for use in screening serum containing antigens of the polypeptide of the invention. The diagnostic kit includes a substantially isolated antibody specifically immunoreactive with polypeptide or polynucleotide antigens, and means for detecting the binding of the polynucleotide or polypeptide antigen to the antibody. In one embodiment, the antibody is attached to a solid support. In a specific embodiment, the antibody may be a monoclonal antibody. The detecting means of the kit may include a second, labeled monoclonal antibody. Alternatively, or in addition, the detecting means may include a labeled, competing antigen.

[0332] In one diagnostic configuration, test serum is reacted with a solid phase reagent having a surface-bound antigen obtained by the methods of the present invention. After binding with specific antigen antibody to the reagent and removing unbound serum components by washing, the reagent is reacted with reporter-labeled anti-human antibody to bind reporter to the reagent in proportion to the amount of bound anti-antigen antibody on the solid support. The reagent is again washed to remove unbound labeled antibody, and the amount of reporter associated with the reagent is determined. Typically, the reporter is an enzyme, which is detected by incubating the solid phase in the presence of a suitable fluorometric, luminescent or colorimetric substrate (Sigma, St. Louis, Mo.).

[0333] The solid surface reagent in the above assay is prepared by known techniques for attaching protein material to solid support material, such as polymeric beads, dip sticks, 96-well plate or filter material. These attachment methods generally include non-specific adsorption of the protein to the support or covalent attachment of the protein, typically through a free amine group, to a chemically reactive group on the solid support, such as an activated carboxyl, hydroxyl, or aldehyde group. Alternatively, streptavidin coated plates can be used in conjunction with biotinylated antigen(s).

[0334] Thus, the invention provides an assay system or kit for carrying out this diagnostic method. The kit generally includes a support with surface-bound recombinant antigens, and a reporter-labeled anti-human antibody for detecting surface-bound anti-antigen antibody.

[0335] Uses of the Polynucleotides

[0336] Each of the polynucleotides identified herein can be used in numerous ways as reagents. The following description should be considered exemplary and utilizes known techniques.

[0337] The polynucleotides of the present invention are useful for chromosome identification. There exists an ongoing need to identify new chromosome markers, since few chromosome marking reagents, based on actual sequence data (repeat polymorphisms), are presently available. Each sequence is specifically targeted to and can hybridize with a particular location on an individual human chromosome, thus each polynucleotide of the present invention can routinely be used as a chromosome marker using techniques known in the art. Table 1, column 9 provides the chromosome location of some of the polynucleotides of the invention.

[0338] Briefly, sequences can be mapped to chromosomes by preparing PCR primers (preferably at least 15 bp (e.g., 15-25 bp) from the sequences shown in SEQ ID NO: X. Primers can optionally be selected using computer analysis so that primers do not span more than one predicted exon in the genomic DNA. These primers are then used for PCR screening of somatic cell hybrids containing individual human chromosomes. Only those hybrids containing the human gene corresponding to SEQ ID NO: X will yield an amplified fragment.

[0339] Similarly, somatic hybrids provide a rapid method of PCR mapping the polynucleotides to particular chromosomes. Three or more clones can be assigned per day using a single thermal cycler. Moreover, sublocalization of the polynucleotides can be achieved with panels of specific chromosome fragments. Other gene mapping strategies that can be used include in situ hybridization, prescreening with labeled flow-sorted chromosomes, preselection by hybridization to construct chromosome specific-cDNA libraries, and computer mapping techniques (See, e.g., Shuler, Trends Biotechnol 16:456-459 (1998) which is hereby incorporated by reference in its entirety).

[0340] Precise chromosomal location of the polynucleotides can also be achieved using fluorescence in situ hybridization (FISH) of a metaphase chromosomal spread. This technique uses polynucleotides as short as 500 or 600-bases; however, polynucleotides 2,000-4,000 bp are preferred. For a review of this technique, see Verma et al., “Human Chromosomes: a Manual of Basic Techniques,” Pergamon Press, New York (1988).

[0341] For chromosome mapping, the polynucleotides can be used individually (to mark a single chromosome or a single site on that chromosome) or in panels (for marking multiple sites and/or multiple chromosomes).

[0342] Thus, the present invention also provides a method for chromosomal localization which involves (a) preparing PCR primers from the polynucleotide sequences in Table 1 and/or Table 2 and SEQ ID NO: X and (b) screening somatic cell hybrids containing individual chromosomes.

[0343] The polynucleotides of the present invention would likewise be useful for radiation hybrid mapping, HAPPY mapping, and long range restriction mapping. For a review of these techniques and others known in the art, see, e.g. Dear, “Genome Mapping: A Practical Approach,” IRL Press at Oxford University Press, London (1997); Aydin, J. Mol. Med. 77:691-694 (1999); Hacia et al., Mol. Psychiatry 3:483-492 (1998); Herrick et al., Chromosome Res. 7:409-423 (1999); Hamilton et al., Methods Cell Biol. 62:265-280 (2000); and/or Ott, J. Hered. 90:68-70 (1999), each of which is hereby incorporated by reference in its entirety.

[0344] Once a polynucleotide has been mapped to a precise chromosomal location, the physical position of the polynucleotide can be used in linkage analysis. Linkage analysis establishes coinheritance between a chromosomal location and presentation of a particular disease. (Disease mapping data are found, for example, in V. McKusick, Mendelian Inheritance in Man (available on line through Johns Hopkins University Welch Medical Library).) Column 10 of Table 1 provides an OMIM reference identification number of diseases associated with the cytologic band disclosed in column 9 of Table 1, as determined using techniques described herein and by reference to Table 5. Assuming 1 megabase mapping resolution and one gene per 20 kb, a cDNA precisely localized to a chromosomal region associated with the disease could be one of 50-500 potential causative genes.

[0345] Thus, once coinheritance is established, differences in a polynucleotide of the invention and the corresponding gene between affected and unaffected individuals can be examined. First, visible structural alterations in the chromosomes, such as deletions or translocations, are examined in chromosome spreads or by PCR. If no structural alterations exist, the presence of point mutations are ascertained. Mutations observed in some or all affected individuals, but not in normal individuals, indicate that the mutation may cause the disease. However, complete sequencing of the polypeptide and the corresponding gene from several normal individuals is required to distinguish the mutation from a polymorphism. If a new polymorphism is identified, this polymorphic polypeptide can be used for further linkage analysis.

[0346] Furthermore, increased or decreased expression of the gene in affected individuals as compared to unaffected individuals can be assessed using the polynucleotides of the invention. Any of these alterations (altered expression, chromosomal rearrangement, or mutation) can be used as a diagnostic or prognostic marker. Diagnostic and prognostic methods, kits and reagents encompassed by the present invention are briefly described below and more thoroughly elsewhere herein (see e.g., the sections labeled “Antibodies”, “Diagnostic Assays”, and “Methods for Detecting Colon Disease, Including Cancer”).

[0347] Thus, the invention also provides a diagnostic method useful during diagnosis of a disorder, involving measuring the expression level of polynucleotides of the present invention in cells or body fluid from an individual and comparing the measured gene expression level with a standard level of polynucleotide expression level, whereby an increase or decrease in the gene expression level compared to the standard is indicative of a disorder. Additional non-limiting examples of diagnostic methods encompassed by the present invention are more thoroughly described elsewhere herein (see, e.g., Example 12).

[0348] In still another embodiment, the invention includes a kit for analyzing samples for the presence of proliferative and/or cancerous polynucleotides derived from a test subject, as further described herein. In a general embodiment, the kit includes at least one polynucleotide probe containing a nucleotide sequence that will specifically hybridize with a polynucleotide of the invention and a suitable container. In a specific embodiment, the kit includes two polynucleotide probes defining an internal region of the polynucleotide of the invention, where each probe has one strand containing a 31′mer-end internal to the region. In a further embodiment, the probes may be useful as primers for polymerase chain reaction amplification.

[0349] Where a diagnosis of a related disorder, including, for example, diagnosis of a tumor, has already been madeaccording to conventional methods, the present invention is useful as a prognostic indicator, whereby patients exhibiting enhanced or depressed polynucleotide of the invention expression will experience a worse clinical outcome relative to patients expressing the gene at a level nearer the standard level.

[0350] By “measuring the expression level of polynucleotides of the invention” is intended qualitatively or quantitatively measuring or estimating the level of the polypeptide of the invention or the level of the mRNA encoding the polypeptide of the invention in a first biological sample either directly (e.g., by determining or estimating absolute protein level or mRNA level) or relatively (e.g., by comparing to the polypeptide level or mRNA level in a second biological sample). Preferably, the polypeptide level or mRNA level in the first biological sample is measured or estimated and compared to a standard polypeptide level or mRNA level, the standard being taken from a second biological sample obtained from an individual not having the related disorder or being determined by averaging levels from a population of individuals not having a related disorder. As will be appreciated in the art, once a standard polypeptide level or mRNA level is known, it can be used repeatedly as a standard for comparison.

[0351] By “biological sample” is intended any biological sample obtained from an individual, body fluid, cell line, tissue culture, or other source which contains polypeptide of the present invention or the corresponding mRNA. As indicated, biological samples include body fluids (such as semen, lymph, vaginal pool, sera, plasma, urine, synovial fluid and spinal fluid) which contain the polypeptide of the present invention, and tissue sources found to express the polypeptide of the present invention. Methods for obtaining tissue biopsies and body fluids from mammals are well known in the art. Where the biological sample is to include mRNA, a tissue biopsy is the preferred source.

[0352] The method(s) provided above may preferably be applied in a diagnostic method and/or kits in which polynucleotides and/or polypeptides of the invention are attached to a solid support. In one exemplary method, the support may be a “gene chip” or a “biological chip” as described in U.S. Pat. Nos. 5,837,832, 5,874,219, and 5,856,174. Further, such a gene chip with polynucleotides of the invention attached may be used to identify polymorphisms between the isolated polynucleotide sequences of the invention, with polynucleotides isolated from a test subject. The knowledge of such polymorphisms (i.e., their location, as well as, their existence) would be beneficial in identifying disease loci for many disorders, such as for example, in neural disorders, immune system disorders, muscular disorders, reproductive disorders, gastrointestinal disorders, pulmonary disorders, digestive disorders, cardiovascular disorders, renal disorders, proliferative disorders, and/or cancerous diseases and conditions. Such a method is described in U.S. Pat. Nos. 5,858,659 and 5,856,104. The U.S. Patents referenced supra are hereby incorporated by reference in their entirety herein.

[0353] The present invention encompasses polynucleotides of the present invention that are chemically synthesized, or reproduced as peptide nucleic acids (PNA), or according to other methods known in the art. The use of PNAs would serve as the preferred form if the polynucleotides of the invention are incorporated onto a solid support, or gene chip. For the purposes of the present invention, a peptide nucleic acid (PNA) is a polyamide type of DNA analog and the monomeric units for adenine, guanine, thymine and cytosine are available commercially (Perceptive Biosystems). Certain components of DNA, such as phosphorus, phosphorus oxides, or deoxyribose derivatives, are not present in PNAs. As disclosed by Nielsen et al., Science 254:1497 (1991); and Egholm et al., Nature 365:666 (1993), PNAs bind specifically and tightly to complementary DNA strands and are not degraded by nucleases. In fact, PNA binds more strongly to DNA than DNA itself does. This is probably because there is no electrostatic repulsion between the two strands, and also the polyamide backbone is more flexible. Because of this, PNA/DNA duplexes bind under a wider range of stringency conditions than DNA/DNA duplexes, making it easier to perform multiplex hybridization. Smaller probes can be used than with DNA due to the strong binding. In addition, it is more likely that single base mismatches can be determined with PNA/DNA hybridization because a single mismatch in a PNA/DNA 15-mer lowers the melting point (T.sub.m) by 8°-20° C., vs. 4°-16° C. for the DNA/DNA 15-mer duplex. Also, the absence of charge groups in PNA means that hybridization can be done at low ionic strengths and reduce possible interference by salt during the analysis.

[0354] The compounds of the present invention have uses which include, but are not limited to, detecting cancer in mammals. In particular the invention is useful during diagnosis of pathological cell proliferative neoplasias which include, but are not limited to: acute myelogenous leukemias including acute monocytic leukemia, acute myeloblastic leukemia, acute promyelocytic leukemia, acute myelomonocytic leukemia, acute erythroleukemia, acute megakaryocytic leukemia, and acute undifferentiated leukemia, etc.; and chronic myclogenous leukemias including chronic myelomonocytic leukemia, chronic granulocytic leukemia, etc. Preferred mammals include monkeys, apes, cats, dogs, cows, pigs, horses, rabbits and humans. Particularly preferred are humans.

[0355] The compounds of the present invention have preferred uses which include, but are not limited to, detecting ovarian and/or breast cancer in mammals. In particular the invention is useful during diagnosis of pathological cell proliferative neoplasias, which include, but are not limited to: ovarian Krukenberg tumor, malignant mixed Mullerian tumors, and/or as described under “Hyperproliferative Disorders” and “Reproductive System Disorders” below.

[0356] Preferred mammals include monkeys, apes, cats, dogs, cows, pigs, horses, rabbits and humans. Particularly preferred are humans.

[0357] Pathological cell proliferative disorders are often associated with inappropriate activation of proto-oncogenes. (Gelmann, E. P. et al., “The Etiology of Acute Leukemia: Molecular Genetics and Viral Oncology,” in Neoplastic Diseases of the Blood, Vol 1., Wiemik, P. H. et al. eds., 161-182 (1985)). Neoplasias are now believed to result from the qualitative alteration of a normal cellular gene product, or from the quantitative modification of gene expression by insertion into the chromosome of a viral sequence, by chromosomal translocation of a gene to a more actively transcribed region, or by some other mechanism. (Gelmann et al., supra) It is likely that mutated or altered expression of specific genes is involved in the pathogenesis of some leukemias, among other tissues and cell types. (Gelmann et al., supra) Indeed, the human counterparts of the oncogenes involved in some animal neoplasias have been amplified or translocated in some cases of human leukemia and carcinoma. (Gelmann et al., supra)

[0358] For example, c-myc expression is highly amplified in the non-lymphocytic leukemia cell line HL-60. When HL-60 cells are chemically induced to stop proliferation, the level of c-myc is found to be downregulated. (International Publication Number WO 91/15580). However, it has been shown that exposure of HL-60 cells to a DNA construct that is complementary to the 5′ end of c-myc or c-myb blocks translation of the corresponding mRNAs which downregulates expression of the c-myc or c-myb proteins and causes arrest of cell proliferation and differentiation of the treated cells. (International Publication Number WO 91/15580; Wickstrom et al., Proc. Natl. Acad. Sci. 85:1028 (1988); Anfossi et al., Proc. Natl. Acad. Sci. 86:3379 (1989)). However, the skilled artisan would appreciate the present invention's usefulness is not be limited to treatment, prevention, diagnosis and/or prognosis, of proliferative disorders of cells and tissues of hematopoietic origin, in light of the numerous cells and cell types of varying origins which are known to exhibit proliferative phenotypes. In preferred embodiments, the compounds and/or methods of the invention are used to treat, prevent, diagnose, and/or prognose, proliferative disorders of ovarian cells and tissues.

[0359] In addition to the foregoing, a polynucleotide of the present invention can be used to control gene expression through triple helix formation or through antisense DNA or RNA. Antisense techniques are discussed, for example, in Okano, J. Neurochem. 56: 560 (1991); “Oligodeoxynucleotides as Antisense Inhibitors of Gene Expression, CRC Press, Boca Raton, Fla. (1988). Triple helix formation is discussed in, for instance Lee et al., Nucleic Acids Research 6: 3073 (1979); Cooney et al., Science 241: 456 (1988); and Dervan et al., Science 251: 1360 (1991). Both methods rely on binding of the polynucleotide to a complementary DNA or RNA. For these techniques, preferred polynucleotides are usually oligonucleotides 20 to 40 bases in length and complementary to either the region of the gene involved in transcription (triple helix—see Lee et al., Nucl. Acids Res. 6:3073 (1979); Cooney et al., Science 241:456 (1988); and Dervan et al., Science 251:1360 (1991)) or to the mRNA itself (antisense—Okano, J. Neurochem. 56:560 (1991); Oligodeoxy-nucleotides as Antisense Inhibitors of Gene Expression, CRC Press, Boca Raton, Fla. (1988).) Triple helix formation optimally results in a shut-off of RNA transcription from DNA, while antisense RNA hybridization blocks translation of an mRNA molecule into polypeptide. The oligonucleotide described above can also be delivered to cells such that the antisense RNA or DNA may be expressed in vivo to inhibit production of polypeptide of the present invention antigens. Both techniques are effective in model systems, and the information disclosed herein can be used to design antisense or triple helix polynucleotides in an effort to treat disease, and in particular, for the treatment of proliferative diseases and/or conditions. Non-limiting antisense and triple helix methods encompassed by the present invention are more thoroughly described elsewhere herein (see, e.g., the section labeled “Antisense and Ribozyme (Antagonists)”).

[0360] Polynucleotides of the present invention are also useful in gene therapy. One goal of gene therapy is to insert a normal gene into an organism having a defective gene, in an effort to correct the genetic defect. The polynucleotides disclosed in the present invention offer a means of targeting such genetic defects in a highly accurate manner. Another goal is to insert a new gene that was not present in the host genome, thereby producing a new trait in the host cell. Additional non-limiting examples of gene therapy methods encompassed by the present invention are more thoroughly described elsewhere herein (see, e.g., the sections labeled “Gene Therapy Methods” and Examples 16, 17 and 18).

[0361] The polynucleotides are also useful for identifying individuals from minute biological samples. The United States military, for example, is considering the use of restriction fragment length polymorphism (RFLP) for identification of its personnel. In this technique, an individual's genomic DNA is digested with one or more restriction enzymes, and probed on a Southern blot to yield unique bands for identifying personnel. This method does not suffer from the current limitations of “Dog Tags” which can be lost, switched, or stolen, making positive identification difficult. The polynucleotides of the present invention can be used as additional DNA markers for RFLP.

[0362] The polynucleotides of the present invention can also be used as an alternative to RFLP, by determining the actual base-by-base DNA sequence of selected portions of an individual's genome. These sequences can be used to prepare PCR primers for amplifying and isolating such selected DNA, which can then be sequenced. Using this technique, individuals can be identified because each individual will have a unique set of DNA sequences. Once a unique ID database is established for an individual, positive identification of that individual, living or dead, can be made from extremely small tissue samples.

[0363] Forensic biology also benefits from using DNA-based identification techniques as disclosed herein. DNA sequences taken from very small biological samples such as tissues, e.g., hair or skin, or body fluids, e.g., blood, saliva, semen, synovial fluid, amniotic fluid, breast milk, lymph, pulmonary sputum or surfactant, urine, fecal matter, etc., can be amplified using PCR. In one prior art technique, gene sequences amplified from polymorphic loci, such as DQa class II HLA gene, are used in forensic biology to identify individuals. (Erlich, H., PCR Technology, Freeman and Co. (1992).) Once these specific polymorphic loci are amplified, they are digested with one or more restriction enzymes, yielding an identifying set of bands on a Southern blot probed with DNA corresponding to the DQa class II HLA gene. Similarly, polynucleotides of the present invention can be used as polymorphic markers for forensic purposes.

[0364] There is also a need for reagents capable of identifying the source of a particular tissue. Such need arises, for example, in forensics when presented with tissue of unknown origin. Appropriate reagents can comprise, for example, DNA probes or primers prepared from the sequences of the present invention, specific to tissues, including but not limited to, those sequences referred to in Table 1. Panels of such reagents can identify tissue by species and/or by organ type. In a similar fashion, these reagents can be used to screen tissue cultures for contamination. Additional non-limiting examples of such uses are further described herein.

[0365] Because ovarian antigens are found expressed in the ovaries and/or breast, the polynucleotides of the present invention are also useful as hybridization probes for differential identification of the tissue(s) or cell type(s) present in a biological sample. Similarly, polypeptides and antibodies directed to polypeptides of the present invention are useful to provide immunological probes for differential identification of the tissue(s) (e.g., immunohistochemistry assays) or cell type(s) (e.g., immunocytochemistry assays). In a specific embodiment, the polynucleotides of the present invention are also useful as hybridization probes for differential identification of ovarian and/or breast tissue(s) or cell type(s) present in a biological sample. Similarly, polypeptides and antibodies directed to polypeptides of the present invention are useful to provide immunological probes for differential identification of ovarian and/or breast tissue(s) (e.g., immunohistochemistry assays) or cell type(s) (e.g., immunocytochemistry assays). In addition, for a number of disorders of the above tissues or cells, significantly higher or lower levels of gene expression of the polynucleotides/polypeptides of the present invention may be detected in certain tissues (e.g., tissues expressing polypeptides and/or polynucleotides of the present invention, for example, normal ovarian or diseased ovarian tissues, and/or those tissues/cells corresponding to the library source relating to a polynucleotide sequence of the invention as disclosed in column 8 of Table 1, and/or cancerous and/or wounded tissues) or bodily fluids (e.g., semen, lymph, vaginal pool, serum, plasma, urine, synovial fluid or spinal fluid) taken from an individual having such a disorder, relative to a “standard” gene expression level, i.e., the expression level in healthy tissue from an individual not having the disorder.

[0366] Thus, the invention provides a diagnostic method of a disorder, which involves: (a) assaying gene expression level in cells or body fluid of an individual; (b) comparing the gene expression level with a standard gene expression level, whereby an increase or decrease in the assayed gene expression level compared to the standard expression level is indicative of a disorder.

[0367] In the very least, the polynucleotides of the present invention can be used as molecular weight markers on Southern gels, as diagnostic probes for the presence of a specific mRNA in a particular cell type, as a probe to “subtract-out” known sequences in the process of discovering novel polynucleotides, for selecting and making oligomers for attachment to a “gene chip” or other support, to raise anti-DNA antibodies using DNA immunization techniques, and as an antigen to elicit an immune response.

[0368] Uses of the Polypeptides

[0369] Each of the polypeptides identified herein can be used in numerous ways. The following description should be considered exemplary and utilizes known techniques.

[0370] Polypeptides and antibodies directed to polypeptides of the present invention are useful to provide immunological probes for differential identification of the tissue(s) (e.g., immunohistochemistry assays such as, for example, ABC immunoperoxidase (Hsu et al., J. Histochem. Cytochem. 29:577-580 (1981)) or cell type(s) (e.g., immunocytochemistry assays).

[0371] Antibodies can be used to assay levels of polypeptides encoded by polynucleotides of the invention in a biological sample using classical immunohistological methods known to those of skill in the art (see, e.g., Jalkanen, et al., J. Cell. Biol. 101:976-985 (1985); Jalkanen, et al., J. Cell. Biol. 105:3087-3096 (1987)). Other antibody-based methods useful for detecting protein gene expression include immunoassays, such as the enzyme linked immunosorbent assay (ELISA) and the radioimmunoassay (RIA). Suitable antibody assay labels are known in the art and include enzyme labels, such as, glucose oxidase; radioisotopes, such as iodine (¹³¹I, ¹²⁵I, ¹²³I, ¹²¹I), carbon (¹⁴C), sulfur (³⁵S), tritium (³H), indium (^{115m}In, ^{113m}In, ¹¹²In, ¹¹¹In), and technetium (⁹⁹Tc, ^{99m}Tc), thallium (²⁰¹Ti), gallium (⁶⁸Ga, ⁶⁷Ga), palladium (¹⁰³Pd), molybdenum (⁹⁹Mo), xenon (¹³³Xe), fluorine (¹⁸F), ¹⁵³Sm, ¹⁷⁷Lu, ¹⁵⁹Gd, ¹⁴⁹Pm, ¹⁴⁰La, ¹⁷⁵Yb, ¹⁶⁶Ho, ⁹⁰Y, ⁴⁷Sc, ¹⁸⁶Re, ¹⁸⁸Re, ¹⁴²Pr, ¹⁰⁵Rh, ⁹⁷Ru; luminescent labels, such as luminol; and fluorescent labels, such as fluorescein and rhodamine, and biotin.

[0372] In addition to assaying levels of polypeptide of the present invention in a biological sample, proteins can also be detected in vivo by imaging. Antibody labels or markers for in vivo imaging of protein include those detectable by X-radiography, NMR or ESR. For X-radiography, suitable labels include radioisotopes such as barium or cesium, which emit detectable radiation but are not overtly harmful to the subject. Suitable markers for NMR and ESR include those with a detectable characteristic spin, such as deuterium, which may be incorporated into the antibody by labeling of nutrients for the relevant hybridoma.

[0373] An ovarian antigen-specific antibody or antibody fragment which has been labeled with an appropriate detectable imaging moiety, such as a radioisotope (for example, ¹³¹I, ¹¹²In, ^{99m}Tc, (¹³¹I, ¹²⁵I, ¹²³I, ¹²¹I), carbon (¹⁴C), sulfur (³⁵S), tritium (³H), indium (^{115m}In, ^{113m}In, ¹¹²In, ¹¹¹In), and technetium (⁹⁹Tc, ^{99m}Tc), thallium (²⁰¹Ti), gallium (⁶⁸Ga, ⁶⁷Ga), palladium (¹⁰³Pd), molybdenum (⁹⁹Mo), xenon (¹³³Xe), fluorine (¹⁸F, ¹⁵³Sm, ¹⁷⁷Lu, ¹⁵⁹Gd, ¹⁴⁹Pm, ¹⁴⁰La, ¹⁷⁵Yb, ¹⁶⁶Ho, ⁹⁰Y, ⁴⁷Sc, ¹⁸⁶Re, ¹⁸⁸Re, ¹⁴²Pr, ¹⁰⁵Rh, ⁹⁷Ru), a radio-opaque substance, or a material detectable by nuclear magnetic resonance, is introduced (for example, parenterally, subcutaneously or intraperitoneally) into the mammal to be examined for ovarian and/or breast disorder. It will be understood in the art that the size of the subject and the imaging system used will determine the quantity of imaging moiety needed to produce diagnostic images. In the case of a radioisotope moiety, for a human subject, the quantity of radioactivity injected will normally range from about 5 to 20 millicuries of ^{99m}Tc. The labeled antibody or antibody fragment will then preferentially accumulate at the location of cells which express the polypeptide encoded by a polynucleotide of the invention. In vivo tumor imaging is described in S. W. Burchiel et al., “Immunopharmacokinetics of Radiolabeled Antibodies and Their Fragments” (Chapter 13 in Tumor Imaging: The Radiochemical Detection of Cancer, S. W. Burchiel and B. A. Rhodes, eds., Masson Publishing Inc. (1982)).

[0374] In one embodiment, the invention provides a method for the specific delivery of compositions of the invention to cells by administering polypeptides of the invention (e.g., polypeptides encoded by polynucleotides of the invention and/or antibodies) that are associated with heterologous polypeptides or nucleic acids. In one example, the invention provides a method for delivering a therapeutic protein into the targeted cell. In another example, the invention provides a method for delivering a single stranded nucleic acid (e.g., antisense or ribozymes) or double stranded nucleic acid (e.g., DNA that can integrate into the cell's genome or replicate episomally and that can be transcribed) into the targeted cell.

[0375] In another embodiment, the invention provides a method for the specific destruction of cells (e.g., the destruction of tumor cells) by administering polypeptides of the invention in association with toxins or cytotoxic prodrugs.

[0376] In a preferred embodiment, the invention provides a method for the specific destruction of ovarian and/or breast cells (e.g., aberrant ovarian and/or breast cells, ovarian and/or breast neoplasm) by administering polypeptides of the invention (e.g., polypeptides encoded by polynucleotides of the invention and/or antibodies) in association with toxins or cytotoxic prodrugs. In another preferred embodiment the invention provides a method for the specific destruction of tissues/cells corresponding to the library source relating to a polynucleotide sequence of the invention as disclosed in column 8 of Table 1 by administering polypeptides of the invention in association with toxins or cytotoxic prodrugs.

[0377] By “toxin” is meant one or more compounds that bind and activate endogenous cytotoxic effector systems, radioisotopes, holotoxins, modified toxins, catalytic subunits of toxins, or any molecules or enzymes not normally present in or on the surface of a cell that under defined conditions cause the cell's death. Toxins that may be used according to the methods of the invention include, but are not limited to, radioisotopes known in the art, compounds such as, for example, antibodies (or complement fixing containing portions thereof) that bind an inherent or induced endogenous cytotoxic effector system, thymidine kinase, endonuclease, RNAse, alpha toxin, ricin, abrin, Pseudomonas exotoxin A, diphtheria toxin, saporin, momordin, gelonin, pokeweed antiviral protein, alpha-sarcin and cholera toxin. “Toxin” also includes a cytostatic or cytocidal agent, a therapeutic agent or a radioactive metal ion, e.g., alpha-emitters such as, for example, ²¹³Bi, or other radioisotopes such as, for example, ¹⁰³Pd, ¹³³Xe, ¹³¹I, ¹¹¹In, ⁶⁸Ge, ⁵⁷Co, ⁶⁵Zn, ⁸⁵Sr, ³²P, ³⁵S, ⁹⁰Y, ¹⁵³Sm, ¹⁵³Gd, ¹⁶⁹Yb ⁵¹Cr, ⁵⁴Mn, ⁷⁵Se, ¹¹³Sn, ⁹⁰Yttrium, ¹¹⁷Tin, ¹⁸⁶Rhenium, ¹⁶⁶Holmium, and ¹⁸⁸Rhenium; luminescent labels, such as luminol; and fluorescent labels, such as fluorescein and rhodamine, and biotin.

[0378] In a specific embodiment, the invention provides a method for the specific destruction of cells (e.g., the destruction of tumor cells) by administering polypeptides of the invention or antibodies of the invention in association with the radioisotope ⁹⁰Y. In another specific embodiment, the invention provides a method for the specific destruction of cells (e.g., the destruction of tumor cells) by administering polypeptides of the invention or antibodies of the invention in association with the radioisotope ¹¹¹In. In a further specific embodiment, the invention provides a method for the specific destruction of cells (e.g., the destruction of tumor cells) by administering polypeptides of the invention or antibodies of the invention in association with the radioisotope ¹³¹I.

[0379] Techniques known in the art may be applied to label polypeptides of the invention (including antibodies). Such techniques include, but are not limited to, the use of bifunctional conjugating agents (see e.g., U.S. Pat. Nos. 5,756,065; 5,714,631; 5,696,239; 5,652,361; 5,505,931; 5,489,425; 5,435,990; 5,428,139; 5,342,604; 5,274,119; 4,994,560; and 5,808,003; the contents of each of which are hereby incorporated by reference in its entirety).

[0380] Thus, the invention provides a diagnostic method of a disorder, which involves (a) assaying the expression level of a polypeptide of the present invention in cells or body fluid of an individual; and (b) comparing the assayed polypeptide expression level with a standard polypeptide expression level, whereby an increase or decrease in the assayed polypeptide expression level compared to the standard expression level is indicative of a disorder. With respect to cancer, the presence of a relatively high amount of transcript in biopsied tissue from an individual may indicate a predisposition for the development of the disease, or may provide a means for detecting the disease prior to the appearance of actual clinical symptoms. A more definitive diagnosis of this type may allow health professionals to employ preventative measures or aggressive treatment earlier thereby preventing the development or further progression of the cancer.

[0381] Moreover, polypeptides of the present invention can be used to treat or prevent diseases or conditions of the ovaries and/or breast, including, but not limited to, neoplastic disorders (e.g., ovarian Krukenberg tumor, malignant mixed Mullerian tumors, and/or as described under “Hyperproliferative Disorders” below), infectious diseases (e.g., mastitis, oophoritis, and/or as described under “Infectious Diseases” below), and inflammatory diseases (e.g., abcesses and/or as described under “Immune Disorders” below) and as described in “Reproductive System Disorders” below. In preferred embodiments, polynucleotides expressed in a particular tissue type (see, e.g., Table 1, column 8) are used to diagnose, detect, prevent, treat and/or prognose disorders associated with the tissue type. For example, patients can be administered a polypeptide of the present invention in an effort to replace absent or decreased levels of the polypeptide (e.g., insulin), to supplement absent or decreased levels of a different polypeptide (e.g., hemoglobin S for hemoglobin B, SOD, catalase, DNA repair proteins), to inhibit the activity of a polypeptide (e.g., an oncogene or tumor supressor), to activate the activity of a polypeptide (e.g., by binding to a receptor), to reduce the activity of a membrane bound receptor by competing with it for free ligand (e.g., soluble TNF receptors used in reducing inflammation), or to bring about a desired response (e.g., blood vessel growth inhibition, enhancement of the immune response to proliferative cells or tissues).

[0382] Similarly, antibodies directed to a polypeptide of the present invention can also be used to treat disease (as described supra, and elsewhere herein). For example, administration of an antibody directed to a polypeptide of the present invention can bind, and/or neutralize the polypeptide, and/or reduce overproduction of the polypeptide. Similarly, administration of an antibody can activate the polypeptide, such as by binding to a polypeptide bound to a membrane (receptor).

[0383] At the very least, the polypeptides of the present invention can be used as molecular weight markers on SDS-PAGE gels or on molecular sieve gel filtration columns using methods well known to those of skill in the art. Polypeptides can also be used to raise antibodies, which in turn are used to measure protein expression from a recombinant cell, as a way of assessing transformation of the host cell. Moreover, the polypeptides of the present invention can be used to test the biological activities described herein.

[0384] Diagnostic Asssays

[0385] The compounds of the present invention are useful for diagnosis, treatment, prevention and/or prognosis of various ovarian and/or breast related disorders in mammals, preferably humans. Such disorders include, but are not limited to, neoplastic disorders (e.g., ovarian Krukenberg tumor, malignant mixed Mullerian tumors, and/or as described under “Hyperproliferative Disorders” below), infectious diseases (e.g., mastitis, oophoritis, and/or as described under “Infectious Diseases” below), and inflammatory diseases (e.g., abcesses and/or as described under “Immune Disorders” below) and as described in “Reproductive System Disorders” below. In preferred embodiments, polynucleotides expressed in a particular tissue type (see, e.g., Table 1, column 8) are used to diagnose, detect, prevent, treat and/or prognose disorders associated with the tissue type.

[0386] Ovarian antigens are expressed in the ovaries. For a number of ovarian-related disorders, substantially altered (increased or decreased) levels of ovarian antigen gene expression can be detected in ovarian tissue or other cells or bodily fluids (e.g., sera, plasma, urine, semen, synovial fluid or spinal fluid) taken from an individual having such a disorder, relative to a “standard” ovarian antigen gene expression level, that is, the ovarian antigen expression level in ovarian tissues or bodily fluids from an individual not having the ovarian disorder. Thus, the invention provides a diagnostic method useful during diagnosis of a ovarian disorder, which involves measuring the expression level of the gene encoding the ovarian associated polypeptide in ovarian tissue or other cells or body fluid from an individual and comparing the measured gene expression level with a standard ovarian antigens gene expression level, whereby an increase or decrease in the gene expression level(s) compared to the standard is indicative of a ovarian disorder.

[0387] In specific embodiments, the invention provides a diagnostic method useful during diagnosis of a disorder of a normal or diseased tissue/cell source corresponding to column 8 of Table 1, which involves measuring the expression level of the coding sequence of a polynucleotide sequence associated with this tissue/cell source as disclosed in Table 1 in the tissue/cell source or other cells or body fluid from an individual and comparing the expression level of the coding sequence with a standard expression level of the coding sequence of a polynucleotide sequence, whereby an increase or decrease in the gene expression level(s) compared to the standard is indicative of a disorder of a normal or diseased tissue/cell source corresponding to column 8 of Table 1.

[0388] In particular, it is believed that certain tissues in mammals with cancer of cells or tissue of the ovaries and/or breast express significantly enhanced or reduced levels of normal or altered ovarian antigen expression and mRNA encoding the ovarian associated polypeptide when compared to a corresponding “standard” level. Further, it is believed that enhanced or depressed levels of the ovarian associated polypeptide can be detected in certain body fluids (e.g., sera, plasma, urine, and spinal fluid) or cells or tissue from mammals with such a cancer when compared to sera from mammals of the same species not having the cancer.

[0389] For example, as disclosed herein, ovarian associated polypeptides of the invention are expressed in the ovaries. Accordingly, polynucleotides of the invention (e.g., polynucleotide sequences complementary to all or a portion of a ovarian antigen mRNA nucleotide sequence of SEQ ID NO: X, nucleotide sequence encoding SEQ ID NO: Y, nucleotide sequence encoding a polypeptide encoded by SEQ ID NO: X and/or a nucleotide sequence delineated by columns 8 and 9 of Table 2) and antibodies (and antibody fragments) directed against the polypeptides of the invention may be used to quantitate or qualitate concentrations of cells of the ovaries expressing ovarian antigens, preferrably on their cell surfaces. These polynucleotides and antibodies additionally have diagnostic applications in detecting abnormalities in the level of ovarian antigens gene expression, or abnormalities in the structure and/or temporal, tissue, cellular, or subcellular location of ovarian antigens. These diagnostic assays may be performed in vivo or in vitro, such as, for example, on blood samples, biopsy tissue or autopsy tissue. In specific embodiments, polynucleotides and antibodies of the invention are used to quantitate or qualitate tissues/cells corresponding to the library source disclosed in column 8 of Table 1 expressing the corresponding ovarian sequence disclosed in the same row of Table 1, preferrably on their cell surface.

[0390] Thus, the invention provides a diagnostic method useful during diagnosis of a ovarian and/or breast disorder, including cancers, which involves measuring the expression level of the gene encoding the ovarian antigen polypeptide in ovarian and/or breast tissue or other cells or body fluid from an individual and comparing the measured gene expression level with a standard ovarian antigen gene expression level, whereby an increase or decrease in the gene expression level compared to the standard is indicative of a ovarian and/or breast disorder. In specific embodiments, polynucleotides and antibodies of the invention are used to quantitate or qualitate tissues/cells corresponding to the library source disclosed in column 8 of Table 1 expressing the corresponding ovarian sequence disclosed in the same row of Table 1, preferrably on their cell surface.

[0391] Where a diagnosis of a disorder in the ovaries and/or breast, including diagnosis of a tumor, has already been made according to conventional methods, the present invention is useful as a prognostic indicator, whereby patients exhibiting enhanced or depressed ovarian antigen gene expression will experience a worse clinical outcome relative to patients expressing the gene at a level nearer the standard level.

[0392] By “assaying the expression level of the gene encoding the ovarian associated polypeptide” is intended qualitatively or quantitatively measuring or estimating the level of the ovarian antigen polypeptide or the level of the mRNA encoding the ovarian antigen polypeptide in a first biological sample either directly (e.g., by determining or estimating absolute protein level or mRNA level) or relatively (e.g., by comparing to the ovarian associated polypeptide level or mRNA level in a second biological sample). Preferably, the ovarian antigen polypeptide expression level or mRNA level in the first biological sample is measured or estimated and compared to a standard ovarian antigen polypeptide level or mRNA level, the standard being taken from a second biological sample obtained from an individual not having the disorder or being determined by averaging levels from a population of individuals not having a disorder of the ovaries and/or breast. As will be appreciated in the art, once a standard ovarian antigen polypeptide level or mRNA level is known, it can be used repeatedly as a standard for comparison.

[0393] By “biological sample” is intended any biological sample obtained from an individual, cell line, tissue culture, or other source containing ovarian antigen polypeptides (including portions thereof) or mRNA. As indicated, biological samples include body fluids (such as sera, plasma, urine, synovial fluid and spinal fluid) which contain cells expressing ovarian antigen polypeptides, ovarian and/or breast tissue, and other tissue sources found to express the full length or fragments thereof of a ovarian cancer antigen. Methods for obtaining tissue biopsies and body fluids from mammals are well known in the art. Where the biological sample is to include mRNA, a tissue biopsy is the preferred source.

[0394] Total cellular RNA can be isolated from a biological sample using any suitable technique such as the single-step guanidinium-thiocyanate-phenol-chloroform method described in Chomczynski and Sacchi, Anal. Biochem. 162:156-159 (1987). Levels of mRNA encoding the ovarian antigen polypeptides are then assayed using any appropriate method. These include Northern blot analysis, S1 nuclease mapping, the polymerase chain reaction (PCR), reverse transcription in combination with the polymerase chain reaction (RT-PCR), and reverse transcription in combination with the ligase chain reaction (RT-LCR).

[0395] The present invention also relates to diagnostic assays such as quantitative and diagnostic assays for detecting levels of ovarian antigen polypeptides, in a biological sample (e.g., cells and tissues), including determination of normal and abnormal levels of polypeptides. Thus, for instance, a diagnostic assay in accordance with the invention for detecting over-expression of ovarian antigens compared to normal control tissue samples may be used to detect the presence of tumors. Assay techniques that can be used to determine levels of a polypeptide, such as a ovarian antigen polypeptide of the present invention in a sample derived from a host are well-known to those of skill in the art. Such assay methods include radioimmunoassays, competitive-binding assays, Western Blot analysis and ELISA assays. Assaying ovarian antigen polypeptide levels in a biological sample can occur using any art-known method.

[0396] Assaying ovarian antigen polypeptide levels in a biological sample can occur using antibody-based techniques. For example, ovarian antigen polypeptide expression in tissues can be studied with classical immunohistological methods (Jalkanen et al., J. Cell. Biol. 101:976-985 (1985); Jalkanen, M., et al., J. Cell. Biol. 105:3087-3096 (1987)). Other antibody-based methods useful for detecting ovarian antigen polypeptide gene expression include immunoassays, such as the enzyme linked immunosorbent assay (ELISA) and the radioimmunoassay (RIA). Suitable antibody assay labels are known in the art and include enzyme labels, such as, glucose oxidase, and radioisotopes, such as iodine (¹²⁵I, ¹²¹I), carbon (¹⁴C), sulfur (³⁵S), tritium (³H), indium (¹¹²In), and technetium (^{99m}Tc), and fluorescent labels, such as fluorescein and rhodamine, and biotin.

[0397] The tissue or cell type to be analyzed will generally include those which are known, or suspected, to express the ovarian antigen gene (such as, for example, cells of the ovaries and/or breast or ovarian and/or breast cancer). The protein isolation methods employed herein may, for example, be such as those described in Harlow and Lane (Harlow, E. and Lane, D., 1988, “Antibodies: A Laboratory Manual”, Cold Spring Harbor Laboratory Press, Cold Spring Harbor, N.Y.), which is incorporated herein by reference in its entirety. The isolated cells can be derived from cell culture or from a patient. The analysis of cells taken from culture may be a necessary step in the assessment of cells that could be used as part of a cell-based gene therapy technique or, alternatively, to test the effect of compounds on the expression of the ovarian antigen gene.

[0398] For example, antibodies, or fragments of antibodies, such as those described herein, may be used to quantitatively or qualitatively detect the presence of ovarian antigen gene products or conserved variants or peptide fragments thereof. This can be accomplished, for example, by immunofluorescence techniques employing a fluorescently labeled antibody coupled with light microscopic, flow cytometric, or fluorimetric detection.

[0399] In a preferred embodiment, antibodies, or fragments of antibodies directed to any one or all of the predicted epitope domains of the ovarian antigen polypeptides (Shown in Table 1, column 7) may be used to quantitatively or qualitatively detect the presence of ovarian antigen gene products or conserved variants or peptide fragments thereof. This can be accomplished, for example, by immunofluorescence techniques employing a fluorescently labeled antibody coupled with light microscopic, flow cytometric, or fluorimetric detection.

[0400] In an additional preferred embodiment, antibodies, or fragments of antibodies directed to a conformational epitope of an ovarian antigen may be used to quantitatively or qualitatively detect the presence of ovarian antigen gene products or conserved variants or peptide fragments thereof. This can be accomplished, for example, by immunofluorescence techniques employing a fluorescently labeled antibody coupled with light microscopic, flow cytometric, or fluorimetric detection.

[0401] The antibodies (or fragments thereof), and/or ovarian antigen polypeptides of the present invention may, additionally, be employed histologically, as in immunofluorescence, immunoelectron microscopy or non-immunological assays, for in situ detection of ovarian antigen gene products or conserved variants or peptide fragments thereof. In situ detection may be accomplished by removing a histological specimen from a patient, and applying thereto a labeled antibody or ovarian antigen polypeptide of the present invention. The antibody (or fragment thereof) or ovarian antigen polypeptide is preferably applied by overlaying the labeled antibody (or fragment) onto a biological sample. Through the use of such a procedure, it is possible to determine not only the presence of the ovarian antigen gene product, or conserved variants or peptide fragments, or ovarian antigen polypeptide binding, but also its distribution in the examined tissue. Using the present invention, those of ordinary skill will readily perceive that any of a wide variety of histological methods (such as staining procedures) can be modified in order to achieve such in situ detection.

[0402] Immunoassays and non-immunoassays for ovarian antigen gene products or conserved variants or peptide fragments thereof will typically comprise incubating a sample, such as a biological fluid, a tissue extract, freshly harvested cells, or lysates of cells which have been incubated in cell culture, in the presence of a detectably labeled antibody capable of binding ovarian antigen gene products or conserved variants or peptide fragments thereof, and detecting the bound antibody by any of a number of techniques well-known in the art.

[0403] The biological sample may be brought in contact with and immobilized onto a solid phase support or carrier such as nitrocellulose, or other solid support which is capable of immobilizing cells, cell particles or soluble proteins. The support may then be washed with suitable buffers followed by treatment with the detectably labeled anti-ovarian antigen antibody or detectable ovarian antigen polypeptide. The solid phase support may then be washed with the buffer a second time to remove unbound antibody or polypeptide. Optionally the antibody is subsequently labeled. The amount of bound label on solid support may then be detected by conventional means.

[0404] By “solid phase support or carrier” is intended any support capable of binding an antigen or an antibody. Well-known supports or carriers include glass, polystyrene, polypropylene, polyethylene, dextran, nylon, amylases, natural and modified celluloses, polyacrylamides, gabbros, and magnetite. The nature of the carrier can be either soluble to some extent or insoluble for the purposes of the present invention. The support material may have virtually any possible structural configuration so long as the coupled molecule is capable of binding to an antigen or antibody. Thus, the support configuration may be spherical, as in a bead, or cylindrical, as in the inside surface of a test tube, or the external surface of a rod. Alternatively, the surface may be flat such as a sheet, test strip, etc. Preferred supports include polystyrene beads. Those skilled in the art will know many other suitable carriers for binding antibody or antigen, or will be able to ascertain the same by use of routine experimentation.

[0405] The binding activity of a given lot of anti-ovarian antigen antibody or ovarian antigen polypeptide may be determined according to well known methods. Those skilled in the art will be able to determine operative and optimal assay conditions for each determination by employing routine experimentation.

[0406] In addition to assaying ovarian antigen polypeptide levels or polynucleotide levels in a biological sample obtained from an individual, ovarian antigen polypeptide or polynucleotide can also be detected in vivo by imaging. For example, in one embodiment of the invention, ovarian antigen polypeptide and/or anti-ovarian antigen antibodies are used to image ovarian and/or breast diseased cells, such as neoplasms. In another embodiment, ovarian antigen polynucleotides of the invention (e.g., polynucleotides complementary to all or a portion of ovarian antigen mRNA) and/or anti ovarian antigen antibodies (e.g., antibodies directed to any one or a combination of the epitopes of ovarian antigens, antibodies directed to a conformational epitope of ovarian antigens, antibodies directed to the full length polypeptide expressed on the cell surface of a mammalian cell) are used to image diseased or neoplastic cells of the ovaries and/or breast.

[0407] Antibody labels or markers for in vivo imaging of ovarian antigen polypeptides include those detectable by X-radiography, NMR, MRI, CAT-scans or ESR. For X-radiography, suitable labels include radioisotopes such as barium or cesium, which emit detectable radiation but are not overtly harmful to the subject. Suitable markers for NMR and ESR include those with a detectable characteristic spin, such as deuterium, which may be incorporated into the antibody by labeling of nutrients for the relevant hybridoma. Where in vivo imaging is used to detect enhanced levels of ovarian antigen polypeptides for diagnosis in humans, it may be preferable to use human antibodies or “humanized” chimeric monoclonal antibodies. Such antibodies can be produced using techniques described herein or otherwise known in the art. For example methods for producing chimeric antibodies are known in the art. See, for review, Morrison, Science 229:1202 (1985); Oi et al., BioTechniques 4:214 (1986); Cabilly et al., U.S. Pat. No. 4,816,567; Taniguchi et al., EP 171496; Morrison et al., EP 173494; Neuberger et al., WO 8601533; Robinson et al., WO 8702671; Boulianne et al., Nature 312:643 (1984); Neuberger et al., Nature 314:268 (1985).

[0408] Additionally, any ovarian antigen polypeptides whose presence can be detected, can be administered. For example, colon or colon cancer antigen polypeptides labeled with a radio-opaque or other appropriate compound can be administered and visualized in vivo, as discussed, above for labeled antibodies. Further such ovarian antigen polypeptides can be utilized for in vitro diagnostic procedures.

[0409] An ovarian antigen polypeptide-specific antibody or antibody fragment which has been labeled with an appropriate detectable imaging moiety, such as a radioisotope (for example, ¹³¹I, ¹¹²In, 99m Tc), a radio-opaque substance, or a material detectable by nuclear magnetic resonance, is introduced (for example, parenterally, subcutaneously or intraperitoneally) into the mammal to be examined for an ovarian and/or breast disorder. It will be understood in the art that the size of the subject and the imaging system used will determine the quantity of imaging moiety needed to produce diagnostic images. In the case of a radioisotope moiety, for a human subject, the quantity of radioactivity injected will normally range from about 5 to 20 millicuries of ^{99m}Tc. The labeled antibody or antibody fragment will then preferentially accumulate at the location of cells which contain ovarian antigen protein. In vivo tumor imaging is described in S. W. Burchiel et al., “Immunopharmacokinetics of Radiolabeled Antibodies and Their Fragments” (Chapter 13 in Tumor Imaging: The Radiochemical Detection of Cancer, S. W. Burchiel and B. A. Rhodes, eds., Masson Publishing Inc. (1982)).

[0410] With respect to antibodies, one of the ways in which the anti-ovarian antigen antibody can be detectably labeled is by linking the same to an enzyme and using the linked product in an enzyme immunoassay (EIA) (Voller, A., “The Enzyme Linked Immunosorbent Assay (ELISA)”, 1978, Diagnostic Horizons 2:1-7, Microbiological Associates Quarterly Publication, Walkersville, Md.); Voller et al., J. Clin. Pathol. 31:507-520 (1978); Butler, J. E., Meth. Enzymol. 73:482-523 (1981); Maggio, E. (ed.), 1980, Enzyme Immunoassay, CRC Press, Boca Raton, Fla.,; Ishikawa, E. et al., (eds.), 1981, Enzyme Immunoassay, Kgaku Shoin, Tokyo). The enzyme, which is bound to the antibody will react with an appropriate substrate, preferably a chromogenic substrate, in such a manner as to produce a chemical moiety which can be detected, for example, by spectrophotometric, fluorimetric or by visual means. Enzymes which can be used to detectably label the antibody include, but are not limited to, malate dehydrogenase, staphylococcal nuclease, delta-5-steroid isomerase, yeast alcohol dehydrogenase, alpha-glycerophosphate, dehydrogenase, triose phosphate isomerase, horseradish peroxidase, alkaline phosphatase, asparaginase, glucose oxidase, beta-galactosidase, ribonuclease, urease, catalase, glucose-6-phosphate dehydrogenase, glucoamylase and acetylcholinesterase. Additionally, the detection can be accomplished by calorimetric methods which employ a chromogenic substrate for the enzyme. Detection may also be accomplished by visual comparison of the extent of enzymatic reaction of a substrate in comparison with similarly prepared standards.

[0411] Detection may also be accomplished using any of a variety of other immunoassays. For example, by radioactively labeling the antibodies or antibody fragments, it is possible to detect ovarian antigens through the use of a radioimmunoassay (RIA) (see, for example, Weintraub, B., Principles of Radioimmunoassays, Seventh Training Course on Radioligand Assay Techniques, The Endocrine Society, March, 1986, which is incorporated by reference herein). The radioactive isotope can be detected by means including, but not limited to, a gamma counter, a scintillation counter, or autoradiography.

[0412] It is also possible to label the antibody with a fluorescent compound. When the fluorescently labeled antibody is exposed to light of the proper wave length, its presence can then be detected due to fluorescence. Among the most commonly used fluorescent labeling compounds are fluorescein isothiocyanate, rhodamine, phycoerythrin, phycocyanin, allophycocyanin, ophthaldehyde and fluorescamine.

[0413] The antibody can also be detectably labeled using fluorescence emitting metals such as ¹⁵²Eu, or others of the lanthanide series. These metals can be attached to the antibody using such metal chelating groups as diethylenetriaminepentacetic acid (DTPA) or ethylenediaminetetraacetic acid (EDTA).

[0414] The antibody also can be detectably labeled by coupling it to a chemiluminescent compound. The presence of the chemiluminescent-tagged antibody is then determined by detecting the presence of luminescence that arises during the course of a chemical reaction. Examples of particularly useful chemiluminescent labeling compounds are luminol, isoluminol, theromatic acridinium ester, imidazole, acridinium salt and oxalate ester.

[0415] Likewise, a bioluminescent compound may be used to label the antibody of the present invention. Bioluminescence is a type of chemiluminescence found in biological systems in, which a catalytic protein increases the efficiency of the chemiluminescent reaction. The presence of a bioluminescent protein is determined by detecting the presence of luminescence. Important bioluminescent compounds for purposes of labeling are luciferin, luciferase and aequorin.

[0416] Methods for Detecting Ovarian and/or Breast Disease, Including Cancer

[0417] In general, an ovarian and/or breast disease or cancer may be detected in a patient based on the presence of one or more ovarian antigen proteins of the invention and/or polynucleotides encoding such proteins in abiological sample (for example, blood, sera, urine, and/or tumor biopsies) obtained from the patient. In other words, such proteins and/or polynucleotides may be used as markers to indicate the presence or absence of a colon disease or disorder, including cancer. Cancers that may be diagnosed, and/or prognosed using the compositions of the invention include but are not limited to, ovarian and/or breast cancer. In addition, such proteins and/or polynucleotides may be useful for the detection of other diseases and cancers, including cancers of tissues/cells corresponding to the library source disclosed in column 8 of Table 1 expressing the corresponding ovarian sequence disclosed in the same row of Table 1. The binding agents provided herein generally permit detection of the level of antigen that binds to the agent in the biological sample. Polynucleotide primers and probes may be used to detect the level of mRNA encoding ovarian antigen polypeptides, which is also indicative of the presence or absence of an ovarian and/or breast disease or disorder, including cancer. In general, ovarian antigen polypeptides should be present at a level that is at least three fold higher in diseased tissue than in normal tissue.

[0418] There are a variety of assay formats known to those of ordinary skill in the art for using a binding agent to detect polypeptide markers in a sample. See, e.g., Harlow and Lane, supra. In general, the presence or absence of a colon disease in a patient may be determined by (a) contacting a biological sample obtained from a patient with a binding agent; (b) detecting in the sample a level of polypeptide that binds to the binding agent; and (c) comparing the level of polypeptide with a predetermined cut-off value.

[0419] In a preferred embodiment, the assay involves the use of binding agent immobilized on a solid support to bind to and remove the ovarian antigen polypeptide of the invention from the remainder of the sample. The bound polypeptide may then be detected using a detection reagent that contains a reporter group and specifically binds to the binding agent/polypeptide complex. Such detection reagents may comprise, for example, a binding agent that specifically binds to the polypeptide or an antibody or other agent that specifically binds to the binding agent, such as an anti-immunoglobulin, protein G, protein A or a lectin. Alternatively, a competitive assay may be utilized, in which a polypeptide is labeled with a reporter group and allowed to bind to the immobilized binding agent after incubation of the binding agent with the sample. The extent to which components of the sample inhibit the binding of the labeled polypeptide to the binding agent is indicative of the reactivity of the sample with the immobilized binding agent. Suitable polypeptides for use within such assays include ovarian antigen polypeptides and portions thereof, or antibodies, to which the binding agent binds, as described above.

[0420] The solid support may be any material known to those of skill in the art to which ovarian antigen polypeptides of the invention may be attached. For example, the solid support may be a test well in a microtiter plate or a nitrocellulose or other suitable membrane. Alternatively, the support may be a bead or disc, such as glass fiberglass, latex or a plastic material such as polystyrene or polyvinylchloride. The support may also be a magnetic particle or a fiber optic sensor, such as those disclosed, for example, in U.S. Pat. No. 5,359,681. The binding agent may be immobilized on the solid support using a variety of techniques known to those of skill in the art, which are amply described in the patent and scientific literature. In the context of the present invention, the term “immobilization” refers to both noncovalent association, such as adsorption, and covalent attachment (which may be a direct linkage between the agent and functional groups on the support or may be a linkage by way of a cross-linking agent). Immobilization by adsorption to a well in a microtiter plate or to a membrane is preferred. In such cases, adsorption may be achieved by contacting the binding agent, in a suitable buffer, with the solid support for the suitable amount of time. The contact time varies with temperature, but is typically between about 1 hour and about 1 day. In general, contacting a well of plastic microtiter plate (such as polystyrene or polyvinylchloride) with an amount of binding agent ranging from about 10 ng to about 10 ug, and preferably about 100 ng to about 1 ug, is sufficient to immobilize an adequate amount of binding agent.

[0421] Covalent attachment of binding agent to a solid support may generally be achieved by first reacting the support with a bifunctional reagent that will react with both the support and a functional group, such as a hydroxyl or amino group, on the binding agent. For example, the binding agent may be covalently attached to supports having an appropriate polymer coating using benzoquinone or by condensation of an aldehyde group on the support with an amine and an active hydrogen on the binding partner (see, e.g., Pierce Immunotechnology Catalog and Handbook, 1991, at A12-A13).

[0422] Gene Therapy Methods

[0423] Also encompassed by the present invention are gene therapy methods for treating or preventing disorders, diseases and conditions. The gene therapy methods relate to the introduction of nucleic acid (DNA, RNA and antisense DNA or RNA) sequences into an animal to achieve expression of an ovarian antigen of the present invention. This method requires a polynucleotide which codes for a polypeptide of the present invention operatively linked to a promoter and any other genetic elements necessary for the expression of the polypeptide by the target tissue. Such gene therapy and delivery techniques are known in the art, see, for example, WO90/11092, which is herein incorporated by reference.

[0424] Thus, for example, cells from a patient may be engineered with a polynucleotide (DNA or RNA) comprising a promoter operably linked to a polynucleotide of the present invention ex vivo, with the engineered cells then being provided to a patient to be treated with the polypeptide of the present invention. Such methods are well-known in the art. For example, see Belldegrun, A., et al., J. Natl. Cancer Inst. 85: 207-216 (1993); Ferrantini, M. et al., Cancer Research 53: 1107-1112 (1993); Ferrantini, M. et al., J. Immunology 153: 4604-4615 (1994); Kaido, T., et al., Int. J. Cancer 60: 221-229 (1995); Ogura, H., et al., Cancer Research 50: 5102-5106 (1990); Santodonato, L., et al., Human Gene Therapy 7:1-10 (1996); Santodonato, L., et al., Gene Therapy 4:1246-1255 (1997); and Zhang, J. -F. et al., Cancer Gene Therapy 3: 31-38 (1996)), which are herein incorporated by reference. In one embodiment, the cells, which are engineered are arterial cells. The arterial cells may be reintroduced into the patient through direct injection to the artery, the tissues surrounding the artery, or through catheter injection.

[0425] As discussed in more detail below, the polynucleotide constructs can be delivered by any method that delivers injectable materials to the cells of an animal, such as, injection into the interstitial space of tissues (heart, muscle, skin, lung, liver, and the like). The polynucleotide constructs may be delivered in a pharmaceutically acceptable liquid or aqueous carrier.

[0426] In one embodiment, the polynucleotide of the present invention is delivered as a naked polynucleotide. The term “naked” polynucleotide, DNA or RNA refers to sequences that are free from any delivery vehicle that acts to assist, promote or facilitate entry into the cell, including viral sequences, viral particles, liposome formulations, lipofectin or precipitating agents and the like. However, the polynucleotide of the present invention can also be delivered in-liposome formulations and lipofectin formulations and the like can be prepared by methods well known to those skilled in the art. Such methods are described, for example, in U.S. Pat. Nos. 5,593,972, 5,589,466, and 5,580,859, which are herein incorporated by reference.

[0427] The polynucleotide vector constructs used in the gene therapy method are preferably constructs that will not integrate into the host genome nor will they contain sequences that allow for replication. Appropriate vectors include pWLNEO, pSV2CAT, pOG44, pXT1 and pSG available from Stratagene; pSVK3, pBPV, pMSG and pSVL available from Pharmacia; and pEF1/V5, pcDNA3.1, and pRc/CMV2 available from Invitrogen. Other suitable vectors will be readily apparent to the skilled artisan.

[0428] Any strong promoter known to those skilled in the art can be used for driving the expression of the polynucleotide sequence. Suitable promoters include adenoviral promoters, such as the adenoviral major late promoter; or heterologous promoters, such as the cytomegalovirus (CMV) promoter; the respiratory syncytial virus (RSV) promoter; inducible promoters, such as the MMT promoter, the metallothionein promoter; heat shock promoters; the albumin promoter; the ApoAI promoter; human globin promoters; viral thyinidine kinase promoters, such as the Herpes Simplex thymidine kinase promoter; retroviral LTRs; the b-actin promoter; and human growth hormone promoters. The promoter also may be the native promoter for the polynucleotide of the present invention.

[0429] Unlike other gene therapy techniques, one major advantage of introducing naked nucleic acid sequences into target cells is the transitory nature of the polynucleotide synthesis in the cells. Studies have shown that non-replicating DNA sequences can be introduced into cells to provide production of the desired polypeptide for periods of up to six months.

[0430] The polynucleotide construct can be delivered to the interstitial space of tissues within the an animal, including of muscle, skin, brain, lung, liver, spleen, bone marrow, thymus, heart, lymph, blood, bone, cartilage, pancreas, kidney, gall bladder, stomach, intestine, testis, ovary, uterus, rectum, nervous system, eye, gland, and connective tissue. Interstitial space of the tissues comprises the intercellular, fluid, mucopolysaccharide matrix among the reticular fibers of organ tissues, elastic fibers in the walls of vessels or chambers, collagen fibers of fibrous tissues, or that same matrix within connective tissue ensheathing muscle cells or in the lacunae of bone. It is similarly the space occupied by the plasma of the circulation and the lymph fluid of the lymphatic channels. Delivery to the interstitial space of muscle tissue is preferred for the reasons discussed below. They may be conveniently delivered by injection into the tissues comprising these cells. They are preferably delivered to and expressed in persistent, non-dividing cells which are differentiated, although delivery and expression may be achieved in non-differentiated or less completely differentiated cells, such as, for example, stem cells of blood or skin fibroblasts. In vivo muscle cells are particularly competent in their ability to take up and express polynucleotides.

[0431] For the naked nucleic acid sequence injection, an effective dosage amount of DNA or RNA will be in the range of from about 0.05 mg/kg body weight to about 50 mg/kg body weight. Preferably the dosage will be from about 0.005 mg/kg to about 20 mg/kg and more preferably from about 0.05 mg/kg to about 5 mg/kg. Of course, as the artisan of ordinary skill will appreciate, this dosage will vary according to the tissue site of injection. The appropriate and effective dosage of nucleic acid sequence can readily be determined by those of ordinary skill in the art and may depend on the condition being treated and the route of administration.

[0432] The preferred route of administration is by the parenteral route of injection into the interstitial space of tissues. However, other parenteral routes may also be used, such as, inhalation of an aerosol formulation particularly for delivery to lungs or bronchial tissues, throat or mucous membranes of the nose. In addition, naked DNA constructs can be delivered to arteries during angioplasty by the catheter used in the procedure.

[0433] The naked polynucleotides are delivered by any method known in the art, including, but not limited to, direct needle injection at the delivery site, intravenous injection, topical administration, catheter infusion, and so-called “gene guns”. These delivery methods are known in the art.

[0434] The constructs may also be delivered with delivery vehicles such as viral sequences, viral particles, liposome formulations, lipofectin, precipitating agents, etc. Such methods of delivery are known in the art.

[0435] In certain embodiments, the polynucleotide constructs are complexed in a liposome preparation. Liposomal preparations for use in the instant invention include cationic (positively charged), anionic (negatively charged) and neutral preparations. However, cationic liposomes are particularly preferred because a tight charge complex can be formed between the cationic liposome and the polyanionic nucleic acid. Cationic liposomes have been shown to mediate intracellular delivery of plasmid DNA (Felgner et al., Proc. Natl. Acad. Sci. USA (1987) 84:7413-7416, which is herein incorporated by reference); mRNA (Malone et al., Proc. Natl. Acad. Sci. USA (1989) 86:6077-6081, which is herein incorporated by reference); and purified transcription factors (Debs et al., J. Biol. Chem. (1990) 265:10189-10192, which is herein incorporated by reference), in functional form.

[0436] Cationic liposomes are readily available. For example, N[1-2,3-dioleyloxy)propyl]-N,N,N-triethylammonium (DOTMA) liposomes are particularly useful and are available under the trademark Lipofectin, from GIBCO BRL, Grand Island, N.Y., (see, also, Felgner et al., Proc. Natl Acad. Sci. USA (1987) 84:7413-7416, which is herein incorporated by reference). Other commercially available liposomes include transfectace (DDAB/DOPE) and DOTAP/DOPE (Boehringer).

[0437] Other cationic liposomes can be prepared from readily available materials using techniques well known in the art. See, e.g. PCT Publication No. WO 90/11092 (which is herein incorporated by reference) for a description of the synthesis of DOTAP (1,2-bis(oleoyloxy)-3-(trimethylammonio)propane) liposomes. Preparation of DOTMA liposomes is explained in the literature, see, e.g., P. Felgner et al., Proc. Natl. Acad. Sci. USA 84:7413-7417, which is herein incorporated by reference. Similar methods can be used to prepare liposomes from other cationic lipid materials.

[0438] Similarly, anionic and neutral liposomes are readily available, such as from Avanti Polar Lipids (Birmingham, Ala.), or can be easily prepared using readily available materials. Such materials include phosphatidyl choline, cholesterol, phosphatidyl ethanolamine, dioleoylphosphatidyl choline (DOPC), dioleoylphosphatidyl glycerol (DOPG), dioleoylphoshatidyl ethanolamine (DOPE), among others. These materials can also be mixed with the DOTMA and DOTAP starting materials in appropriate ratios. Methods for making liposomes using these materials are well known in the art.

[0439] For example, commercially dioleoylphosphatidyl choline (DOPC), dioleoylphosphatidyl glycerol (DOPG), and dioleoylphosphatidyl ethanolamine (DOPE) can be used in various combinations to make conventional liposomes, with or without the addition of cholesterol. Thus, for example, DOPG/DOPC vesicles can be prepared by drying 50 mg each of DOPG and DOPC under a stream of nitrogen gas into a sonication vial. The sample is placed under a vacuum pump overnight and is hydrated the following day with deionized water. The sample is then sonicated for 2 hours in a capped vial, using a Heat Systems model 350 sonicator equipped with an inverted cup (bath type) probe at the maximum setting while the bath is circulated at 15EC. Alternatively, negatively charged vesicles can be prepared without sonication to produce multilamellar vesicles or by extrusion through nucleopore membranes to produce unilamellar vesicles of discrete size. Other methods are known and available to those of skill in the art.

[0440] The liposomes can comprise multilamellar vesicles (MLVs), small unilamellar vesicles (SUVs), or large unilamellar vesicles (LUVs), with SUVs being preferred. The various liposome-nucleic acid complexes are prepared using methods well known in the art. See, e.g., Straubinger et al., Methods of Immunology (1983), 101:512-527, which is herein incorporated by reference. For example, MLVs containing nucleic acid can be prepared by depositing a thin film of phospholipid on the walls of a glass tube and subsequently hydrating with a solution of the material to be encapsulated. SUVs are prepared by extended sonication of MLVs to produce a homogeneous population of unilamellar liposomes. The material to be entrapped is added to a suspension of preformed MLVs and then sonicated. When using liposomes containing cationic lipids, the dried lipid film is resuspended in an appropriate solution such as sterile water or an isotonic buffer solution such as 10 mM Tris/NaCl, sonicated, and then the preformed liposomes are mixed directly with the DNA. The liposome and DNA form a very stable complex due to binding of the positively charged liposomes to the cationic DNA. SUVs find use with small nucleic acid fragments. LUVs are prepared by a number of methods, well known in the art. Commonly used methods include Ca²⁺-EDTA chelation (Papahadjopoulos et al., Biochim. Biophys. Acta (1975) 394:483; Wilson et al., Cell 17:77 (1979); ether injection (Deamer, D. and Bangham, A., Biochim. Biophys. Acta 443:629 (1976); Ostro et al., Biochem. Biophys. Res. Commun. 76:836 (1977); Fraley et al., Proc. Natl. Acad. Sci. USA 76:3348 (1979)); detergent dialysis (Enoch, H. and Strittmatter, P., Proc. Natl. Acad. Sci. USA 76:145 (1979)); and reverse-phase evaporation (REV) (Fraley et al., J. Biol. Chem. 255:10431 (1980); Szoka et al., Proc. Natl. Acad. Sci. USA 75:145 (1978); Schaefer-Ridder et al., Science 215:166 (1982)), which are herein incorporated by reference.

[0441] Generally, the ratio of DNA to liposomes will be from about 10:1 to about 1:10. Preferably, the ration will be from about 5:1 to about 1:5. More preferably, the ration will be about 3:1 to about 1:3. Still more preferably, the ratio will be about 1:1.

[0442] U.S. Pat. No. 5,676,954 (which is herein incorporated by reference) reports on the injection of genetic material, complexed with cationic liposomes carriers, into mice. U.S. Pat. Nos. 4,897,355, 4,946,787, 5,049,386, 5,459,127, 5,589,466, 5,693,622, 5,580,859, 5,703,055, and international publication no. WO 94/9469 (which are herein incorporated by reference) provide cationic lipids for use in transfecting DNA into cells and mammals. U.S. Pat. Nos. 5,589,466, 5,693,622, 5,580,859, 5,703,055, and International Publication No. WO 94/9469 provide methods for delivering DNA-cationic lipid complexes to mammals.

[0443] In certain embodiments, cells are engineered, ex vivo or in vivo, using a retroviral particle containing RNA, which comprises a sequence encoding a polypeptide of the present invention. Retroviruses from which the retroviral plasmid vectors may be derived include, but are not limited to, Moloney Murine Leukemia Virus, spleen necrosis virus, Rous sarcoma Virus, Harvey Sarcoma Virus, avian leukosis virus, gibbon ape leukemia virus, human immunodeficiency virus, Mycloproliferative Sarcoma Virus, and mammary tumor virus.

[0444] The retroviral plasmid vector is employed to transduce packaging cell lines to form producer cell lines. Examples of packaging cells which may be transfected include, but are not limited to, the PE501, PA317, R-2, R-AM, PA12, T19-14X, VT-19-17-H2, RCRE, RCRIP, GP+E-86, GP+envAm12, and DAN cell lines as described in Miller, Human Gene Therapy 1:5-14 (1990), which is incorporated herein by reference in its entirety. The vector may transduce the packaging cells through any means known in the art. Such means include, but are not limited to, electroporation, the use of liposomes, and CaPO₄ precipitation. In one alternative, the retroviral plasmid vector may be encapsulated into a liposome, or coupled to a lipid, and then administered to a host.

[0445] The producer cell line generates infectious retroviral vector particles, which include polynucleotide encoding a polypeptide of the present invention. Such retroviral vector particles then may be employed, to transduce eukaryotic cells, either in vitro or in vivo. The transduced eukaryotic cells will express a polypeptide of the present invention.

[0446] In certain other embodiments, cells are engineered, ex vivo or in vivo, with polynucleotide contained in an adenovirus vector. Adenovirus can be manipulated such that it encodes and expresses a polypeptide of the present invention, and at the same time is inactivated in terms of its ability to replicate in a normal lytic viral life cycle. Adenovirus expression is achieved without integration of the viral DNA into the host cell chromosome, thereby alleviating concerns about insertional mutagenesis. Furthermore, adenoviruses have been used as live enteric vaccines for many years with an excellent safety profile (Schwartz, et al., Am. Rev. Respir. Dis.109:233-238 (1974)). Finally, adenovirus mediated gene transfer has been demonstrated in a number of instances including transfer of alpha-1-antitrypsin and CFTR to the lungs of cotton rats (Rosenfeld et al., Science 252:431-434 (1991); Rosenfeld et al., Cell 68:143-155 (1991)). Furthermore, extensive studies to attempt to establish adenovirus as a causative agent in human cancer were uniformly negative (Green et al., Proc. Natl. Acad. Sci. USA 76:6606 (1979)).

[0447] Suitable adenoviral vectors useful in the present invention are described, for example, in Kozarsky and Wilson, Curr. Opin. Genet. Devel. 3:499-503 (1993); Rosenfeld et al., Cell 68:143-155 (1992); Engelhardt et al., Human Genet. Ther. 4:759-769 (1993); Yang et al., Nature Genet. 7:362-369 (1994); Wilson et al., Nature 365:691-692 (1993); and U.S. Pat. No. 5,652,224, which are herein incorporated by reference. For example, the adenovirus vector Ad2 is useful and can be grown in human 293 cells. These cells contain the E1 region of adenovirus and constitutively express E1a and E1b, which complement the defective adenoviruses by providing the products of the genes deleted from the vector. In addition to Ad2, other varieties of adenovirus (e.g., Ad3, Ad5, and Ad7) are also useful in the present invention.

[0448] Preferably, the adenoviruses used in the present invention are replication deficient. Replication deficient adenoviruses require the aid of a helper virus and/or packaging cell line to form infectious particles. The resulting virus is capable of infecting cells and can express a polynucleotide of interest which is operably linked to a promoter, but cannot replicate in most cells. Replication deficient adenoviruses may be deleted in one or more of all or a portion of the following genes: E1a, E1b, E3, E4, E2a, or L1 through L5.

[0449] In certain other embodiments, the cells are engineered, ex vivo or in vivo, using an adeno-associated virus (AAV). AAVs are naturally occurring defective viruses that require helper viruses to produce infectious particles (Muzyczka, N., Curr. Topics in Microbiol. Immunol. 158:97 (1992)). It is also one of the few viruses that may integrate its DNA into non-dividing cells. Vectors containing as little as 300 base pairs of AAV can be packaged and can integrate, but space for exogenous DNA is limited to about 4.5 kb. Methods for producing and using such AAVs are known in the art. See, for example, U.S. Pat. Nos. 5,139,941, 5,173,414, 5,354,678, 5,436,146, 5,474,935, 5,478,745, and 5,589,377.

[0450] For example, an appropriate AAV vector for use in the present invention will include all the sequences necessary for DNA replication, encapsidation, and host-cell integration. The polynucleotide construct is inserted into the AAV vector using standard cloning methods, such as those found in Sambrook et al., Molecular Cloning: A Laboratory Manual, Cold Spring Harbor Press (1989). The recombinant AAV vector is then transfected into packaging cells which are infected with a helper virus, using any standard technique, including lipofection, electroporation, calcium phosphate precipitation, etc. Appropriate helper viruses include adenoviruses, cytomegaloviruses, vaccinia viruses, or herpes viruses. Once the packaging cells are transfected and infected, they will produce infectious AAV viral particles, which contain the polynucleotide construct. These viral particles are then used to transduce eukaryotic cells, either ex vivo or in vivo. The transduced cells will contain the polynucleotide construct integrated into its genome, and will express a polypeptide of the invention.

[0451] Another method of gene therapy involves operably associating heterologous control regions and endogenous ovarian antigen polynucleotide sequences (e.g., encoding an ovarian antigen polypeptide of the present invention) via homologous recombination (see, e.g., U.S. Pat. No. 5,641,670, issued Jun. 24, 1997; International Publication No. WO 96/29411, published Sep. 26, 1996; International Publication No. WO 94/12650, published Aug. 4, 1994; Koller et al., Proc. Natl. Acad. Sci. USA 86:8932-8935 (1989); and Zijlstra et al., Nature 342:435-438 (1989), which are herein incorporated by reference. This method involves the activation of a gene which is present in the target cells, but which is not normally expressed in the cells, or is expressed at a lower level than desired.

[0452] Polynucleotide constructs are made, using standard techniques known in the art, which contain the promoter with targeting sequences flanking the promoter. Suitable promoters are described herein. The targeting sequence is sufficiently complementary to an endogenous sequence to permit homologous recombination of the promoter-targeting sequence with the endogenous sequence. The targeting sequence will be sufficiently near the 5′ end of the desired endogenous polynucleotide sequence so the promoter will be operably linked to the endogenous sequence upon homologous recombination.

[0453] The promoter and the targeting sequences can be amplified using PCR. Preferably, the amplified promoter contains distinct restriction enzyme sites on the 5′ and 3′ ends. Preferably, the 3′ end of the first targeting sequence contains the same restriction enzyme site as the 5′ end of the amplified promoter and the 5′ end of the second targeting sequence contains the same restriction site as the 3′ end of the amplified promoter. The amplified promoter and targeting sequences are digested and ligated together.

[0454] The promoter-targeting sequence construct is delivered to the cells, either as naked polynucleotide, or in conjunction with transfection-facilitating agents, such as liposomes, viral sequences, viral particles, whole viruses, lipofection, precipitating agents, etc., described in more detail above. The P promoter-targeting sequence can be delivered by any method, included direct needle injection, intravenous injection, topical administration, catheter infusion, particle accelerators, etc. The methods are described in more detail below.

[0455] The promoter-targeting sequence construct is taken up by cells. Homologous recombination between the construct and the endogenous sequence takes place, such that an endogenous sequence is placed under the control of the promoter. The promoter then drives the expression of the endogenous sequence.

[0456] The polynucleotide encoding a polypeptide of the present invention may contain a secretory signal sequence that facilitates secretion of the protein. Typically, the signal sequence is positioned in the coding region of the polynucleotide to be expressed towards or at the 5′ end of the coding region. The signal sequence may be homologous or heterologous to the ovarian antigen polynucleotide of interest and may be homologous or heterologous to the cells to be transfected. Additionally, the signal sequence may be chemically synthesized using methods known in the art.

[0457] Any mode of administration of any of the above-described polynucleotides constructs can be used so long as the mode results in the expression of one or more molecules in an amount sufficient to provide a therapeutic effect. This includes direct needle injection, systemic injection, catheter infusion, biolistic injectors, particle accelerators (i.e., “gene guns”), gelfoam sponge depots, other commercially available depot materials, osmotic pumps (e.g., Alza minipumps), oral or suppositorial solid (tablet or pill) pharmaceutical formulations, and decanting or topical applications during surgery. For example, direct injection of naked calcium phosphate-precipitated plasmid into rat liver and rat spleen or a protein-coated plasmid into the portal vein has resulted in gene expression of the foreign gene in the rat livers (Kaneda et al., Science 243:375 (1989)).

[0458] A preferred method of local administration is by direct injection. Preferably, a recombinant molecule of the present invention complexed with a delivery vehicle is administered by direct injection into or locally within the area of arteries. Administration of a composition locally within the area of arteries refers to injecting the composition centimeters and preferably, millimeters within arteries.

[0459] Another method of local administration is to contact a polynucleotide construct of the present invention in or around a surgical wound. For example, a patient can undergo surgery and the polynucleotide construct can be coated on the surface of tissue inside the wound or the construct can be injected into areas of tissue inside the wound.

[0460] Therapeutic compositions useful in systemic administration, include recombinant molecules of the present invention complexed to a targeted delivery vehicle of the present invention. Suitable delivery vehicles for use with systemic administration comprise liposomes comprising ligands for targeting the vehicle to a particular site. In specific embodiments, suitable delivery vehicles for use with systemic administration comprise liposomes comprising polypeptides of the invention for targeting the vehicle to a particular site.

[0461] Preferred methods of systemic administration, include intravenous injection, aerosol, oral and percutaneous (topical) delivery. Intravenous injections can be performed using methods standard in the art. Aerosol delivery can also be performed using methods standard in the art (see, for example, Stribling et al., Proc. Natl. Acad. Sci. USA 189:11277-11281, 1992, which is incorporated herein by reference). Oral delivery can be performed by complexing a polynucleotide construct of the present invention to a carrier capable of withstanding degradation by digestive enzymes in the gut of an animal. Examples of such carriers, include plastic capsules or tablets, such as those known in the art. Topical delivery can be performed by mixing a polynucleotide construct of the present invention with a lipophilic reagent (e.g., DMSO) that is capable of passing into the skin.

[0462] Determining an effective amount of substance to be delivered can depend upon a number of factors including, for example, the chemical structure and biological activity of the substance, the age and weight of the animal, the precise condition requiring treatment and its severity, and the route of administration. The frequency of treatments depends upon a number of factors, such as the amount of polynucleotide constructs administered per dose, as well as the health and history of the subject. The precise amount, number of doses, and timing of doses will be determined by the attending physician or veterinarian.

[0463] Therapeutic compositions of the present invention can be administered to any animal, preferably to mammals and birds. Preferred mammals include humans, dogs, cats, mice, rats, rabbits sheep, cattle, horses and pigs, with humans being particularly preferred.

[0464] Biological Activities

[0465] Polynucleotides or polypeptides, or agonists or antagonists of the present invention, can be used in assays to test for one or more biological activities. If these polynucleotides or polypeptides, or agonists or antagonists of the present invention, do exhibit activity in a particular assay, it is likely that these molecules may be involved in the diseases associated with the biological activity. Thus, the polynucleotides and polypeptides, and agonists or antagonists could be used to treat, prevent diagnose and/or prognose the associated disease.

[0466] The ovarian antigen polynucleotides and polypeptides of the invention are predicted to have predominant expression in ovarian tissues.

[0467] Thus, the ovarian antigens of the invention may be useful as therapeutic molecules. Each would be useful for diagnosis, detection, treatment and/or prevention of diseases or disorders of the ovaries and/or breast, including but not limited to, neoplastic disorders (e.g., ovarian Krukenberg tumor, malignant mixed Mullerian tumors, and/or as described under “Hyperproliferative Disorders” below), infectious diseases (e.g., mastitis, oophoritis, and/or as described under “Infectious Diseases” below), and inflammatory diseases (e.g., abcesses and/or as described under “Immune Disorders” below) and as described in “Reproductive System Disorders” below.

[0468] In a preferred embodiment, polynucleotides of the invention (e.g., a nucleic acid sequence of SEQ ID NO: X or the complement thereof; or the cDNA sequence contained in Clone ID NO: Z, or fragments or variants thereof) and/or polypeptides of the invention (e.g., an amino acid sequence contained in SEQ ID NO: Y, an amino acid sequence encoded by SEQ ID NO: X, or the complement thereof, an amino acid sequence encoded by the cDNA sequence contained in Clone ID NO: Z and fragments or variants thereof as described herein) are useful for the diagnosis, detection, treatement, and/or prevention of diseases or disorders of the tissues/cells corresponding to the library source disclosed in column 8 of Table 1 expressing the corresponding ovarian sequence disclosed in the same row of Table 1. In certain embodiments, a polypeptide of the invention, or polynucleotides, antibodies, agonists, or antagonists corresponding to that polypeptide, may be used to diagnose and/or prognose diseases and/or disorders associated with the tissue(s) in which the polypeptide of the invention is expressed, including one, two, three, four, five, or more tissues disclosed in Table 1, column 8 (Tissue Distribution Library Code).

[0469] Particularly, the ovarian antigens may be a useful therapeutic for ovarian and/or breast cancer. Treatment, diagnosis, detection, and/or prevention of ovarian and/or breast disorders could be carried out using an ovarian antigen or soluble form of an ovarian antigen, an ovarian antigen ligand, gene therapy, or ex vivo applications. Moreover, inhibitors of an ovarian antigen, either blocking antibodies or mutant forms, could modulate the expression of the ovarian antigen. These inhibitors may be useful to treat, diagnose, detect, and/or prevent diseases associated with the misregulation of an ovarian antigen.

[0470] In one embodiment, the invention provides a method for the specific delivery of compositions of the invention to cells (e.g., normal or diseased ovarian and/or breast cells) by administering polypeptides of the invention (e.g., ovarian antigen polypeptides or anti-ovarian antigen antibodies) that are associated with heterologous polypeptides or nucleic acids. In one example, the invention provides a method for delivering a therapeutic protein into the targeted cell (e.g., an aberrant ovarian and/or breast cell or ovarian and/or breast cancer cell). In another example, the invention provides a method for delivering a single stranded nucleic acid (e.g., antisense or ribozymes) or double stranded nucleic acid (e.g., DNA that can integrate into the cell's genome or replicate episomally and that can be transcribed) into the targeted cell.

[0471] In another embodiment, the invention provides a method for the specific destruction of cells (e.g., the destruction of aberrant ovarian and/or breast cells, including, but not limited to, ovarian and/or breast tumor cells) by administering polypeptides of the invention (e.g., ovarian antigen polypeptides or fragments thereof, or anti- ovarian antigen antibodies) in association with toxins or cytotoxic prodrugs.

[0472] By “toxin” is meant compounds that bind and activate endogenous cytotoxic effector systems, radioisotopes, holotoxins, modified toxins, catalytic subunits of toxins, cytotoxins (cytotoxic agents), or any molecules or enzymes not normally present in or on the surface of a cell that under defined conditions cause the cell's death. Toxins that may be used according to the methods of the invention include, but are not limited to, radioisotopes known in the art, compounds such as, for example, antibodies (or complement fixing containing portions thereof) that bind an inherent or induced endogenous cytotoxic effector system, thymidine kinase, endonuclease, RNAse, alpha toxin, ricin, abrin, Pseudomonas exotoxin A, diphtheria toxin, saporin, momordin, gelonin, pokeweed antiviral protein, alpha-sarcin and cholera toxin. “Toxin” also includes a cytostatic or cytocidal agent, a therapeutic agent or a radioactive metal ion, e.g., alpha-emitters such as, for example, ²¹³Bi, or other radioisotopes such as, for example, ¹⁰³Pd, ¹³³Xe, 131H, ⁶⁸Ge, ⁵⁷Co, ⁶⁵Zn, ⁸⁵Sr, ³²p, ³⁵S, ⁹⁰Y, ¹⁵³Sm, ¹⁵³Gd, 169Yb, ⁵¹Cr, ⁵⁴Mn, ⁷⁵Se, ¹¹³Sn, ⁹⁰Yttrium, ¹¹⁷Tin, ¹⁸⁶Rhenium, ¹⁶⁶Holmium, and ¹⁸⁸Rhenium; luminescent labels, such as luminol; and fluorescent labels, such as fluorescein and rhodamine, and biotin.

[0473] Techniques known in the art may be applied to label antibodies of the invention. Such techniques include, but are not limited to, the use of bifunctional conjugating agents (see e.g., U.S. Pat. Nos. 5,756,065; 5,714,631; 5,696,239; 5,652,361; 5,505,931; 5,489,425; 5,435,990; 5,428,139; 5,342,604; 5,274,119; 4,994,560; and 5,808,003; the contents of each of which are hereby incorporated by reference in its entirety). A cytotoxin or cytotoxic agent includes any agent that is detrimental to cells. Examples include paclitaxol, cytochalasin B, gramicidin D, ethidium bromide, emetine, mitomycin, etoposide, tenoposide, vincristine, vinblastine, colchicin, doxorubicin, daunorubicin, dihydroxy anthracin dione, mitoxantrone, mithramycin, actinomycin D, 1-dehydrotestosterone, glucocorticoids, procaine, tetracaine, lidocaine, propranolol, and puromycin and analogs or homologs thereof. Therapeutic agents include, but are not limited to, antimetabolites (e.g., methotrexate, 6-mercaptopurine, 6-thioguanine, cytarabine, 5-fluorouracil decarbazine), alkylating agents (e.g., mechlorethamine, thioepa chlorambucil, melphalan, carmustine (BSNU) and lomustine (CCNU), cyclothosphamide, busulfan, dibromomannitol, streptozotocin, mitomycin C, and cis- dichlorodiamine platinum (II) (DDP) cisplatin), anthracyclines (e.g., daunorubicin (formerly daunomycin) and doxorubicin), antibiotics (e.g., dactinomycin (formerly actinomycin), bleomycin, mithramycin, and anthramycin (AMC)), and anti-mitotic agents (e.g., vincristine and vinblastine).

[0474] By “cytotoxic prodrug” is meant a non-toxic compound that is converted by an enzyme, normally present in the cell, into a cytotoxic compound. Cytotoxic prodrugs that may be used according to the methods of the invention include, but are not limited to, glutamyl derivatives of benzoic acid mustard alkylating agent, phosphate derivatives of etoposide or mitomycin C, cytosine arabinoside, daunorubisin, and phenoxyacetamide derivatives of doxorubicin.

[0475] It will be appreciated that conditions caused by a decrease in the standard or normal level of an ovarian antigen activity in an individual, particularly disorders of the ovaries and/or breast, can be treated by administration of an ovarian antigen polypeptide (e.g., such as, for example, the complete ovarian antigen polypeptide, the soluble form of the extracellular domain of an ovarian antigen polypeptide, or cells expressing the complete protein) or agonist. Thus, the invention also provides a method of treatment of an individual in need of an increased level of ovarian antigen activity comprising administering to such an individual a pharmaceutical composition comprising an amount of an isolated ovarian antigen polypeptide of the invention, or agonist thereof (e.g., an agonistic anti- ovarian antigen antibody), effective to increase the ovarian cancer antigen activity level in such an individual.

[0476] It will also be appreciated that conditions caused by a increase in the standard or normal level of ovarian antigen activity in an individual, particularly disorders of the ovaries and/or breast, can be treated by administration of ovarian cancer antigen polypeptides (e.g., such as, for example, the complete ovarian cancer antigen polypeptide, the soluble form of the extracellular domain of an ovarian antigen polypeptide, or cells expressing the complete protein) or antagonist (e.g., an antagonistic ovarian antigen antibody). Thus, the invention also provides a method of treatment of an individual in need of an decreased level of ovarian antigen activity comprising administering to such an individual a pharmaceutical composition comprising an amount of an isolated ovarian antigen polypeptide of the invention, or antagonist thereof (e.g., an antagonistic anti- ovarian antigen antibody), effective to decrease the ovarian antigen activity level in such an individual.

[0477] More generally, polynucleotides, translation products and antibodies corresponding to this gene may be useful for the diagnosis, prognosis, prevention, and/or treatment of diseases and/or disorders associated with the following systems.

[0478] Reproductive System Disorders

[0479] The polynucleotides or polypeptides, or agonists or antagonists of the invention may be used for the diagnosis, treatment, or prevention of diseases and/or disorders of the reproductive system. Reproductive system disorders that can be treated by the compositions of the invention, include, but are not limited to, reproductive system injuries, infections, neoplastic disorders, congenital defects, and diseases or disorders which result in infertility, complications with pregnancy, labor, or parturition, and postpartum difficulties.

[0480] Reproductive system disorders and/or diseases include diseases and/or disorders of the testes, including, but not limited to, testicular atrophy, testicular feminization, cryptorchism (unilateral and bilateral), anorchia, ectopic testis, epididymitis and orchitis (typically resulting from infections such as, for example, gonorrhea, mumps, tuberculosis, and syphilis), testicular torsion, vasitis nodosa, germ cell tumors (e.g., seminomas, embryonal cell carcinomas, teratocarcinomas, chonocarcinomas, yolk sac tumors, and teratomas), stromal tumors (e.g., Leydig cell tumors), hydrocele, hematocele, varicocele, spermatocele, inguinal hernia, and disorders of sperm production (e.g., immotile cilia syndrome, aspermia, asthenozoospermia, azoospermia, oligospermia, and teratozoospermia).

[0481] Reproductive system disorders also include, but are not limited to, disorders of the prostate gland, such as acute non-bacterial prostatitis, chronic non-bacterial prostatitis, acute bacterial prostatitis, chronic bacterial prostatitis, prostatodystonia, prostatosis, granulomatous prostatitis, malacoplakia, benign prostatic hypertrophy or hyperplasia, and prostate neoplastic disorders, including adenocarcinomas, transitional cell carcinomas, ductal carcinomas, and squamous cell carcinomas.

[0482] Additionally, the compositions of the invention may be useful in the diagnosis, treatment, and/or prevention of disorders or diseases of the penis and urethra, including, but not limited to, inflammatory disorders, such as balanoposthitis, balanitis xerotica obliterans, phimosis, paraphimosis, syphilis, herpes simplex virus, gonorrhea, non-gonococcal urethritis, chlamydia, mycoplasma, trichomonas, HIV, AIDS, Reiter's syndrome, condyloma acuminatum, condyloma latum, and pearly penile papules; urethral abnormalities, such as hypospadias, epispadias, and phimosis; premalignant lesions, including Erythroplasia of Queyrat, Bowen's disease, Bowenoid paplosis, giant condyloma of Buscke-Lowenstein, and varrucous carcinoma; penile cancers, including squamous cell carcinomas, carcinoma in situ, verrucous carcinoma, and disseminated penile carcinoma; urethral neoplastic disorders, including penile urethral carcinoma, bulbomembranous urethral carcinoma, and prostatic urethral carcinoma; and erectile disorders, such as priapism, Peyronie's disease, erectile dysfunction, and impotence.

[0483] Moreover, diseases and/or disorders of the vas deferens include, but are not limited to, vasculititis and CBAVD (congenital bilateral absence of the vas deferens); additionally, the polynucleotides, polypeptides, and agonists or antagonists of the present invention may be used in the diagnosis, treatment, and/or prevention of diseases and/or disorders of the seminal vesicles, including but not limited to, hydatid disease, congenital chloride diarrhea, and polycystic kidney disease.

[0484] Other disorders and/or diseases of the male reproductive system that may be diagnosed, treated, and/or prevented with the compositions of the invention include, but are not limited to, Klinefelter's syndrome, Young's syndrome, premature ejaculation, diabetes mellitus, cystic fibrosis, Kartagener's syndrome, high fever, multiple sclerosis, and gynecomastia.

[0485] Further, the polynucleotides, polypeptides, and agonists or antagonists of the present invention may be used in the diagnosis, treatment, and/or prevention of diseases and/or disorders of the vagina and vulva, including, but not limited to, bacterial vaginosis, candida vaginitis, herpes simplex virus, chancroid, granuloma inguinale, lymphogranuloma venereum, scabies, human papillomavirus, vaginal trauma, vulvar trauma, adenosis, chlamydia vaginitis, gonorrhea, trichomonas vaginitis, condyloma acuminatum, syphilis, molluscum contagiosum, atrophic vaginitis, Paget's disease, lichen sclerosus, lichen planus, vulvodynia, toxic shock syndrome, vaginismus, vulvovaginitis, vulvar vestibulitis, and neoplastic disorders, such as squamous cell hyperplasia, clear cell carcinoma, basal cell carcinoma, melanomas, cancer of Bartholin's gland, and vulvar intraepithelial neoplasia.

[0486] Disorders and/or diseases of the uterus that may be diagnosed, treated, and/or prevented with the compositions of the invention include, but are not limited to, dysmenorrhea, retroverted uterus, endometriosis, fibroids, adenomyosis, anovulatory bleeding, amenorrhea, Cushing's syndrome, hydatidiform moles, Asherman's syndrome, premature menopause, precocious puberty, uterine polyps, dysfunctional uterine bleeding (e.g., due to aberrant hormonal signals), and neoplastic disorders, such as adenocarcinomas, keiomyosarcomas, and sarcomas. Additionally, the polypeptides, polynucleotides, or agonists or antagonists of the invention may be useful as a marker or detector of, as well as in the diagnosis, treatment, and/or prevention of congenital uterine abnormalities, such as bicornuate uterus, septate uterus, simple unicornuate uterus, unicornuate uterus with a noncavitary rudimentary horn, unicornuate uterus with a non-communicating cavitary rudimentary horn, unicornuate uterus with a communicating cavitary horn, arcuate uterus, uterine didelfus, and T-shaped uterus.

[0487] Ovarian diseases and/or disorders that may be diagnosed, treated, and/or prevented with the compositions of the invention include, but are not limited to, anovulation, polycystic ovary syndrome (Stein-Leventhal syndrome), ovarian cysts, ovarian hypofunction, ovarian insensitivity to gonadotropins, ovarian overproduction of androgens, right ovarian vein syndrome, amenorrhea, hirutism, and ovarian cancer (including, but not limited to, primary and secondary cancerous growth, Sertoli-Leydig tumors, endometriod carcinoma of the ovary, ovarian papillary serous adenocarcinoma, ovarian mucinous adenocarcinoma, and Ovarian Krukenberg tumors).

[0488] Cervical diseases and/or disorders that may be diagnosed, treated, and/or prevented with the compositions of the invention include, but are not limited to, cervicitis, chronic cervicitis, mucopurulent cervicitis, cervical dysplasia, cervical polyps, Nabothian cysts, cervical erosion, cervical incompetence, and cervical neoplasms (including, for example, cervical carcinoma, squamous metaplasia, squamous cell carcinoma, adenosquamous cell neoplasia, and columnar cell neoplasia).

[0489] Additionally, diseases and/or disorders of the reproductive system that may be diagnosed, treated, and/or prevented with the compositions of the invention include, but are not limited to, disorders and/or diseases of pregnancy, including miscarriage and stillbirth, such as early abortion, late abortion, spontaneous abortion, induced abortion, therapeutic abortion, threatened abortion, missed abortion, incomplete abortion, complete abortion, habitual abortion, missed abortion, and septic abortion; ectopic pregnancy, anemia, Rh incompatibility, vaginal bleeding during pregnancy, gestational diabetes, intrauterine growth retardation, polyhydramnios, HELLP syndrome, abruptio placentae, placenta previa, hyperemesis, preeclampsia, eclampsia, herpes gestationis, and urticaria of pregnancy. Additionally, the polynucleotides, polypeptides, and agonists or antagonists of the present invention may be used in the diagnosis, treatment, and/or prevention of diseases that can complicate pregnancy, including heart disease, heart failure, rheumatic heart disease, congenital heart disease, mitral valve prolapse, high blood pressure, anemia, kidney disease, infectious disease (e.g., rubella, cytomegalovirus, toxoplasmosis, infectious hepatitis, chlamydia, HIV, AIDS, and genital herpes), diabetes mellitus, Graves' disease, thyroiditis, hypothyroidism, Hashimoto's thyroiditis, chronic active hepatitis, cirrhosis of the liver, primary biliary cirrhosis, asthma, systemic lupus eryematosis, rheumatoid arthritis, myasthenia gravis, idiopathic thrombocytopenic purpura, appendicitis, ovarian cysts, gallbladder disorders,and obstruction of the intestine.

[0490] Complications associated with labor and parturition that may be diagnosed, treated, and/or prevented with the compositions of the invention include, but are not limited to, premature rupture of the membranes, pre-term labor, post-term pregnancy, postmaturity, labor that progresses too slowly, fetal distress (e.g., abnormal heart rate (fetal or maternal), breathing problems, and abnormal fetal position), shoulder dystocia, prolapsed umbilical cord, amniotic fluid embolism, and aberrant uterine bleeding.

[0491] Further, diseases and/or disorders of the postdelivery period, that may be diagnosed, treated, and/or prevented with the compositions of the invention, include, but are not limited to, endometritis, myometritis, parametritis, peritonitis, pelvic thrombophlebitis, pulmonary embolism, endotoxemia, pyelonephritis, saphenous thrombophlebitis, mastitis, cystitis, postpartum hemorrhage, and inverted uterus.

[0492] Other disorders and/or diseases of the female reproductive system that may be diagnosed, treated, and/or prevented by the polynucleotides, polypeptides, and agonists or antagonists of the present invention include, but are not limited to, Turner's syndrome, pseudohermaphroditism, premenstrual syndrome, pelvic inflammatory disease, pelvic congestion (vascular engorgement), frigidity, anorgasmia, dyspareunia, ruptured fallopian tube, and Mittelschmerz.

[0493] Gastrointestinal Disorders

[0494] Polynucleotides or polypeptides, or agonists or antagonists of the present invention, may be used to treat, prevent, diagnose, and/or prognose gastrointestinal disorders, including inflammatory diseases and/or conditions, infections, cancers (e.g., intestinal neoplasms (carcinoid tumor of the small intestine, non-Hodgkin's lymphoma of the small intestine, small bowl lymphoma)), and ulcers, such as peptic ulcers.

[0495] Gastrointestinal disorders include dysphagia, odynophagia, inflammation of the esophagus, peptic esophagitis, gastric reflux, submucosal fibrosis and stricturing, Mallory-Weiss lesions, leiomyomas, lipomas, epidermal cancers, adeoncarcinomas, gastric retention disorders, gastroenteritis, gastric atrophy, gastric/stomach cancers, polyps of the stomach, autoimmune disorders such as pernicious anemia, pyloric stenosis, gastritis (bacterial, viral, eosinophilic, stress-induced, chronic erosive, atrophic, plasma cell, and Ménétrier's), and peritoneal diseases (e.g., chyloperioneum, hemoperitoneum, mesenteric cyst, mesenteric lymphadenitis, mesentenic vascular occlusion, panniculitis, neoplasms, peritonitis, pneumoperitoneum, bubphrenic abscess).

[0496] Gastrointestinal disorders also include disorders associated with the small intestine, such as malabsorption syndromes, distension, irritable bowel syndrome, sugar intolerance, celiac disease, duodenal ulcers, duodenitis, tropical sprue, Whipple's disease, intestinal lymphangiectasia, Crohn's disease, appendicitis, obstructions of the ileum, Meckel's diverticulum, multiple diverticula, failure of complete rotation of the small and large intestine, lymphoma, and bacterial and parasitic diseases (such as Traveler's diarrhea, typhoid and paratyphoid, cholera, infection by Roundworms (Ascariasis lumbricoides), Hookworms (Ancylostoma duodenale), Threadworms (Enterobius vermicularis), Tapeworms (Taenia saginata, Echinococcus granulosus, Diphyllobothrium spp., and T. solium).

[0497] Liver diseases and/or disorders include intrahepatic cholestasis (alagille syndrome, biliary liver cirrhosis), fatty liver (alcoholic fatty liver, reye syndrome), hepatic vein thrombosis, hepatolentricular degeneration, hepatomegaly, hepatopulmonary syndrome, hepatorenal syndrome, portal hypertension (esophageal and gastric varices), liver abscess (amebic liver abscess), liver cirrhosis (alcoholic, biliary and experimental), alcoholic liver diseases (fatty liver, hepatitis, cirrhosis), parasitic (hepatic echinococcosis, fascioliasis, amebic liver abscess), jaundice (hemolytic, hepatocellular, and cholestatic), cholestasis, portal hypertension, liver enlargement, ascites, hepatitis (alcoholic hepatitis, animal hepatitis, chronic hepatitis (autoimmune, hepatitis B, hepatitis C, hepatitis D, drug induced), toxic hepatitis, viral human hepatitis (hepatitis A, hepatitis B, hepatitis C, hepatitis D, hepatitis E), Wilson's disease, granulomatous hepatitis, secondary biliary cirrhosis, hepatic encephalopathy, portal hypertension, varices, hepatic encephalopathy, primary biliary cirrhosis, primary sclerosing cholangitis, hepatocellular adenoma, hemangiomas, bile stones, liver failure (hepatic encephalopathy, acute liver failure), and liver neoplasms (angiomyolipoma, calcified liver metastases, cystic liver metastases, epithelial tumors, fibrolamellar hepatocarcinoma, focal nodular hyperplasia, hepatic adenoma, hepatobiliary cystadenoma, hepatoblastoma, hepatocellular carcinoma, hepatoma, liver cancer, liver hemangioendothelioma, mesenchymal hamartoma, mesenchymal tumors of liver, nodular regenerative hyperplasia, benign liver tumors (Hepatic cysts [Simple cysts, Polycystic liver disease, Hepatobiliary cystadenoma, Choledochal cyst], Mesenchymal tumors [Mesenchymal hamartoma, Infantile hemangioendothelioma, Hemangioma, Peliosis hepatis, Lipomas, Inflammatory pseudotumor, Miscellaneous], Epithelial tumors [Bile duct epithelium (Bile duct hamartoma, Bile duct adenoma), Hepatocyte (Adenoma, Focal nodular hyperplasia, Nodular regenerative hyperplasia)], malignant liver tumors [hepatocellular, hepatoblastoma, hepatocellular carcinoma, cholangiocellular, cholangiocarcinoma, cystadenocarcinoma, tumors of blood vessels, angiosarcoma, Karposi's sarcoma, hemangioendothelioma, other tumors, embryonal sarcoma, fibrosarcoma, leiomyosarcoma, rhabdomyosarcoma, carcinosarcoma, teratoma, carcinoid, squamous carcinoma, primary lymphoma]), peliosis hepatis, erythrohepatic porphyria, hepatic porphyria (acute intermittent porphyria, porphyria cutanea tarda), Zellweger syndrome).

[0498] Pancreatic diseases and/or disorders include acute pancreatitis, chronic pancreatitis (acute necrotizing pancreatitis, alcoholic pancreatitis), neoplasms (adenocarcinoma of the pancreas, cystadenocarcinoma, insulinoma, gastrinoma, and glucagonoma, cystic neoplasms, islet-cell tumors, pancreoblastoma), and other pancreatic diseases (e.g., cystic fibrosis, cyst (pancreatic pseudocyst, pancreatic fistula, insufficiency)).

[0499] Gallbladder diseases include gallstones (cholelithiasis and choledocholithiasis), postcholecystectomy syndrome, diverticulosis of the gallbladder, acute cholecystitis, chronic cholecystitis, bile duct tumors, and mucocele.

[0500] Diseases and/or disorders of the large intestine include antibiotic-associated colitis, diverticulitis, ulcerative colitis, acquired megacolon, abscesses, fungal and bacterial infections, anorectal disorders (e.g., fissures, hemorrhoids), colonic diseases (colitis, colonic neoplasms [colon cancer, adenomatous colon polyps (e.g., villous adenoma), colon carcinoma, colon cancer], colonic diverticulitis, colonic diverticulosis, megacolon [Hirschsprung disease, toxic megacolon]; sigmoid diseases [proctocolitis, sigmoin neoplasms]), constipation, Crohn's disease, diarrhea (infantile diarrhea, dysentery), duodenal diseases (duodenal neoplasms, duodenal obstruction, duodenal ulcer, duodenitis), enteritis (enterocolitis), HIV enteropathy, ileal diseases (ileal neoplasms, ileitis), immunoproliferative small intestinal disease, inflammatory bowel disease (ulcerative colitis, Crohn's disease), intestinal atresia, parasitic diseases (anisakiasis, balantidiasis, blastocystis infections, cryptosporidiosis, dientamoebiasis, amebic dysentery, giardiasis), intestinal fistula (rectal fistula), intestinal neoplasms (cecal neoplasms, colonic neoplasms, duodenal neoplasms, ileal neoplasms, intestinal polyps, jejunal neoplasms, rectal neoplasms), intestinal obstruction (afferent loop syndrome, duodenal obstruction, impacted feces, intestinal pseudo-obstruction [cecal volvulus], intussusception), intestinal perforation, intestinal polyps (colonic polyps, gardner syndrome, peutz-jeghers syndrome), jejunal diseases (jejunal neoplasms), malabsorption syndromes (blind loop syndrome, celiac disease, lactose intolerance, short bowl syndrome, tropical sprue, whipple's disease), mesenteric vascular occlusion, pneumatosis cystoides intestinalis, protein-losing enteropathies (intestinal lymphagiectasis), rectal diseases (anus diseases, fecal incontinence, hemorrhoids, proctitis, rectal fistula, rectal prolapse, rectocele), peptic ulcer (duodenal ulcer, peptic esophagitis, hemorrhage, perforation, stomach ulcer, Zollinger-Ellison syndrome), postgastrectomy syndromes (dumping syndrome), stomach diseases (e.g., achlorhydria, duodenogastric reflux (bile reflux), gastric antral vascular ectasia, gastric fistula, gastric outlet obstruction, gastritis (atrophic or hypertrophic), gastroparesis, stomach dilatation, stomach diverticulum, stomach neoplasms (gastric cancer, gastric polyps, gastric adenocarcinoma, hyperplastic gastric polyp), stomach rupture, stomach ulcer, stomach volvulus), tuberculosis, visceroptosis, vomiting (e.g., hematemesis, hyperemesis gravidarum, postoperative nausea and vomiting) and hemorrhagic colitis.

[0501] Further diseases and/or disorders of the gastrointestinal system include biliary tract diseases, such as, gastroschisis, fistula (e.g., biliary fistula, esophageal fistula, gastric fistula, intestinal fistula, pancreatic fistula), neoplasms (e.g., biliary tract neoplasms, esophageal neoplasms, such as adenocarcinoma of the esophagus, esophageal squamous cell carcinoma, gastrointestinal neoplasms, pancreatic neoplasms, such as adenocarcinoma of the pancreas, mucinous cystic neoplasm of the pancreas, pancreatic cystic neoplasms, pancreatoblastoma, and peritoneal neoplasms), esophageal disease (e.g., bullous diseases, candidiasis, glycogenic acanthosis, ulceration, barrett esophagus varices, atresia, cyst, diverticulum (e.g., Zenker's diverticulum), fistula (e.g., tracheoesophageal fistula), motility disorders (e.g., CREST syndrome, deglutition disorders, achalasia, spasm, gastroesophageal reflux), neoplasms, perforation (e.g., Boerhaave syndrome, Mallory-Weiss syndrome), stenosis, esophagitis, diaphragmatic hernia (e.g., hiatal hernia); gastrointestinal diseases, such as, gastroenteritis (e.g., cholera morbus, norwalk virus infection), hemorrhage (e.g., hematemesis, melena, peptic ulcer hemorrhage), stomach neoplasms (gastric cancer, gastric polyps, gastric adenocarcinoma, stomach cancer)), hernia (e.g., congenital diaphragmatic hernia, femoral hernia, inguinal hernia, obturator hernia, umbilical hernia, ventral hernia), and intestinal diseases (e.g., cecal diseases (appendicitis, cecal neoplasms)).

[0502] Immune Activity

[0503] Polynucleotides, polypeptides, antibodies, and/or agonists or antagonists of the present invention may be useful in treating, preventing, diagnosing and/or prognosing diseases, disorders, and/or conditions of the immune system, by, for example, activating or inhibiting the proliferation, differentiation, or mobilization (chemotaxis) of immune cells. Immune cells develop through a process called hematopoiesis, producing myeloid (platelets, red blood cells, neutrophils, and macrophages) and lymphoid (B and T lymphocytes) cells from pluripotent stem cells. The etiology of these immune diseases, disorders, and/or conditions may be genetic, somatic, such as cancer and some autoimmune diseases, acquired (e.g., by chemotherapy or toxins), or infectious. Moreover, polynucleotides, polypeptides, antibodies, and/or agonists or antagonists of the present invention can be used as a marker or detector of a particular immune system disease or disorder.

[0504] In another embodiment, a polypeptide of the invention, or polynucleotides, antibodies, agonists, or antagonists corresponding to that polypeptide, may be used to treat diseases and disorders of the immune system and/or to inhibit or enhance an immune response generated by cells associated with the tissue(s) in which the polypeptide of the invention is expressed, including one, two, three, four, five, or more tissues disclosed in Table 1, column 8 (Tissue Distribution Library Code).

[0505] Polynucleotides, polypeptides, antibodies, and/or agonists or antagonists of the present invention may be useful in treating, preventing, diagnosing, and/or prognosing immunodeficiencies, including both congenital and acquired immunodeficiencies. Examples of B cell immunodeficiencies in which immunoglobulin levels B cell function and/or B cell numbers are decreased include: X-linked agammaglobulinemia (Bruton's disease), X-linked infantile agammaglobulinemia, X-linked immunodeficiency with hyper IgM, non X-linked immunodeficiency with hyper IgM, X-linked lymphoproliferative syndrome (XLP), agammaglobulinemia including congenital and acquired agammaglobulinemia, adult onset agammaglobulinemia, late-onset agammaglobulinemia, dysgammaglobulinemia, hypogammaglobulinemia, unspecified hypogammaglobulinemia, recessive agammaglobulinemia (Swiss type), Selective IgM deficiency, selective IgA deficiency, selective IgG subclass deficiencies, IgG subclass deficiency (with or without IgA deficiency), Ig deficiency with increased IgM, IgG and IgA deficiency with increased IgM, antibody deficiency with normal or elevated Igs, Ig heavy chain deletions, kappa chain deficiency, B cell lymphoproliferative disorder (BLPD), common variable immunodeficiency (CVID), common variable immunodeficiency (CVI) (acquired), and transient hypogammaglobulinemia of infancy.

[0506] In specific embodiments, ataxia-telangiectasia or conditions associated with ataxia-telangiectasia are treated, prevented, diagnosed, and/or prognosing using the polypeptides or polynucleotides of the invention, and/or agonists or antagonists thereof.

[0507] Examples of congenital immunodeficiencies in which T cell and/or B cell function and/or number is decreased include, but are not limited to: DiGeorge anomaly, severe combined immunodeficiencies (SCID) (including, but not limited to, X-linked SCID, autosomal recessive SCID, adenosine deaminase deficiency, purine nucleoside phosphorylase (PNP) deficiency, Class II MHC deficiency (Bare lymphocyte syndrome), Wiskott-Aldrich syndrome, and ataxia telangiectasia), thymic hypoplasia, third and fourth pharyngeal pouch syndrome, 22q11.2 deletion, chronic mucocutaneous candidiasis, natural killer cell deficiency (NK), idiopathic CD4+ T-lymphocytopenia, immunodeficiency with predominant T cell defect (unspecified), and unspecified immunodeficiency of cell mediated immunity.

[0508] In specific embodiments, DiGeorge anomaly or conditions associated with DiGeorge anomaly are treated, prevented, diagnosed, and/or prognosed using polypeptides or polynucleotides of the invention, or antagonists or agonists thereof.

[0509] Other immunodeficiencies that may be treated, prevented, diagnosed, and/or prognosed using polypeptides or polynucleotides of the invention, and/or agonists or antagonists thereof, include, but are not limited to, chronic granulomatous disease, Chédiak-Higashi syndrome, myeloperoxidase deficiency, leukocyte glucose-6-phosphate dehydrogenase deficiency, X-linked lymphoproliferative syndrome (XLP), leukocyte adhesion deficiency, complement component deficiencies (including C1, C2, C3, C4, C5, C6, C7, C8 and/or C9 deficiencies), reticular dysgenesis, thymic alymphoplasia-aplasia, immunodeficiency with thymoma, severe congenital leukopenia, dysplasia with immunodeficiency, neonatal neutropenia, short limbed dwarfism, and Nezelof syndrome-combined immunodeficiency with Igs.

[0510] In a preferred embodiment, the immunodeficiencies and/or conditions associated with the immunodeficiencies recited above are treated, prevented, diagnosed and/or prognosed using polynucleotides, polypeptides, antibodies, and/or agonists or antagonists of the present invention.

[0511] In a preferred embodiment polynucleotides, polypeptides, antibodies, and/or agonists or antagonists of the present invention could be used as an agent to boost immunoresponsiveness among immunodeficient individuals. In specific embodiments, polynucleotides, polypeptides, antibodies, and/or agonists or antagonists of the present invention could be used as an agent to boost immunoresponsiveness among B cell and/or T cell immunodeficient individuals.

[0512] The polynucleotides, polypeptides, antibodies, and/or agonists or antagonists of the present invention may be useful in treating, preventing, diagnosing and/or prognosing autoimmune disorders. Many autoimmune disorders result from inappropriate recognition of self as foreign material by immune cells. This inappropriate recognition results in an immune response leading to the destruction of the host tissue. Therefore, the administration of polynucleotides and polypeptides of the invention that can inhibit an immune response, particularly the proliferation, differentiation, or chemotaxis of T-cells, may be an effective therapy in preventing autoimmune disorders.

[0513] Autoimmune diseases or disorders that may be treated, prevented, diagnosed and/or prognosed by polynucleotides, polypeptides, antibodies, and/or agonists or antagonists of the present invention include, but are not limited to, one or more of the following: systemic lupus erythematosus, rheumatoid arthritis, ankylosing spondylitis, multiple sclerosis, autoimmune thyroiditis, Hashimoto's thyroiditis, autoimmune hemolytic anemia, hemolytic anemia, thrombocytopenia, autoimmune thrombocytopenia purpura, autoimmune neonatal thrombocytopenia, idiopathic thrombocytopenia purpura, purpura (e.g., Henloch-Scoenlein purpura), autoimmunocytopenia, Goodpasture's syndrome, Pemphigus vulgaris, myasthenia gravis, Grave's disease (hyperthyroidism), and insulin-resistant diabetes mellitus.

[0514] Additional disorders that are likely to have an autoimmune component that may be treated, prevented, and/or diagnosed with the compositions of the invention include, but are not limited to, type II collagen-induced arthritis, antiphospholipid syndrome, dermatitis, allergic encephalomyelitis, myocarditis, relapsing polychondritis, rheumatic heart disease, neuritis, uveitis ophthalmia, polyendocrinopathies, Reiter's Disease, Stiff-Man Syndrome, autoimmune pulmonary inflammation, autism, Guillain-Barre Syndrome, insulin dependent diabetes mellitus, and autoimmune inflammatory eye disorders.

[0515] Additional disorders that are likely to have an autoimmune component that may be treated, prevented, diagnosed and/or prognosed with the compositions of the invention include, but are not limited to, scleroderma with anti-collagen antibodies (often characterized, e.g., by nucleolar and other nuclear antibodies), mixed connective tissue disease (often characterized, e.g., by antibodies to extractable nuclear antigens (e.g., ribonucleoprotein)), polymyositis (often characterized, e.g., by nonhistone ANA), pernicious anemia (often characterized, e.g., by antiparietal cell, microsomes, and intrinsic factor antibodies), idiopathic Addison's disease (often characterized, e.g., by humoral and cell-mediated adrenal cytotoxicity, infertility (often characterized, e.g., by antispermatozoal antibodies), glomerulonephritis (often characterized, e.g., by glomerular basement membrane antibodies or immune complexes), bullous pemphigoid (often characterized, e.g., by IgG and complement in basement membrane), Sjogren's syndrome (often characterized, e.g., by multiple tissue antibodies, and/or a specific nonhistone ANA (SS-B)), diabetes mellitus (often characterized, e.g., by cell-mediated and humoral islet cell antibodies), and adrenergic drug resistance (including adrenergic drug resistance with asthma or cystic fibrosis) (often characterized, e.g., by beta-adrenergic receptor antibodies).

[0516] Additional disorders that may have an autoimmune component that may be treated, prevented, diagnosed and/or prognosed with the compositions of the invention include, but are not limited to, chronic active hepatitis (often characterized, e.g., by smooth muscle antibodies), primary biliary cirrhosis (often characterized, e.g., by mitochondria antibodies), other endocrine gland failure (often characterized, e.g., by specific tissue antibodies in some cases), vitiligo (often characterized, e.g., by melanocyte antibodies), vasculitis (often characterized, e.g., by Ig and complement in vessel walls and/or low serum complement), post-MI (often characterized, e.g., by myocardial antibodies), cardiotomy syndrome (often characterized, e.g., by myocardial antibodies), urticaria (often characterized, e.g., by IgG and IgM antibodies to IgE), atopic dermatitis (often characterized, e.g., by IgG and IgM antibodies to IgE), asthma (often characterized, e.g., by IgG and IgM antibodies to IgE), and many other inflammatory, granulomatous, degenerative, and atrophic disorders.

[0517] In a preferred embodiment, the autoimmune diseases and disorders and/or conditions associated with the diseases and disorders recited above are treated, prevented, diagnosed and/or prognosed using for example, antagonists or agonists, polypeptides or polynucleotides, or antibodies of the present invention. In a specific preferred embodiment, rheumatoid arthritis is treated, prevented, and/or diagnosed using polynucleotides, polypeptides, antibodies, and/or agonists or antagonists of the present invention.

[0518] In another specific preferred embodiment, systemic lupus erythematosus is treated, prevented, and/or diagnosed using polynucleotides, polypeptides, antibodies, and/or agonists or antagonists of the present invention. In another specific preferred embodiment, idiopathic thrombocytopenia purpura is treated, prevented, and/or diagnosed using polynucleotides, polypeptides, antibodies, and/or agonists or antagonists of the present invention.

[0519] In another specific preferred embodiment IgA nephropathy is treated, prevented, and/or diagnosed using polynucleotides, polypeptides, antibodies, and/or agonists or antagonists of the present invention.

[0520] In a preferred embodiment, the autoimmune diseases and disorders and/or conditions associated with the diseases and disorders recited above are treated, prevented, diagnosed and/or prognosed using polynucleotides, polypeptides, antibodies, and/or agonists or antagonists of the present invention.

[0521] In preferred embodiments, polypeptides, antibodies, polynucleotides and/or agonists or antagonists of the present invention are used as a immunosuppressive agent(s).

[0522] Polynucleotides, polypeptides, antibodies, and/or agonists or antagonists of the present invention may be useful in treating, preventing, prognosing, and/or diagnosing diseases, disorders, and/or conditions of hematopoietic cells. Polynucleotides, polypeptides, antibodies, and/or agonists or antagonists of the present invention could be used to increase differentiation and proliferation of hematopoietic cells, including the pluripotent stem cells, in an effort to treat or prevent those diseases, disorders, and/or conditions associated with a decrease in certain (or many) types hematopoietic cells, including but not limited to, leukopenia, neutropenia, anemia, and thrombocytopenia. Alternatively, Polynucleotides, polypeptides, antibodies, and/or agonists or antagonists of the present invention could be used to increase differentiation and proliferation of hematopoietic cells, including the pluripotent stem cells, in an effort to treat or prevent those diseases, disorders, and/or conditions associated with an increase in certain (or many) types of hematopoietic cells, including but not limited to, histiocytosis.

[0523] Allergic reactions and conditions, such as asthma (particularly allergic asthma) or other respiratory problems, may also be treated, prevented, diagnosed and/or prognosed using polypeptides, antibodies, or polynucleotides of the invention, and/or agonists or antagonists thereof. Moreover, these molecules can be used to treat, prevent, prognose, and/or diagnose anaphylaxis, hypersensitivity to an antigenic molecule, or blood group incompatibility.

[0524] Additionally, polypeptides or polynucleotides of the invention, and/or agonists or antagonists thereof, may be used to treat, prevent, diagnose and/or prognose IgE-mediated allergic reactions. Such allergic reactions include, but are not limited to, asthma, rhinitis, and eczema. In specific embodiments, polynucleotides, polypeptides, antibodies, and/or agonists or antagonists of the present invention may be used to modulate IgE concentrations in vitro or in vivo.

[0525] Moreover, polynucleotides, polypeptides, antibodies, and/or agonists or antagonists of the present invention have uses in the diagnosis, prognosis, prevention, and/or treatment of inflammatory conditions. For example, since polypeptides, antibodies, or polynucleotides of the invention, and/or agonists or antagonists of the invention may inhibit the activation, proliferation and/or differentiation of cells involved in an inflammatory response, these molecules can be used to prevent and/or treat chronic and acute inflammatory conditions. Such inflammatory conditions include, but are not limited to, for example, inflammation associated with infection (e.g., septic shock, sepsis, or systemic inflammatory response syndrome), ischemia-reperfusion injury, endotoxin lethality, complement-mediated hyperacute rejection, nephritis, cytokine or chemokine induced lung injury, inflammatory bowel disease, Crohn's disease, over production of cytokines (e.g., TNF or IL-1.), respiratory disorders (e.g., asthma and allergy); gastrointestinal disorders (e.g., inflammatory bowel disease); cancers (e.g., gastric, ovarian, lung, bladder, liver, and breast); CNS disorders (e.g., multiple sclerosis; ischemic brain injury and/or stroke, traumatic brain injury, neurodegenerative disorders (e.g., Parkinson's disease and Alzheimer's disease); AIDS-related dementia; and prion disease); cardiovascular disorders (e.g., atherosclerosis, myocarditis, cardiovascular disease, and cardiopulmonary bypass complications); as well as many additional diseases, conditions, and disorders that are characterized by inflammation (e.g., hepatitis, rheumatoid arthritis, gout, trauma, pancreatitis, sarcoidosis, dermatitis, renal ischemia-reperfusion injury, Grave's disease, systemic lupus erythematosus, diabetes mellitus, and allogenic transplant rejection).

[0526] Because inflammation is a fundamental defense mechanism, inflammatory disorders can effect virtually any tissue of the body. Accordingly, polynucleotides, polypeptides, and antibodies of the invention, as well as agonists or antagonists thereof, have uses in the treatment of tissue-specific inflammatory disorders, including, but not limited to, adrenalitis, alveolitis, angiocholecystitis, appendicitis, balanitis, blepharitis, bronchitis, bursitis, carditis, cellulitis, cervicitis, cholecystitis, chorditis, cochlitis, colitis, conjunctivitis, cystitis, dermatitis, diverticulitis, encephalitis, endocarditis, esophagitis, eustachitis, fibrositis, folliculitis, gastritis, gastroenteritis, gingivitis, glossitis, hepatosplenitis, keratitis, labyrinthitis, laryngitis, lymphangitis, mastitis, media otitis, meningitis, metritis, mucitis, myocarditis, myosititis, myringitis, nephritis, neuritis, orchitis, osteochondritis, otitis, pericarditis, peritendonitis, peritonitis, pharyngitis, phlebitis, poliomyelitis, prostatitis, pulpitis, retinitis, rhinitis, salpingitis, scleritis, sclerochoroiditis, scrotitis, sinusitis, spondylitis, steatitis, stomatitis, synovitis, syringitis, tendonitis, tonsillitis, urethritis, and vaginitis.

[0527] In specific embodiments, polypeptides, antibodies, or polynucleotides of the invention, and/or agonists or antagonists thereof, are useful to diagnose, prognose, prevent, and/or treat organ transplant rejections and graft-versus-host disease. Organ rejection occurs by host immune cell destruction of the transplanted tissue through an immune response. Similarly, an immune response is also involved in GVHD, but, in this case, the foreign transplanted immune cells destroy the host tissues. Polypeptides, antibodies, or polynucleotides of the invention, and/or agonists or antagonists thereof, that inhibit an immune response, particularly the activation, proliferation, differentiation, or chemotaxis of T-cells, may be an effective therapy in preventing organ rejection or GVHD. In specific embodiments, polypeptides, antibodies, or polynucleotides of the invention, and/or agonists or antagonists thereof, that inhibit an immune response, particularly the activation, proliferation, differentiation, or chemotaxis of T-cells, may be an effective therapy in preventing experimental allergic and hyperacute xenograft rejection.

[0528] In other embodiments, polypeptides, antibodies, or polynucleotides of the invention, and/or agonists or antagonists thereof, are useful to diagnose, prognose, prevent, and/or treat immune complex diseases, including, but not limited to, serum sickness, post streptococcal glomerulonephritis, polyarteritis nodosa, and immune complex-induced vasculitis.

[0529] Polypeptides, antibodies, polynucleotides and/or agonists or antagonists of the invention can be used to treat, detect, and/or prevent infectious agents. For example, by increasing the immune response, particularly increasing the proliferation activation and/or differentiation of B and/or T cells, infectious diseases may be treated, detected, and/or prevented. The immune response may be increased by either enhancing an existing immune response, or by initiating a new immune response. Alternatively, polynucleotides, polypeptides, antibodies, and/or agonists or antagonists of the present invention may also directly inhibit the infectious agent (refer to section of application listing infectious agents, etc), without necessarily eliciting an immune response.

[0530] In another embodiment, polypeptides, antibodies, polynucleotides and/or agonists or antagonists of the present invention are used as a vaccine adjuvant that enhances immune responsiveness to an antigen. In a specific embodiment, polypeptides, antibodies, polynucleotides and/or agonists or antagonists of the present invention are used as an adjuvant to enhance tumor-specific immune responses.

[0531] In another specific embodiment, polypeptides, antibodies, polynucleotides and/or agonists or antagonists of the present invention are used as an adjuvant to enhance anti-viral immune responses. Anti-viral immune responses that may be enhanced using the compositions of the invention as an adjuvant, include virus and virus associated diseases or symptoms described herein or otherwise known in the art. In specific embodiments, the compositions of the invention are used as an adjuvant to enhance an immune response to a virus, disease, or symptom selected from the group consisting of: AIDS, meningitis, Dengue, EBV, and hepatitis (e.g., hepatitis B). In another specific embodiment, the compositions of the invention are used as an adjuvant to enhance an immune response to a virus, disease, or symptom selected from the group consisting of: HIV/AIDS, respiratory syncytial virus, Dengue, rotavirus, Japanese B encephalitis, influenza A and B, parainfluenza, measles, cytomegalovirus, rabies, Junin, Chikungunya, Rift Valley Fever, herpes simplex, and yellow fever.

[0532] In another specific embodiment, polypeptides, antibodies, polynucleotides and/or agonists or antagonists of the present invention are used as an adjuvant to enhance anti-bacterial or anti-fungal immune responses. Anti-bacterial or anti-fungal immune responses that may be enhanced using the compositions of the invention as an adjuvant, include bacteria or fungus and bacteria or fungus associated diseases or symptoms described herein or otherwise known in the art. In specific embodiments, the compositions of the invention are used as an adjuvant to enhance an immune response to a bacteria or fungus, disease, or symptom selected from the group consisting of: tetanus, Diphtheria, botulism, and meningitis type B.

[0533] In another specific embodiment, the compositions of the invention are used as an adjuvant to enhance an immune response to a bacteria or fungus, disease, or symptom selected from the group consisting of: Vibrio cholerae, Mycobacterium leprae, Salmonella typhi, Salmonella paratyphi, Meisseria meningitidis, Streptococcus pneumoniae, Group B streptococcus, Shigella spp., Enterotoxigenic Escherichia coli, Enterohemorrhagic E. coli, and Borrelia burgdorferi.

[0534] In another specific embodiment, polypeptides, antibodies, polynucleotides and/or agonists or antagonists of the present invention are used as an adjuvant to enhance anti-parasitic immune responses. Anti-parasitic immune responses that may be enhanced using the compositions of the invention as an adjuvant, include parasite and parasite associated diseases or symptoms described herein or otherwise known in the art. In specific embodiments, the compositions of the invention are used as an adjuvant to enhance an immune response to a parasite. In another specific embodiment, the compositions of the invention are used as an adjuvant to enhance an immune response to Plasmodium (malaria) or Leishmania.

[0535] In another specific embodiment, polypeptides, antibodies, polynucleotides and/or agonists or antagonists of the present invention may also be employed to treat infectious diseases including silicosis, sarcoidosis, and idiopathic pulmonary fibrosis; for example, by preventing the recruitment and activation of mononuclear phagocytes.

[0536] In another specific embodiment, polypeptides, antibodies, polynucleotides and/or agonists or antagonists of the present invention are used as an antigen for the generation of antibodies to inhibit or enhance immune mediated responses against polypeptides of the invention.

[0537] In one embodiment, polypeptides, antibodies, polynucleotides and/or agonists or antagonists of the present invention are administered to an animal (e.g., mouse, rat, rabbit, hamster, guinea pig, pigs, micro-pig, chicken, camel, goat, horse, cow, sheep, dog, cat, non-human primate, and human, most preferably human) to boost the immune system to produce increased quantities of one or more antibodies (e.g., IgG, IgA, IgM, and IgE), to induce higher affinity antibody production and immunoglobulin class switching (e.g., IgG, IgA, IgM, and IgE), and/or to increase an immune response.

[0538] In another specific embodiment, polypeptides, antibodies, polynucleotides and/or agonists or antagonists of the present invention are used as a stimulator of B cell responsiveness to pathogens.

[0539] In another specific embodiment, polypeptides, antibodies, polynucleotides and/or agonists or antagonists of the present invention are used as an activator of T cells.

[0540] In another specific embodiment, polypeptides, antibodies, polynucleotides and/or agonists or antagonists of the present invention are used as an agent that elevates the immune status of an individual prior to their receipt of immunosuppressive therapies.

[0541] In another specific embodiment, polypeptides, antibodies, polynucleotides and/or agonists or antagonists of the present invention are used as an agent to induce higher affinity antibodies.

[0542] In another specific embodiment, polypeptides, antibodies, polynucleotides and/or agonists or antagonists of the present invention are used as an agent to increase serum immunoglobulin concentrations.

[0543] In another specific embodiment, polypeptides, antibodies, polynucleotides and/or agonists or antagonists of the present invention are used as an agent to accelerate recovery of immunocompromised individuals.

[0544] In another specific embodiment, polypeptides, antibodies, polynucleotides and/or agonists or antagonists of the present invention are used as an agent to boost immunoresponsiveness among aged populations and/or neonates.

[0545] In another specific embodiment, polypeptides, antibodies, polynucleotides and/or agonists or antagonists of the present invention are used as an immune system enhancer prior to, during, or after bone marrow transplant and/or other transplants (e.g., allogeneic or xenogeneic organ transplantation). With respect to transplantation, compositions of the invention may be administered prior to, concomitant with, and/or after transplantation. In a specific embodiment, compositions of the invention are administered after transplantation, prior to the beginning of recovery of T-cell populations. In another specific embodiment, compositions of the invention are first administered after transplantation after the beginning of recovery of T cell populations, but prior to full recovery of B cell populations.

[0546] In another specific embodiment, polypeptides, antibodies, polynucleotides and/or agonists or antagonists of the present invention are used as an agent to boost immunoresponsiveness among individuals having an acquired loss of B cell function. Conditions resulting in an acquired loss of B cell function that may be ameliorated or treated by administering the polypeptides, antibodies, polynucleotides and/or agonists or antagonists thereof, include, but are not limited to, HIV Infection, AIDS, bone marrow transplant, and B cell chronic lymphocytic leukemia (CLL).

[0547] In another specific embodiment, polypeptides, antibodies, polynucleotides and/or agonists or antagonists of the present invention are used as an agent to boost immunoresponsiveness among individuals having a temporary immune deficiency. Conditions resulting in a temporary immune deficiency that may be ameliorated or treated by administering the polypeptides, antibodies, polynucleotides and/or agonists or antagonists thereof, include, but are not limited to, recovery from viral infections (e.g., influenza), conditions associated with malnutrition, recovery from infectious mononucleosis, or conditions associated with stress, recovery from measles, recovery from blood transfusion, and recovery from surgery.

[0548] In another specific embodiment, polypeptides, antibodies, polynucleotides and/or agonists or antagonists of the present invention are used as a regulator of antigen presentation by monocytes, dendritic cells, and/or B-cells. In one embodiment, polynucleotides, polypeptides, antibodies, and/or agonists or antagonists of the present invention enhance antigen presentation or antagonizes antigen presentation in vitro or in vivo. Moreover, in related embodiments, said enhancement or antagonism of antigen presentation may be useful as an anti-tumor treatment or to modulate the immune system.

[0549] In another specific embodiment, polypeptides, antibodies, polynucleotides and/or agonists or antagonists of the present invention are used as an agent to direct an individual's immune system towards development of a humoral response (i.e. TH2) as opposed to a TH1 cellular response.

[0550] In another specific embodiment, polypeptides, antibodies, polynucleotides and/or agonists or antagonists of the present invention are used as a means to induce tumor proliferation and thus make it more susceptible to anti-neoplastic agents. For example, multiple myeloma is a slowly dividing disease and is thus refractory to virtually all anti-neoplastic regimens. If these cells were forced to proliferate more rapidly their susceptibility profile would likely change.

[0551] In another specific embodiment, polypeptides, antibodies, polynucleotides and/or agonists or antagonists of the present invention are used as a stimulator of B cell production in pathologies such as AIDS, chronic lymphocyte disorder and/or Common Variable Immunodificiency.

[0552] In another specific embodiment, polypeptides, antibodies, polynucleotides and/or agonists or antagonists of the present invention are used as a therapy for generation and/or regeneration of lymphoid tissues following surgery, trauma or genetic defect. In another specific embodiment, polypeptides, antibodies, polynucleotides and/or agonists or antagonists of the present invention are used in the pretreatment of bone marrow samples prior to transplant.

[0553] In another specific embodiment, polypeptides, antibodies, polynucleotides and/or agonists or antagonists of the present invention are used as a gene-based therapy for genetically inherited disorders resulting in immuno-incompetence/immunodeficiency such as observed among SCID patients.

[0554] In another specific embodiment, polypeptides, antibodies, polynucleotides and/or agonists or antagonists of the present invention are used as a means of activating monocytes/macrophages to defend against parasitic diseases that effect monocytes such as Leishmania.

[0555] In another specific embodiment, polypeptides, antibodies, polynucleotides and/or agonists or antagonists of the present invention are used as a means of regulating secreted cytokines that are elicited by polypeptides of the invention.

[0556] In another embodiment, polypeptides, antibodies, polynucleotides and/or agonists or antagonists of the present invention are used in one or more of the applications decribed herein, as they may apply to veterinary medicine.

[0557] In another specific embodiment, polypeptides, antibodies, polynucleotides and/or agonists or antagonists of the present invention are used as a means of blocking various aspects of immune responses to foreign agents or self. Examples of diseases or conditions in which blocking of certain aspects of immune responses may be desired include autoimmune disorders such as lupus, and arthritis, as well as immunoresponsiveness to skin allergies, inflammation, bowel disease, injury and diseases/disorders associated with pathogens.

[0558] In another specific embodiment, polypeptides, antibodies, polynucleotides and/or agonists or antagonists of the present invention are used as a therapy for preventing the B cell proliferation and Ig secretion associated with autoimmune diseases such as idiopathic thrombocytopenic purpura, systemic lupus erythematosus and multiple sclerosis.

[0559] In another specific embodiment, polypeptides, antibodies, polynucleotides and/or agonists or antagonists of the present invention are used as a inhibitor of B and/or T cell migration in endothelial cells. This activity disrupts tissue architecture or cognate responses and is useful, for example in disrupting immune responses, and blocking sepsis.

[0560] In another specific embodiment, polypeptides, antibodies, polynucleotides and/or agonists or antagonists of the present invention are used as a therapy for chronic hypergammaglobulinemia evident in such diseases as monoclonal gammopathy of undetermined significance (MGUS), Waldenstrom's disease, related idiopathic monoclonal gammopathies, and plasmacytomas.

[0561] In another specific embodiment, polypeptides, antibodies, polynucleotides and/or agonists or antagonists of the present invention may be employed for instance to inhibit polypeptide chemotaxis and activation of macrophages and their precursors, and of neutrophils, basophils, B lymphocytes and some T-cell subsets, e.g., activated and CD8 cytotoxic T cells and natural killer cells, in certain autoimmune and chronic inflammatory and infective diseases. Examples of autoimmune diseases are described herein and include multiple sclerosis, and insulin-dependent diabetes.

[0562] The polypeptides, antibodies, polynucleotides and/or agonists or antagonists of the present invention may also be employed to treat idiopathic hyper-eosinophilic syndrome by, for example, preventing eosinophil production and migration.

[0563] In another specific embodiment, polypeptides, antibodies, polynucleotides and/or agonists or antagonists of the present invention are used to enhance or inhibit complement mediated cell lysis.

[0564] In another specific embodiment, polypeptides, antibodies, polynucleotides and/or agonists or antagonists of the present invention are used to enhance or inhibit antibody dependent cellular cytotoxicity.

[0565] In another specific embodiment, polypeptides, antibodies, polynucleotides and/or agonists or antagonists of the present invention may also be employed for treating atherosclerosis, for example, by preventing monocyte infiltration in the artery wall.

[0566] In another specific embodiment, polypeptides, antibodies, polynucleotides and/or agonists or antagonists of the present invention may be employed to treat adult respiratory distress syndrome (ARDS).

[0567] In another specific embodiment, polypeptides, antibodies, polynucleotides and/or agonists or antagonists of the present invention may be useful for stimulating wound and tissue repair, stimulating angiogenesis, and/or stimulating the repair of vascular or lymphatic diseases or disorders. Additionally, agonists and antagonists of the invention may be used to stimulate the regeneration of mucosal surfaces.

[0568] In a specific embodiment, polynucleotides or polypeptides, and/or agonists thereof are used to diagnose, prognose, treat, and/or prevent a disorder characterized by primary or acquired immunodeficiency, deficient serum immunoglobulin production, recurrent infections, and/or immune system dysfunction. Moreover, polynucleotides or polypeptides, and/or agonists thereof may be used to treat or prevent infections of the joints, bones, skin, and/or parotid glands, blood-borne infections (e.g., sepsis, meningitis, septic arthritis, and/or osteomyelitis), autoimmune diseases (e.g., those disclosed herein), inflammatory disorders, and malignancies, and/or any disease or disorder or condition associated with these infections, diseases, disorders and/or malignancies) including, but not limited to, CVID, other primary immune deficiencies, HIV disease, CLL, recurrent bronchitis, sinusitis, otitis media, conjunctivitis, pneumonia, hepatitis, meningitis, herpes zoster (e.g., severe herpes zoster), and/or pneumocystis carnii. Other diseases and disorders that may be prevented, diagnosed, prognosed, and/or treated with polynucleotides or polypeptides, and/or agonists of the present invention include, but are not limited to, HIV infection, HTLV-BLV infection, lymphopenia, phagocyte bactericidal dysfunction anemia, thrombocytopenia, and hemoglobinuria.

[0569] In another embodiment, polynucleotides, polypeptides, antibodies, and/or agonists or antagonists of the present invention are used to treat, and/or diagnose an individual having common variable immunodeficiency disease (“CVID”; also known as “acquired agammaglobulinemia” and “acquired hypogammaglobulinemia”) or a subset of this disease.

[0570] In a specific embodiment, polynucleotides, polypeptides, antibodies, and/or agonists or antagonists of the present invention may be, used to, diagnose, prognose, prevent, and/or treat cancers or neoplasms including immune cell or immune tissue-related cancers or neoplasms. Examples of cancers or neoplasms that may be prevented, diagnosed, or treated by polynucleotides, polypeptides, antibodies, and/or agonists or antagonists of the present invention include, but are not limited to, acute myelogenous leukemia, chronic myelogenous leukemia, Hodgkin's disease, non-Hodgkin's lymphoma, acute lymphocytic anemia (ALL) Chronic lymphocyte leukemia, plasmacytomas, multiple myeloma, Burkitt's lymphoma, EBV-transformed diseases, and/or diseases and disorders described in the section entitled “Hyperproliferative Disorders” elsewhere herein.

[0571] In another specific embodiment, polypeptides, antibodies, polynucleotides and/or agonists or antagonists of the present invention are used as a therapy for decreasing cellular proliferation of Large B-cell Lymphomas.

[0572] In another specific embodiment, polypeptides, antibodies, polynucleotides and/or agonists or antagonists of the present invention are used as a means of decreasing the involvement of B cells and Ig associated with Chronic Myelogenous Leukemia.

[0573] In specific embodiments, the compositions of the invention are used as an agent to boost immunoresponsiveness among B cell immunodeficient individuals, such as, for example, an individual who has undergone a partial or complete splenectomy.

[0574] Antagonists of the invention include, for example, binding and/or inhibitory antibodies, antisense nucleic acids, ribozymes or soluble forms of the polypeptides of the present invention (e.g., Fc fusion protein; see, e.g., Example 9). Agonists of the invention include, for example, binding or stimulatory antibodies, and soluble forms of the polypeptides (e.g., Fc fusion proteins; see, e.g., Example 9). Polypeptides, antibodies, polynucleotides and/or agonists or antagonists of the present invention may be employed in a composition with a pharmaceutically acceptable carrier, e.g., as described herein.

[0575] In another embodiment, polypeptides, antibodies, polynucleotides and/or agonists or antagonists of the present invention are administered to an animal (including, but not limited to, those listed above, and also including transgenic animals) incapable of producing functional endogenous antibody molecules or having an otherwise compromised endogenous immune system, but which is capable of producing human immunoglobulin molecules by means of a reconstituted or partially reconstituted immune system from another animal (see, e.g., published PCT Application Nos. WO98/24893, WO/9634096, WO/9633735, and WO/9110741). Administration of polypeptides, antibodies, polynucleotides and/or agonists or antagonists of the present invention to such animals is useful for the generation of monoclonal antibodies against the polypeptides, antibodies, polynucleotides and/or agonists or antagonists of the present invention.

[0576] Blood-Related Disorders

[0577] The polynucleotides, polypeptides, antibodies, and/or agonists or antagonists of the present invention may be used to modulate hemostatic (the stopping of bleeding) or thrombolytic (clot dissolving) activity. For example, by increasing hemostatic or thrombolytic activity, polynucleotides or polypeptides, and/or agonists or antagonists of the present invention could be used to treat or prevent blood coagulation diseases, disorders, and/or conditions (e.g., afibrinogenemia, factor deficiencies, hemophilia), blood platelet diseases, disorders, and/or conditions (e.g., thrombocytopenia), or wounds resulting from trauma, surgery, or other causes. Alternatively, polynucleotides, polypeptides, antibodies, and/or agonists or antagonists of the present invention that can decrease hemostatic or thrombolytic activity could be used to inhibit or dissolve clotting. These molecules could be important in the treatment or prevention of heart attacks (infarction), strokes, or scarring.

[0578] In specific embodiments, the polynucleotides, polypeptides, antibodies, and/or agonists or antagonists of the present invention may be used to prevent, diagnose, prognose, and/or treat thrombosis, arterial thrombosis, venous thrombosis, thromboembolism, pulmonary embolism, atherosclerosis, myocardial infarction, transient ischemic attack, unstable angina. In specific embodiments, the polynucleotides, polypeptides, antibodies, and/or agonists or antagonists of the present invention may be used for the prevention of occulsion of saphenous grafts, for reducing the risk of periprocedural thrombosis as might accompany angioplasty procedures, for reducing the risk of stroke in patients with atrial fibrillation including nonrheumatic atrial fibrillation, for reducing the risk of embolism associated with mechanical heart valves and or mitral valves disease. Other uses for the polynucleotides, polypeptides, antibodies, and/or agonists or antagonists of the present invention, include, but are not limited to, the prevention of occlusions in extrcorporeal devices (e.g., intravascular canulas, vascular access shunts in hemodialysis patients, hemodialysis machines, and cardiopulmonary bypass machines).

[0579] In another embodiment, a polypeptide of the invention, or polynucleotides, antibodies, agonists, or antagonists corresponding to that polypeptide, may be used to prevent, diagnose, prognose, and/or treat diseases and disorders of the blood and/or blood forming organs associated with the tissue(s) in which the polypeptide of the invention is expressed, including one, two, three, four, five, or more tissues disclosed in Table 1, column 8 (Tissue Distribution Library Code).

[0580] The polynucleotides, polypeptides, antibodies, and/or agonists or antagonists of the present invention may be used to modulate hematopoietic activity (the formation of blood cells). For example, the polynucleotides, polypeptides, antibodies, and/or agonists or antagonists of the present invention may be used to increase the quantity of all or subsets of blood cells, such as, for example, erythrocytes, lymphocytes (B or T cells), myeloid cells (e.g., basophils, eosinophils, neutrophils, mast cells, macrophages) and platelets. The ability to decrease the quantity of blood cells or subsets of blood cells may be useful in the prevention, detection, diagnosis and/or treatment of anemias and leukopenias described below. Alternatively, the polynucleotides, polypeptides, antibodies, and/or agonists or antagonists of the present invention may be used to decrease the quantity of all or subsets of blood cells, such as, for example, erythrocytes, lymphocytes (B or T cells), myeloid cells (e.g., basophils, eosinophils, neutrophils, mast cells, macrophages) and platelets.. The ability to decrease the quantity of blood cells or subsets of blood cells may be useful in the prevention, detection, diagnosis and/or treatment of leukocytoses, such as, for example eosinophilia.

[0581] The polynucleotides, polypeptides, antibodies, and/or agonists or antagonists of the present invention may be used to prevent, treat, or diagnose blood dyscrasia.

[0582] Anemias are conditions in which the number of red blood cells or amount of hemoglobin (the protein that carries oxygen) in them is below normal. Anemia may be caused by excessive bleeding, decreased red blood cell production, or increased red blood cell destruction (hemolysis). The polynucleotides, polypeptides, antibodies, and/or agonists or antagonists of the present invention may be useful in treating, preventing, and/or diagnosing anemias. Anemias that may be treated prevented or diagnosed by the polynucleotides, polypeptides, antibodies, and/or agonists or antagonists of the present invention include iron deficiency anemia, hypochromic anemia, microcytic anemia, chlorosis, hereditary siderob;astic anemia, idiopathic acquired sideroblastic anemia, red cell aplasia, megaloblastic anemia (e.g., pernicious anemia, (vitamin B12 deficiency) and folic acid deficiency anemia), aplastic anemia, hemolytic anemias (e.g., autoimmune helolytic anemia, microangiopathic hemolytic anemia, and paroxysmal nocturnal hemoglobinuria). The polynucleotides, polypeptides, antibodies, and/or agonists or antagonists of the present invention may be useful in treating, preventing, and/or diagnosing anemias associated with diseases including but not limited to, anemias associated with systemic lupus erythematosus, cancers, lymphomas, chronic renal disease, and enlarged spleens. The polynucleotides, polypeptides, antibodies, and/or agonists or antagonists of the present invention may be useful in treating, preventing, and/or diagnosing anemias arising from drug treatments such as anemias associated with methyldopa, dapsone, and/or sulfadrugs. Additionally, rhe polynucleotides, polypeptides, antibodies, and/or agonists or antagonists of the present invention may be useful in treating, preventing, and/or diagnosing anemias associated with abnormal red blood cell architecture including but not limited to, hereditary spherocytosis, hereditary elliptocytosis, glucose-6-phosphate dehydrogenase deficiency, and sickle cell anemia.

[0583] The polynucleotides, polypeptides, antibodies, and/or agonists or antagonists of the present invention may be useful in treating, preventing, and/or diagnosing hemoglobin abnormalities, (e.g., those associated with sickle cell anemia, hemoglobin C disease, hemoglobin S-C disease, and hemoglobin E disease). Additionally, the polynucleotides, polypeptides, antibodies, and/or agonists or antagonists of the present invention may be useful in diagnosing, prognosing, preventing, and/or treating thalassemias, including, but not limited to major and minor forms of alpha-thalassemia and beta-thalassemia.

[0584] In another embodiment, the polynucleotides, polypeptides, antibodies, and/or agonists or antagonists of the present invention may be useful in diagnosing, prognosing, preventing, and/or treating bleeding disorders including, but not limited to, thrombocytopenia (e.g., idiopathic thrombocytopenic purpura, and thrombotic thrombocytopenic purpura), Von Willebrand's disease, hereditary platelet disorders (e.g., storage pool disease such as Chediak-Higashi and Hermansky-Pudlak syndromes, thromboxane A2 dysfunction, thromboasthenia, and Bernard-Soulier syndrome), hemolytic-uremic syndrome, hemophelias such as hemophelia A or Factor VII deficiency and Christmas disease or Factor IX deficiency, Hereditary Hemorhhagic Telangiectsia, also known as Rendu-Osler-Weber syndrome, allergic purpura (Henoch Schonlein purpura) and disseminated intravascular coagulation.

[0585] The effect of the polynucleotides, polypeptides, antibodies, and/or agonists or antagonists of the present invention on the clotting time of blood may be monitored using any of the clotting tests known in the art including, but not limited to, whole blood partial thromboplastin time (PTT), the activated partial thromboplastin time (aPTT), the activated clotting time (ACT), the recalcified activated clotting time, or the Lee-White Clotting time.

[0586] Several diseases and a variety of drugs can cause platelet dysfunction. Thus, in a specific embodiment, the polynucleotides, polypeptides, antibodies, and/or agonists or antagonists of the present invention may be useful in diagnosing, prognosing, preventing, and/or treating acquired platelet dysfunction such as platelet dysfunction accompanying kidney failure, leukemia, multiple myeloma, cirrhosis of the liver, and systemic lupus erythematosus as well as platelet dysfunction associated with drug treatments, including treatment with aspirin, ticlopidine, nonsteroidal anti-inflammatory drugs (used for arthritis, pain, and sprains), and penicillin in high doses.

[0587] In another embodiment, the polynucleotides, polypeptides, antibodies, and/or agonists or antagonists of the present invention may be useful in diagnosing, prognosing, preventing, and/or treating diseases and disorders characterized by or associated with increased or decreased numbers of white blood cells. Leukopenia occurs when the number of white blood cells decreases below normal. Leukopenias include, but are not limited to, neutropenia and lymphocytopenia. An increase in the number of white blood cells compared to normal is known as leukocytosis. The body generates increased numbers of white blood cells during infection. Thus, leukocytosis may simply be a normal physiological parameter that reflects infection. Alternatively, leukocytosis may be an indicator of injury or other disease such as cancer. Leokocytoses, include but are not limited to, eosinophilia, and accumulations of macrophages. In specific embodiments, the polynucleotides, polypeptides, antibodies, and/or agonists or antagonists of the present invention may be useful in diagnosing, prognosing, preventing, and/or treating leukopenia. In other specific embodiments, the polynucleotides, polypeptides, antibodies, and/or agonists or antagonists of the present invention may be useful in diagnosing, prognosing, preventing, and/or treating leukocytosis

[0588] Leukopenia may be a- generalized decreased in all types of white blood cells, or may be a specific depletion of particular types of white blood cells. Thus, in specific embodiments, the polynucleotides, polypeptides, antibodies, and/or agonists or antagonists of the present invention may be useful in diagnosing, prognosing, preventing, and/or treating decreases in neutrophil numbers, known as neutropenia. Neutropenias that may be diagnosed, prognosed, prevented, and/or treated by the polynucleotides, polypeptides, antibodies, and/or agonists or antagonists of the present invention include, but are not limited to, infantile genetic agranulocytosis, familial neutropenia, cyclic neutropenia, neutropenias resulting from or associated with dietary deficiencies (e.g., vitamin B 12 deficiency or folic acid deficiency), neutropenias resulting from or associated with drug treatments (e.g., antibiotic regimens such as penicillin treatment, sulfonamide treatment, anticoagulant treatment, anticonvulsant drugs, anti-thyroid drugs, and cancer chemotherapy), and neutropenias resulting from increased neutrophil destruction that may occur in association with some bacterial or viral infections, allergic disorders, autoimmune diseases, conditions in which an individual has an enlarged spleen (e.g., Felty syndrome, malaria and sarcoidosis), and some drug treatment regimens.

[0589] The polynucleotides, polypeptides, antibodies, and/or agonists or antagonists of the present invention may be useful in diagnosing, prognosing, preventing, and/or treating lymphocytopenias (decreased numbers of B and/or T lymphocytes), including, but not limited lymphocytopenias resulting from or associated with stress, drug treatments (e.g., drug treatment with corticosteroids, cancer chemotherapies, and/or radiation therapies), AIDS infection and/or other diseases such as, for example, cancer, rheumatoid arthritis, systemic lupus erythematosus, chronic infections, some viral infections and/or hereditary disorders (e.g., DiGeorge syndrome, Wiskott-Aldrich Syndome, severe combined immunodeficiency, ataxia telangiectsia).

[0590] The polynucleotides, polypeptides, antibodies, and/or agonists or antagonists of the present invention may be useful in diagnosing, prognosing, preventing, and/or treating diseases and disorders associated with macrophage numbers and/or macrophage function including, but not limited to, Gaucher's disease, Niemann-Pick disease, Letterer-Siwe disease and Hand-Schuller-Christian disease.

[0591] In another embodiment, the polynucleotides, polypeptides, antibodies, and/or agonists or antagonists of the present invention may be useful in diagnosing, prognosing, preventing, and/or treating diseases and disorders associated with eosinophil numbers and/or eosinophil function including, but not limited to, idiopathic hypereosinophilic syndrome, eosinophilia-myalgia syndrome, and Hand-Schuller-Christian disease.

[0592] In yet another embodiment, the polynucleotides, polypeptides, antibodies, and/or agonists or antagonists of the present invention may be useful in diagnosing, prognosing, preventing, and/or treating leukemias and lymphomas including, but not limited to, acute lymphocytic (lymphpblastic) leukemia (ALL), acute myeloid (myelocytic, myelogenous, myeloblastic, or myelomonocytic) leukemia, chronic lymphocytic leukemia (e.g., B cell leukemias, T cell leukemias, Sezary syndrome, and Hairy cell leukenia), chronic myelocytic (myeloid, myelogenous, or granulocytic) leukemia, Hodgkin's lymphoma, non-hodgkin's lymphoma, Burkitt's lymphoma, and mycosis fungoides.

[0593] In other embodiments, the polynucleotides, polypeptides, antibodies, and/or agonists or antagonists of the present invention may be useful in diagnosing, prognosing, preventing, and/or treating diseases and disorders of plasma cells including, but not limited to, plasma cell dyscrasias, monoclonal gammaopathies, monoclonal gammopathies of undetermined significance, multiple myeloma, macroglobulinemia, Waldenstrom's macroglobulinemia, cryoglobulinemia, and Raynaud's phenomenon.

[0594] In other embodiments, the polynucleotides, polypeptides, antibodies, and/or agonists or antagonists of the present invention may be useful in treating, preventing, and/or diagnosing myeloproliferative disorders, including but not limited to, polycythemia vera, relative polycythemia, secondary polycythemia, myelofibrosis, acute myelofibrosis, agnogenic myelod metaplasia, thrombocythemia, (including both primary and seconday thrombocythemia) and chronic myelocytic leukemia.

[0595] In other embodiments, the polynucleotides, polypeptides, antibodies, and/or agonists or antagonists of the present invention may be useful as a treatment prior to surgery, to increase blood cell production.

[0596] In other embodiments, the polynucleotides, polypeptides, antibodies, and/or agonists or antagonists of the present invention may be useful as an agent to enhance the migration, phagocytosis, superoxide production, antibody dependent cellular cytotoxicity of neutrophils, eosionophils and macrophages.

[0597] In other embodiments, the polynucleotides, polypeptides, antibodies, and/or agonists or antagonists of the present invention may be useful as an agent to increase the number of stem cells in circulation prior to stem cells pheresis. In another specific embodiment, the polynucleotides, polypeptides, antibodies, and/or agonists or antagonists of the present invention may be useful as an agent to increase the number of stem cells in circulation prior to platelet pheresis.

[0598] In other embodiments, the polynucleotides, polypeptides, antibodies, and/or agonists or antagonists of the present invention may be useful as an agent to increase cytokine production.

[0599] In other embodiments, the polynucleotides, polypeptides, antibodies, and/or agonists or antagonists of the present invention may be useful in preventing, diagnosing, and/or treating primary hematopoietic disorders.

[0600] Hyperproliferative Disorders

[0601] Ovarian associated polynucleotides or polypeptides, or agonists or antagonists thereof, can be used to treat, prevent, diagnose and/or prognose hyperproliferative diseases, disorders, and/or conditions, including neoplasms.

[0602] In a specific embodiment, ovarian associated polynucleotides or polypeptides, or agonists or antagonists thereof, can be used to treat, prevent, and/or diagnose hyperproliferative diseases, disorders, and/or conditions of the ovaries and/or breast.

[0603] In a preferred embodiment, ovarian associated polynucleotides or polypeptides, or agonists or antagonists thereof, can be used to treat, prevent, and/or diagnose ovarian and/or breast neoplasms.

[0604] Ovarian associated polynucleotides or polypeptides, or agonists or antagonists of the invention, may inhibit the proliferation of the disorder through direct or indirect interactions. Alternatively, ovarian associated polynucleotides or polypeptides, or agonists or antagonists thereof, may proliferate other cells, which can inhibit the hyperproliferative disorder.

[0605] For example, by increasing an immune response, particularly increasing antigenic qualities of the hyperproliferative disorder or by proliferating, differentiating, or mobilizing T-cells, hyperproliferative diseases, disorders, and/or conditions can be treated, prevented, and/or diagnosed. This immune response may be increased by either enhancing an existing immune response, or by initiating a new immune response. Alternatively, decreasing an immune response may also be a method of treating, preventing, and/or diagnosing hyperproliferative diseases, disorders, and/or conditions, such as a chemotherapeutic agent.

[0606] Examples of hyperproliferative diseases, disorders, and/or conditions that can be treated, prevented, and/or diagnosed by ovarian associated polynucleotides or polypeptides, or agonists or antagonists thereof, include, but are not limited to neoplasms located in the: prostate, colon, abdomen, bone, breast, digestive system, liver, pancreas, peritoneum, endocrine glands (adrenal, parathyroid, pituitary, testicles, ovary, thymus, thyroid), eye, head and neck, nervous (central and peripheral), lymphatic system, pelvic, skin, soft tissue, spleen, thoracic, and urogenital.

[0607] Similarly, other hyperproliferative disorders can also be treated or detected by polynucleotides or polypeptides, or agonists or antagonists of the present invention. Examples of such hyperproliferative disorders include, but are not limited to: Acute Childhood Lymphoblastic Leukemia, Acute Lymphoblastic Leukemia, Acute Lymphocytic Leukemia, Acute Myeloid Leukemia, Adrenocortical Carcinoma, Adult (Primary) Hepatocellular Cancer, Adult (Primary) Liver Cancer, Adult Acute Lymphocytic Leukemia, Adult Acute Myeloid Leukemia, Adult Hodgkin's Disease, Adult Hodgkin's Lymphoma, Adult Lymphocytic Leukemia, Adult Non-Hodgkin's Lymphoma, Adult Primary Liver Cancer, Adult Soft Tissue Sarcoma, AIDS-Related Lymphoma, AIDS-Related Malignancies, Anal Cancer, Astrocytoma, Bile Duct Cancer, Bladder Cancer, Bone Cancer, Brain Stem Glioma, Brain Tumors, Breast Cancer, Cancer of the Renal Pelvis and Ureter, Central Nervous System (Primary) Lymphoma, Central Nervous System Lymphoma, Cerebellar Astrocytoma, Cerebral Astrocytoma, Cervical Cancer, Childhood (Primary) Hepatocellular Cancer, Childhood (Primary) Liver Cancer, Childhood Acute Lymphoblastic Leukemia, Childhood Acute Myeloid Leukemia, Childhood Brain Stem Glioma, Childhood Cerebellar Astrocytoma, Childhood Cerebral Astrocytoma, Childhood Extracranial Germ Cell Tumors, Childhood Hodgkin's Disease, Childhood Hodgkin's Lymphoma, Childhood Hypothalamic and Visual Pathway Glioma, Childhood Lymphoblastic Leukemia, Childhood Medulloblastoma, Childhood Non-Hodgkin's Lymphoma, Childhood Pineal and Supratentorial Primitive Neuroectodermal Tumors, Childhood Primary Liver Cancer, Childhood Rhabdomyosarcoma, Childhood Soft Tissue Sarcoma, Childhood Visual Pathway and Hypothalamic Glioma, Chronic Lymphocytic Leukemia, Chronic Myelogenous Leukemia, Colon Cancer, Cutaneous T-Cell Lymphoma, Endocrine Pancreas Islet Cell Carcinoma, Endometrial Cancer, Ependymoma, Epithelial Cancer, Esophageal Cancer, Ewing's Sarcoma and Related Tumors, Exocrine Pancreatic Cancer, Extracranial Germ Cell Tumor, Extragonadal Germ Cell Tumor, Extrahepatic Bile Duct Cancer, Eye Cancer, Female Breast Cancer, Gaucher's Disease, Gallbladder Cancer, Gastric Cancer, Gastrointestinal Carcinoid Tumor, Gastrointestinal Tumors, Germ Cell Tumors, Gestational Trophoblastic Tumor, Hairy Cell Leukemia, Head and Neck Cancer, Hepatocellular Cancer, Hodgkin's Disease, Hodgkin's Lymphoma, Hypergammaglobulinemia, Hypopharyngeal Cancer, Intestinal Cancers, Intraocular Melanoma, Islet Cell Carcinoma, Islet Cell Pancreatic Cancer, Kaposi's Sarcoma, Kidney Cancer, Laryngeal Cancer, Lip and Oral Cavity Cancer, Liver Cancer, Lung Cancer, Lymphoproliferative Disorders, Macroglobulinemia, Male Breast Cancer, Malignant Mesothelioma, Malignant Thymoma, Medulloblastoma, Melanoma, Mesothelioma, Metastatic Occult Primary Squamous Neck Cancer, Metastatic Primary Squamous Neck Cancer, Metastatic Squamous Neck Cancer, Multiple Myeloma, Multiple Myeloma/Plasma Cell Neoplasm, Myelodysplastic Syndrome, Myelogenous Leukemia, Myeloid Leukemia, Myeloproliferative Disorders, Nasal Cavity and Paranasal Sinus Cancer, Nasopharyngeal Cancer, Neuroblastoma, Non-Hodgkin's Lymphoma During Pregnancy, Nonmelanoma Skin Cancer, Non-Small Cell Lung Cancer, Occult Primary Metastatic Squamous Neck Cancer, Oropharyngeal Cancer, Osteo-/Malignant Fibrous Sarcoma, Osteosarcoma/Malignant Fibrous Histiocytoma, Osteosarcoma/Malignant Fibrous Histiocytoma of Bone, Ovarian Epithelial Cancer, Ovarian Germ Cell Tumor, Ovarian Low Malignant Potential Tumor, Pancreatic Cancer, Paraproteinemias, Purpura, Parathyroid Cancer, Penile Cancer, Pheochromocytoma, Pituitary Tumor, Plasma Cell Neoplasm/Multiple Myeloma, Primary Central Nervous System Lymphoma, Primary Liver Cancer, Prostate Cancer, Rectal Cancer, Renal Cell Cancer, Renal Pelvis and Ureter Cancer, Retinoblastoma, Rhabdomyosarcoma, Salivary Gland Cancer, Sarcoidosis Sarcomas, Sezary Syndrome, Skin Cancer, Small Cell Lung Cancer, Small Intestine Cancer, Soft Tissue Sarcoma, Squamous Neck Cancer, Stomach Cancer, Supratentorial Primitive Neuroectodermal and Pineal Tumors, T-Cell Lymphoma, Testicular Cancer, Thymoma, Thyroid Cancer, Transitional Cell Cancer of the Renal Pelvis and Ureter, Transitional Renal Pelvis and Ureter Cancer, Trophoblastic Tumors, Ureter and Renal Pelvis Cell Cancer, Urethral Cancer, Uterine Cancer, Uterine Sarcoma, Vaginal Cancer, Visual Pathway and Hypothalamic Glioma, Vulvar Cancer, Waldenstrom's Macroglobulinemia, Wilms' Tumor, and any other hyperproliferative disease, besides neoplasia, located in an organ system listed above.

[0608] In another preferred embodiment, polynucleotides or polypeptides, or agonists or antagonists of the present invention are used to diagnose, prognose, prevent, and/or treat premalignant conditions and to prevent progression to a neoplastic or malignant state, including but not limited to those disorders described above. Such uses are indicated in conditions known or suspected of preceding progression to neoplasia or cancer, in particular, where non-neoplastic cell growth consisting of hyperplasia, metaplasia, or most particularly, dysplasia has occurred (for review of such abnormal growth conditions, see Robbins and Angell, 1976, Basic Pathology, 2d Ed., W. B. Saunders Co., Philadelphia, pp. 68-79.)

[0609] Hyperplasia is a form of controlled cell proliferation, involving an increase in cell number in a tissue or organ, without significant alteration in structure or function. Hyperplastic disorders which can be diagnosed, prognosed, prevented, and/or treated with compositions of the invention (including polynucleotides, polypeptides, agonists or antagonists) include, but are not limited to, angiofollicular mediastinal lymph node hyperplasia, angiolymphoid hyperplasia with eosinophilia, atypical melanocytic hyperplasia, basal cell hyperplasia, benign giant lymph node hyperplasia, cementum hyperplasia, congenital adrenal hyperplasia, congenital sebaceous hyperplasia, cystic hyperplasia, cystic hyperplasia of the breast, denture hyperplasia, ductal hyperplasia, endometrial hyperplasia, fibromuscular hyperplasia, focal epithelial hyperplasia, gingival hyperplasia, inflammatory fibrous hyperplasia, inflammatory papillary hyperplasia, intravascular papillary endothelial hyperplasia, nodular hyperplasia of prostate, nodular regenerative hyperplasia, pseudoepitheliomatous hyperplasia, senile sebaceous hyperplasia, and verrucous hyperplasia.

[0610] Metaplasia is a form of controlled cell growth in which one type of adult or fully differentiated cell substitutes for another type of adult cell. Metaplastic disorders which can be diagnosed, prognosed, prevented, and/or treated with compositions of the invention (including polynucleotides, polypeptides, agonists or antagonists) include, but are not limited to, agnogenic myeloid metaplasia, apocrine metaplasia, atypical metaplasia, autoparenchymatous metaplasia, connective tissue metaplasia, epithelial metaplasia, intestinal metaplasia, metaplastic anemia, metaplastic ossification, metaplastic polyps, myeloid metaplasia, primary myeloid metaplasia, secondary myeloid metaplasia, squamous metaplasia, squamous metaplasia of amnion, and symptomatic myeloid metaplasia.

[0611] Dysplasia is frequently a forerunner of cancer, and is found mainly in the epithelia; it is the most disorderly form of non-neoplastic cell growth, involving a loss in individual cell uniformity and in the architectural orientation of cells. Dysplastic cells often have abnormally large, deeply stained nuclei, and exhibit pleomorphism. Dysplasia characteristically occurs where there exists chronic irritation or inflammation. Dysplastic disorders which can be diagnosed, prognosed, prevented, and/or treated with compositions of the invention (including polynucleotides, polypeptides, agonists or antagonists) include, but are not limited to, anhidrotic ectodermal dysplasia, anterofacial dysplasia, asphyxiating thoracic dysplasia, atriodigital dysplasia, bronchopulmonary dysplasia, cerebral dysplasia, cervical dysplasia, chondroectodermal dysplasia, cleidocranial dysplasia, congenital ectodermal dysplasia, craniodiaphysial dysplasia, craniocarpotarsal dysplasia, craniometaphysial dysplasia, dentin dysplasia, diaphysial dysplasia, ectodermal dysplasia, enamel dysplasia, encephalo-ophthalmic dysplasia, dysplasia epiphysialis hemimelia, dysplasia epiphysialis multiplex, dysplasia epiphysialis punctata, epithelial dysplasia, faciodigitogenital dysplasia, familial fibrous dysplasia of jaws, familial white folded dysplasia, fibromuscular dysplasia, fibrous dysplasia of bone, florid osseous dysplasia, hereditary renal-retinal dysplasia, hidrotic ectodermal dysplasia, hypohidrotic ectodermal dysplasia, lymphopenic thymic dysplasia, mammary dysplasia, mandibulofacial dysplasia, metaphysial dysplasia, Mondini dysplasia, monostotic fibrous dysplasia, mucoepithelial dysplasia, multiple epiphysial dysplasia, oculoauriculovertebral dysplasia, oculodentodigital dysplasia, oculovertebral dysplasia, odontogenic dysplasia, ophthalmomandibulomelic dysplasia, periapical cemental dysplasia, polyostotic fibrous dysplasia, pseudoachondroplastic spondyloepiphysial dysplasia, retinal dysplasia, septo-optic dysplasia, spondyloepiphysial dysplasia, and ventriculoradial dysplasia.

[0612] Additional pre-neoplastic disorders which can be diagnosed, prognosed, prevented, and/or treated with compositions of the invention (including polynucleotides, polypeptides, agonists or antagonists) include, but are not limited to, benign dysproliferative disorders (e.g., benign tumors, fibrocystic conditions, tissue hypertrophy, intestinal polyps, colon polyps, and esophageal dysplasia), leukoplakia, keratoses, Bowen's disease, Farmer's Skin, solar cheilitis, and solar keratosis.

[0613] In another embodiment, a polypeptide of the invention, or polynucleotides, antibodies, agonists, or antagonists corresponding to that polypeptide, may be used to diagnose and/or prognose disorders associated with the tissue(s) in which the polypeptide of the invention is expressed, including one, two, three, four, five, or more tissues disclosed in Table 1, 7 (Tissue Distribution Library Code).

[0614] In another embodiment, polynucleotides, polypeptides, antibodies, and/or agonists or antagonists of the present invention conjugated to a toxin or a radioactive isotope, as described herein, may be used to treat cancers and neoplasms, including, but not limited to those described herein. In a further preferred embodiment, polynucleotides, polypeptides, antibodies, and/or agonists or antagonists of the present invention conjugated to a toxin or a radioactive isotope, as described herein, may be used to treat acute myelogenous leukemia.

[0615] Additionally, polynucleotides, polypeptides, and/or agonists or antagonists of the invention may affect apoptosis, and therefore, would be useful in treating a number of diseases associated with increased cell survival or the inhibition of apoptosis. For example, diseases associated with increased cell survival or the inhibition of apoptosis that could be diagnosed, prognosed, prevented, and/or treated by polynucleotides, polypeptides, and/or agonists or antagonists of the invention, include cancers (such as follicular lymphomas, carcinomas with p53 mutations, and hormone-dependent tumors, including, but not limited to colon cancer, cardiac tumors, pancreatic cancer, melanoma, retinoblastoma, glioblastoma, lung cancer, intestinal cancer, testicular cancer, stomach cancer, neuroblastoma, myxoma, myoma, lymphoma, endothelioma, osteoblastoma, osteoclastoma, osteosarcoma, chondrosarcoma, adenoma, breast cancer, prostate cancer, Kaposi's sarcoma and ovarian cancer); autoimmune disorders such as, multiple sclerosis, Sjogren's syndrome, Hashimoto's thyroiditis, biliary cirrhosis, Behcet's disease, Crohn's disease, polymyositis, systemic lupus erythematosus and immune-related glomerulonephritis and rheumatoid arthritis) and viral infections (such as herpes viruses, pox viruses and adenoviruses), inflammation, graft v. host disease, acute graft rejection, and chronic graft rejection.

[0616] In preferred embodiments, polynucleotides, polypeptides, and/or agonists or antagonists of the invention are used to inhibit growth, progression, and/or metastasis of cancers, in particular those listed above.

[0617] Additional diseases or conditions associated with increased cell survival that could be diagnosed, prognosed, prevented, and/or treated by polynucleotides, polypeptides, and/or agonists or antagonists of the invention, include, but are not limited to, progression, and/or metastases of malignancies and related disorders such as leukemia (including acute leukemias (e.g., acute lymphocytic leukemia, acute myelocytic leukemia (including myeloblastic, promyelocytic, myelomonocytic, monocytic, and erythroleukemia)) and chronic leukemias (e.g., chronic myelocytic (granulocytic) leukemia and chronic lymphocytic leukemia)), polycythemia vera, lymphomas (e.g., Hodgkin's disease and non-Hodgkin's disease), multiple myeloma, Waldenstrom's macroglobulinemia, heavy chain disease, and solid tumors including, but not limited to, sarcomas and carcinomas such as fibrosarcoma, myxosarcoma, liposarcoma, chondrosarcoma, osteogenic sarcoma, chordoma, angiosarcoma, endotheliosarcoma, lymphangiosarcoma, lymphangioendotheliosarcoma, synovioma, mesothelioma, Ewing's tumor, leiomyosarcoma, rhabdomyosarcoma, colon carcinoma, pancreatic cancer, breast cancer, ovarian cancer, prostate cancer, squamous cell carcinoma, basal cell carcinoma, adenocarcinoma, sweat gland carcinoma, sebaceous gland carcinoma, papillary carcinoma, papillary adenocarcinomas, cystadenocarcinoma, medullary carcinoma, bronchogenic carcinoma, renal cell carcinoma, hepatoma, bile duct carcinoma, choriocarcinoma, seminoma, embryonal carcinoma, Wilm's tumor, cervical cancer, testicular tumor, lung carcinoma, small cell lung carcinoma, bladder carcinoma, epithelial carcinoma, glioma, astrocytoma, medulloblastoma, craniopharyngioma, ependymoma, pinealoma, emangioblastoma, acoustic neuroma, oligodendroglioma, menangioma, melanoma, neuroblastoma, and retinoblastoma.

[0618] Diseases associated with increased apoptosis that could be diagnosed, prognosed, prevented, and/or treated by polynucleotides, polypeptides, and/or agonists or antagonists of the invention, include AIDS; neurodegenerative disorders (such as Alzheimer's disease, Parkinson's disease, amyotrophic lateral sclerosis, retinitis pigmentosa, cerebellar degeneration and brain tumor or prior associated disease); autoimmune disorders (such as, multiple sclerosis, Sjogren's syndrome, Hashimoto's thyroiditis, biliary cirrhosis, Behcet's disease, Crohn's disease, polymyositis, systemic lupus erythematosus and immune-related glomerulonephritis and rheumatoid arthritis) myelodysplastic syndromes (such as aplastic anemia), graft v. host disease, ischemic injury (such as that caused by myocardial infarction, stroke and reperfusion injury), liver injury (e.g., hepatitis related liver injury, ischemia/reperfusion injury, cholestosis (bile duct injury) and liver cancer); toxin-induced liver disease (such as that caused by alcohol), septic shock, cachexia and anorexia.

[0619] Hyperproliferative diseases and/or disorders that could be diagnosed, prognosed, prevented, and/or treated by polynucleotides, polypeptides, and/or agonists or antagonists of the invention, include, but are not limited to, neoplasms located in the liver, abdomen, bone, breast, digestive system, pancreas, peritoneum, endocrine glands (adrenal, parathyroid, pituitary, testicles, ovary, thymus, thyroid), eye, head and neck, nervous system (central and peripheral), lymphatic system, pelvis, skin, soft tissue, spleen, thorax, and urogenital tract.

[0620] Similarly, other hyperproliferative disorders can also be diagnosed, prognosed, prevented, and/or treated by polynucleotides, polypeptides, and/or agonists or antagonists of the invention. Examples of such hyperproliferative disorders include, but are not limited to: hypergammaglobulinemia, lymphoproliferative disorders, paraproteinemias, purpura, sarcoidosis, Sezary Syndrome, Waldenstron's macroglobulinemia, Gaucher's Disease, histiocytosis, and any other hyperproliferative disease, besides neoplasia, located in an organ system listed above.

[0621] One preferred embodiment utilizes polynucleotides of the present invention to inhibit aberrant cellular division, by gene therapy using the present invention, and/or protein fusions or fragments thereof.

[0622] Thus, the present invention provides a method for treating cell proliferative diseases, disorders, and/or conditions by inserting into an abnormally proliferating cell a polynucleotide of the present invention, wherein said polynucleotide represses said cell proliferation, disease, disorder, and/or condition.

[0623] In a preferred embodiment, the present invention provides a method for treating cell proliferative diseases, disorders and/or conditions of the ovaries and/or breast by inserting into a cell, a polynucleotide of the present invention, wherein said polynucleotide represses said cell proliferation, disease and/or disorder.

[0624] Another embodiment of the present invention provides a method of treating cell-proliferative diseases, disorders, and/or conditions in individuals comprising administration of one or more active gene copies of the present invention to an abnormally proliferating cell or cells. In a preferred embodiment, polynucleotides of the present invention is a DNA construct comprising a recombinant expression vector effective in expressing a DNA sequence encoding said polynucleotides. In another preferred embodiment of the present invention, the DNA construct encoding the polynucleotides of the present invention is inserted into cells to be treated utilizing a retrovirus, or more preferably an adenoviral vector (see, e.g., G J. Nabel, et. al., PNAS 96: 324-326 (1999), which is hereby incorporated by reference). In a most preferred embodiment, the viral vector is defective and will not transform non-proliferating cells, only proliferating cells. Moreover, in a preferred embodiment, the polynucleotides of the present invention inserted into proliferating cells either alone, or in combination with or fused to other polynucleotides, can then be modulated via an external stimulus (i.e., magnetic, specific small molecule, chemical, or drug administration, etc.), which acts upon the promoter upstream of said polynucleotides to induce expression of the encoded protein product. As such the beneficial therapeutic affect of the present invention may be expressly modulated (i.e., to increase, decrease, or inhibit expression of the present invention) based upon said external stimulus.

[0625] Polynucleotides of the present invention may be useful in repressing expression of oncogenic genes or antigens. By “repressing expression of the oncogenic genes” is intended the suppression of the transcription of the gene, the degradation of the gene transcript (pre-message RNA), the inhibition of splicing, the destruction of the messenger RNA, the prevention of the post-translational modifications of the protein, the destruction of the protein, or the inhibition of the normal function of the protein.

[0626] For local administration to abnormally proliferating cells, polynucleotides of the present invention may be administered by any method known to those of skill in the art including, but not limited to transfection, electroporation, microinjection of cells, or in vehicles such as liposomes, lipofectin, or as naked polynucleotides, or any other method described throughout the specification. The polynucleotide of the present invention may be delivered by known gene delivery systems such as, but not limited to, retroviral vectors (Gilboa, J. Virology 44:845 (1982); Hocke, Nature 320:275 (1986); Wilson, et al., Proc. Natl. Acad. Sci. U.S.A. 85:3014), vaccinia virus system (Chakrabarty et al., Mol. Cell Biol. 5:3403 (1985) or other efficient DNA delivery systems (Yates et al., Nature 313:812 (1985)) known to those skilled in the art. These references are exemplary only and are hereby incorporated by reference. In order to specifically deliver or transfect cells which are abnormally proliferating and spare non-dividing cells, it is preferable to utilize a retrovirus, or adenoviral (as described in the art and elsewhere herein) delivery system known to those of skill in the art. Since host DNA replication is required for retroviral DNA to integrate and the retrovirus will be unable to self replicate due to the lack of the retrovirus genes needed for its life cycle. Utilizing such a retroviral delivery system for polynucleotides of the present invention will target said gene and constructs to abnormally proliferating cells and will spare the non-dividing normal cells.

[0627] The polynucleotides of the present invention may be delivered directly to cell proliferative disorder/disease sites in internal organs, body cavities and the like by use of imaging devices used to guide an injecting needle directly to the disease site. The polynucleotides of the present invention may also be administered to disease sites at the time of surgical intervention.

[0628] By “cell proliferative disease” is meant any human or animal disease or disorder, affecting any one or any combination of organs, cavities, or body parts, which is characterized by single or multiple local abnormal proliferations of cells, groups of cells, or tissues, whether benign or malignant.

[0629] Any amount of the polynucleotides of the present invention may be administered as long as it has a biologically inhibiting effect on the proliferation of the treated cells. Moreover, it is possible to administer more than one of the polynucleotide of the present invention simultaneously to the same site. By “biologically inhibiting” is meant partial or total growth inhibition as well as decreases in the rate of proliferation or growth of the cells. The biologically inhibitory dose may be determined by assessing the effects of the polynucleotides of the present invention on target malignant or abnormally proliferating cell growth in tissue culture, tumor growth in animals and cell cultures, or any other method known to one of ordinary skill in the art.

[0630] The present invention is further directed to antibody-based therapies which involve administering of anti-polypeptides and anti-polynucleotide antibodies to a mammalian, preferably human, patient for treating one or more of the described diseases, disorders, and/or conditions. Methods for producing anti-polypeptides and anti-polynucleotide antibodies polyclonal and monoclonal antibodies are described in detail elsewhere herein. Such antibodies may be provided in pharmaceutically acceptable compositions as known in the art or as described herein.

[0631] A summary of the ways in which the antibodies of the present invention may be used therapeutically includes binding polynucleotides or polypeptides of the present invention locally or systemically in the body or by direct cytotoxicity of the antibody, e.g., as mediated by complement (CDC) or by effector cells (ADCC). Some of these approaches are described in more detail below. Armed with the teachings provided herein, one of ordinary skill in the art will know how to use the antibodies of the present invention for diagnostic, monitoring or therapeutic purposes without undue experimentation.

[0632] In particular, the antibodies, fragments and derivatives of the present invention are useful for treating a subject having or developing cell proliferative and/or differentiation diseases, disorders, and/or conditions as described herein. Such treatment comprises administering a single or multiple doses of the antibody, or a fragment, derivative, or a conjugate thereof.

[0633] The antibodies of this invention may be advantageously utilized in combination with other monoclonal or chimeric antibodies, or with lymphokines or hematopoietic growth factors, for example, which serve to increase the number or activity of effector cells which interact with the antibodies.

[0634] It is preferred to use high affinity and/or potent in vivo inhibiting and/or neutralizing antibodies against polypeptides or polynucleotides of the present invention, fragments or regions thereof, for both immunoassays directed to and therapy of diseases, disorders, and/or conditions related to polynucleotides or polypeptides, including fragments thereof, of the present invention. Such antibodies, fragments, or regions, will preferably have an affinity for polynucleotides or polypeptides, including fragments thereof. Preferred binding affinities include those with a dissociation constant or Kd less than 5×10⁻⁶M, 10⁻⁶M, 5×10⁻⁷M, 10⁻⁷M, 5×10⁻⁸M, 10⁻⁸M, 5×10⁻⁹M, 10⁻⁹M, 5×10⁻¹⁰M, 10⁻¹⁰M, 5×10⁻¹¹M, 10⁻¹¹M, 5×10⁻¹²M, 10⁻¹²M, 5×10⁻¹³M, 10⁻¹³M, 5×10⁻¹⁴M, 10⁻¹⁴M, 10⁻¹⁴M, 5×10⁻¹⁵M, and 10⁻¹⁵M.

[0635] Moreover, ovarian antigen polypeptides of the present invention or fragments thereof, are useful in inhibiting the angiogenesis of proliferative cells or tissues, either alone, as a protein fusion, or in combination with other polypeptides directly or indirectly, as described elsewhere herein. In a most preferred embodiment, said anti-angiogenesis effect may be achieved indirectly, for example, through the inhibition of hematopoietic, tumor-specific cells, such as tumor-associated macrophages (see, e.g., Joseph I B, et al. J Natl Cancer Inst, 90(21):1648-53 (1998), which is hereby incorporated by reference). Antibodies directed to polypeptides or polynucleotides of the present invention may also result in inhibition of angiogenesis directly, or indirectly (see, e.g., Witte L, et al., Cancer Metastasis Rev. 17(2):155-61 (1998), which is hereby incorporated by reference)).

[0636] Polypeptides, including protein fusions, of the present invention, or fragments thereof may be useful in inhibiting proliferative cells or tissues through the induction of apoptosis. Said polypeptides may act either directly, or indirectly to induce apoptosis of proliferative cells and tissues, for example in the activation of a death-domain receptor, such as tumor necrosis factor (TNF) receptor-1, CD95 (Fas/APO-1), TNF-receptor-related apoptosis-mediated protein (TRAMP) and TNF-related apoptosis-inducing ligand (TRAIL) receptor-1 and -2 (see, e.g., Schulze-Osthoff K, et.al., Eur J Biochem 254(3):439-59 (1998), which is hereby incorporated by reference). Moreover, in another preferred embodiment of the present invention, said polypeptides may induce apoptosis through other mechanisms, such as in the activation of other proteins which will activate apoptosis, or through stimulating the expression of said proteins, either alone or in combination with small molecule drugs or adjuvants, such as apoptonin, galectins, thioredoxins, antiinflammatory proteins (See for example, Mutat. Res. 400(1-2):447-55 (1998), Med Hypotheses.50(5):423-33 (1998), Chem. Biol. Interact. April 24;111-112:23-34 (1998), J. Mo. Med. 76(6):402-12 (1998), Int. J. Tissue React. 20(1):3-15 (1998), which are all hereby incorporated by reference).

[0637] Polypeptides, including protein fusions to, or fragments thereof, of the present invention are useful in inhibiting the metastasis of proliferative cells or tissues. Inhibition may occur as a direct result of administering polypeptides, or antibodies directed to said polypeptides as described elsewhere herein, or indirectly, such as activating the expression of proteins known to inhibit metastasis, for example alpha 4 integrins, (See, e.g., Curr Top Microbiol Immunol 1998;231:125-41, which is hereby incorporated by reference). Such therapeutic affects of the present invention may be achieved either alone, or in combination with small molecule drugs or adjuvants.

[0638] In another embodiment, the invention provides a method of delivering compositions containing the polypeptides of the invention (e.g., compositions containing polypeptides or anti- ovarian antigen polypeptide antibodies associated with heterologous polypeptides, heterologous nucleic acids, toxins, or prodrugs) to targeted cells expressing the polypeptide of the present invention. Ovarian antigen polypeptides or anti- ovarian antigen polypeptide antibodies of the invention may be associated with heterologous polypeptides, heterologous nucleic acids, toxins, or prodrugs via hydrophobic, hydrophilic, ionic and/or covalent interactions.

[0639] Polypeptides, protein fusions to, or fragments thereof, of the present invention are useful in enhancing the immunogenicity and/or antigenicity of proliferating cells or tissues, either directly, such as would occur if the polypeptides of the present invention ‘vaccinated’ the immune response to respond to proliferative antigens and immunogens, or indirectly, such as in activating the expression of proteins known to enhance the immune response (e.g. chemokines), to said antigens and immunogens.

[0640] Urinary System Disorders

[0641] Polynucleotides, polypeptides, antibodies, and/or agonists or antagonists of the present invention, may be used to treat, prevent, diagnose, and/or prognose disorders of the urinary system, including but not limited to disorders of the renal system, bladder, ureters, and urethra. Renal disorders include, but are not limited to, kidney failure, nephritis, blood vessel disorders of kidney, metabolic and congenital kidney disorders, urinary disorders of the kidney, autoimmune disorders, sclerosis and necrosis, electrolyte imbalance, and kidney cancers.

[0642] Kidney failure diseases include, but are not limited to, acute kidney failure, chronic kidney failure, atheroembolic renal failure, and end-stage renal disease. Inflammatory diseases of the kidney include acute glomerulonephritis, postinfectious glomerulonephritis, rapidly progressive glomerulonephritis, nephrotic syndrome, membranous glomerulonephritis, familial nephrotic syndrome, membranoproliferative glomerulonephritis I and II, mesangial proliferative glomerulonephritis, chronic glomerulonephritis, acute tubulointerstitial nephritis, chronic tubulointerstitial nephritis, acute post-streptococcal glomerulonephritis (PSGN), pyelonephritis, lupus nephritis, chronic nephritis, interstitial nephritis, and post-streptococcal glomerulonephritis.

[0643] Blood vessel disorders of the kidneys include, but are not limited to, kidney infarction, atheroembolic kidney disease, cortical necrosis, malignant nephrosclerosis, renal vein thrombosis, renal underperfusion, renal ischemia-reperfusion, renal artery embolism, and renal artery stenosis. Kidney disorders resulting form urinary tract problems include, but are not limited to, pyelonephritis, hydronephrosis, urolithiasis (renal lithiasis, nephrolithiasis), reflux nephropathy, urinary tract infections, urinary retention, and acute or chronic unilateral obstructive uropathy.

[0644] Metabolic and congenital disorders of the kidneys include, but are not limited to, renal tubular acidosis, renal glycosuria, nephrogenic diabetes insipidus, cystinuria, Fanconi's syndrome, vitamin D-resistant rickets, Hartnup disease, Bartter's syndrome, Liddle's syndrome, polycystic kidney disease, medullary cystic disease, medullary sponge kidney, Alport's syndrome, nail-patella syndrome, congenital nephrotic syndrome, CRUSH syndrome, horseshoe kidney, diabetic nephropathy, nephrogenic diabetes insipidus, analgesic nephropathy, kidney stones, and membranous nephropathy, Kidney disorders resulting from an autoimmune response include, but are not limited to, systemic lupus erythematosus (SLE), Goodpasture syndrome, IgA nephropathy, and IgM mesangial proliferative glomerulonephritis.

[0645] Sclerotic or necrotic disorders of the kidney include, but are not limited to, glomerulosclerosis, diabetic nephropathy, focal segmental glomerulosclerosis (FSGS), necrotizing glomerulonephritis, and renal papillary necrosis. Kidneys may also develop carcinomas, including, but not limited to, hypernephroma, nephroblastoma, renal cell cancer, transitional cell cancer, squamous cell cancer, and Wilm's tumor.

[0646] Kidney disorders may also result in electrolyte imbalances, including, but not limited to, nephrocalcinosis, pyuria, edema, hydronephritis, proteinuria, hyponatremia, hypernatremia, hypokalemia, hyperkalemia, hypocalcemia, hypercalcemia, hypophosphatemia, and hyperphosphatemia.

[0647] Bladder disorders include, but are not limited to, benign prostatic hyperplasia (BPH), interstitial cystitis (IC), prostatitis, proteinuria, urinary tract infections, urinary incontinence, urinary retention. Disorders of the ureters and urethra include, but are not limited to, acute or chronic unilateral obstructive uropathy. The bladder, ureters, and urethra may also develop carcinomas, including, but not limited to, superficial bladder canccer, invasive bladder cancer, carcinoma of the ureter, and urethra cancers.

[0648] Polypeptides may be administered using any method known in the art, including, but not limited to, direct needle injection at the delivery site, intravenous injection, topical administration, catheter infusion, biolistic injectors, particle accelerators, gelfoam sponge depots, other commercially available depot materials, osmotic pumps, oral or suppositorial solid pharmaceutical formulations, decanting or topical applications during surgery, aerosol delivery. Such methods are known in the art. Polypeptides may be administered as part of a Therapeutic, described in more detail below. Methods of delivering polynucleotides are described in more detail herein.

[0649] Cardiovascular Disorders

[0650] Polynucleotides or polypeptides, or agonists or antagonists of the present invention, may be used to treat, prevent, diagnose, and/or prognose cardiovascular disorders, including, but not limited to, peripheral artery disease, such as limb ischemia.

[0651] Cardiovascular disorders include cardiovascular abnormalities, such as arterio-arterial fistula, arteriovenous fistula, cerebral arteriovenous malformations, congenital heart defects, pulmonary atresia, and Scimitar Syndrome. Congenital heart defects include aortic coarctation, cor triatriatum, coronary vessel anomalies, crisscross heart, dextrocardia, patent ductus arteriosus, Ebstein's anomaly, Eisenmenger complex, hypoplastic left heart syndrome, levocardia, tetralogy of fallot, transposition of great vessels, double outlet right ventricle, tricuspid atresia, persistent truncus arteriosus, total anomalous pulmonary venous connection, hypoplastic left heart syndrome, and heart septal defects, such as aortopulmonary septal defect, endocardial cushion defects, Lutembacher's Syndrome, atrioventricular canal defect, trilogy of Fallot, ventricular heart septal defects.

[0652] Cardiovascular disorders also include heart disease, such as arrhythmias, carcinoid heart disease, high cardiac output, low cardiac output, cardiac tamponade, endocarditis (including bacterial), heart aneurysm, cardiac arrest, sudden cardiac death, congestive heart failure, congestive cardiomyopathy, paroxysmal dyspnea, cardiac edema, heart hypertrophy, congestive cardiomyopathy, left ventricular hypertrophy, right ventricular hypertrophy, post-infarction heart rupture, ventricular septal rupture, heart valve diseases, myocardial diseases, myocardial ischemia, pericardial effusion, pericarditis (including constrictive and tuberculous), pneumopericardium, postpericardiotomy syndrome, pulmonary heart disease, rheumatic heart disease, ventricular dysfunction, hyperemia, cardiovascular pregnancy complications, Scimitar Syndrome, diastolic dysfunction, enlarged heart, heart block, J-curve phenomenon, rheumatic heart disease, Marfan syndrome, cardiovascular syphilis, and cardiovascular tuberculosis.

[0653] Arrhythmias include sinus arrhythmia, atrial fibrillation, atrial flutter, bradycardia, extrasystole, Adams-Stokes Syndrome, bundle-branch block, sinoatrial block, long QT syndrome, parasystole, Lown-Ganong-Levine Syndrome, Mahaim-type pre-excitation syndrome, Wolff-Parkinson-White syndrome, sick sinus syndrome, tachycardias, and ventricular fibrillation. Tachycardias include paroxysmal tachycardia, supraventricular tachycardia, accelerated idioventricular rhythm, atrioventricular nodal reentry tachycardia, ectopic atrial tachycardia, ectopic junctional tachycardia, sinoatrial nodal reentry tachycardia, sinus tachycardia, Torsades de Pointes, and ventricular tachycardia.

[0654] Heart valve disease include aortic valve insufficiency, aortic valve stenosis, heart murmurs, aortic valve prolapse, mitral valve prolapse, tricuspid valve prolapse, mitral valve insufficiency, mitral valve stenosis, pulmonary atresia, pulmonary valve insufficiency, pulmonary valve stenosis, tricuspid atresia, tricuspid valve insufficiency, tricuspid valve stenosis, and bicuspid aortic valve.

[0655] Myocardial diseases include alcoholic cardiomyopathy, congestive cardiomyopathy, hypertrophic cardiomyopathy, aortic subvalvular stenosis, pulmonary subvalvular stenosis, restrictive cardiomyopathy, Chagas cardiomyopathy, endocardial fibroelastosis, endomyocardial fibrosis, Kearns Syndrome, Barth syndrome, myocardial reperfusion injury, and myocarditis.

[0656] Myocardial ischemias include coronary disease, such as angina pectoris, Prinzmetal's angina, unstable angina, coronary aneurysm, coronary arteriosclerosis, coronary thrombosis, coronary vasospasm, myocardial infarction and myocardial stunning.

[0657] Cardiovascular diseases also include vascular diseases such as aneurysms, angiodysplasia, angiomatosis, bacillary angiomatosis, Hippel-Lindau Disease, Klippel-Trenaunay-Weber Syndrome, Sturge-Weber Syndrome, angioneurotic edema, aortic diseases, Takayasu's Arteritis, aortitis, Leriche's Syndrome, arterial occlusive diseases, arteritis, enarteritis, polyarteritis nodosa, cerebrovascular disorders, diabetic angiopathies, diabetic retinopathy, embolisms, thrombosis, erythromelalgia, hemorrhoids, hepatic veno-occlusive disease, hypertension, hypotension (shock), ischemia, peripheral vascular diseases, phlebitis, superficial phlebitis, pulmonary veno-occlusive disease, chronic obstructive pulmonary disease, Buerger's disease, Raynaud's disease, CREST syndrome, retinal vein occlusion, Scimitar syndrome, superior vena cava syndrome, telangiectasia, atacia telangiectasia, hereditary hemorrhagic telangiectasia, deep vein thrombosis, varicocele, varicose veins, varicose ulcer, vasculitis, and venous insufficiency.

[0658] Aneurysms include dissecting aneurysms, false aneurysms, infected aneurysms, ruptured aneurysms, aortic aneurysms, cerebral aneurysms, coronary aneurysms, heart aneurysms, and iliac aneurysms.

[0659] Arterial occlusive diseases include arteriosclerosis, arteriolosclerosis, atherosclerosis, intermittent claudication, carotid stenosis, fibromuscular dysplasias, mesenteric vascular occlusion, Moyamoya disease, renal artery obstruction, retinal artery occlusion, and thromboangiitis obliterans.

[0660] Cerebrovascular disorders include carotid artery diseases, cerebral amyloid angiopathy, cerebral aneurysm, cerebral anoxia, cerebral arteriosclerosis, cerebral arteriovenous malformation, cerebral artery diseases, cerebral embolism and thrombosis, carotid artery thrombosis, sinus thrombosis, Wallenberg's syndrome, cerebral hemorrhage, epidural hematoma, subdural hematoma, subaraxhnoid hemorrhage, cerebral infarction, cerebral ischemia (including transient), subclavian steal syndrome, periventricular leukomalacia, vascular headache, cluster headache, migraine, and vertebrobasilar insufficiency.

[0661] Embolisms include air embolisms, amniotic fluid embolisms, cholesterol embolisms, blue toe syndrome, fat embolisms, pulmonary embolisms, and thromoboembolisms. Thrombosis include coronary thrombosis, hepatic vein thrombosis, deep vein thrombosis, retinal vein occlusion, carotid artery thrombosis, sinus thrombosis, Wallenberg's syndrome, and thrombophlebitis.

[0662] Ischemia includes cerebral ischemia, ischemic colitis, silent ischemia, compartment syndromes, anterior compartment syndrome, myocardial ischemia, reperfusion injuries, and peripheral limb ischemia. Vasculitis includes aortitis, arteritis, Behcet's Syndrome, Churg-Strauss Syndrome, mucocutaneous lymph node syndrome, thromboangiitis obliterans, hypersensitivity vasculitis, Schoenlein-Henoch purpura, allergic cutaneous vasculitis, and Wegener's granulomatosis.

[0663] Cardiovascular diseases can also occur due to electrolyte imbalances that include, but are not limited to hyponatremia, hypernatremia, hypokalemia, hyperkalemia, hypocalcemia, hypercalcemia, hypophosphatemia, and hyperphophatemia. Neoplasm and/or cancers of the cardiovascular system include, but are not limited to, myxomas, fibromas, and rhabdomyomas.

[0664] Polypeptides may be administered using any method known in the art, including, but not limited to, direct needle injection at the delivery site, intravenous injection, topical administration, catheter infusion, biolistic injectors, particle accelerators, gelfoam sponge depots, other commercially available depot materials, osmotic pumps, oral or suppositorial solid pharmaceutical formulations, decanting or topical applications during surgery, aerosol delivery. Such methods are known in the art. Polypeptides may be administered as part of a Therapeutic, described in more detail below. Methods of delivering polynucleotides are described in more detail herein.

[0665] Respiratory Disorders

[0666] Polynucleotides or polypeptides, or agonists or antagonists of the present invention may be used to treat, prevent, diagnose, and/or prognose diseases and/or disorders of the respiratory system.

[0667] Diseases and disorders of the respiratory system include, but are not limited to, nasal vestibulitis, nonallergic rhinitis (e.g., acute rhinitis, chronic rhinitis, atrophic rhinitis, vasomotor rhinitis), nasal polyps, and sinusitis, juvenile angiofibromas, cancer of the nose and juvenile papillomas, vocal cord polyps, nodules (singer's nodules), contact ulcers, vocal cord paralysis, laryngoceles, pharyngitis (e.g., viral and bacterial), tonsillitis, tonsillar cellulitis, parapharyngeal abscess, laryngitis, laryngoceles, and throat cancers (e.g., cancer of the nasopharynx, tonsil cancer, larynx cancer), lung cancer (e.g., squamous cell carcinoma, small cell (oat cell) carcinoma, large cell carcinoma, and adenocarcinoma), allergic disorders (eosinophilic pneumonia, hypersensitivity pneumonitis (e.g., extrinsic allergic alveolitis, allergic interstitial pneumonitis, organic dust pneumoconiosis, allergic bronchopulmonary aspergillosis, asthma, Wegener's granulomatosis (granulomatous vasculitis), Goodpasture's syndrome)), pneumonia (e.g., bacterial pneumonia (e.g., Streptococcus pneumoniae (pneumoncoccal pneumonia), Staphylococcus aureus (staphylococcal pneumonia), Gram-negative bacterial pneumonia (caused by, e.g., Klebsiella and Pseudomas spp.), Mycoplasma pneumoniae pneumonia, Hemophilus influenzae pneumonia, Legionella pneumophila (Legionnaires' disease), and Chlamydia psittaci (Psittacosis)), and viral pneumonia (e.g., influenza, chickenpox (varicella).

[0668] Additional diseases and disorders of the respiratory system include, but are not limited to bronchiolitis, polio (poliomyelitis), croup, respiratory syncytial viral infection, mumps, erythema infectiosum (fifth disease), roseola infantum, progressive rubella panencephalitis, german measles, and subacute sclerosing panencephalitis), fungal pneumonia (e.g., Histoplasmosis, Coccidioidomycosis, Blastomycosis, fungal infections in people with severely suppressed immune systems (e.g., cryptococcosis, caused by Cryptococcus neoformans; aspergillosis, caused by Aspergillus spp.; candidiasis, caused by Candida; and mucormycosis)), Pneumocystis carinii (pneumocystis pneumonia), atypical pneumonias (e.g., Mycoplasma and Chlamydia spp.), opportunistic infection pneumonia, nosocomial pneumonia, chemical pneumonitis, and aspiration pneumonia, pleural disorders (e.g., pleurisy, pleural effusion, and pneumothorax (e.g., simple spontaneous pneumothorax, complicated spontaneous pneumothorax, tension pneumothorax)), obstructive airway diseases (e.g., asthma, chronic obstructive pulmonary disease (COPD), emphysema, chronic or acute bronchitis), occupational lung diseases (e.g., silicosis, black lung (coal workers' pneumoconiosis), asbestosis, berylliosis, occupational asthsma, byssinosis, and benign pneumoconmoses), Infiltrative Lung Disease (e.g., pulmonary fibrosis (e.g., fibrosing alveolitis, usual interstitial pneumonia), idiopathic pulmonary fibrosis, desquamative interstitial pneumonia, lymphoid interstitial pneumonia, histiocytosis X (e.g., Letterer-Siwe disease, Hand-Schuller-Christian disease, eosinophilic granuloma), idiopathic pulmonary hemosiderosis, sarcoidosis and pulmonary alveolar proteinosis), Acute respiratory distress syndrome (also called, e.g., adult respiratory distress syndrome), edema, pulmonary embolism, bronchitis (e.g., viral, bacterial), bronchiectasis, atelectasis, lung abscess (caused by, e.g., Staphylococcus aureus or Legionella pneumophila), and cystic fibrosis.

[0669] Anti-Angiogenesis Activity

[0670] The naturally occurring balance between endogenous stimulators and inhibitors of angiogenesis is one in which inhibitory influences predominate. Rastinejad et al., Cell 56:345-355 (1989). In those rare instances in which neovascularization occurs under normal physiological conditions, such as wound healing, organ regeneration, embryonic development, and female reproductive processes, angiogenesis is stringently regulated and spatially and temporally delimited. Under conditions of pathological angiogenesis such as that characterizing solid tumor growth, these regulatory controls fail. Unregulated angiogenesis becomes pathologic and sustains progression of many neoplastic and non-neoplastic diseases. A number of serious diseases are dominated by abnormal neovascularization including solid tumor growth and metastases, arthritis, some types of eye disorders, and psoriasis. See, e.g., reviews by Moses et al., Biotech. 9:630-634 (1991); Folkman et al., N. Engl. J. Med., 333:1757-1763 (1995); Auerbach et al., J. Microvasc. Res. 29:401-411 (1985); Folkman, Advances in Cancer Research, eds. Klein and Weinhouse, Academic Press, New York, pp. 175-203 (1985); Patz, Am. J. Opthalmol. 94:715-743 (1982); and Folkman et al., Science 221:719-725 (1983). In a number of pathological conditions, the process of angiogenesis contributes to the disease state. For example, significant data have accumulated which suggest that the growth of solid tumors is dependent on angiogenesis. Folkman and Klagsbrun, Science 235:442-447 (1987).

[0671] The present invention provides for treatment of diseases or disorders associated with neovascularization by administration of the polynucleotides and/or polypeptides of the invention, as well as agonists or antagonists of the present invention. Malignant and metastatic conditions which can be treated with the polynucleotides and polypeptides, or agonists or antagonists of the invention include, but are not limited to, malignancies, solid tumors, and cancers described herein and otherwise known in the art (for a review of such disorders, see Fishman et al., Medicine, 2d Ed., J. B. Lippincott Co., Philadelphia (1985)). Thus, the present invention provides a method of treating an angiogenesis-related disease and/or disorder, comprising administration to an individual in need thereof a therapeutically effective amount of a polynucleotide, polypeptide, antagonist and/or agonist of the invention. For example, polynucleotides, polypeptides, antagonists and/or agonists may be utilized in a variety of additional methods in order to therapeutically treat a cancer or tumor. Cancers which may be treated with polynucleotides, polypeptides, antagonists and/or agonists include, but are not limited to solid tumors, including prostate, lung, breast, ovarian, stomach, pancreas, larynx, esophagus, testes, liver, parotid, biliary tract, colon, rectum, cervix, uterus, endometrium, kidney, bladder, thyroid cancer; primary tumors and metastases; melanomas; glioblastoma; Kaposi's sarcoma; leiomyosarcoma; non- small cell lung cancer; colon cancer; advanced malignancies; and blood born tumors such as leukemias. For example, polynucleotides, polypeptides, antagonists and/or agonists may be delivered topically, in order to treat cancers such as skin cancer, head and neck tumors, breast tumors, and Kaposi's sarcoma.

[0672] Within yet other aspects, polynucleotides, polypeptides, antagonists and/or agonists may be utilized to treat superficial forms of bladder cancer by, for example, intravesical administration. Polynucleotides, polypeptides, antagonists and/or agonists may be delivered directly into the tumor, or near the tumor site, via injection or a catheter. Of course, as the artisan of ordinary skill will appreciate, the appropriate mode of administration will vary according to the cancer to be treated. Other modes of delivery are discussed herein.

[0673] Polynucleotides, polypeptides, antagonists and/or agonists may be useful in treating other disorders, besides cancers, which involve angiogenesis. These disorders include, but are not limited to: benign tumors, for example hemangiomas, acoustic neuromas, neurofibromas, trachomas, and pyogenic granulomas; artheroscleric plaques; ocular angiogenic diseases, for example, diabetic retinopathy, retinopathy of prematurity, macular degeneration, corneal graft rejection, neovascular glaucoma, retrolental fibroplasia, rubeosis, retinoblastoma, uvietis and Pterygia (abnormal blood vessel growth) of the eye; rheumatoid arthritis; psoriasis; delayed wound healing; endometriosis; vasculogenesis; granulations; hypertrophic scars (keloids); nonunion fractures; scleroderma; trachoma; vascular adhesions; myocardial angiogenesis; coronary collaterals; cerebral collaterals; arteriovenous malformations; ischemic limb angiogenesis; Osler-Webber Syndrome; plaque neovascularization; telangiectasia; hemophiliac joints; angiofibroma; fibromuscular dysplasia; wound granulation; Crohn's disease; and atherosclerosis.

[0674] For example, within one aspect of the present invention methods are provided for treating hypertrophic scars and keloids, comprising the step of administering a polynucleotide, polypeptide, antagonist and/or agonist of the invention to a hypertrophic scar or keloid.

[0675] Within one embodiment of the present invention polynucleotides, polypeptides, antagonists and/or agonists of the invention are directly injected into a hypertrophic scar or keloid, in order to prevent the progression of these lesions. This therapy is of particular value in the prophylactic treatment of conditions which are known to result in the development of hypertrophic scars and keloids (e.g., bums), and is preferably initiated after the proliferative phase has had time to progress (approximately 14 days after the initial injury), but before hypertrophic scar or keloid development. As noted above, the present invention also provides methods for treating neovascular diseases of the eye, including for example, corneal neovascularization, neovascular glaucoma, proliferative diabetic retinopathy, retrolental fibroplasia and macular degeneration.

[0676] Moreover, ocular disorders associated with neovascularization which can be treated with the polynucleotides and polypeptides of the present invention (including agonists and/or antagonists) include, but are not limited to: neovascular glaucoma, diabetic retinopathy, retinoblastoma, retrolental fibroplasia, uveitis, retinopathy of prematurity macular degeneration, corneal graft neovascularization, as well as other eye inflammatory diseases, ocular tumors and diseases associated with choroidal or iris neovascularization. See, e.g., reviews by Waltman et al., Am. J. Ophthal. 85:704-710 (1978) and Gartner et al., Surv. Ophthal. 22:291-312 (1978).

[0677] Thus, within one aspect of the present invention methods are provided for treating neovascular diseases of the eye such as corneal neovascularization (including corneal graft neovascularization), comprising the step of administering to a patient a therapeutically effective amount of a compound (as described above) to the cornea, such that the formation of blood vessels is inhibited. Briefly, the cornea is a tissue, which normally lacks blood vessels. In certain pathological conditions however, capillaries may extend into the cornea from the pericorneal vascular plexus of the limbus. When the cornea becomes vascularized, it also becomes clouded, resulting in a decline in the patient's visual acuity. Visual loss may become complete if the cornea completely opacitates. A wide variety of disorders can result in corneal neovascularization, including for example, corneal infections (e.g., trachoma, herpes simplex keratitis, leishmaniasis and onchocerciasis), immunological processes (e.g., graft rejection and Stevens-Johnson's syndrome), alkali burns, trauma, inflammation (of any cause), toxic and nutritional deficiency states, and as a complication of wearing contact lenses.

[0678] Within particularly preferred embodiments of the invention, may be prepared for topical administration in saline (combined with any of the preservatives and antimicrobial agents commonly used in ocular preparations), and administered in eyedrop form. The solution or suspension may be prepared in its pure form and administered several times daily. Alternatively, anti-angiogenic compositions, prepared as described above, may also be administered directly to the cornea. Within preferred embodiments, the anti-angiogenic composition is prepared with a muco-adhesive polymer, which binds to cornea. Within further embodiments, the anti-angiogenic factors or anti-angiogenic compositions may be utilized as an adjunct to conventional steroid therapy. Topical therapy may also be useful prophylactically in corneal lesions which are known to have a high probability of inducing an angiogenic response (such as chemical burns). In these instances the treatment, likely in combination with steroids, may be instituted immediately to help prevent subsequent complications.

[0679] Within other embodiments, the compounds described above may be injected directly into the corneal stroma by an ophthalmologist under microscopic guidance. The preferred site of injection may vary with the morphology of the individual lesion, but the goal of the administration would be to place the composition at the advancing front of the vasculature (i.e., interspersed between the blood vessels and the normal cornea). In most cases this would involve perilimbic corneal injection to “protect” the cornea from the advancing blood vessels. This method may also be utilized shortly after a corneal insult in order to prophylactically prevent corneal neovascularization. In this situation, the material could be injected in the perilimbic cornea interspersed between the corneal lesion and its undesired potential limbic blood supply. Such methods may also be utilized in a similar fashion to prevent capillary invasion of transplanted corneas. In a sustained-release form, injections might only be required 2-3 times per year. A steroid could also be added to the injection solution to reduce-inflammation resulting from the injection itself.

[0680] Within another aspect of the present invention, methods are provided for treating neovascular glaucoma, comprising the step of administering to a patient a therapeutically effective amount of a polynucleotide, polypeptide, antagonist and/or agonist to the eye, such that the formation of blood vessels is inhibited. In one embodiment, the compound may be administered topically to the eye in order to treat early forms of neovascular glaucoma. Within other embodiments, the compound may be implanted by injection into the region of the anterior chamber angle. Within other embodiments, the compound may also be placed in any location such that the compound is continuously released into the aqueous humor. Within another aspect of the present invention, methods are provided for treating proliferative diabetic retinopathy, comprising the step of administering to a patient a therapeutically effective amount of a polynucleotide, polypeptide, antagonist and/or agonist to the eyes, such that the formation of blood vessels is inhibited.

[0681] Within particularly preferred embodiments of the invention, proliferative diabetic retinopathy may be treated by injection into the aqueous humor or the vitreous, in order to increase the local concentration of the polynucleotide, polypeptide, antagonist and/or agonist in the retina. Preferably, this treatment should be initiated prior to the acquisition of severe disease requiring photocoagulation.

[0682] Within another aspect of the present invention, methods are provided for treating retrolental fibroplasia, comprising the step of administering to a patient a therapeutically effective amount of a polynucleotide, polypeptide, antagonist and/or agonist to the eye, such that the formation of blood vessels is inhibited. The compound may be administered topically, via intravitreous injection and/or via intraocular implants.

[0683] Additionally, disorders which can be treated with the polynucleotides, polypeptides, agonists and/or agonists include, but are not limited to, hemangioma, arthritis, psoriasis, angiofibroma, atherosclerotic plaques, delayed wound healing, granulations, hemophilic joints, hypertrophic scars, nonunion fractures, Osler-Weber syndrome, pyogenic granuloma, scleroderma, trachoma, and vascular adhesions.

[0684] Moreover, disorders and/or states, which can be treated, prevented, diagnosed and/or prognosed with the polynucleotides, polypeptides, agonists and/or agonists of the invention include, but are not limited to, solid tumors, blood born tumors such as leukemias, tumor metastasis, Kaposi's sarcoma, benign tumors, for example hemangiomas, acoustic neuromas, neurofibromas, trachomas, and pyogenic granulomas, rheumatoid arthritis, psoriasis, ocular angiogenic diseases, for example, diabetic retinopathy, retinopathy of prematurity, macular degeneration, corneal graft rejection, neovascular glaucoma, retrolental fibroplasia, rubeosis, retinoblastoma, and uvietis, delayed wound healing, endometriosis, vascluogenesis, granulations, hypertrophic scars (keloids), nonunion fractures, scleroderma, trachoma, vascular adhesions, myocardial angiogenesis, coronary collaterals, cerebral collaterals, arteriovenous malformations, ischemic limb angiogenesis, Osler-Webber Syndrome, plaque neovascularization, telangiectasia, hemophiliac joints, angiofibroma fibromuscular dysplasia, wound granulation, Crohn's disease, atherosclerosis, birth control agent by preventing vascularization required for embryo implantation controlling menstruation, diseases that have angiogenesis as a pathologic consequence such as cat scratch disease (Rochele minalia quintosa), ulcers (Helicobacter pylori), Bartonellosis and bacillary angiomatosis.

[0685] In one aspect of the birth control method, an amount of the compound sufficient to block embryo implantation is administered before or after intercourse and fertilization have occurred, thus providing an effective method of birth control, possibly a “morning after” method. Polynucleotides, polypeptides, agonists and/or agonists may also be used in controlling menstruation or administered as either a peritoneal lavage fluid or for peritoneal implantation in the treatment of endometriosis.

[0686] Polynucleotides, polypeptides, agonists and/or agonists of the present invention may be incorporated into surgical sutures in order to prevent stitch granulomas.

[0687] Polynucleotides, polypeptides, agonists and/or agonists may be utilized in a wide variety of surgical procedures. For example, within one aspect of the present invention a compositions (in the form of, for example, a spray or film) may be utilized to coat or spray an area prior to removal of a tumor, in order to isolate normal surrounding tissues from malignant tissue, and/or to prevent the spread of disease to surrounding tissues. Within other aspects of the present invention, compositions (e.g., in the form of a spray) may be delivered via endoscopic procedures in order to coat tumors, or inhibit angiogenesis in a desired locale. Within yet other aspects of the present invention, surgical meshes, which have been coated with anti- angiogenic compositions of the present invention may be utilized in any procedure wherein a surgical mesh might be utilized. For example, within one embodiment of the invention a surgical mesh laden with an anti-angiogenic composition may be utilized during abdominal cancer resection surgery (e.g., subsequent to colon resection) in order to provide support to the structure, and to release an amount of the anti-angiogenic factor.

[0688] Within further aspects of the present invention, methods are provided for treating tumor excision sites, comprising administering a polynucleotide, polypeptide, agonist and/or agonist to the resection margins of a tumor subsequent to excision, such that the local recurrence of cancer and the formation of new blood vessels at the site is inhibited. Within one embodiment of the invention, the anti-angiogenic compound is administered directly to the tumor excision site (e.g., applied by swabbing, brushing or otherwise coating the resection margins of the tumor with the anti-angiogenic compound). Alternatively, the anti-angiogenic compounds may be incorporated into known surgical pastes prior to administration. Within particularly preferred embodiments of the invention, the anti-angiogenic compounds are applied after hepatic resections for malignancy, and after neurosurgical operations.

[0689] Within one aspect of the present invention, polynucleotides, polypeptides, agonists and/or agonists may be administered to the resection margin of a wide variety of tumors, including for example, breast, colon, brain and hepatic tumors. For example, within one embodiment of the invention, anti-angiogenic compounds may be administered to the site of a neurological tumor subsequent to excision, such that the formation of new blood vessels at the site are inhibited.

[0690] The polynucleotides, polypeptides, agonists and/or agonists of the present invention may also be administered along with other anti-angiogenic factors. Representative examples of other anti-angiogenic factors include: Anti-Invasive Factor, retinoic acid and derivatives thereof, paclitaxel, Suramin, Tissue Inhibitor of Metalloproteinase-1, Tissue Inhibitor of Metalloproteinase-2, Plasminogen Activator Inhibitor-1, Plasminogen Activator Inhibitor-2, and various forms of the lighter “d group” transition metals.

[0691] Lighter “d group” transition metals include, for example, vanadium, molybdenum, tungsten, titanium, niobium, and tantalum species. Such transition metal species may form transition metal complexes. Suitable complexes of the above-mentioned transition metal species include oxo transition metal complexes.

[0692] Representative examples of vanadium complexes include oxo vanadium complexes such as vanadate and vanadyl complexes. Suitable vanadate complexes include metavanadate and orthovanadate complexes such as, for example, ammonium metavanadate, sodium metavanadate, and sodium orthovanadate. Suitable vanadyl complexes include, for example, vanadyl acetylacetonate and vanadyl sulfate including vanadyl sulfate hydrates such as vanadyl sulfate mono- and trihydrates.

[0693] Representative examples of tungsten and molybdenum complexes also include oxo complexes. Suitable oxo tungsten complexes include tungstate and tungsten oxide complexes. Suitable tungstate complexes include ammonium tungstate, calcium tungstate, sodium tungstate dihydrate, and tungstic acid. Suitable tungsten oxides include tungsten (IV) oxide and tungsten (VI) oxide. Suitable oxo molybdenum complexes include molybdate, molybdenum oxide, and molybdenyl complexes. Suitable molybdate complexes include ammonium molybdate and its hydrates, sodium molybdate and its hydrates, and potassium molybdate and its hydrates. Suitable molybdenum oxides include molybdenum (VI) oxide, molybdenum (VI) oxide, and molybdic acid. Suitable molybdenyl complexes include, for example, molybdenyl acetylacetonate. Other suitable tungsten and molybdenum complexes include hydroxo derivatives derived from, for example, glycerol, tartaric acid, and sugars.

[0694] A wide variety of other anti-angiogenic factors may also be utilized within the context of the present invention. Representative examples include platelet factor 4; protamine sulphate; sulphated chitin derivatives (prepared from queen crab shells), (Murata et al., Cancer Res. 51:22-26 (1991)); Sulphated Polysaccharide Peptidoglycan Complex (SP-PG) (the function of this compound may be enhanced by the presence of steroids such as estrogen, and tamoxifen citrate); Staurosporine; modulators of matrix metabolism, including for example, proline analogs, cishydroxyproline, d,L-3,4-dehydroproline, Thiaproline, alpha,alpha-dipyridyl, aminopropionitrile fumarate; 4-propyl-5-(4-pyridinyl)-2(3H)-oxazolone; Methotrexate; Mitoxantrone; Heparin; Interferons; 2 Macroglobulin-serum; ChIMP-3 (Pavloff et al., J. Bio. Chem. 267:17321-17326 (1992)); Chymostatin (Tomkinson et al., Biochem J. 286:475-480 (1992)); Cyclodextrin Tetradecasulfate; Eponemycin; Camptothecin; Fumagillin (Ingber et al., Nature 348:555-557 (1990)); Gold Sodium Thiomalate (“GST”; Matsubara and Ziff, J. Clin. Invest. 79:1440-1446 (1987)); anticollagenase-serum; alpha2-antiplasmin (Holmes et al., J. Biol. Chem. 262(4):1659-1664 (1987)); Bisantrene (National Cancer Institute); Lobenzarit disodium (N-(2)-carboxyphenyl-4- chloroanthronilic acid disodium or “CCA”; Takeuchi et al., Agents Actions 36:312-316, 1992); Thalidomide; Angostatic steroid; AGM-1470; carboxynaminolmidazole; and metalloproteinase inhibitors such as BB94.

[0695] Musculoskeletal System Disorders

[0696] Polynucleotides, polypeptides, antibodies, and/or agonists or antagonists of the present invention, may be used to treat, prevent, diagnose, and/or prognose disorders of the musculoskeletal system, including but not limited to, disorders of the bone, joints, ligaments, tendons, bursa, muscle, and/or neoplasms and cancers associated with musculoskeletal tissue.

[0697] Diseases or disorders of the bone include, but are not limited to, Albers-Schönberg disease, bowlegs, heel spurs, Köhler's bone disease, knock-knees, Legg-Calvé-Perthes disease, Marfan's syndrome, mucopolysaccharidoses, Osgood-Schlatter disease, osteochondroses, osteochondrodysplasia, osteomyelitis, osteopetroses, osteoporosis (postmenopausal, senile, and juvenile), Paget's disease, Scheuermann's disease, scoliosis, Sever's disease, and patellofemoral stress syndrome.

[0698] Joint diseases or disorders include, but are not limited to, ankylosing spondylitis, Behcet's syndrome, CREST syndrome, Ehlers-Danlos syndrome, infectious arthritis, discoid lupus erythematosus, systemic lupus erythematosus, Lyme disease, osteoarthritis, psoriatic arthritis, relapsing polychondrites, Reiter's syndrome, rheumatoid arthritis (adult and juvenile), scleroderma, and Still's disease.

[0699] Diseases or disorders affecting ligaments, tendons, or bursa include, but are not limited to, ankle sprain, bursitis, posterior Achilles tendon bursitis (Haglund's deformity), anterior Achilles tendon bursitis (Albert's disease), tendinitis, tenosynovitis, poplieus tendinitis, Achilles tendinitis, medial or lateral epicondylitis, rotator cuff tendinitis, spasmodic torticollis, and fibromyalgia syndrome.

[0700] Muscle diseases or disorders include, but are not limited to, Becker's muscular dystrophy, Duchenne's muscular dystrophy, Landouzy-Dejerine muscular dystrophy, Leyden-Mobius muscular dystrophy, Erb's muscular dystrophy, Charcot's joints, dermatomyositis, gout, pseudogout, glycogen storage diseases, Pompe's disease, mitochondrial myopathy, periodic paralysis, polymyalgia rheumatica, polymyositis, Steinert's disease, Thomsen's disease, anterolateral and posteromedial shin splints, posterior femoral muscle strain, and fibromyositis.

[0701] Musculoskeletal tissue may also develop cancers and/or neoplasms that include, but are not limited to, osteochondroma, benign chondroma, chondroblastoma, chondromyxoid fibroma, osteoid osteoma, giant cell tumor, multiple mycloma, osteosarcoma, fibrosarcoma, malignant fibrous histiocytoma, chondrosarcoma, Ewing's tumor, and malignant lymphoma of bone.

[0702] Neural Activity and Neurological Diseases

[0703] The polynucleotides, polypeptides and agonists or antagonists of the invention may be used for the diagnosis and/or treatment of diseases, disorders, damage or injury of the brain and/or nervous system. Nervous system disorders that can be treated with the compositions of the invention (e.g., polypeptides, polynucleotides, and/or agonists or antagonists), include, but are not limited to, nervous system injuries, and diseases or disorders which result in either a disconnection of axons, a diminution or degeneration of neurons, or demyelination. Nervous system lesions which may be treated in a patient (including human and non-human mammalian patients) according to the methods of the invention, include but are not limited to, the following lesions of either the central (including spinal cord, brain) or peripheral nervous systems: (1) ischemic lesions, in which a lack of oxygen in a portion of the nervous system results in neuronal injury or death, including cerebral infarction or ischemia, or spinal cord infarction or ischemia; (2) traumatic lesions, including lesions caused by physical injury or associated with surgery, for example, lesions which sever a portion of the nervous system, or compression injuries; (3) malignant lesions, in which a portion of the nervous system is destroyed or injured by malignant tissue which is either a nervous system associated malignancy or a malignancy derived from non-nervous system tissue; (4) infectious lesions, in which a portion of the nervous system is destroyed or injured as a result of infection, for example, by an abscess or associated with infection by human immunodeficiency virus, herpes zoster, or herpes simplex virus or with Lyme disease, tuberculosis, or syphilis; (5) degenerative lesions, in which a portion of the nervous system is destroyed or injured as a result of a degenerative process including but not limited to, degeneration associated with Parkinson's disease, Alzheimer's disease, Huntington's chorea, or amyotrophic lateral sclerosis (ALS); (6) lesions associated with nutritional diseases or disorders, in which a portion of the nervous system is destroyed or injured by a nutritional disorder or disorder of metabolism including, but not limited to, vitamin B12 deficiency, folic acid deficiency, Wernicke disease, tobacco-alcohol amblyopia, Marchiafava-Bignami disease (primary degeneration of the corpus callosum), and alcoholic cerebellar degeneration; (7) neurological lesions associated with systemic diseases including, but not limited to, diabetes (diabetic neuropathy, Bell's palsy), systemic lupus erythematosus, carcinoma, or sarcoidosis; (8) lesions caused by toxic substances including alcohol, lead, or particular neurotoxins; and (9) demyelinated lesions in which a portion of the nervous system is destroyed or injured by a demyelinating disease including, but not limited to, multiple sclerosis, human immunodeficiency virus-associated myelopathy, transverse myelopathy or various etiologies, progressive multifocal leukoencephalopathy, and central pontine myelinolysis.

[0704] In one embodiment, the polypeptides, polynucleotides, or agonists or antagonists of the invention are used to protect neural cells from the damaging effects of hypoxia. In a further preferred embodiment, the polypeptides, polynucleotides, or agonists or antagonists of the invention are used to protect neural cells from the damaging effects of cerebral hypoxia. According to this embodiment, the compositions of the invention are used to treat or prevent neural cell injury associated with cerebral hypoxia. In one non-exclusive aspect of this embodiment, the polypeptides, polynucleotides, or agonists or antagonists of the invention, are used to treat or prevent neural cell injury associated with cerebral ischemia. In another non-exclusive aspect of this embodiment, the polypeptides, polynucleotides, or agonists or antagonists of the invention are used to treat or prevent neural cell injury associated with cerebral infarction.

[0705] In another preferred embodiment, the polypeptides, polynucleotides, or agonists or antagonists of the invention are used to treat or prevent neural cell injury associated with a stroke. In a specific embodiment, the polypeptides, polynucleotides, or agonists or antagonists of the invention are used to treat or prevent cerebral neural cell injury associated with a stroke.

[0706] In another preferred embodiment, the polypeptides, polynucleotides, or agonists or antagonists of the invention are used to treat or prevent neural cell injury associated with a heart attack. In a specific embodiment, the polypeptides, polynucleotides, or agonists or antagonists of the invention are used to treat or prevent cerebral neural cell injury associated with a heart attack.

[0707] The compositions of the invention which are useful for treating or preventing a nervous system disorder may be selected by testing for biological activity in promoting the survival or differentiation of neurons. For example, and not by way of limitation, compositions of the invention which elicit any of the following effects may be useful according to the invention: (1) increased survival time of neurons in culture either in the presence or absence of hypoxia or hypoxic conditions; (2) increased sprouting of neurons in culture or in vivo; (3) increased production of a neuron-associated molecule in culture or in vivo, e.g., choline acetyltransferase or acetylcholinesterase with respect to motor neurons; or (4) decreased symptoms of neuron dysfunction in vivo. Such effects may be measured by any method known in the art. In preferred, non-limiting embodiments, increased survival of neurons may routinely be measured using a method set forth herein or otherwise known in the art, such as, for example, in Zhang et al., Proc Natl Acad Sci USA 97:3637-42 (2000) or in Arakawa et al., J. Neurosci., 10:3507-15 (1990); increased sprouting of neurons may be detected by methods known in the art, such as, for example, the methods set forth in Pestronk et al., Exp. Neurol., 70:65-82 (1980), or Brown et al., Ann. Rev. Neurosci., 4:17-42 (1981); increased production of neuron-associated molecules may be measured by bioassay, enzymatic assay, antibody binding, Northern blot assay, etc., using techniques known in the art and depending on the molecule to be measured; and motor neuron dysfunction may be measured by assessing the physical manifestation of motor neuron disorder, e.g., weakness, motor neuron conduction velocity, or functional disability.

[0708] In specific embodiments, motor neuron disorders that may be treated according to the invention include, but are not limited to, disorders such as infarction, infection, exposure to toxin, trauma, surgical damage, degenerative disease or malignancy that may affect motor neurons as well as other components of the nervous system, as well as disorders that selectively affect neurons such as amyotrophic lateral sclerosis, and including, but not limited to, progressive spinal muscular atrophy, progressive bulbar palsy, primary lateral sclerosis, infantile and juvenile muscular atrophy, progressive bulbar paralysis of childhood (Fazio-Londe syndrome), poliomyelitis and the post polio syndrome, and Hereditary Motorsensory Neuropathy (Charcot-Marie-Tooth Disease).

[0709] Further, polypeptides or polynucleotides of the invention may play a role in neuronal survival; synapse formation; conductance; neural differentiation, etc. Thus, compositions of the invention (including polynucleotides, polypeptides, and agonists or antagonists) may be used to diagnose and/or treat or prevent diseases or disorders associated with these roles, including, but not limited to, learning and/or cognition disorders. The compositions of the invention may also be useful in the treatment or prevention of neurodegenerative disease states and/or behavioural disorders. Such neurodegenerative disease states and/or behavioral disorders include, but are not limited to, Alzheimer's Disease, Parkinson's Disease, Huntington's Disease, Tourette Syndrome, schizophrenia, mania, dementia, paranoia, obsessive compulsive disorder, panic disorder, learning disabilities, ALS, psychoses, autism, and altered behaviors, including disorders in feeding, sleep patterns, balance, and perception. In addition, compositions of the invention may also play a role in the treatment, prevention and/or detection of developmental disorders associated with the developing embryo, or sexually-linked disorders.

[0710] Additionally, polypeptides, polynucleotides and/or agonists or antagonists of the invention, may be useful in protecting neural cells from diseases, damage, disorders, or injury, associated with cerebrovascular disorders including, but not limited to, carotid artery diseases (e.g., carotid artery thrombosis, carotid stenosis, or Moyamoya Disease), cerebral amyloid angiopathy, cerebral aneurysm, cerebral anoxia, cerebral arteriosclerosis, cerebral arteriovenous malformations, cerebral artery diseases, cerebral embolism and thrombosis (e.g., carotid artery thrombosis, sinus thrombosis; or Wallenberg's Syndrome), cerebral hemorrhage (e.g., epidural or subdural hematoma, or subarachnoid hemorrhage), cerebral infarction, cerebral ischemia (e.g., transient cerebral ischemia, Subdlavian Steal Syndrome, or vertebrobasilar insufficiency), vascular dementia (e.g., multi-infarct), leukomalacia, periventricular, and vascular headache (e.g., cluster headache or migraines).

[0711] In accordance with yet a further aspect of the present invention, there is provided a process for utilizing polynucleotides or polypeptides, as well as agonists or antagonists of the present invention, for therapeutic purposes, for example, to stimulate neurological cell proliferation and/or differentiation. Therefore, polynucleotides, polypeptides, agonists and/or antagonists of the invention may be used to treat and/or detect neurologic diseases. Moreover, polynucleotides or polypeptides, or agonists or antagonists of the invention, can be used as a marker or detector of a particular nervous system disease or disorder.

[0712] Examples of neurologic diseases which can be treated or detected with polynucleotides, polypeptides, agonists, and/or antagonists of the present invention include brain diseases, such as metabolic brain diseases which includes phenylketonuria such as maternal phenylketonuria, pyruvate carboxylase deficiency, pyruvate dehydrogenase complex deficiency, Wernicke's Encephalopathy, brain edema, brain neoplasms such as cerebellar neoplasms which include infratentorial neoplasms, cerebral ventricle neoplasms such as choroid plexus neoplasms, hypothalamic neoplasms, supratentorial neoplasms, canavan disease, cerebellar diseases such as cerebellar ataxia which include spinocerebellar degeneration such as ataxia telangiectasia, cerebellar dyssynergia, Friederich's Ataxia, Machado-Joseph Disease, olivopontocerebellar atrophy, cerebellar neoplasms such as infratentorial neoplasms, diffuse cerebral sclerosis such as encephalitis periaxialis, globoid cell leukodystrophy, metachromatic leukodystrophy and subacute sclerosing panencephalitis.

[0713] Additional neurologic diseases which can be treated or detected with polynucleotides, polypeptides, agonists, and/or antagonists of the present invention include cerebrovascular disorders (such as carotid artery diseases which include carotid artery thrombosis, carotid stenosis and Moyamoya Disease), cerebral amyloid angiopathy, cerebral aneurysm, cerebral anoxia, cerebral arteriosclerosis, cerebral arteriovenous malformations, cerebral artery diseases, cerebral embolism and thrombosis such as carotid artery thrombosis, sinus thrombosis and Wallenberg's Syndrome, cerebral hemorrhage such as epidural hematoma, subdural hematoma and subarachnoid hemorrhage, cerebral infarction, cerebral ischemia such as transient cerebral ischemia, Subdlavian Steal Syndrome and vertebrobasilar insufficiency, vascular dementia such as multi-infarct dementia, periventricular leukomalacia, vascular headache such as cluster headache and migraine.

[0714] Additional neurologic diseases which can be treated or detected with polynucleotides, polypeptides, agonists, and/or antagonists of the present invention include dementia such as AIDS Dementia Complex, presenile dementia such as Alzheimer's Disease and Creutzfeldt-Jakob Syndrome, senile dementia such as Alzheimer's Disease and progressive supranuclear palsy, vascular dementia such as multi-infarct dementia, encephalitis which include encephalitis periaxialis, viral encephalitis such as epidemic encephalitis, Japanese Encephalitis, St. Louis Encephalitis, tick-borne encephalitis and West Nile Fever, acute disseminated encephalomyelitis, meningoencephalitis such as uveomeningoencephalitic syndrome, Postencephalitic Parkinson Disease and subacute sclerosing panencephalitis, encephalomalacia such as periventricular leukomalacia, epilepsy such as generalized epilepsy which includes infantile spasms, absence epilepsy, myoclonic epilepsy which includes MERRF Syndrome, tonic-clonic epilepsy, partial epilepsy such as complex partial epilepsy, frontal lobe epilepsy and temporal lobe epilepsy, post-traumatic epilepsy, status epilepticus such as Epilepsia Partialis Continua, and Hallervorden-Spatz Syndrome.

[0715] Additional neurologic diseases which can be treated or detected with polynucleotides, polypeptides, agonists, and/or antagonists of the present invention include hydrocephalus such as Dandy-Walker Syndrome and normal pressure hydrocephalus, hypothalamic diseases such as hypothalamic neoplasms, cerebral malaria, narcolepsy which includes cataplexy, bulbar poliomyelitis, cerebri pseudotumor, Rett Syndrome, Reye's Syndrome, thalamic diseases, cerebral toxoplasmosis, intracranial tuberculoma and Zellweger Syndrome, central nervous system infections such as AIDS Dementia Complex, Brain Abscess, subdural empyema, encephalomyelitis such as Equine Encephalomyelitis, Venezuelan Equine Encephalomyelitis, Necrotizing Hemorrhagic Encephalomyelitis, Visna, and cerebral malaria.

[0716] Additional neurologic diseases which can be treated or detected with polynucleotides, polypeptides, agonists, and/or antagonists of the present invention include meningitis such as arachnoiditis, aseptic meningtitis such as viral meningtitis which includes lymphocytic choriomeningitis, Bacterial meningtitis which includes Haemophilus Meningtitis, Listeria Meningtitis, Meningococcal Meningtitis such as Waterhouse-Friderichsen Syndrome, Pneumococcal Meningtitis and meningeal tuberculosis, fungal meningitis such as Cryptococcal Meningtitis, subdural effusion, meningoencephalitis such as uvemeningoencephalitic syndrome, myelitis such as transverse myelitis, neurosyphilis such as tabes dorsalis, poliomyelitis which includes bulbar poliomyelitis and postpoliomyelitis syndrome, prion diseases (such as Creutzfeldt-Jakob Syndrome, Bovine Spongiform Encephalopathy, Gerstmann-Straussler Syndrome, Kuru, Scrapie), and cerebral toxoplasmosis.

[0717] Additional neurologic diseases which can be treated or detected with polynucleotides, polypeptides, agonists, and/or antagonists of the present invention include central nervous system neoplasms such as brain neoplasms that include cerebellar neoplasms such as infratentorial neoplasms, cerebral ventricle neoplasms such as choroid plexus neoplasms, hypothalamic neoplasms and supratentorial neoplasms, meningeal neoplasms, spinal cord neoplasms which include epidural neoplasms, demyelinating diseases such as Canavan Diseases, diffuse cerebral sceloris which includes adrenoleukodystrophy, encephalitis periaxialis, globoid cell leukodystrophy, diffuse cerebral sclerosis such as metachromatic leukodystrophy, allergic encephalomyelitis, necrotizing hemorrhagic encephalomyelitis, progressive multifocal leukoencephalopathy, multiple sclerosis, central pontine myelinolysis, transverse myelitis, neuromyelitis optica, Scrapie, Swayback, Chronic Fatigue Syndrome, Visna, High Pressure Nervous Syndrome, Meningism, spinal cord diseases such as amyotonia congenita, amyotrophic lateral sclerosis, spinal muscular atrophy such as Werdnig-Hoffmann Disease, spinal cord compression, spinal cord neoplasms such as epidural neoplasms, syringomyelia, Tabes Dorsalis, Stiff-Man Syndrome, mental retardation such as Angelman Syndrome, Cri-du-Chat Syndrome, De Lange's Syndrome, Down Syndrome, Gangliosidoses such as gangliosidoses G(M1), Sandhoff Disease, Tay-Sachs Disease, Hartnup Disease, homocystinuria, Laurence-Moon- Biedl Syndrome, Lesch-Nyhan Syndrome, Maple Syrup Urine Disease, mucolipidosis such as fucosidosis, neuronal ceroid-lipofuscinosis, oculocerebrorenal syndrome, phenylketonuria such as maternal phenylketonuria, Prader-Willi Syndrome, Rett Syndrome, Rubinstein-Taybi Syndrome, Tuberous Sclerosis, WAGR Syndrome, nervous system abnormalities such as holoprosencephaly, neural tube defects such as anencephaly which includes hydrangencephaly, Arnold-Chairi Deformity, encephalocele, meningocele, meningomyelocele, spinal dysraphism such as spina bifida cystica and spina bifida occulta.

[0718] Additional neurologic diseases which can be treated or detected with polynucleotides, polypeptides, agonists, and/or antagonists of the present invention include hereditary motor and sensory neuropathies which include Charcot-Marie Disease, Hereditary optic atrophy, Refsum's Disease, hereditary spastic paraplegia, Werdnig-Hoffmann Disease, Hereditary Sensory and Autonomic Neuropathies such as Congenital Analgesia and Familial Dysautonomia, Neurologic manifestations (such as agnosia that include Gerstmann's Syndrome, Amnesia such as retrograde amnesia, apraxia, neurogenic bladder, cataplexy, communicative disorders such as hearing disorders that includes deafness, partial hearing loss, loudness recruitment and tinnitus, language disorders such as aphasia which include agraphia, anomia, broca aphasia, and Wernicke Aphasia, Dyslexia such as Acquired Dyslexia, language development disorders, speech disorders such as aphasia which includes anomia, broca aphasia and Wernicke Aphasia, articulation disorders, communicative disorders such as speech disorders which include dysarthria, echolalia, mutism and stuttering, voice disorders such as aphonia and hoarseness, decerebrate state, delirium, fasciculation, hallucinations, meningism, movement disorders such as angelman syndrome, ataxia, athetosis, chorea, dystonia, hypokinesia, muscle hypotonia, myoclonus, tic, torticollis and tremor, muscle hypertonia such as muscle rigidity such as stiff-man syndrome, muscle spasticity, paralysis such as facial paralysis which includes Herpes Zoster Oticus, Gastroparesis, Hemiplegia, ophthalmoplegia such as diplopia, Duane's Syndrome, Homer's Syndrome, Chronic progressive external ophthalmoplegia such as Kearns Syndrome, Bulbar Paralysis, Tropical Spastic Paraparesis, Paraplegia such as Brown-Sequard Syndrome, quadriplegia, respiratory paralysis and vocal cord paralysis, paresis, phantom limb, taste disorders such as ageusia and dysgeusia, vision disorders such as amblyopia, blindness, color vision defects, diplopia, hemianopsia, scotoma and subnormal vision, sleep disorders such as hypersomnia which includes Kleine-Levin Syndrome, insomnia, and somnambulism, spasm such as trismus, unconsciousness such as coma, persistent vegetative state and syncope and vertigo, neuromuscular diseases such as amyotonia congenita, amyotrophic lateral sclerosis, Lambert-Eaton Myasthenic Syndrome, motor neuron disease, muscular atrophy such as spinal muscular atrophy, Charcot-Marie Disease and Werdnig-Hoffmann Disease, Postpoliomyelitis Syndrome, Muscular Dystrophy, Myasthenia Gravis, Myotonia Atrophica, Myotonia Confenita, Nemaline Myopathy, Familial Periodic Paralysis, Multiplex Paramyloclonus, Tropical Spastic Paraparesis and Stiff-Man Syndrome, peripheral nervous system diseases such as acrodynia, amyloid neuropathies, autonomic nervous system diseases such as Adie's Syndrome, Barre-Lieou Syndrome, Familial Dysautonomia, Homer's Syndrome, Reflex Sympathetic Dystrophy and Shy-Drager Syndrome, Cranial Nerve Diseases such as Acoustic Nerve Diseases such as Acoustic Neuroma which includes Neurofibromatosis 2, Facial Nerve Diseases such as Facial Neuralgia,Melkersson-Rosenthal Syndrome, ocular motility disorders which includes amblyopia, nystagmus, oculomotor nerve paralysis, ophthalmoplegia such as Duane's Syndrome, Homer's Syndrome, Chronic Progressive External Ophthalmoplegia which includes Kearns Syndrome, Strabismus such as Esotropia and Exotropia, Oculomotor Nerve Paralysis, Optic Nerve Diseases such as Optic Atrophy which includes Hereditary Optic Atrophy, Optic Disk Drusen, Optic Neuritis such as Neuromyelitis Optica, Papilledema, Trigeminal Neuralgia, Vocal Cord Paralysis, Demyelinating Diseases such as Neuromyelitis Optica and Swayback, and Diabetic neuropathies such as diabetic foot.

[0719] Additional neurologic diseases which can be treated or detected with polynucleotides, polypeptides, agonists, and/or antagonists of the present invention include nerve compression syndromes such as carpal tunnel syndrome, tarsal tunnel syndrome, thoracic outlet syndrome such as cervical rib syndrome, ulnar nerve compression syndrome, neuralgia such as causalgia, cervico-brachial neuralgia, facial neuralgia and trigeminal neuralgia, neuritis such as experimental allergic neuritis, optic neuritis, polyneuritis, polyradiculoneuritis and radiculities such as polyradiculitis, hereditary motor and sensory neuropathies such as Charcot-Marie Disease, Hereditary Optic Atrophy, Refsum's Disease, Hereditary Spastic Paraplegia and Werdnig-Hoffmann Disease, Hereditary Sensory and Autonomic Neuropathies which include Congenital Analgesia and Familial Dysautonomia, POEMS Syndrome, Sciatica, Gustatory Sweating and Tetany).

[0720] Endocrine Disorders

[0721] Polynucleotides or polypeptides, or agonists or antagonists of the present invention, may be used to treat, prevent, diagnose, and/or prognose disorders and/or diseases related to hormone imbalance, and/or disorders or diseases of the endocrine system.

[0722] Hormones secreted by the glands of the endocrine system control physical growth, sexual function, metabolism, and other functions. Disorders may be classified in two ways: disturbances in the production of hormones, and the inability of tissues to respond to hormones. The etiology of these hormone imbalance or endocrine system diseases, disorders or conditions may be genetic, somatic, such as cancer and some autoimmune diseases, acquired (e.g., by chemotherapy, injury or toxins), or infectious. Moreover, polynucleotides, polypeptides, antibodies, and/or agonists or antagonists of the present invention can be used as a marker or detector of a particular disease or disorder related to the endocrine system and/or hormone imbalance.

[0723] Endocrine system and/or hormone imbalance and/or diseases encompass disorders of uterine motility including, but not limited to: complications with pregnancy and labor (e.g., pre-term labor, post-term pregnancy, spontaneous abortion, and slow or stopped labor); and disorders and/or diseases of the menstrual cycle (e.g., dysmenorrhea and endometriosis).

[0724] Endocrine system and/or hormone imbalance disorders and/or diseases include disorders and/or diseases of the pancreas, such as, for example, diabetes mellitus, diabetes insipidus, congenital pancreatic agenesis, pheochromocytoma—islet cell tumor syndrome; disorders and/or diseases of the adrenal glands such as, for example, Addison's Disease, corticosteroid deficiency, virilizing disease, hirsutism, Cushing's Syndrome, hyperaldosteronism, pheochromocytoma; disorders and/or diseases of the pituitary gland, such as, for example, hyperpituitarism, hypopituitarism, pituitary dwarfism, pituitary adenoma, panhypopituitarism, acromegaly, gigantism; disorders and/or diseases of the thyroid, including but not limited to, hyperthyroidism, hypothyroidism, Plummer's disease, Graves' disease (toxic diffuse goiter), toxic nodular goiter, thyroiditis (Hashimoto's thyroiditis, subacute granulomatous thyroiditis, and silent lymphocytic thyroiditis), Pendred's syndrome, myxedema, cretinism, thyrotoxicosis, thyroid hormone coupling defect, thymic aplasia, Hurthle cell tumours of the thyroid, thyroid cancer, thyroid carcinoma, Medullary thyroid carcinoma; disorders and/or diseases of the parathyroid, such as, for example, hyperparathyroidism, hypoparathyroidism; disorders and/or diseases of the hypothalamus.

[0725] In addition, endocrine system and/or hormone imbalance disorders and/or diseases may also include disorders and/or diseases of the testes or ovaries, including cancer. Other disorders and/or diseases of the testes or ovaries further include, for example, ovarian cancer, polycystic ovary syndrome, Klinefelter's syndrome, vanishing testes syndrome (bilateral anorchia), congenital absence of Leydig's cells, cryptorchidism, Noonan's syndrome, myotonic dystrophy, capillary haemangioma of the testis (benign), neoplasias of the testis and neo-testis.

[0726] Moreover, endocrine system and/or hormone imbalance disorders and/or diseases may also include disorders and/or diseases such as, for example, polyglandular deficiency syndromes, pheochromocytoma, neuroblastoma, multiple Endocrine neoplasia, and disorders and/or cancers of endocrine tissues.

[0727] In another embodiment, a polypeptide of the invention, or polynucleotides, antibodies, agonists, or antagonists corresponding to that polypeptide, may be used to diagnose, prognose, prevent, and/or treat endocrine diseases and/or disorders associated with the tissue(s) in which the polypeptide of the invention is expressed, including one, two, three, four, five, or more tissues disclosed in Table 1, column 8 (Tissue Distribution Library Code).

[0728] Developmental and Inherited Disorders

[0729] Polynuceotides or polypeptides, or agonists or antagonists of the present invention may be used to treat, prevent, diagnose, and/or prognose diseases associated with mixed fetal tissues, including, but not limited to, developmental and inherited disorders or defects of the nervous system, musculoskelelal system, execretory system, cardiovascular system, hematopoietic system, gastrointestinal system, reproductive system, and respiratory system. Compositions of the present invention may also be used to treat, prevent, diagnose, and/or prognose developmental and inherited disorders or defects associated with, but not limited to, skin, hair, visual, and auditory tissues, metabolism. Additionally, the compositions of the invention may be useful in the diagnosis, treatment, and/or prevention of disorders or diseases associated with, but not limited to, chromosomal or genetic abnormalities and hyperproliferation or neoplasia.

[0730] Disorders or defects of the nervous system associated with developmental or inherited abnormalities that may be diagnosed, treated, and/or prevented with the compostions of the invention include, but are not limited to, adrenoleukodystrophy, agenesis of corpus callosum, Alexander disease, anencephaly, Angelman syndrome, Arnold-Chiari deformity, Batten disease, Canavan disease, cephalic disorders, Charcot-Marie-Tooth disease, encephalocele, Friedreich's ataxia, Gaucher's disease, Gorlin syndrome, Hallervorden-Spatz disease, hereditary spastic paraplegia, Huntington disease, hydranencephaly, hydrocephalus, Joubert syndrome, Lesch-Nyhan syndrome, leukodystrophy, Menkes disease, microcephaly, Niemann-Pick Type C1, neurofibromatosis, porencephaly, progeria, proteus syndrome, Refsum disease, spina bifida, Sturge-Weber syndrome, Tay-Sachs disease, tuberous sclerosis, and von Hippel-Lindau disease.

[0731] Developmental and inherited disorders resulting in disorders or defects of the musculoskeletal system that may be diagnosed, treated, and/or prevented with the compositions of the invention include, but are not limited to, achondroplasia, atlanto-occipital fusion, arthrogryposis mulitplex congenita, autosomal recessive muscular dystrophy, Becker's muscular dystrophy, cerebral palsy, choanal atresia, cleft lip, cleft palate, clubfoot, congenital amputation, congenital dislocation of the hip, congenital torticollis, congenital scoliosis, dopa-repsonsive dystonia, Duchenne muscular dystrophy, early-onset generalized dystonia, femoral torsion, Gorlin syndrome, hypophosphatasia, Klippel-Feil syndrome, knee dislocation, myoclonic dystonia, myotonic dystrophy, nail-patella syndrome, osteogenesis imperfecta, paroxysmal dystonia, progeria, prune-belly syndrome, rapid-onset dystonia parkinsonism, scolosis, syndactyly, Treacher Collins' syndrome, velocardiofacial syndrome, and X-linked dystonia-parkinsonism.

[0732] Developmental or hereditary disorders or defects of the excretory system that may be diagnosed, treated, and/or prevented with the compositions of the invention include, but are not limited to, Alport's syndrome, Bartter's syndrome, bladder diverticula, bladder exstrophy, cystinuria, epispadias, Fanconi's syndrome, Hartnup disease, horseshoe kidney, hypospadias, kidney agenesis, kidney ectopia, kidney malrotation, Liddle's syndrome, medullary cystic disease, medullary sponge, multicystic kidney, kidney polycystic kidney disease, nail-patella syndrome, Potter's syndrome, urinary tract flow obstruction, vitamin D-resistant rickets, and Wilm's tumor.

[0733] Cardiovascular disorders or defects of developmental or hereditary origin that may be diagnosed, treated, and/or prevented with the compositions of the inventtion include, but are not limited to, aortic valve stenosis, atrial septal defects, artioventricular (A-V) canal defect, bicuspid aortic valve, coarctation or the aorta, dextrocardia, Ebstein's anomaly, Eisenmenger's complex, hypoplastic left heart syndrome, Marfan syndrome, patent ductus arteriosus, progeria, pulmonary atresia, pulmonary valve stenosis, subaortic stenosis, tetralogy of fallot, total anomalous pulmonary venous (P-V) connection, transposition of the great arteries, tricuspid atresia, truncus arteriosus, ventricular septal defects. Developmental or inherited disorders resulting in disorders involving the hematopoietic system that may be diagnosed, treated, and/or prevented with the compositions of the invention include, but not limited to, Bernard-Soulier syndrome, Chédiak-Higashi syndrome, hemophilia, Hermansky-Pudlak syndrome, sickle cell anemia, storage pool disease, thromboxane A2 dysfunction, thrombasthenia, and von Willebrand's disease.

[0734] The compositions of the invention may also be used to diagnose, treat, and/or prevent developmental and inherited disorders resulting in disorders or defects of the gastrointestinal system, including, but not limited to, anal atresia, biliary atresia, esophageal atresia, diaphragmatic hernia, Hirschsprung's disease, Meckel's diverticulum, oligohydramnios, omphalocele, polyhydramnios, porphyria, situs inversus viscera. Developmental or inherited disorders resulting in metabolic disorders that may be diagnosed, treated, and/or prevented with the compositions of the invention include, but are not limited to, alpha-1 antitrypsin deficiency, cystic fibrosis, hemochromatosis, lysosomal storage disease, phenylketonuria, Wilson's disease, and Zellweger syndrome.

[0735] Disorders of the reproductive system that are developmentally or hereditary related that may also be diagnosed, treated, and/or prevented with the compositions of the invention include, but are not limited to, androgen insensitivity syndrome, ambiguous genitalia, autosomal sex reversal, congenital adreneal hyperplasia, gonadoblastoma, ovarian germ cell cancer, pseudohermphroditism, true hermaphroditism, undescended testis, XX male syndrome, and XY female type gonadal dysgenesis. The compositions of the invention may also be used to diagnose, treat, and/or prevent developmental or inherited respiratory defects including, but not limited to, askin tumor, azygos lobe, congenital diaphragmatic hernia, congenital lobar emphysema, cystic adenomatoid malformation, lobar emphysema, hyaline membrane disease, and pectus excavatum.

[0736] Developmental or inherited disorders may also result from chromosomal or genetic aberration that may be diagnosed, treated, and/or prevented with the compositions of the invention including, but not limited to, 4p- syndrome, cri du chat syndrome, Digeorge syndrome, Down's syndrome, Edward's syndrome, fragile X syndrome, Klinefelter's syndrome, Patau's syndrome, Prader-Willi syndrome, progeria, Turner's syndrome, triple X syndrome, and XYY syndrome. Other developmental disorders that can be diagnosed, treated, and/or prevented with the compositions of the invention, include, but are not limited to, fetal alcohol syndrome, and can be caused by environmental factors surrounding the developing fetus.

[0737] The compositions of the invention may further be able to be used to diagnose, treat, and/or prevent errors in development or a genetic disposition that may result in hyperproliferative disorders or neoplasms, including, but not limited to, acute childhood lymphoblastic leukemia, askin tumor, Beckwith-Wiedemann syndrome, childhood acute myeloid leukemia, childhood brain stem glioma, childhood cerebellar astrocytoma, childhood extracranial germ cell tumors childhood (primary), gonadoblastoma, hepatocellular cancer, childhood Hodgkin's disease, childhood Hodgkin's lymphoma, childhood hypothalamic and visual pathway glioma, childhood (primary) liver cancer, childhood lymphoblastic leukemia, childhood medulloblastoma, childhood non-Hodgkin's lymphoma, childhood pineal and supratentorial primitive neuroectodermal tumors, childhood primary liver cancer, childhood rhabdomyosarcoma, childhood soft tissue sarcoma, Gorlin syndrome, familial multiple endrocrine neoplasia type I, neuroblastoma, ovarian germ cell cancer, pheochromocytoma, retinoblastoma, and Wilm's tumor.

[0738] Polypeptides may be administered using any method known in the art, including, but not limited to, direct needle injection at the delivery site, intravenous injection, topical administration, catheter infusion, biolistic injectors, particle accelerators, gelfoam sponge depots, other commercially available depot materials, osmotic pumps, oral or suppositorial solid pharmaceutical formulations, decanting or topical applications during surgery, aerosol delivery. Such methods are known in the art. Polypeptides may be administered as part of a Therapeutic, described in more detail below. Methods of delivering polynucleotides are described in more detail herein.

[0739] Diseases at the Cellular Level

[0740] Diseases associated with increased cell survival or the inhibition of apoptosis that could be treated, prevented, diagnosed and/or prognosed using polynucleotides or polypeptides, as well as antagonists or agonists of the present invention, include cancers (such as follicular lymphomas, carcinomas with p53 mutations, and hormone-dependent tumors, including, but not limited to colon cancer, cardiac tumors, pancreatic cancer, melanoma, retinoblastoma, glioblastoma, lung cancer, intestinal cancer, testicular cancer, stomach cancer, neuroblastoma, myxoma, myoma, lymphoma, endothelioma, osteoblastoma, osteoclastoma, osteosarcoma, chondrosarcoma, adenoma, breast cancer, prostate cancer, Kaposi's sarcoma and ovarian cancer); autoimmune disorders (such as, multiple sclerosis, Sjogren's syndrome, Hashimoto's thyroiditis, biliary cirrhosis, Behcet's disease, Crohn's disease, polymyositis, systemic lupus erythematosus and immune-related glomerulonephritis and rheumatoid arthritis) and viral infections (such as herpes viruses, pox viruses and adenoviruses), inflammation, graft v. host disease, acute graft rejection, and chronic graft rejection.

[0741] In preferred embodiments, polynucleotides, polypeptides, and/or antagonists of the invention are used to inhibit growth, progression, and/or metastasis of cancers, in particular those [listed above] involving ovarian and/or breast tissues.

[0742] Additional diseases or conditions associated with increased cell survival that could be treated or detected by polynucleotides or polypeptides, or agonists or antagonists of the present invention include, but are not limited to, progression, and/or metastases of malignancies and related disorders such as leukemia (including acute leukemias (e.g., acute lymphocytic leukemia, acute myelocytic leukemia (including myeloblastic, promyelocytic, myelomonocytic, monocytic, and erythroleukemia)) and chronic leukemias (e.g., chronic myelocytic (granulocytic) leukemia and chronic lymphocytic leukemia)), polycythemia vera, lymphomas (e.g., Hodgkin's disease and non-Hodgkin's disease), multiple myeloma, Waldenstrom's macroglobulinemia, heavy chain disease, and solid tumors including, but not limited to, sarcomas and carcinomas such as fibrosarcoma, myxosarcoma, liposarcoma, chondrosarcoma, osteogenic sarcoma, chordoma, angiosarcoma, endotheliosarcoma, lymphangiosarcoma, lymphangioendotheliosarcoma, synovioma, mesothelioma, Ewing's tumor, leiomyosarcoma, rhabdomyosarcoma, colon carcinoma, pancreatic cancer, breast cancer, ovarian cancer, prostate cancer, squamous cell carcinoma, basal cell carcinoma, adenocarcinoma, sweat gland carcinoma, sebaceous gland carcinoma, papillary carcinoma, papillary adenocarcinomas, cystadenocarcinoma, medullary carcinoma, bronchogenic carcinoma, renal cell carcinoma, hepatoma, bile duct carcinoma, choriocarcinoma, seminoma, embryonal carcinoma, Wilm's tumor, cervical cancer, testicular tumor, lung carcinoma, small cell lung carcinoma, bladder carcinoma, epithelial carcinoma, glioma, astrocytoma, medulloblastoma, craniopharyngioma, ependymoma, pinealoma, hemangioblastoma, acoustic neuroma, oligodendroglioma, menangioma, melanoma, neuroblastoma, and retinoblastoma.

[0743] Diseases associated with increased apoptosis that could be treated, prevented, diagnosted, and/or prognosed using polynucleotides or polypeptides, as well as agonists or antagonists of the present invention, include, but are not limited to, AIDS; neurodegenerative disorders (such as Alzheimer's disease, Parkinson's disease, Amyotrophic lateral sclerosis, Retinitis pigmentosa, Cerebellar degeneration and brain tumor or prior associated disease); autoimmune disorders (such as, multiple sclerosis, Sjogren's syndrome, Hashimoto's thyroiditis, biliary cirrhosis, Behcet's disease, Crohn's disease, polymyositis, systemic lupus erythematosus and immune-related glomerulonephritis and rheumatoid arthritis) myelodysplastic syndromes (such as aplastic anemia), graft v. host disease, ischemic injury (such as that caused by myocardial infarction, stroke and reperfusion injury), liver injury (e.g., hepatitis related liver injury, ischemia/reperfusion injury, cholestosis (bile duct injury) and liver cancer); toxin-induced liver disease (such as that caused by alcohol), septic shock, cachexia and anorexia.

[0744] Wound Healing and Epithelial Cell Proliferation

[0745] In accordance with yet a further aspect of the present invention, there is provided a process for utilizing polynucleotides or polypeptides, as well as agonists or antagonists of the present invention, for therapeutic purposes, for example, to stimulate epithelial cell proliferation and basal keratinocytes for the purpose of wound healing, and to stimulate hair follicle production and healing of dermal wounds. Polynucleotides or polypeptides, as well as agonists or antagonists of the present invention, may be clinically useful in stimulating wound healing including surgical wounds, excisional wounds, deep wounds involving damage of the dermis and epidermis, eye tissue wounds, dental tissue wounds, oral cavity wounds, diabetic ulcers, dermal ulcers, cubitus ulcers, arterial ulcers, venous stasis ulcers, bums resulting from heat exposure or chemicals, and other abnormal wound healing conditions such as uremia, malnutrition, vitamin deficiencies and complications associated with systemic treatment with steroids, radiation therapy and antineoplastic drugs and antimetabolites. Polynucleotides or polypeptides, as well as agonists or antagonists of the present invention, could be used to promote dermal reestablishment subsequent to dermal loss.

[0746] Polynucleotides or polypeptides, as well as agonists or antagonists of the present invention, could be used to increase the adherence of skin grafts to a wound bed and to stimulate re-epithelialization from the wound bed. The following are types of grafts that polynucleotides or polypeptides, agonists or antagonists of the present invention, could be used to increase adherence to a wound bed: autografts, artificial skin, allografts, autodermic graft, autoepdermic grafts, avacular grafts, Blair-Brown grafts, bone graft, brephoplastic grafts, cutis graft, delayed graft, dermic graft, epidermic graft, fascia graft, full thickness graft, heterologous graft, xenograft, homologous graft, hyperplastic graft, lamellar graft, mesh graft, mucosal graft, Ollier-Thiersch graft, omenpal graft, patch graft, pedicle graft, penetrating graft, split skin graft, thick split graft. Polynucleotides or polypeptides, as well as agonists or antagonists of the present invention, can be used to promote skin strength and to improve the appearance of aged skin.

[0747] It is believed that polynucleotides or polypeptides, as well as agonists or antagonists of the present invention, will also produce changes in hepatocyte proliferation, and epithelial cell proliferation in the lung, breast, pancreas, stomach, small intestine, and large intestine. Polynucleotides or polypeptides, as well as agonists or antagonists of the present invention, could promote proliferation of epithelial cells such as sebocytes, hair follicles, hepatocytes, type II pneumocytes, mucin-producing goblet cells, and other epithelial cells and their progenitors contained within the skin, lung, liver, and gastrointestinal tract. Polynucleotides or polypeptides, agonists or antagonists of the present invention, may promote proliferation of endothelial cells, keratinocytes, and basal keratinocytes.

[0748] Polynucleotides or polypeptides, as well as agonists or antagonists of the present invention, could also be used to reduce the side effects of gut toxicity that result from radiation, chemotherapy treatments or viral infections. Polynucleotides or polypeptides, as well as agonists or antagonists of the present invention, may have a cytoprotective effect on the small intestine mucosa. Polynucleotides or polypeptides, as well as agonists or antagonists of the present invention, may also stimulate healing of mucositis (mouth ulcers) that result from chemotherapy and viral infections.

[0749] Polynucleotides or polypeptides, as well as agonists or antagonists of the present invention, could further be used in full regeneration of skin in full and partial thickness skin defects, including bums, (i.e., repopulation of hair follicles, sweat glands, and sebaceous glands), treatment of other skin defects such as psoriasis. Polynucleotides or polypeptides, as well as agonists or antagonists of the present invention, could be used to treat epidermolysis bullosa, a defect in adherence of the epidermis to the underlying dermis which results in frequent, open and painful blisters by accelerating reepithelialization of these lesions. Polynucleotides or polypeptides, as well as agonists or antagonists of the present invention, could also be used to treat gastric and doudenal ulcers and help heal by scar formation of the mucosal lining and regeneration of glandular mucosa and duodenal mucosal lining more rapidly. Inflammatory bowel diseases, such as Crohn's disease and ulcerative colitis, are diseases, which result in destruction of the mucosal surface of the small or large intestine, respectively. Thus, polynucleotides or polypeptides, as well as agonists or antagonists of the present invention, could be used to promote the resurfacing of the mucosal surface to aid more rapid healing and to prevent progression of inflammatory bowel disease. Treatment with polynucleotides or polypeptides, agonists or antagonists of the present invention, is expected to have a significant effect on the production of mucus throughout the gastrointestinal tract and could be used to protect the intestinal mucosa from injurious substances that are ingested or following surgery. Polynucleotides or polypeptides, as well as agonists or antagonists of the present invention, could be used to treat diseases associate with the under expression.

[0750] Moreover, polynucleotides or polypeptides, as well as agonists or antagonists of the present invention, could be used to prevent and heal damage to the lungs due to various pathological states. Polynucleotides or polypeptides, as well as agonists or antagonists of the present invention, could stimulate proliferation and differentiation and promote the repair of alveoli and brochiolar epithelium to prevent or treat acute or chronic lung damage. For example, emphysema, which results in the progressive loss of aveoli, and inhalation injuries, i.e., resulting from smoke inhalation and bums, that cause necrosis of the bronchiolar epithelium and alveoli could be effectively treated using polynucleotides or polypeptides, agonists or antagonists of the present invention. Also, polynucleotides or polypeptides, as well as agonists or antagonists of the present invention, could be used to stimulate the proliferation of and differentiation of type II pneumocytes, which may help treat or prevent disease such as hyaline membrane diseases, such as infant respiratory distress syndrome and bronchopulmonary displasia, in premature infants.

[0751] Polynucleotides or polypeptides, as well as agonists or antagonists of the present invention, could stimulate the proliferation and differentiation of hepatocytes and, thus, could be used to alleviate or treat liver diseases and pathologies such as fulminant liver failure caused by cirrhosis, liver damage caused by viral hepatitis and toxic substances (i.e., acetaminophen, carbon tetraholoride and other hepatotoxins known in the art).

[0752] In addition, polynucleotides or polypeptides, as well as agonists or antagonists of the present invention, could be used treat or prevent the onset of diabetes mellitus. In patients with newly diagnosed Types I and II diabetes, where some islet cell function remains, polynucleotides or polypeptides, as well as agonists or antagonists of the present invention, could be used to maintain the islet function so as to alleviate, delay or prevent permanent manifestation of the disease. Also, polynucleotides or polypeptides, as well as agonists or antagonists of the present invention, could be used as an auxiliary in islet cell transplantation to improve or promote islet cell function.

[0753] Infectious Disease

[0754] Polynucleotides or polypeptides, as well as agonists or antagonists of the present invention can be used to treat or detect infectious agents. For example, by increasing the immune response, particularly increasing the proliferation and differentiation of B and/or T cells, infectious diseases may be treated. The immune response may be increased by either enhancing an existing immune response, or by initiating a new immune response. Alternatively, polynucleotides or polypeptides, as well as agonists or antagonists of the present invention may also directly inhibit the infectious agent, without necessarily eliciting an immune response.

[0755] Viruses are one example of an infectious agent that can cause disease or symptoms that can be treated or detected by a polynucleotide or polypeptide and/or agonist or antagonist of the present invention. Examples of viruses, include, but are not limited to Examples of viruses, include, but are not limited to the following DNA and RNA viruses and viral families: Arbovirus, Adenoviridae, Arenaviridae, Arterivirus, Birnaviridae, Bunyaviridae, Caliciviridae, Circoviridae, Coronaviridae, Dengue, EBV, HIV, Flaviviridae, Hepadnaviridae (Hepatitis), Herpesviridae (such as, Cytomegalovirus, Herpes Simplex, Herpes Zoster), Mononegavirus (e.g., Paramyxoviridae, Morbillivirus, Rhabdoviridae), Orthomyxoviridae (e.g., Influenza A, Influenza B, and parainfluenza), Papiloma virus, Papovaviridae, Parvoviridae, Picornaviridae, Poxviridae (such as Smallpox or Vaccinia), Reoviridae (e.g., Rotavirus), Retroviridae (HTLV-I, HTLV-II, Lentivirus), and Togaviridae (e.g., Rubivirus). Viruses falling within these families can cause a variety of diseases or symptoms, including, but not limited to: arthritis, bronchiollitis, respiratory syncytial virus, encephalitis, eye infections (e.g., conjunctivitis, keratitis), chronic fatigue syndrome, hepatitis (A, B, C, E, Chronic Active, Delta), Japanese B encephalitis, Junin, Chikungunya, Rift Valley fever, yellow fever, meningitis, opportunistic infections (e.g., AIDS), pneumonia, Burkitt's Lymphoma, chickenpox, hemorrhagic fever, Measles, Mumps, Parainfluenza, Rabies, the common cold, Polio, leukemia, Rubella, sexually transmitted diseases, skin diseases (e.g., Kaposi's, warts), and viremia, polynucleotides or polypeptides, or agonists or antagonists of the invention, can be used to treat or detect any of these symptoms or diseases. In specific embodiments, polynucleotides, polypeptides, or agonists or antagonists of the invention are used to treat: meningitis, Dengue, EBV, and/or hepatitis (e.g., hepatitis B). In an additional specific embodiment polynucleotides, polypeptides, or agonists or antagonists of the invention are used to treat patients nonresponsive to one or more other commercially available hepatitis vaccines. In a further specific embodiment polynucleotides, polypeptides, or agonists or antagonists of the invention are used to treat AIDS.

[0756] Similarly, bacterial or fungal agents that can cause disease or symptoms and that can be treated or detected by a polynucleotide or polypeptide and/or agonist or antagonist of the present invention include, but not limited to, include, but not limited to, the following Gram-Negative and Gram-positive bacteria and bacterial families and fungi: Actinomycetales (e.g., Corynebacterium, Mycobacterium, Norcardia), Cryptococcus neoformans, Aspergillosis, Bacillaceae (e.g., Anthrax, Clostridium), Bacteroidaceae, Blastomycosis, Bordetella, Borrelia (e.g., Borrelia burgdorferi, Brucellosis, Candidiasis, Campylobacter, Coccidioidomycosis, Cryptococcosis, Dermatocycoses, E. coli (e.g., Enterotoxigenic E. coli and Enterohemorrhagic E. coli), Enterobacteriaceae (Klebsiella, Salmonella (e.g., Salmonella typhi, and Salmonella paratyphi), Serratia, Yersinia), Erysipelothrix, Helicobacter, Legionellosis, Leptospirosis, Listeria, Mycoplasmatales, Mycobacterium leprae, Vibrio cholerae, Neisseriaceae (e.g., Acinetobacter, Gonorrhea, Menigococcal), Meisseria meningitidis, Pasteurellacea Infections (e.g., Actinobacillus, Heamophilus (e.g., Heamophilus influenza type B), Pasteurella), Pseudomonas, Rickettsiaceae, Chlamydiaceae, Treponema spp., Leptospira spp., Shigella spp., Staphylococcal, Meningiococcal, Pneumococcal and Streptococcal (e.g., Streptococcus pneumoniae and Group B Streptococcus). These bacterial or fungal families can cause the following diseases or symptoms, including, but not limited to: bacteremia, endocarditis, eye infections (conjunctivitis, tuberculosis, uveitis), gingivitis, opportunistic infections (e.g., AIDS related infections), paronychia, prosthesis-related infections, Reiter's Disease, respiratory tract infections, such as Whooping Cough or Empyema, sepsis, Lyme Disease, Cat-Scratch Disease, Dysentery, Paratyphoid Fever, food poisoning, Typhoid, pneumonia, Gonorrhea, meningitis (e.g., mengitis types A and B), Chlamydia, Syphilis, Diphtheria, Leprosy, Paratuberculosis, Tuberculosis, Lupus, Botulism, gangrene, tetanus, impetigo, Rheumatic Fever, Scarlet Fever, sexually transmitted diseases, skin diseases (e.g., cellulitis, dermatocycoses), toxemia, urinary tract infections, wound infections. Polynucleotides or polypeptides, agonists or antagonists of the invention, can be used to treat or detect any of these symptoms or diseases. In specific embodiments, Ppolynucleotides, polypeptides, agonists or antagonists of the invention are used to treat: tetanus, Diptheria, botulism, and/or meningitis type B.

[0757] Moreover, parasitic agents causing disease or symptoms that can be treated or detected by a polynucleotide or polypeptide and/or agonist or antagonist of the present invention include, but not limited to, the following families or class: Amebiasis, Babesiosis, Coccidiosis, Cryptosporidiosis, Dientamoebiasis, Dourine, Ectoparasitic, Giardiasis, Helminthiasis, Leishmaniasis, Theileriasis, Toxoplasmosis, Trypanosomiasis, and Trichomonas and Sporozoans (e.g., Plasmodium virax, Plasmodium falciparium, Plasmodium malariae and Plasmodium ovale). These parasites can cause a variety of diseases or symptoms, including, but not limited to: Scabies, Trombiculiasis, eye infections, intestinal disease (e.g., dysentery, giardiasis), liver disease, lung disease, opportunistic infections (e.g., AIDS related), malaria, pregnancy complications, and toxoplasmosis, polynucleotides or polypeptides, or agonists or antagonists of the invention, can be used to treat or detect any of these symptoms or diseases.

[0758] Polynucleotides or polypeptides, as well as agonists or antagonists of the present invention of the present invention could either be by administering an effective amount of a polypeptide to the patient, or by removing cells from the patient, supplying the cells with a polynucleotide of the present invention, and returning the engineered cells to the patient (ex vivo therapy). Moreover, the polypeptide or polynucleotide of the present invention can be used as an antigen in a vaccine to raise an immune response against infectious disease.

[0759] Regeneration

[0760] Polynucleotides or polypeptides, as well as agonists or antagonists of the present invention can be used to differentiate, proliferate, and attract cells, leading to the regeneration of tissues. (See, Science 276:59-87 (1997).) The regeneration of tissues could be used to repair, replace, or protect tissue damaged by congenital defects, trauma (wounds, bums, incisions, or ulcers), age, disease (e.g. osteoporosis, osteocarthritis, periodontal disease, liver failure), surgery, including cosmetic plastic surgery, fibrosis, reperfusion injury, or systemic cytokine damage.

[0761] Tissues that could be regenerated using the present invention include organs (e.g., pancreas, liver, intestine, kidney, skin, endothelium), muscle (smooth, skeletal or cardiac), vasculature (including vascular and lymphatics), nervous, hematopoietic, and skeletal (bone, cartilage, tendon, and ligament) tissue. Preferably, regeneration occurs without or decreased scarring. Regeneration also may include angiogenesis.

[0762] Moreover, polynucleotides or polypeptides, as well as agonists or antagonists of the present invention, may increase regeneration of tissues difficult to heal. For example, increased tendon/ligament regeneration would quicken recovery time after damage. Polynucleotides or polypeptides, as well as agonists or antagonists of the present invention could also be used prophylactically in an effort to avoid damage. Specific diseases that could be treated include of tendinitis, carpal tunnel syndrome, and other tendon or ligament defects. A further example of tissue regeneration of non-healing wounds includes pressure ulcers, ulcers associated with vascular insufficiency, surgical, and traumatic wounds.

[0763] Similarly, nerve and brain tissue could also be regenerated by using polynucleotides or polypeptides, as well as agonists or antagonists of the present invention, to proliferate and differentiate nerve cells. Diseases that could be treated using this method include central and peripheral nervous system diseases, neuropathies, or mechanical and traumatic disorders (e.g., spinal cord disorders, head trauma, cerebrovascular disease, and stoke). Specifically, diseases associated with peripheral nerve injuries, peripheral neuropathy (e.g., resulting from chemotherapy or other medical therapies), localized neuropathies, and central nervous system diseases (e.g., Alzheimer's disease, Parkinson's disease, Huntington's disease, amyotrophic lateral sclerosis, and Shy-Drager syndrome), could all be treated using the polynucleotides or polypeptides, as well as agonists or antagonists of the present invention.

[0764] Chemotaxis

[0765] Polynucleotides or polypeptides, as well as agonists or antagonists of the present invention may have chemotaxis activity. A chemotaxic molecule attracts or mobilizes cells (e.g., monocytes, fibroblasts, neutrophils, T-cells, mast cells, eosinophils, epithelial and/or endothelial cells) to a particular site in the body, such as inflammation, infection, or site of hyperproliferation. The mobilized cells can then fight off and/or heal the particular trauma or abnormality.

[0766] Polynucleotides or polypeptides, as well as agonists or antagonists of the present invention may increase chemotaxic activity of particular cells. These chemotactic molecules can then be used to treat inflammation, infection, hyperproliferative disorders, or any immune system disorder by increasing the number of cells targeted to a particular location in the body. For example, chemotaxic molecules can be used to treat wounds and other trauma to tissues by attracting immune cells to the injured location. Chemotactic molecules of the present invention can also attract fibroblasts, which can be used to treat wounds.

[0767] It is also contemplated that polynucleotides or polypeptides, as well as agonists or antagonists of the present invention may inhibit chemotactic activity. These molecules could also be used to treat disorders. Thus, polynucleotides or polypeptides, as well as agonists or antagonists of the present invention could be used as an inhibitor of chemotaxis.

[0768] Binding Activity

[0769] A polypeptide of the present invention may be used to screen for molecules that bind to the polypeptide or for molecules to which the polypeptide binds. The binding of the polypeptide and the molecule may activate (agonist), increase, inhibit (antagonist), or decrease activity of the polypeptide or the molecule bound. Examples of such molecules include antibodies, oligonucleotides, proteins (e.g., receptors),or small molecules.

[0770] Preferably, the molecule is closely related to the natural ligand of the polypeptide, e.g., a fragment of the ligand, or a natural substrate, a ligand, a structural or functional mimetic. (See, Coligan et al., Current Protocols in Immunology 1(2):Chapter 5 (1991).) Similarly, the molecule can be closely related to the natural receptor to which the polypeptide binds, or at least, a fragment of the receptor capable of being bound by the polypeptide (e.g., active site). In either case, the molecule can be rationally designed using known techniques.

[0771] Preferably, the screening for these molecules involves producing appropriate cells, which express the polypeptide. Preferred cells include cells from mammals, yeast, Drosophila, or E. coli. Cells expressing the polypeptide (or cell membrane containing the expressed polypeptide) are then preferably contacted with a test compound potentially containing the molecule to observe binding, stimulation, or inhibition of activity of either the polypeptide or the molecule.

[0772] The assay may simply test binding of a candidate compound to the polypeptide, wherein binding is detected by a label, or in an assay involving competition with a labeled competitor. Further, the assay may test whether the candidate compound results in a signal generated by binding to the polypeptide.

[0773] Alternatively, the assay can be carried out using cell-free preparations, polypeptide/molecule affixed to a solid support, chemical libraries, or natural product mixtures. The assay may also simply comprise the steps of mixing a candidate compound with a solution containing a polypeptide, measuring polypeptide/molecule activity or binding, and comparing the polypeptide/molecule activity or binding to a standard.

[0774] Preferably, an ELISA assay can measure polypeptide level or activity in a sample (e.g., biological sample) using a monoclonal or polyclonal antibody. The antibody can measure polypeptide level or activity by either binding, directly or indirectly, to the polypeptide or by competing with the polypeptide for a substrate.

[0775] Additionally, the receptor to which the polypeptide of the present invention binds can be identified by numerous methods known to those of skill in the art, for example, ligand panning and FACS sorting (Coligan, et al., Current Protocols in Immun., 1(2), Chapter 5, (1991)). For example, expression cloning is employed wherein polyadenylated RNA is prepared from a cell responsive to the polypeptides, for example, NIH3T3 cells which are known to contain multiple receptors for the FGF family proteins, and SC-3 cells, and a cDNA library created from this RNA is divided into pools and used to transfect COS cells or other cells that are not responsive to the polypeptides. Transfected cells which are grown on glass slides are exposed to the polypeptide of the present invention, after they have been labeled. The polypeptides can be labeled by a variety of means including iodination or inclusion of a recognition site for a site-specific protein kinase.

[0776] Following fixation and incubation, the slides are subjected to auto-radiographic analysis. Positive pools are identified and sub-pools are prepared and re-transfected using an iterative sub-pooling and re-screening process, eventually yielding a single clones that encodes the putative receptor.

[0777] As an alternative approach for receptor identification, the labeled polypeptides can be photoaffinity linked with cell membrane or extract preparations that express the receptor molecule. Cross-linked material is resolved by PAGE analysis and exposed to X-ray film. The labeled complex containing the receptors of the polypeptides can be excised, resolved into peptide fragments, and subjected to protein microsequencing. The amino acid sequence obtained from microsequencing would be used to design a set of degenerate oligonucleotide probes to screen a cDNA library to identify the genes encoding the putative receptors.

[0778] Moreover, the techniques of gene-shuffling, motif-shuffling, exon-shuffling, and/or codon-shuffling (collectively referred to as “DNA shuffling”) may be employed to modulate the activities of the polypeptide of the present invention thereby effectively generating agonists and antagonists of the polypeptide of the present invention. See generally, U.S. Pat. Nos. 5,605,793, 5,811,238, 5,830,721, 5,834,252, and 5,837,458, and Patten, P. A., et al., Curr. Opinion Biotechnol. 8:724-33 (1997); Harayama, S. Trends Biotechnol. 16(2):76-82 (1998); Hansson L. O., et al., J. Mol. Biol. 287:265-76 (1999); and Lorenzo, M. M. and Blasco, R. Biotechniques 24(2):308-13 (1998); each of these patents and publications are hereby incorporated by reference). In one embodiment, alteration of polynucleotides and corresponding polypeptides may be achieved by DNA shuffling. DNA shuffling involves the assembly of two or more DNA segments into a desired molecule by homologous, or site-specific, recombination. In another embodiment, polynucleotides and corresponding polypeptides may be altered by being subjected to random mutagenesis by error-prone PCR, random nucleotide insertion or other methods prior to recombination. In another embodiment, one or more components, motifs, sections, parts, domains, fragments, etc., of the polypeptide of the present invention may be recombined with one or more components, motifs, sections, parts, domains, fragments, etc. of one or more heterologous molecules. In preferred embodiments, the heterologous molecules are family members. In further preferred embodiments, the heterologous molecule is a growth factor such as, for example, platelet-derived growth factor (PDGF), insulin-like growth factor (IGF-I), transforming growth factor (TGF)-alpha, epidermal growth factor (EGF), fibroblast growth factor (FGF), TGF-beta, bone morphogenetic protein (BMP)-2, BMP-4, BMP-5, BMP-6, BMP-7, activins A and B, decapentaplegic(dpp), 60A, OP-2, dorsalin, growth differentiation factors (GDFs), nodal, MIS, inhibin-alpha, TGF-beta1, TGF-beta2, TGF-beta3, TGF-beta5, and glial-derived neurotrophic factor (GDNF).

[0779] Other preferred fragments are biologically active fragments of the polypeptide of the present invention. Biologically active fragments are those exhibiting activity similar, but not necessarily identical, to an activity of the polypeptide of the present invention. The biological activity of the fragments may include an improved desired activity, or a decreased undesirable activity.

[0780] Additionally, this invention provides a method of screening compounds to identify those, which modulate the action of the polypeptide of the present invention. An example of such an assay comprises combining a mammalian fibroblast cell, the polypeptide of the present invention, the compound to be screened and ³[H] thymidine under cell culture conditions where the fibroblast cell would normally proliferate. A control assay may be performed in the absence of the compound to be screened and compared to the amount of fibroblast proliferation in the presence of the compound to determine if the compound stimulates proliferation by determining the uptake of 3[H] thymidine in each case. The amount of fibroblast cell proliferation is measured by liquid scintillation chromatography, which measures the incorporation of 3[H] thymidine. Both agonist and antagonist compounds may be identified by this procedure.

[0781] In another method, a mammalian cell or membrane preparation expressing a receptor for a polypeptide of the present invention is incubated with a labeled polypeptide of the present invention in the presence of the compound. The ability of the compound to enhance or block this interaction could then be measured. Alternatively, the response of a known second messenger system following interaction of a compound to be screened and the receptor is measured and the ability of the compound to bind to the receptor and elicit a second messenger response is measured to determine if the compound is a potential agonist or antagonist. Such second messenger systems include but are not limited to, cAMP guanylate cyclase, ion channels or phosphoinositide hydrolysis.

[0782] All of these above assays can be used as diagnostic or prognostic markers. The molecules discovered using these assays can be used to treat disease or to bring about a particular result in a patient (e.g., blood vessel growth) by activating or inhibiting the polypeptide/molecule. Moreover, the assays can discover agents which may inhibit or enhance the production of the polypeptides of the invention from suitably manipulated cells or tissues.

[0783] Therefore, the invention includes a method of identifying compounds which bind to a polypeptide of the invention comprising the steps of: (a) incubating a candidate binding compound with a polypeptide of the present invention; and (b) determining if binding has occurred. Moreover, the invention includes a method of identifying agonists/antagonists comprising the steps of: (a) incubating a candidate compound with a polypeptide of the present invention, (b) assaying a biological activity, and (b) determining if a biological activity of the polypeptide has been altered.

[0784] Targeted Delivery

[0785] In another embodiment, the invention provides a method of delivering compositions to targeted cells expressing a receptor for a polypeptide of the invention, or cells expressing a cell bound form of a polypeptide of the invention.

[0786] As discussed herein, polypeptides or antibodies of the invention may be associated with heterologous polypeptides, heterologous nucleic acids, toxins, or prodrugs via hydrophobic, hydrophilic, ionic and/or covalent interactions. In one embodiment, the invention provides a method for the specific delivery of compositions of the invention to cells by administering polypeptides of the invention (including antibodies) that are associated with heterologous polypeptides or nucleic acids. In one example, the invention provides a method for delivering a therapeutic protein into the targeted cell. In another example, the invention provides a method for delivering a single stranded nucleic acid (e.g., antisense or ribozymes) or double stranded nucleic acid (e.g., DNA that can integrate into the cell's genome or replicate episomally and that can be transcribed) into the targeted cell.

[0787] In another embodiment, the invention provides a method for the specific destruction of cells (e.g., the destruction of tumor cells) by administering polypeptides of the invention (e.g., polypeptides of the invention or antibodies of the invention) in association with toxins or cytotoxic prodrugs.

[0788] By “toxin” is meant compounds that bind and activate endogenous cytotoxic effector systems, radioisotopes, holotoxins, modified toxins, catalytic subunits of toxins, or any molecules or enzymes not normally present in or on the surface of a cell that under defined conditions cause the cell's death. Toxins that may be used according to the methods of the invention include, but are not limited to, radioisotopes known in the art, compounds such as, for example, antibodies (or complement fixing containing portions thereof) that bind an inherent or induced endogenous cytotoxic effector system, thymidine kinase, endonuclease, RNAse, alpha toxin, ricin, abrin, Pseudomonas exotoxin A, diphtheria toxin, saporin, momordin, gelonin, pokeweed antiviral protein, alpha-sarcin and cholera toxin. By “cytotoxic prodrug” is meant a non-toxic compound that is converted by an enzyme, normally present in the cell, into a cytotoxic compound. Cytotoxic prodrugs that may be used according to the methods of the invention include, but are not limited to, glutamyl derivatives of benzoic acid mustard alkylating agent, phosphate derivatives of etoposide or mitomycin C, cytosine arabinoside, daunorubisin, and phenoxyacetamide derivatives of doxorubicin.

[0789] Drug Screening

[0790] Further contemplated is the use of the polypeptides of the present invention, or the polynucleotides encoding these polypeptides, to screen for molecules, which modify the activities of the polypeptides of the present invention. Such a method would include contacting the polypeptide of the present invention with a selected compound(s) suspected of having antagonist or agonist activity, and assaying the activity of these polypeptides following binding.

[0791] This invention is particularly useful for screening therapeutic compounds by using the polypeptides of the present invention, or binding fragments thereof, in any of a variety of drug screening techniques. The polypeptide or fragment employed in such a test may be affixed to a solid support, expressed on a cell surface, free in solution, or located intracellularly. One method of drug screening utilizes eukaryotic or prokaryotic host cells which are stably transformed with recombinant nucleic acids expressing the polypeptide or fragment. Drugs are screened against such transformed cells in competitive binding assays. One may measure, for example, the formulation of complexes between the agent being tested and a polypeptide of the present invention.

[0792] Thus, the present invention provides methods of screening for drugs or any other agents, which affect activities mediated by the polypeptides of the present invention. These methods comprise contacting such an agent with a polypeptide of the present invention or a fragment thereof and assaying for the presence of a complex between the agent and the polypeptide or a fragment thereof, by methods well known in the art. In such a competitive binding assay, the agents to screen are typically labeled. Following incubation, free agent is separated from that present in bound form, and the amount of free or uncomplexed label is a measure of the ability of a particular agent to bind to the polypeptides of the present invention.

[0793] Another technique for drug screening provides high throughput screening for compounds having suitable binding affinity to the polypeptides of the present invention, and is described in great detail in European Patent Application 84/03564, published on Sep. 13, 1984, which is incorporated herein by reference herein. Briefly stated, large numbers of different small peptide test compounds are synthesized on a solid substrate, such as plastic pins or some other surface. The peptide test compounds are reacted with polypeptides of the present invention and washed. Bound polypeptides are then detected by methods well known in the art. Purified polypeptides are coated directly onto plates for use in the aforementioned drug screening techniques. In addition, non-neutralizing antibodies may be used to capture the peptide and immobilize it on the solid support.

[0794] This invention also contemplates the use of competitive drug screening assays in which neutralizing antibodies capable of binding polypeptides of the present invention specifically compete with a test compound for binding to the polypeptides or fragments thereof. In this manner, the antibodies are used to detect the presence of any peptide which shares one or more antigenic epitopes with a polypeptide of the invention.

[0795] Antisense And Ribozyme (Antagonists)

[0796] In specific embodiments, antagonists according to the present invention are nucleic acids corresponding to the sequences contained in SEQ ID NO: X, or the complementary strand thereof, and/or to cDNA sequences contained in cDNA Clone ID NO: Z identified for example, in Table 1. In one embodiment, antisense sequence is generated internally, by the organism, in another embodiment, the antisense sequence is separately administered (see, for example, O'Connor, J., Neurochem. 56:560 (1991). Oligodeoxynucleotides as Antisense Inhibitors of Gene Expression, CRC Press, Boca Raton, Fla. (1988). Antisense technology can be used to control gene expression through antisense DNA or RNA, or through triple-helix formation. Antisense techniques are discussed for example, in Okano, J., Neurochem. 56:560 (1991); Oligodeoxynucleotides as Antisense Inhibitors of Gene Expression, CRC Press, Boca Raton, Fla. (1988). Triple helix formation is discussed in, for instance, Lee et al., Nucleic Acids Research 6:3073 (1979); Cooney et al., Science 241:456 (1988); and Dervan et al., Science 251:1300 (1991). The methods are based on binding of a polynucleotide to a complementary DNA or RNA.

[0797] For example, the use of c-myc and c-myb antisense RNA constructs to inhibit the growth of the non-lymphocytic leukemia cell line HL-60 and other cell lines was previously described. (Wickstrom et al. (1988); Anfossi et al. (1989)). These experiments were performed in vitro by incubating cells with the oligoribonucleotide. A similar procedure for in vivo use is described in WO 91/15580. Briefly, a pair of oligonucleotides for a given antisense RNA is produced as follows: A sequence complimentary to the first 15 bases of the open reading frame is flanked by an EcoR1 site on the 5′ end and a HindIII site on the 3′ end. Next, the pair of oligonucleotides is heated at 90° C. for one minute and then annealed in 2×ligation buffer (20 mM TRIS HCl pH 7.5, 10 mM MgCl2, 10 MM dithiothreitol (DTT) and 0.2 mM ATP) and then ligated to the EcoR1/Hind III site of the retroviral vector PMV7 (WO 91/15580).

[0798] For example, the 5′ coding portion of a polynucleotide that encodes the polypeptide of the present invention may be used to design an antisense RNA oligonucleotide of from about 10 to 40 base pairs in length. A DNA oligonucleotide is designed to be complementary to a region of the gene involved in transcription thereby preventing transcription and the production of the receptor. The antisense RNA oligonucleotide hybridizes to the mRNA in vivo and blocks translation of the mRNA molecule into receptor polypeptide.

[0799] In one embodiment, the antisense nucleic acid of the invention is produced intracellularly by transcription from an exogenous sequence. For example, a vector or a portion thereof, is transcribed, producing an antisense nucleic acid (RNA) of the invention. Such a vector would contain a sequence encoding the antisense nucleic acid. Such a vector can remain episomal or become chromosomally integrated, as long as it can be transcribed to produce the desired antisense RNA. Such vectors can be constructed by recombinant DNA technology methods standard in the art. Vectors can be plasmid, viral, or others known in the art, used for replication and expression in vertebrate cells. Expression of the sequence encoding the polypeptide of the present invention or fragments thereof, can be by any promoter known in the art to act in vertebrate, preferably human cells. Such promoters can be inducible or constitutive. Such promoters include, but are not limited to, the SV40 early promoter region (Bernoist and Chambon, Nature 29:304-310 (1981), the promoter contained in the 3′ long terminal repeat of Rous sarcoma virus (Yamamoto et al., Cell 22:787-797 (1980), the herpes thymidine promoter (Wagner et al., Proc. Natl. Acad. Sci. U.S.A. 78:1441-1445 (1981), the regulatory sequences of the metallothionein gene (Brinster, et al., Nature 296:39-42 (1982)), etc.

[0800] The antisense nucleic acids of the invention comprise a sequence complementary to at least a portion of an RNA transcript of a gene of the present invention. However, absolute complementarity, although preferred, is not required. A sequence “complementary to at least a portion of an RNA,” referred to herein, means a sequence having sufficient complementarity to be able to hybridize with the RNA, forming a stable duplex; in the case of double stranded antisense nucleic acids, a single strand of the duplex DNA may thus be tested, or triplex formation may be assayed. The ability to hybridize will depend on both the degree of complementarity and the length of the antisense nucleic acid. Generally, the larger the hybridizing nucleic acid, the more base mismatches with a RNA it may contain and still form a stable duplex (or triplex as the case may be). One skilled in the art can ascertain a tolerable degree of mismatch by use of standard procedures to determine the melting point of the hybridized complex.

[0801] Oligonucleotides that are complementary to the 5′ end of the message, e.g., the 5′ untranslated sequence up to and including the AUG initiation codon, should work most efficiently at inhibiting translation. However, sequences complementary to the 3′ untranslated sequences of mRNAs have been shown to be effective at inhibiting translation of mRNAs as well. See generally, Wagner, R., 1994, Nature 372:333-335. Thus, oligonucleotides complementary to either the 5′- or 3′- non- translated, non-coding regions of polynucleotide sequences described herein could be used in an antisense approach to inhibit translation of endogenous mRNA. Oligonucleotides complementary to the 5′ untranslated region of the mRNA should include the complement of the AUG start codon. Antisense oligonucleotides complementary to mRNA coding regions are less efficient inhibitors of translation but could be used in accordance with the invention. Whether designed to hybridize to the 5′-, 3′- or coding region of mRNA of the present invention, antisense nucleic acids should be at least six nucleotides in length, and are preferably oligonucleotides ranging from 6 to about 50 nucleotides in length. In specific aspects the oligonucleotide is at least 10 nucleotides, at least 17 nucleotides, at least 25 nucleotides or at least 50 nucleotides.

[0802] The polynucleotides of the invention can be DNA or RNA or chimeric mixtures or derivatives or modified versions thereof, single-stranded or double-stranded. The oligonucleotide can be modified at the base moiety, sugar moiety, or phosphate backbone, for example, to improve stability of the molecule, hybridization, etc. The oligonucleotide may include other appended groups such as peptides (e.g., for targeting host cell receptors in vivo), or agents facilitating transport across the cell membrane (see, e.g., Letsinger et al., 1989, Proc. Natl. Acad. Sci. U.S.A. 86:6553-6556; Lemaitre et al., 1987, Proc. Natl. Acad. Sci. 84:648-652; PCT Publication No. WO88/09810, published Dec. 15, 1988) or the blood-brain barrier (see, e.g., PCT Publication No. WO89/10134, published Apr. 25, 1988), hybridization-triggered cleavage agents. (See, e.g., Krol et al., 1988, BioTechniques 6:958-976) or intercalating agents. (See, e.g., Zon, 1988, Pharm. Res. 5:539-549). To this end, the oligonucleotide may be conjugated to another molecule, e.g., a peptide, hybridization triggered cross-linking agent, transport agent, hybridization-triggered cleavage agent, etc.

[0803] The antisense oligonucleotide may comprise at least one modified base moiety which is selected from the group including, but not limited to, 5-fluorouracil, 5-bromouracil, 5-chlorouracil, 5-iodouracil, hypoxanthine, xantine, 4-acetylcytosine, 5-(carboxyhydroxylmethyl) uracil, 5-carboxymethylaminomethyl-2-thiouridine, 5-carboxymethylaminomethyluracil, dihydrouracil, beta-D-galactosylqueosine, inosine, N6-isopentenyladenine, 1-methylguanine, 1-methylinosine, 2,2-dimethylguanine, 2-methyladenine, 2-methylguanine, 3-methylcytosine, 5-methylcytosine, N6-adenine, 7-methylguanine, 5-methylaminomethyluracil, 5-methoxyaminomethyl-2-thiouracil, beta-D-mannosylqueosine, 5′-methoxycarboxymethyluracil, 5-methoxyuracil, 2-methylthio-N6-isopentenyladenine, uracil-5-oxyacetic acid (v), wybutoxosine, pseudouracil, queosine, 2-thiocytosine, 5-methyl-2-thiouracil, 2-thiouracil, 4-thiouracil, 5-methyluracil, uracil-5-oxyacetic acid methylester, uracil-5-oxyacetic acid (v), 5-methyl-2-thiouracil, 3-(3-amino-3-N-2-carboxypropyl) uracil, (acp3)w, and 2,6-diaminopurine.

[0804] The antisense oligonucleotide may also comprise at least one modified sugar moiety selected from the group including, but not limited to, arabinose, 2-fluoroarabinose, xylulose, and hexose.

[0805] In yet another embodiment, the antisense oligonucleotide comprises at least one modified phosphate backbone selected from the group including, but not limited to, a phosphorothioate, a phosphorodithioate, a phosphoramidothioate, a phosphoramidate, a phosphordiamidate, a methylphosphonate, an alkyl phosphotriester, and a formacetal or analog thereof.

[0806] In yet another embodiment, the antisense oligonucleotide is an a-anomeric oligonucleotide: An a-anomeric oligonucleotide forms specific double-stranded hybrids with complementary RNA in which, contrary to the usual b-units, the strands run parallel to each other (Gautier et al., 1987, Nucl. Acids Res. 15:6625-6641). The oligonucleotide is a 2′-0-methylribonucleotide (Inoue et al., 1987, Nucl. Acids Res. 15:6131-6148), or a chimeric RNA-DNA analogue (Inoue et al., 1987, FEBS Lett. 215:327-330).

[0807] Polynucleotides of the invention may be synthesized by standard methods known in the art, e.g. by use of an automated DNA synthesizer (such as are commercially available from Biosearch, Applied Biosystems, etc.). As examples, phosphorothioate oligonucleotides may be synthesized by-the method of Stein et al. (1988, Nucl. Acids Res. 16:3209), methylphosphonate oligonucleotides can be prepared by use of controlled pore glass polymer supports (Sarin et al., 1988, Proc. Natl. Acad. Sci. U.S.A. 85:7448-7451), etc.

[0808] While antisense nucleotides complementary to the coding region sequence could be used, those complementary to the transcribed untranslated region are most preferred.

[0809] Potential antagonists according to the invention also include catalytic RNA, or a ribozyme (See, e.g., PCT International Publication WO 90/11364, published Oct. 4, 1990; Sarver et al, Science 247:1222-1225 (1990). While ribozymes that cleave mRNA at site specific recognition sequences can be used to destroy mRNAs, the use of hammerhead ribozymes is preferred. Hammerhead ribozymes cleave mRNAs at locations dictated by flanking regions that form complementary base pairs with the target mRNA. The sole requirement is that the target mRNA have the following sequence of two bases: 5′-UG-3′. The construction and production of hammerhead ribozymes is well known in the art and is described more fully in Haseloff and Gerlach, Nature 334:585-591 (1988). There are numerous potential hammerhead ribozyme cleavage sites within the nucleotide sequence of SEQ ID NO: X. Preferably, the ribozyme is engineered so that the cleavage recognition site is located near the 5′ end of the mRNA; i.e., to increase efficiency and minimize the intracellular accumulation of non-functional mRNA transcripts.

[0810] As in the antisense approach, the ribozymes of the invention can be composed of modified oligonucleotides (e.g. for improved stability, targeting, etc.) and should be delivered to cells which express in vivo. DNA constructs encoding the ribozyme may be introduced into the cell in the same manner as described above for the introduction of antisense encoding DNA. A preferred method of delivery involves using a DNA construct “encoding” the ribozyme under the control of a strong constitutive promoter, such as, for example, pol III or pol II promoter, so that transfected cells will produce sufficient quantities of the ribozyme to destroy endogenous messages and inhibit translation. Since ribozymes unlike antisense molecules, are catalytic, a lower intracellular concentration is required for efficiency.

[0811] Antagonist/agonist compounds may be employed to inhibit the cell growth and proliferation effects of the polypeptides of the present invention on neoplastic cells and tissues, i.e. stimulation of angiogenesis of tumors, and, therefore, retard or prevent abnormal cellular growth and proliferation, for example, in tumor formation or growth.

[0812] The antagonist/agonist may also be employed to prevent hyper-vascular diseases, and prevent the proliferation of epithelial lens cells after extracapsular cataract surgery. Prevention of the mitogenic activity of the polypeptides of the present invention may also be desirous in cases such as restenosis after balloon angioplasty.

[0813] The antagonist/agonist may also be employed to prevent the growth of scar tissue during wound healing.

[0814] The antagonist/agonist may also be employed to treat the diseases described herein.

[0815] Thus, the invention provides a method of treating disorders or diseases, including but not limited to the disorders or diseases listed throughout this application, associated with overexpression of a polynucleotide of the present invention by administering to a patient (a) an antisense molecule directed to the polynucleotide of the present invention, and/or (b) a ribozyme directed to the polynucleotide of the present invention.

[0816] Binding Peptides and Other Molecules

[0817] The invention also encompasses screening methods for identifying polypeptides and nonpolypeptides that bind ovarian antigen polypeptides, and the ovarian antigen binding molecules identified thereby. These binding molecules are useful, for example, as agonists and antagonists of the ovarian antigen polypeptides. Such agonists and antagonists can be used, in accordance with the invention, in the therapeutic embodiments described in detail, below.

[0818] This method comprises the steps of: (1) contacting ovarian antigen polypeptides or ovarian antigen-like polypeptides with a plurality of molecules; and (2) identifying a molecule that binds the ovarian antigen polypeptides or ovarian antigen-like polypeptides.

[0819] The step of contacting the ovarian antigen polypeptides or ovarian antigen-like polypeptides with the plurality of molecules may be effected in a number of ways. For example, one may contemplate immobilizing the ovarian antigen polypeptides or ovarian antigen-like polypeptides on a solid support and bringing a solution of the plurality of molecules in contact with the immobilized ovarian antigen polypeptides or ovarian antigen-like polypeptides. Such a procedure would be akin to an affinity chromatographic process, with the affinity matrix being comprised of the immobilized ovarian antigen polypeptides or ovarian antigen-like polypeptides. The molecules having a selective affinity for the ovarian antigen polypeptides or ovarian antigen-like polypeptides can then be purified by affinity selection. The nature of the solid support, process for attachment of the ovarian antigen polypeptides or ovarian antigen-like polypeptides to the solid support, solvent, and conditions of the affinity isolation or selection are largely conventional and well known to those of ordinary skill in the art.

[0820] Alternatively, one may also separate a plurality of polypeptides into substantially separate fractions comprising a subset of or individual polypeptides. For instance, one can separate the plurality of polypeptides by gel electrophoresis, column chromatography, or like method known to those of ordinary skill for the separation of polypeptides. The individual polypeptides can also be produced by a transformed host cell in such a way as to be expressed on or about its outer surface (e.g., a recombinant phage). Individual isolates can then be “probed” by ovarian antigen polypeptides or ovarian antigen-like polypeptides, optionally in the presence of an inducer should one be required for expression, to determine if any selective affinity interaction takes place between the ovarian antigen polypeptides or ovarian antigen-like polypeptides and the individual clone. Prior to contacting the ovarian antigen polypeptides or ovarian antigen-like polypeptides with each fraction comprising individual polypeptides, the polypeptides could first be transferred to a solid support for additional convenience. Such a solid support may simply be a piece of filter membrane, such as one made of nitrocellulose or nylon. In this manner, positive clones could be identified from a collection of transformed host cells of an expression library, which harbor a DNA construct encoding a polypeptide having a selective affinity for ovarian antigen polypeptides or ovarian antigen-like polypeptides. Furthermore, the amino acid sequence of the polypeptide having a selective affinity for the ovarian antigen polypeptides or ovarian antigen-like polypeptides can be determined directly by conventional means or the coding sequence of the DNA encoding the polypeptide can frequently be determined more conveniently. The primary sequence can then be deduced from the corresponding DNA sequence. If the amino acid sequence is to be determined from the polypeptide itself, one may use microsequencing techniques. The sequencing technique may include mass spectroscopy.

[0821] In certain situations, it may be desirable to wash away any unbound ovarian antigen polypeptides or ovarian antigen-like polypeptides, or alternatively, unbound polypeptides, from a mixture of the ovarian antigen polypeptides or ovarian antigen-like polypeptides and the plurality of polypeptides prior to attempting to determine or to detect the presence of a selective affinity interaction. Such a wash step may be particularly desirable when the ovarian antigen polypeptides or ovarian antigen-like polypeptides or the plurality of polypeptides is bound to a solid support.

[0822] The plurality of molecules provided according to this method may be provided by way of diversity libraries, such as random or combinatorial peptide or nonpeptide libraries which can be screened for molecules that specifically bind ovarian antigen polypeptides. Many libraries are known in the art that can be used, e.g., chemically synthesized libraries, recombinant (e.g., phage display libraries), and in vitro translation-based libraries. Examples of chemically synthesized libraries are described in Fodor et al., 1991, Science 251:767-773; Houghten et al., 1991, Nature 354:84-86; Lam et al., 1991, Nature 354:82-84; Medynski, 1994, Bio/Technology 12:709-710;Gallop et al., 1994, J. Medicinal Chemistry 37(9):1233-1251; Ohlmeyer et al., 1993, Proc. Natl. Acad. Sci. USA 90:10922-10926; Erb et al., 1994, Proc. Natl. Acad. Sci. USA 91:11422-11426; Houghten et al., 1992, Biotechniques 13:412; Jayawickreme et al., 1994, Proc. Natl. Acad. Sci. USA 91:1614-1618; Salmon et al., 1993, Proc. Natl. Acad. Sci. USA 90:11708-11712; PCT Publication No. WO 93/20242; and Brenner and Lerner, 1992, Proc. Natl. Acad. Sci. USA 89:5381-5383.

[0823] Examples of phage display libraries are described in Scott and Smith, 1990, Science 249:386-390; Devlin et al., 1990, Science, 249:404-406; Christian, R. B., et al., 1992, J. Mol. Biol. 227:711-718); Lenstra, 1992, J. Immunol. Meth. 152:149-157; Kay et al., 1993, Gene 128:59-65; and PCT Publication No. WO 94/18318 dated Aug. 18, 1994.

[0824] In vitro translation-based libraries include but are not limited to those described in PCT Publication No. WO 91/05058 dated Apr. 18, 1991; and Mattheakis et al., 1994, Proc. Natl. Acad. Sci. USA 91:9022-9026.

[0825] By way of examples of nonpeptide libraries, a benzodiazepine library (see e.g., Bunin et al., 1994, Proc. Natl. Acad. Sci. USA 91:4708-4712) can be adapted for use. Peptoid libraries (Simon et al., 1992, Proc. Natl. Acad. Sci. USA 89:9367-9371) can also be used. Another example of a library that can be used, in which the amide functionalities in peptides have been permethylated to generate a chemically transformed combinatorial library, is described by Ostresh et al. (1994, Proc. Natl. Acad. Sci. USA 91:11138-11142).

[0826] The variety of non-peptide libraries that are useful in the present invention is great. For example, Ecker and Crooke, 1995, Bio/Technology 13:351-360 list benzodiazepines, hydantoins, piperazinediones, biphenyls, sugar analogs, beta-mercaptoketones, arylacetic acids, acylpiperidines, benzopyrans, cubanes, xanthines, aminimides, and oxazolones as among the chemical species that form the basis of various libraries.

[0827] Non-peptide libraries can be classified broadly into two types: decorated monomers and oligomers. Decorated monomer libraries employ a relatively simple scaffold structure upon which a variety functional groups is added. Often the scaffold will be a molecule with a known useful pharmacological activity. For example, the scaffold might be the benzodiazepine structure.

[0828] Non-peptide oligomer libraries utilize a large number of monomers that are assembled together in ways that create new shapes that depend on the order of the monomers. Among the monomer units that have been used are carbamates, pyrrolinones, and morpholinos. Peptoids, peptide-like oligomers in which the side chain is attached to the alpha amino group rather than the alpha carbon, form the basis of another version of non-peptide oligomer libraries. The first non-peptide oligomer libraries utilized a single type of monomer and thus contained a repeating backbone. Recent libraries have utilized more than one monomer, giving the libraries added flexibility.

[0829] Screening the libraries can be accomplished by any of a variety of commonly known methods. See, e.g., the following references, which disclose screening of peptide libraries: Parmley and Smith, 1989, Adv. Exp. Med. Biol. 251:215-218; Scott and Smith, 1990, Science 249:386-390; Fowlkes et al., 1992; BioTechniques 13:422-427; Oldenburg et al., 1992, Proc. Natl. Acad. Sci. USA 89:5393-5397; Yu et al., 1994, Cell 76:933-945; Staudt et al., 1988, Science 241:577-580; Bock et al., 1992, Nature 355:564-566; Tuerk et al., 1992, Proc. Natl. Acad. Sci. USA 89:6988-6992; Ellington et al., 1992, Nature 355:850-852; U.S. Pat. No. 5,096,815, U.S. Pat. No. 5,223,409, and U.S. Pat. No. 5,198,346, all to Ladner et al.; Rebar and Pabo, 1993, Science 263:671-673; and CT Publication No. WO 94/18318.

[0830] In a specific embodiment, screening to identify a molecule that binds ovarian antigen polypeptides can be carried out by contacting the library members with an ovarian antigen polypeptides or ovarian antigen-like polypeptides immobilized on a solid phase and harvesting those library members that bind to the ovarian antigen polypeptides or ovarian antigen-like polypeptides. Examples of such screening methods, termed “panning” techniques are described by way of example in Parmley and Smith, 1988, Gene 73:305-318; Fowlkes et al., 1992, BioTechniques 13:422-427; International Publication No. WO 94/18318; and in references cited herein.

[0831] In another embodiment, the two-hybrid system for selecting interacting proteins in yeast (Fields and Song, 1989, Nature 340:245-246; Chien et al., 1991, Proc. Natl. Acad. Sci. USA 88:9578-9582) can be used to identify molecules that specifically bind to ovarian antigen polypeptides or ovarian antigen-like polypeptides.

[0832] Where the ovarian antigen binding molecule is a polypeptide, the polypeptide can be conveniently selected from any peptide library, including random peptide libraries, combinatorial peptide libraries, or biased peptide libraries. The term “biased” is used herein to mean that the method of generating the library is manipulated so as to restrict one or more parameters that govern the diversity of the resulting collection of molecules, in this case peptides.

[0833] Thus, a truly random peptide library would generate a collection of peptides in which the probability of finding a particular amino acid at a given position of the peptide is the same for all 20 amino acids. A bias can be introduced into the library, however, by specifying, for example, that a lysine occurs every fifth amino acid or that positions 4, 8, and 9 of a decapeptide library be fixed to include only arginine. Clearly, many types of biases can be contemplated, and the present invention is not restricted to any particular bias. Furthermore, the present invention contemplates specific types of peptide libraries, such as phage displayed peptide libraries and those that utilize a DNA construct comprising a lambda phage vector with a DNA insert.

[0834] As mentioned above, in the case of an ovarian antigen binding molecule that is a polypeptide, the polypeptide may have about 6 to less than about 60 amino acid residues, preferably about 6 to about 10 amino acid residues, and most preferably, about 6 to about 22 amino acids. In another embodiment, an ovarian antigen binding polypeptide has in the range of 15-100 amino acids, or 20-50 amino acids.

[0835] The selected ovarian antigen binding polypeptide can be obtained by chemical synthesis or recombinant expression.

[0836] Other Activities

[0837] A polypeptide, polynucleotide, agonist, or antagonist of the present invention, as a result of the ability to stimulate vascular endothelial cell growth, may be employed in treatment for stimulating re-vascularization of ischemic tissues due to various disease conditions such as thrombosis, arteriosclerosis, and other cardiovascular conditions. The polypeptide, polynucleotide, agonist, or antagonist of the present invention may also be employed to stimulate angiogenesis and limb regeneration, as discussed above.

[0838] A polypeptide, polynucleotide, agonist, or antagonist of the present invention may also be employed for treating wounds due to injuries, bums, post-operative tissue repair, and ulcers since they are mitogenic to various cells of different origins, such as fibroblast cells and skeletal muscle cells, and therefore, facilitate the repair or replacement of damaged or diseased tissue.

[0839] A polypeptide, polynucleotide, agonist, or antagonist of the present invention may also be employed to stimulate neuronal growth and to treat and prevent neuronal damage which occurs in certain neuronal disorders or neuro-degenerative conditions such as Alzheimer's disease, Parkinson's disease, and AIDS-related complex. A polypeptide, polynucleotide, agonist, or antagonist of the present invention may have the ability to stimulate chondrocyte growth; therefore, they may be employed to enhance bone and periodontal regeneration and aid in tissue transplants or bone grafts.

[0840] A polypeptide, polynucleotide, agonist, or antagonist of the present invention may be also employed to prevent skin aging due to sunburn by stimulating keratinocyte growth.

[0841] A polypeptide, polynucleotide, agonist, or antagonist of the present invention may also be employed for preventing hair loss, since FGF family members activate hair-forming cells and promotes melanocyte growth. Along the same lines, a polypeptide, polynucleotide, agonist, or antagonist of the present invention may be employed to stimulate growth and differentiation of hematopoietic cells and bone marrow cells when used in combination with other cytokines.

[0842] A polypeptide, polynucleotide, agonist, or antagonist of the present invention may also be employed to maintain organs before transplantation or for supporting cell culture of primary tissues. A polypeptide, polynucleotide, agonist, or antagonist of the present invention may also be employed for inducing tissue of mesodermal origin to differentiate in early embryos.

[0843] A polypeptide, polynucleotide, agonist, or antagonist of the present invention may also increase or decrease the differentiation or proliferation of embryonic stem cells, besides, as discussed above, hematopoietic lineage.

[0844] A polypeptide, polynucleotide, agonist, or antagonist of the present invention may also be used to modulate mammalian characteristics, such as body height, weight, hair color, eye color, skin, percentage of adipose tissue, pigmentation, size, and shape (e.g., cosmetic surgery). Similarly, a polypeptide, polynucleotide, agonist, or antagonist of the present invention may be used to modulate mammalian metabolism affecting catabolism, anabolism, processing, utilization, and storage of energy.

[0845] A polypeptide, polynucleotide, agonist, or antagonist of the present invention may be used to change a mammal's mental state or physical state by influencing biorhythms, caricadic rhythms, depression (including depressive disorders), tendency for violence, tolerance for pain, reproductive capabilities (preferably by Activin or Inhibin-like activity), hormonal or endocrine levels, appetite, libido, memory, stress, or other cognitive qualities.

[0846] A polypeptide, polynucleotide, agonist, or antagonist of the present invention may also be used as a food additive or preservative, such as to increase or decrease storage capabilities, fat content, lipid, protein, carbohydrate, vitamins, minerals, cofactors or other nutritional components.

[0847] The above-recited applications have uses in a wide variety of hosts. Such hosts include, but are not limited to, human, murine, rabbit, goat, guinea pig, camel, horse, mouse, rat, hamster, pig, micro-pig, chicken, goat, cow, sheep, dog, cat, non-human primate, and human. In specific embodiments, the host is a mouse, rabbit, goat, guinea pig, chicken, rat, hamster, pig, sheep, dog or cat. In preferred embodiments, the host is a mammal. In most preferred embodiments, the host is a human.

[0848] Other Preferred Embodiments

[0849] Other preferred embodiments of the claimed invention include an isolated nucleic acid molecule comprising a nucleotide sequence which is at least 95% identical to a sequence of at least about 50 contiguous nucleotides in the nucleotide sequence of SEQ ID NO: X or the complementary strand thereto, the nucleotide sequence as defined in column 5 of Table 1 or columns 8 and 9 of Table 2 or the complementary strand thereto, and/or cDNA contained in Clone ID NO: Z.

[0850] Also preferred is a nucleic acid molecule wherein said sequence of contiguous nucleotides is included in the nucleotide sequence of the portion of SEQ ID NO: X as defined in column 5, “ORF (From-To)”, in Table 1.

[0851] Also preferred is a nucleic acid molecule wherein said sequence of contiguous nucleotides is included in the nucleotide sequence of the portion of SEQ ID NO: X as defined in columns 8 and 9, “NT From” and “NT To” respectively, in Table 2.

[0852] Also preferred is an isolated nucleic acid molecule comprising a nucleotide sequence which is at least 95% identical to a sequence of at least about 150 contiguous nucleotides in the nucleotide sequence of SEQ ID NO: X or the complementary strand thereto, the nucleotide sequence as defined in column 5 of Table 1 or columns 8 and 9 of Table 2 or the complementary strand thereto, and/or cDNA contained in Clone ID NO: Z.

[0853] Further preferred is an isolated nucleic acid molecule comprising a nucleotide sequence which is at least 95% identical to a sequence of at least about 500 contiguous nucleotides in the nucleotide sequence of SEQ ID NO: X or the complementary strand thereto, the nucleotide sequence as defined in column 5 of Table 1 or columns 8 and 9 of Table 2 or the complementary strand thereto, and/or cDNA contained in Clone ID NO: Z.

[0854] A further preferred embodiment is a nucleic acid molecule comprising a necleotide sequence which is at least 95% identical to the nucleotide sequence of the portion of SEQ ID NO: X defined in column 5, “ORF (From-To)”, in Table 1.

[0855] A further preferred embodiment is a nucleic acid molecule comprising a nucleotide sequence which is at least 95% identical to the nucleotide sequence of the portion of SEQ ID NO: X defined in columns 8 and 9, “NT From” and “NT To”, respectively, in Table 2.

[0856] A further preferred embodiment is an isolated nucleic acid molecule comprising a nucleotide sequence which is at least 95% identical to the complete nucleotide sequence of SEQ ID NO: X or the complementary strand thereto, the nucleotide sequence as defined in column 5 of Table 1 or columns 8 and 9 of Table 2 or the complementary strand and/or cDNA contained in Clone ID NO: Z.

[0857] Also preferred is an isolated nucleic acid molecule which hybridizes under stringent hybridization conditions to a nucleic acid molecule comprising a nucleotide sequence of SEQ ID NO: X or the complementary strand thereto, the nucleotide sequence as defined in column 5 of Table 1 or columns 8 and 9 of Table 2 or the complementary strand thereto, and/or cDNA contained in Clone ID NO: Z, wherein said nucleic acid molecule which hybridizes does not hybridize under stringent hybridization conditions to a nucleic acid molecule having a nucleotide sequence consisting of only A residues or of only T residues.

[0858] Also preferred is a composition of matter comprising a DNA molecule which comprises the cDNA contained in Clone ID NO: Z.

[0859] Also preferred is an isolated nucleic acid molecule comprising a nucleotide sequence which is at least 95% identical to a sequence of at least 50 contiguous nucleotides of the cDNA sequence contained in Clone ID NO: Z.

[0860] Also preferred is an isolated nucleic acid molecule, wherein said sequence of at least 50 contiguous nucleotides is included in the nucleotide sequence of an open reading frame sequence encoded by cDNA contained in Clone ID NO: Z.

[0861] Also preferred is an isolated nucleic acid molecule comprising a nucleotide sequence which is at least 95% identical to sequence of at least 150 contiguous nucleotides in the nucleotide sequence encoded by cDNA contained in Clone ID NO: Z.

[0862] A further preferred embodiment is an isolated nucleic acid molecule comprising a nucleotide sequence which is at least 95% identical to sequence of at least 500 contiguous nucleotides in the nucleotide sequence encoded by cDNA contained in Clone ID NO: Z.

[0863] A further preferred embodiment is an isolated nucleic acid molecule comprising a nucleotide sequence which is at least 95% identical to the complete nucleotide sequence encoded by cDNA contained in Clone ID NO: Z.

[0864] A further preferred embodiment is a method for detecting in a biological sample a nucleic acid molecule comprising a nucleotide sequence which is at least 95% identical to a sequence of at least 50 contiguous nucleotides in a sequence selected from the group consisting of: a nucleotide sequence of SEQ ID NO: X or the complementary strand thereto; the nucleotide sequence as defined in column 5 of Table 1 or columns 8 and 9 of Table 2 or the complementary strand thereto; and a nucleotide sequence encoded by cDNA contained in Clone ID NO: Z; which method comprises a step of comparing a nucleotide sequence of at least one nucleic acid molecule in said sample with a sequence selected from said group and determining whether the sequence of said nucleic acid molecule in said sample is at least 95% identical to said selected sequence.

[0865] Also preferred is the above method wherein said step of comparing sequences comprises determining the extent of nucleic acid hybridization between nucleic acid molecules in said sample and a nucleic acid molecule comprising said sequence selected from said group. Similarly, also preferred is the above method wherein said step of comparing sequences is performed by comparing the nucleotide sequence determined from a nucleic acid molecule in said sample with said sequence selected from said group. The nucleic acid molecules can comprise DNA molecules or RNA molecules.

[0866] A further preferred embodiment is a method for identifying the species, tissue or cell type of a biological sample which method comprises a step of detecting nucleic acid molecules in said sample, if any, comprising a nucleotide sequence that is at least 95% identical to a sequence of at least 50 contiguous nucleotides in a sequence selected from the group consisting of: a nucleotide sequence of SEQ ID NO: X or the complementary strand thereto; the nucleotide sequence as defined in column 5 of Table 1 or columns 8 and 9 of Table 2 or the complementary strand thereto; and a nucleotide sequence of the cDNA contained in Clone ID NO: Z.

[0867] The method for identifying the species, tissue or cell type of a biological sample can comprise a step of detecting nucleic acid molecules comprising a nucleotide sequence in a panel of at least two nucleotide sequences, wherein at least one sequence in said panel is at least 95% identical to a sequence of at least 50 contiguous nucleotides in a sequence selected from said group.

[0868] Also preferred is a method for diagnosing in a subject a pathological condition associated with abnormal structure or expression of a nucleotide sequence of SEQ ID NO: X or the complementary strand thereto; the nucleotide sequence as defined in column 5 of Table 1 or columns 8 and 9 of Table 2 or the complementary strand thereto; or the cDNA contained in Clone ID NO: Z which encodes a protein, wherein the method comprises a step of detecting in a biological sample obtained from said subject nucleic acid molecules, if any, comprising a nucleotide sequence that is at least 95% identical to a sequence of at least 50 contiguous nucleotides in a sequence selected from the group consisting of: a nucleotide sequence of SEQ ID NO: X or the complementary strand thereto; the nucleotide sequence as defined in column 5 of Table 1 or columns 8 and 9 of Table 2 or the complementary strand thereto; and a nucleotide sequence of cDNA contained in Clone ID NO: Z.

[0869] The method for diagnosing a pathological condition can comprise a step of detecting nucleic acid molecules comprising a nucleotide sequence in a panel of at least two nucleotide sequences, wherein at least one sequence in said panel is at least 95% identical to a sequence of at least 50 contiguous nucleotides in a sequence selected from said group.

[0870] Also preferred is a composition of matter comprising isolated nucleic acid molecules wherein the nucleotide sequences of said nucleic acid molecules comprise a panel of at least two nucleotide sequences, wherein at least one sequence in said panel is at least 95% identical to a sequence of at least 50 contiguous nucleotides in a sequence selected from the group consisting of: a nucleotide sequence of SEQ ID NO: X or the complementary strand thereto; the nucleotide sequence as defined in column 5 of Table 1 or columns 8 and 9 of Table 2 or the complementary strand thereto; and a nucleotide sequence encoded by cDNA contained in Clone ID NO: Z. The nucleic acid molecules can comprise DNA molecules or RNA molecules.

[0871] Also preferred is a composition of matter comprising isolated nucleic acid molecules wherein the nucleotide sequences of said nucleic acid molecules comprise a DNA microarray or “chip” of at least 1, 2, 3, 4, 5, 6, 7, 8, 9, 10, 15, 20, 25, 30, 40, 50, 100, 150, 200, 250, 300, 500, 1000, 2000, 3000, or 4000 nucleotide sequences, wherein at least one sequence in said DNA microarray or “chip” is at least 95% identical to a sequence of at least 50 contiguous nucleotides in a sequence selected from the group consisting of: a nucleotide sequence of SEQ ID NO: X wherein X is any integer as defined in Table 1; and a nucleotide sequence encoded by a human cDNA clone identified by a cDNA “Clone ID” in Table 1.

[0872] Also preferred is an isolated polypeptide comprising an amino acid sequence at least 90% identical to a sequence of at least about 10 contiguous amino acids in the polypeptide sequence of SEQ ID NO: Y; a polypeptide encoded by SEQ ID NO: X or the complementary strand thereto; the polypeptide encoded by the nucleotide sequence as defined in columns 8 and 9 of Table 2; and/or a polypeptide encoded by cDNA contained in Clone ID NO: Z.

[0873] Also preferred is an isolated polypeptide comprising an amino acid sequence at least 95% identical to a sequence of at least about 30 contiguous amino acids in the amino acid sequence of SEQ ID NO: Y; a polypeptide encoded by SEQ ID NO: X or the complementary strand thereto; the polypeptide encoded by the nucleotide sequence as defined in columns 8 and 9 of Table 2; and/or a polypeptide encoded by cDNA contained in Clone ID NO: Z.

[0874] Further preferred is an isolated polypeptide comprising an amino acid sequence at least 95% identical to a sequence of at least about 100 contiguous amino acids in the amino acid sequence of SEQ ID NO: Y; a polypeptide encoded by SEQ ID NO: X or the complementary strand thereto; the polypeptide encoded by the nucleotide sequence as defined in columns 8 and 9 of Table 2; and/or a polypeptide encoded by cDNA contained in Clone ID NO: Z.

[0875] Further preferred is an isolated polypeptide comprising an amino acid sequence at least 95% identical to the complete amino acid sequence of SEQ ID NO: Y; a polypeptide encoded by SEQ ID NO: X or the complementary strand thereto; the polypeptide encoded by the nucleotide sequence as defined in columns 8 and 9 of Table 2; and/or a polypeptide encoded by cDNA contained in Clone ID NO: Z.

[0876] Further preferred is an isolated polypeptide comprising an amino acid sequence at least 90% identical to a sequence of at least about 10 contiguous amino acids in the complete amino acid sequence of a polypeptide encoded by contained in Clone ID NO: Z

[0877] Also preferred is a polypeptide wherein said sequence of contiguous amino acids is included in the amino acid sequence of a portion of said polypeptide encoded by cDNA contained in Clone ID NO: Z; a polypeptide encoded by SEQ ID NO: X or the complementary strand thereto; the polypeptide encoded by the nucleotide sequence as defined in columns 8 and 9 of Table 2; and/or the polypeptide sequence of SEQ ID NO: Y.

[0878] Also preferred is an isolated polypeptide comprising an amino acid sequence at least 95% identical to a sequence of at least about 30 contiguous amino acids in the amino acid sequence of a polypeptide encoded by the cDNA contained in Clone ID NO: Z.

[0879] Also preferred is an isolated polypeptide comprising an amino acid sequence at least 95% identical to a sequence of at least about 100 contiguous amino acids in the amino acid sequence of a polypeptide encoded by cDNA contained in Clone ID NO: Z.

[0880] Also preferred is an isolated polypeptide comprising an amino acid sequence at least 95% identical to the amino acid sequence of a polypeptide encoded by the cDNA contained in Clone ID NO: Z.

[0881] Further preferred is an isolated antibody which binds specifically to a polypeptide comprising an amino acid sequence that is at least 90% identical to a sequence of at least 10 contiguous amino acids in a sequence selected from the group consisting of: a polypeptide sequence of SEQ ID NO: Y; a polypeptide encoded by SEQ ID NO: X or the complementary strand thereto; the polypeptide encoded by the nucleotide sequence as defined in columns 8 and 9 of Table 2; and a polypeptide encoded by the cDNA contained in Clone ID NO: Z.

[0882] Further preferred is a method for detecting in a biological sample a polypeptide comprising an amino acid sequence which is at least 90% identical to a sequence of at least 10 contiguous amino acids in a sequence selected from the group consisting of: a polypeptide sequence of SEQ ID NO: Y; a polypeptide encoded by SEQ ID NO: X or the complementary strand thereto; the polypeptide encoded by the nucleotide sequence as defined in columns 8 and 9 of Table 2; and a polypeptide encoded by the cDNA contained in Clone ID NO: Z; which method comprises a step of comparing an amino acid sequence of at least one polypeptide molecule in said sample with a sequence selected from said group and determining whether the sequence of said polypeptide molecule in said sample is at least 90% identical to said sequence of at least 10 contiguous amino acids.

[0883] Also preferred is the above method wherein said step of comparing an amino acid sequence of at least one polypeptide molecule in said sample with a sequence selected from said group comprises determining the extent of specific binding of polypeptides in said sample to an antibody which binds specifically to a polypeptide comprising an amino acid sequence that is at least 90% identical to a sequence of at least 10 contiguous amino acids in a sequence selected from the group consisting of: a polypeptide sequence of SEQ ID NO: Y; a polypeptide encoded by SEQ ID NO: X or the complementary strand thereto; the polypeptide encoded by the nucleotide sequence as defined in columns 8 and 9 of Table 2; and a polypeptide encoded by the cDNA contained in Clone ID NO: Z.

[0884] Also preferred is the above method wherein said step of comparing sequences is performed by comparing the amino acid sequence determined from a polypeptide molecule in said sample with said sequence selected from said group.

[0885] Also preferred is a method for identifying the species, tissue or cell type of a biological sample which method comprises a step of detecting polypeptide molecules in said sample, if any, comprising an amino acid sequence that is at least 90% identical to a sequence of at least 10 contiguous amino acids in a sequence selected from the group consisting of: polypeptide sequence of SEQ ID NO: Y; a polypeptide encoded by SEQ ID NO: X or the complementary strand thereto; the polypeptide encoded by the nucleotide sequence as defined in columns 8 and 9 of Table 2; and a polypeptide encoded by the cDNA contained in Clone ID NO: Z.

[0886] Also preferred is the above method for identifying the species, tissue or cell type of a biological sample, which method comprises a step of detecting polypeptide molecules comprising an amino acid sequence in a panel of at least two amino acid sequences, wherein at least one sequence in said panel is at least 90% identical to a sequence of at least 10 contiguous amino acids in a sequence selected from the above group.

[0887] Also preferred is a method for diagnosing in a subject a pathological condition associated with abnormal structure or expression of a nucleic acid sequence identified in Table 1 or Table 2 encoding a polypeptide, which method comprises a step of detecting in a biological sample obtained from said subject polypeptide molecules comprising an amino acid sequence in a panel of at least two amino acid sequences, wherein at least one sequence in said panel is at least 90% identical to a sequence of at least 10 contiguous amino acids in a sequence selected from the group consisting of: polypeptide sequence of SEQ ID NO: Y; a polypeptide encoded by SEQ ID NO: X or the complementary strand thereto; the polypeptide encoded by the nucleotide sequence as defined in columns 8 and 9 of Table 2; and a polypeptide encoded by the cDNA contained in Clone ID NO: Z.

[0888] In any of these methods, the step of detecting said polypeptide molecules includes using an antibody.

[0889] Also preferred is an isolated nucleic acid molecule comprising a nucleotide sequence which is at least 95% identical to a nucleotide sequence encoding a polypeptide wherein said polypeptide comprises an amino acid sequence that is at least 90% identical to a sequence of at least 10 contiguous amino acids in a sequence selected from the group consisting of: polypeptide sequence of SEQ ID NO: Y; a polypeptide encoded by SEQ ID NO: X or the complementary strand thereto; the polypeptide encoded by the nucleotide sequence as defined in columns 8 and 9 of Table 2; and a polypeptide encoded by the cDNA contained in Clone ID NO: Z.

[0890] Also preferred is an isolated nucleic acid molecule, wherein said nucleotide sequence encoding a polypeptide has been optimized for expression of said polypeptide in a prokaryotic host.

[0891] Also preferred is a polypeptide molecule, wherein said polypeptide comprises an amino acid sequence selected from the group consisting of: polypeptide sequence of SEQ ID NO: Y; a polypeptide encoded by SEQ ID NO: X or the complementary strand thereto; the polypeptide encoded by the nucleotide sequence as defined in columns 8 and 9 of Table 2; and a polypeptide encoded by the cDNA contained in Clone ID NO: Z.

[0892] Further preferred is a method of making a recombinant vector comprising inserting any of the above isolated nucleic acid molecule into a vector. Also preferred is the recombinant vector produced by this method. Also preferred is a method of making a recombinant host cell comprising introducing the vector into a host cell, as well as the recombinant host cell produced by this method.

[0893] Also preferred is a method of making an isolated polypeptide comprising culturing this recombinant host cell under conditions such that said polypeptide is expressed and recovering said polypeptide. Also preferred is this method of making an isolated polypeptide, wherein said recombinant host cell is a eukaryotic cell and said polypeptide is a human protein comprising an amino acid sequence selected from the group consisting of: polypeptide sequence of SEQ ID NO: Y; a polypeptide encoded by SEQ ID NO: X or the complementary strand thereto; the polypeptide encoded by the nucleotide sequence as defined in columns 8 and 9 of Table 2; and a polypeptide encoded by the cDNA contained in Clone ID NO: Z. The isolated polypeptide produced by this method is also preferred.

[0894] Also preferred is a method of treatment of an individual in need of an increased level of a protein activity, which method comprises administering to such an individual a Therapeutic comprising an amount of an isolated polypeptide, polynucleotide, immunogenic fragment or analogue thereof, binding agent, antibody, or antigen binding fragment of the claimed invention effective to increase the level of said protein activity in said individual.

[0895] Also preferred is a method of treatment of an individual in need of a decreased level of a protein activity, which method comprised administering to such an individual a Therapeutic comprising an amount of an isolated polypeptide, polynucleotide, immunogenic fragment or analogue thereof, binding agent, antibody, or antigen binding fragment of the claimed invention effective to decrease the level of said protein activity in said individual.

[0896] Also preferred is a method of treatment of an individual in need of a specific delivery of toxic compositions to diseased cells (e.g., tumors, leukemias or lymphomas), which method comprises administering to such an individual a Therapeutic comprising an amount of an isolated polypeptide of the invention, including, but not limited to a binding agent, or antibody of the claimed invention that are associated with toxin or cytotoxic prodrugs.

[0897] Having generally described the invention, the same will be more readily understood by reference to the following examples, which are provided by way of illustration and are not intended as limiting.

TABLE 6

| ATCC Deposits | Deposit Date | ATCC Designation Number |
|---|---|---|
| LP01, LP02, LP03, | May-20-97 | 209059, 209060, 209061, 209062, |
| LP04, LP05, LP06, | | 209063, 209064, 209065, 209066, |
| LP07, LP08, LP09, | | 209067, 209068, 209069 |
| LP10, LP11, | | |
| LP12 | Jan-12-98 | 209579 |
| LP13 | Jan-12-98 | 209578 |
| LP14 | Jul-16-98 | 203067 |
| LP15 | Jul-16-98 | 203068 |
| LP16 | Feb-1-99 | 203609 |
| LP17 | Feb-1-99 | 203610 |
| LP20 | Nov-17-98 | 203485 |
| LP21 | Jun-18-99 | PTA-252 |
| LP22 | Jun-18-99 | PTA-253 |
| LP23 | Dec-22-99 | PTA-1081 |
| PA108Amp | Jun-5-00 | PTA-1982 |
| PA108Kan | Jun-5-00 | PTA-1985 |

### EXAMPLES

### Example 1

### Isolation of a Selected cDNA Clone From the Deposited Sample

[0898] Each Clone ID NO: Z is contained in a plasmid. Table 7 identifies the vectors used to construct the cDNA library from which each clone was isolated. In many cases, the vector used to construct the library is a phage vector from which a plasmid has been excised. The following correlates the related plasmid for each phage vector used in constructing the cDNA library. For example, where a particular clone is identified in Table 7 as being isolated in the vector “Lambda Zap,” the corresponding deposited clone is in “pBluescript.”

Vector Used to Construct Library Corresponding Deposited Plasmid

| | |
|---|---|
| Lambda Zap | pBluescript (pBS) |
| Uni-Zap XR | pBluescript (pBS) |
| Zap Express | pBK |
| lafmid BA | plafmid BA |
| pSport 1 | pSport 1 |
| pCMVSport 2.0 | pCMVSport 2.0 |
| pCMVSport 3.0 | pCMVSport 3.0 |
| pCR ®2.1 | pCR ®2.1 |

[0899] Vectors Lambda Zap (U.S. Pat. Nos. 5,128,256 and 5,286,636), Uni-Zap XR (U.S. Pat. Nos. 5,128, 256 and 5,286,636), Zap Express (U.S. Pat. Nos. 5,128,256 and 5,286,636), pBluescript (pBS) (Short, J. M. et al., Nucleic Acids Res. 16:7583-7600 (1988); Alting-Mees, M. A. and Short, J. M., Nucleic Acids Res. 17:9494 (1989)) and pBK (Alting-Mees, M. A. et al., Strategies 5:58-61 (1992)) are commercially available from Stratagene Cloning Systems, Inc., 11011 N. Torrey Pines Road, La Jolla, Calif., 92037. pBS contains an ampicillin resistance gene and pBK contains a neomycin resistance gene. Both can be transformned into E. coli strain XL-1 Blue, also available from Stratagene. pBS comes in 4 forms SK+, SK−, KS+ and KS. The S and K refers to the orientation of the polylinker to the T7 and T3 primer sequences which flank the polylinker region (“S” is for SacI and “K” is for KpnI which are the first sites on each respective end of the linker). “+” or “−” refer to the orientation of the fl origin of replication (“ori”), such that in one orientation, single stranded rescue initiated from the fl ori generates sense strand DNA and in the other, antisense.

[0900] Vectors pSport1, pCMVSport 2.0 and pCMVSport 3.0, were obtained from Life Technologies, Inc., P. O. Box 6009, Gaithersburg, Md. 20897. All Sport vectors contain an ampicillin resistance gene and may be transformed into E. coli strain DH10B, also available from Life Technologies. (See, for instance, Gruber, C. E., et al., Focus 15:59 (1993).) Vector lafmid BA (Bento Soares, Columbia University, N.Y.) contains an ampicillin resistance gene and can be transformed into E. coli strain XL-1 Blue. Vector pCR®2.1, which is available from Invitrogen, 1600 Faraday Avenue, Carlsbad, Calif. 92008, contains an ampicillin resistance gene and may be transformed into E. coli strain DH10B, available from Life Technologies. (See, for instance, Clark, J. M., Nuc. Acids Res. 16:9677-9686.(1988) and Mead, D. et al., Bio/Technology 9: (1991).) Preferably, a polynucleotide of the present invention does not comprise the vector sequences identified for the particular clone in Table 7, as well as the corresponding plasmid vector sequences designated above.

[0901] The deposited material in the sample assigned the ATCC Deposit Number cited by reference to Tables 1, 2, 6 and 7 for any given cDNA clone also may contain one or more additional plasmids, each comprising a cDNA clone different from that given clone. Thus, deposits sharing the same ATCC Deposit Number contain at least a plasmid for each Clone ID NO: Z.

TABLE 7

| | | | ATCC |
|---|---|---|---|
| Libraries owned by Catalog | Catalog Description | Vector | Deposit |
| HUKA HUKB HUKC HUKD HUKE | Human Uterine Cancer | Lambda ZAP II | LP01 |
| HUKF HUKG | | | |
| HCNA HCNB | Human Colon | Lambda Zap II | LP01 |
| HFFA | Human Fetal Brain, random primed | Lambda Zap II | LP01 |
| HTWA | Resting T-Cell | Lambda ZAP II | LP01 |
| HBQA | Early Stage Human Brain, random | Lambda ZAP II | LP01 |
| | primed | | |
| HLMB HLMF HLMG HLMH HLMI | breast lymph node CDNA library | Lambda ZAP II | LP01 |
| HLMJ HLMM HLMN | | | |
| HCQA HCQB | human colon cancer | Lamda ZAP II | LP01 |
| HMEA HMEC HMED HMEE | Human Microvascular Endothelial | Lambda ZAP II | LP01 |
| HMEF HMEG HMEI HMEJ HMEK | Cells, fract. A | | |
| HMEL | | | |
| HUSA HUSC | Human Umbilical Vein Endothelial | Lambda ZAP II | LP01 |
| | Cells, fract. A | | |
| HLQA HLQB | Hepatocellular Tumor | Lambda ZAP II | LP01 |
| HHGA HHGB HHGC HHGD | Hemangiopericytoma | Lambda ZAP II | LP01 |
| HSDM | Human Striatum Depression, re-rescue | Lambda ZAP II | LP01 |
| HUSH | H Umbilical Vein Endothelial Cells, | Lambda ZAP II | LP01 |
| | frac A, re-excision | | |
| HSGS | Salivary gland, subtracted | Lambda ZAP II | LP01 |
| HFXA HFXB HFXC HFXD HFXE | Brain frontal cortex | Lambda ZAP II | LP01 |
| HFXF HFXG HFXH | | | |
| HPQA HPQB HPQC | PERM TF274 | Lambda ZAP II | LP01 |
| HFXJ HFXK | Brain Frontal Cortex, re-excision | Lambda ZAP II | LP01 |
| HCWA HCWB HCWC HCWD | CD34 positive cells (Cord Blood) | ZAP Express | LP02 |
| HCWE HCWF HCWG HCWH | | | |
| HCWI HCWJ HCWK | | | |
| HCUA HCUB HCUC | CD34 depleted Buffy Coat (Cord | ZAP Express | LP02 |
| | Blood) | | |
| HRSM | A-14 cell line | ZAP Express | LP02 |
| HRSA | A1-CELL LINE | ZAP Express | LP02 |
| HCUD HCUE HCUF HCUG HCUH | CD34 depleted Buffy Coat (Cord | ZAP Express | LP02 |
| HCUI | Blood), re-excision | | |
| HBXE HBXF HBXG | H. Whole Brain #2, re-excision | ZAP Express | LP02 |
| HRLM | L8 cell line | ZAP Express | LP02 |
| HBXA HBXB HBXC HBXD | Human Whole Brain #2 - Oligo dT > | ZAP Express | LP02 |
| | 1.5 Kb | | |
| HUDA HUDB HUDC | Testes | ZAP Express | LP02 |
| HHTM HHTN HHTO | H. hypothalamus, frac A; re-excision | ZAP Express | LP02 |
| HHTL | H. hypothalamus, frac A | ZAP Express | LP02 |
| HASA HASD | Human Adult Spleen | Uni-ZAP XR | LP03 |
| HFKC HFKD HFKE HFKF HFKG | Human Fetal Kidney | Uni-ZAP XR | LP03 |
| HE8A HE8B HE8C HE8D HE8E | Human 8 Week Whole Embryo | Uni-ZAP XR | LP03 |
| HE8F HE8M HE8N | | | |
| HGBA HGBD HGBE HGBF HGBG | Human Gall Bladder | Uni-ZAP XR | LP03 |
| HGBH HGBI | | | |
| HLHA HLHB HLHC HLHD HLHE | Human Fetal Lung III | Uni-ZAP XR | LP03 |
| HLHF HLHG HLHH HLHQ | | | |
| HPMA HPMB HPMC HPMD HPME | Human Placenta | Uni-ZAP XR | LP03 |
| HPMF HPMG HPMH | | | |
| HPRA HPRB HPRC HPRD | Human Prostate | Uni-ZAP XR | LP03 |
| HSIA HSIC HSID HSIE | Human Adult Small Intestine | Uni-ZAP XR | LP03 |
| HTEA HTEB HTEC HTED HTEE | Human Testes | Uni-ZAP XR | LP03 |
| HTEF HTEG HTEH HTEI HTEJ | | | |
| HTEK | | | |
| HTPA HTPB HTPC HTPD HTPE | Human Pancreas Tumor | Uni-ZAP XR | LP03 |
| HTTA HTTB HTTC HTTD HTTE | Human Testes Tumor | Uni-ZAP XR | LP03 |
| HTTF | | | |
| HAPA HAPB HAPC HAPM | Human Adult Pulmonary | Uni-ZAP XR | LP03 |
| HETA HETB HETC HETD HETE | Human Endometrial Tumor | Uni-ZAP XR | LP03 |
| HETF HETG HETH HETI | | | |
| HHFB HHFC HHFD HHFE HHFF | Human Fetal Heart | Uni-ZAP XR | LP03 |
| HHFG HHFH HHFI | | | |
| HHPB HHPC HHPD HHPE HHPF | Human Hippocampus | Uni-ZAP XR | LP03 |
| HHPG HHPH | | | |
| HCE1 HCE2 HCE3 HCE4 HCE5 | Human Cerebellum | Uni-ZAP XR | LP03 |
| HCEB HCEC HCED HCEE HCEF | | | |
| HCEG | | | |
| HUVB HUVC HUVD HUVE | Human Umbilical Vein, Endo. remake | Uni-ZAP XR | LP03 |
| HSTA HSTB HSTC HSTD | Human Skin Tumor | Uni-ZAP XR | LP03 |
| HTAA HTAB HTAC HTAD HTAE | Human Activated T-Cells | Uni-ZAP XR | LP03 |
| HFEA HFEB HFEC | Human Fetal Epithelium (Skin) | Uni-ZAP XR | LP03 |
| HJPA HJPB HJPC HJPD | HUMAN JURKAT MEMBRANE | Uni-ZAP XR | LP03 |
| | BOUND POLYSOMES | | |
| HESA | Human epithelioid sarcoma | Uni-Zap XR | LP03 |
| HLTA HLTB HLTC HLTD HLTE | Human T-Cell Lymphoma | Uni-ZAP XR | LP03 |
| HLTF | | | |
| HFTA HFTB HFTC HFTD | Human Fetal Dura Mater | Uni-ZAP XR | LP03 |
| HRDA HRDB HRDC HRDD HRDE | Human Rhabdomyosarcoma | Uni-ZAP XR | LP03 |
| HRDF | | | |
| HCAA HCAB HCAC | Cem cells cyclohexamide treated | Uni-ZAP XR | LP03 |
| HRGA HRGB HRGC HRGD | Raji Cells, cyclohexamide treated | Uni-ZAP XR | LP03 |
| HSUA HSUB HSUC HSUM | Supt Cells, cyclohexamide treated | Uni-ZAP XR | LP03 |
| HT4A HT4C HT4D | Activated T-Cells, 12 hrs. | Uni-ZAP XR | LP03 |
| HE9A HE9B HE9C HE9D HE9E | Nine Week Old Early Stage Human | Uni-ZAP XR | LP03 |
| HE9F HE9G HE9H HE9M HE9N | | | |
| HATA HATB HATC HATD HATE | Human Adrenal Gland Tumor | Uni-ZAP XR | LP03 |
| HT5A | Activated T-Cells, 24 hrs. | Uni-ZAP XR | LP03 |
| HFGA HFGM | Human Fetal Brain | Uni-ZAP XR | LP03 |
| HNEA HNEB HNEC HNED HNEE | Human Neutrophil | Uni-ZAP XR | LP03 |
| HBGB HBGD | Human Primary Breast Cancer | Uni-ZAP XR | LP03 |
| HBNA HBNB | Human Normal Breast | Uni-ZAP XR | LP03 |
| HCAS | Cem Cells, cyclohexamide treated, | Uni-ZAP XR | LP03 |
| | subtra | | |
| HHPS | Human Hippocampus, subtracted | pBS | LP03 |
| HKCS HKCU | Human Colon Cancer, subtracted | pBS | LP03 |
| HRGS | Raji cells, cyclohexamide treated, | pBS | LP03 |
| | subtracted | | |
| HSUT | Supt cells, cyclohexamide treated, | pBS | LP03 |
| | differentially expressed | | |
| HT4S | Activated T-Cells, 12 hrs, subtracted | Uni-ZAP XR | LP03 |
| HCDA HCDB HCDC HCDD HCDE | Human Chondrosarcoma | Uni-ZAP XR | LP03 |
| HOAA HOAB HOAC | Human Osteosarcoma | Uni-ZAP XR | LP03 |
| HTLA HTLB HTLC HTLD HTLE | Human adult testis, large inserts | Uni-ZAP XR | LP03 |
| HTLF | | | |
| HLMA HLMC HLMD | Breast Lymph node cDNA library | Uni-ZAP XR | LP03 |
| H6EA H6EB H6EC | HL-60, PMA 4H | Uni-ZAP XR | LP03 |
| HTXA HTXB HTXC HTXD HTXE | Activated T-Cell (12 hs)/Thiouridine | Uni-ZAP XR | LP03 |
| HTXF HTXG HTXH | labelledEco | | |
| HNFA HNFB HNFC HNFD HNFE | Human Neutrophil, Activated | Uni-ZAP XR | LP03 |
| HNFF HNFG HNFH HNFJ | | | |
| HTOB HTOC | HUMAN TONSILS, FRACTION 2 | Uni-ZAP XR | LP03 |
| HMGB | Human OB MG63 control fraction I | Uni-ZAP XR | LP03 |
| HOPB | Human OB HOS control fraction I | Uni-ZAP XR | LP03 |
| HORB | Human OB HOS treated (10 nM E2) | Uni-ZAP XR | LP03 |
| | fraction I | | |
| HSVA HSVB HSVC | Human Chronic Synovitis | Uni-ZAP XR | LP03 |
| HROA | HUMAN STOMACH | Uni-ZAP XR | LP03 |
| HBJA HBJB HBJC HBJD HBJE | HUMAN B CELL LYMPHOMA | Uni-ZAP XR | LP03 |
| HBJF HBJG HBJH HBJI HBJJ | | | |
| HBJK | | | |
| HCRA HCRB HCRC | human corpus colosum | Uni-ZAP XR | LP03 |
| HODA HODB HODC HODD | human ovarian cancer | Uni-ZAP XR | LP03 |
| HDSA | Dermatofibrosarcoma Protuberance | Uni-ZAP XR | LP03 |
| HMWA HMWB HMWC HMWD | Bone Marrow Cell Line (RS4; 11) | Uni-ZAP XR | LP03 |
| HMWE HMWF HMWG HMWH | | | |
| HMWI HMWJ | | | |
| HSOA | stomach cancer (human) | Uni-ZAP XR | LP03 |
| HERA | SKIN | Uni-ZAP XR | LP03 |
| HMDA | Brain-medulloblastoma | Uni-ZAP XR | LP03 |
| HGLA HGLB HGLD | Glioblastoma | Uni-ZAP XR | LP03 |
| HEAA | H. Atrophic Endometrium | Uni-ZAP XR | LP03 |
| HBCA HBCB | H. Lymph node breast Cancer | Uni-ZAP XR | LP03 |
| HPWT | Human Prostate BPH, re-excision | Uni-ZAP XR | LP03 |
| HFVG HFVH HFVI | Fetal Liver, subtraction II | pBS | LP03 |
| HNFI | Human Neutrophils, Activated, re- | pBS | LP03 |
| | excision | | |
| HBMB HBMC HBMD | Human Bone Marrow, re-excision | pBS | LP03 |
| HKML HKMM HKMN | H. Kidney Medulla, re-excision | pBS | LP03 |
| HKIX HKIY | H. Kidney Cortex, subtracted | pBS | LP03 |
| HADT | H. Amygdala Depression, subtracted | pBS | LP03 |
| H6AS | Hl-60, untreated, subtracted | Uni-ZAP XR | LP03 |
| H6ES | HL-60, PMA 4H, subtracted | Uni-ZAP XR | LP03 |
| H6BS | HL-60, RA 4 h, Subtracted | Uni-ZAP XR | LP03 |
| H6CS | HL-60, PMA 1d, subtracted | Uni-ZAP XR | LP03 |
| HTXJ HTXK | Activated T-cell(12 h)/Thiouridine-re- | Uni-ZAP XR | LP03 |
| | excision | | |
| HMSA HMSB HMSC HMSD HMSE | Monocyte activated | Uni-ZAP XR | LP03 |
| HMSF HMSG HMSH HMSI HMSJ | | | |
| HMSK | | | |
| HAGA HAGB HAGC HAGD HAGE | Human Amygdala | Uni-ZAP XR | LP03 |
| HAGF | | | |
| HSRA HSRB HSRE | STROMAL-OSTEOCLASTOMA | Uni-ZAP XR | LP03 |
| HSRD HSRF HSRG HSRH | Human Osteoclastoma Stromal Cells- | Uni-ZAP XR | LP03 |
| | unamplified | | |
| HSQA HSQB HSQC HSQD HSQE | Stromal cell TF274 | Uni-ZAP XR | LP03 |
| HSQF HSQG | | | |
| HSKA HSKB HSKC HSKD HSKE | Smooth muscle, serum treated | Uni-ZAP XR | LP03 |
| HSKF HSKZ | | | |
| HSLA HSLB HSLC HSLD HSLE | Smooth muscle, control | Uni-ZAP XR | LP03 |
| HSLF HSLG | | | |
| HSDA HSDD HSDE HSDF HSDG | Spinal cord | Uni-ZAP XR | LP03 |
| HSDH | | | |
| HPWS | Prostate-BPH subtracted II | pBS | LP03 |
| HSKW HSKX HSKY | Smooth Muscle-HASTE normalized | pBS | LP03 |
| HFPB HFPC HFPD | H. Frontal cortex, epileptic; re-excision | Uni-ZAP XR | LP03 |
| HSDI HSDJ HSDK | Spinal Cord, re-excision | Uni-ZAP XR | LP03 |
| HSKN HSKO | Smooth Muscle Serum Treated, Norm | pBS | LP03 |
| HSKG HSKH HSKI | Smooth muscle, serum induced, re-exc | pBS | LP03 |
| HFCA HFCB HFCC HFCD HFCE | Human Fetal Brain | Uni-ZAP XR | LP04 |
| HFCF | | | |
| HPTA HPTB HPTD | Human Pituitary | Uni-ZAP XR | LP04 |
| HTHB HTHC HTHD | Human Thymus | Uni-ZAP XR | LP04 |
| HE6B HE6C HE6D HE6E HE6F | Human Whole Six Week Old Embryo | Uni-ZAP XR | LP04 |
| HE6G HE6S | | | |
| HSSA HSSB HSSC HSSD HSSE | Human Synovial Sarcoma | Uni-ZAP XR | LP04 |
| HSSF HSSG HSSH HSSI HSSJ | | | |
| HSSK | | | |
| HE7T | 7 Week Old Early Stage Human, | Uni-ZAP XR | LP04 |
| | subtracted | | |
| HEPA HEPB HEPC | Human Epididymus | Uni-ZAP XR | LP04 |
| HSNA HSNB HSNC HSNM HSNN | Human Synovium | Uni-ZAP XR | LP04 |
| HPFB HPFC HPFD HPFE | Human Prostate Cancer, Stage C | Uni-ZAP XR | LP04 |
| | fraction | | |
| HE2A HE2D HE2E HE2H HE2I | 12 Week Old Early Stage Human | Uni-ZAP XR | LP04 |
| HE2M HE2N HE2O | | | |
| HE2B HE2C HE2F HE2G HE2P | 12 Week Old Early Stage Human, II | Uni-ZAP XR | LP04 |
| HE2Q | | | |
| HPTS HPTT HPTU | Human Pituitary, subtracted | Uni-ZAP XR | LP04 |
| HAUA HAUB HAUC | Amniotic Cells - TNF induced | Uni-ZAP XR | LP04 |
| HAQA HAQB HAQC HAQD | Amniotic Cells - Primary Culture | Uni-ZAP XR | LP04 |
| HWTA HWTB HWTC | wilm's tumor | Uni-ZAP XR | LP04 |
| HBSD | Bone Cancer, re-excision | Uni-ZAP XR | LP04 |
| HSGB | Salivary gland, re-excision | Uni-ZAP XR | LP04 |
| HSJA HSJB HSJC | Smooth muscle-ILb induced | Uni-ZAP XR | LP04 |
| HSXA HSXB HSXC HSXD | Human Substantia Nigra | Uni-ZAP XR | LP04 |
| HSHA HSHB HSHC | Smooth muscle, IL1b induced | Uni-ZAP XR | LP04 |
| HOUA HOUB HOUC HOUD HOUE | Adipocytes | Uni-ZAP XR | LP04 |
| HPWA HPWB HPWC HPWD | Prostate BPH | Uni-ZAP XR | LP04 |
| HPWE | | | |
| HELA HELB HELC HELD HELE | Endothelial cells-control | Uni-ZAP XR | LP04 |
| HELF HELG HELH | | | |
| HEMA HEMB HEMC HEMD | Endothelial-induced | Uni-ZAP XR | LP04 |
| HEME HEMF HEMG HEMH | | | |
| HBIA HBIB HBIC | Human Brain, Striatum | Uni-ZAP XR | LP04 |
| HHSA HHSB HHSC HHSD HHSE | Human Hypothalmus, Schizophrenia | Uni-ZAP XR | LP04 |
| HNGA HNGB HNGC HNGD HNGE | neutrophils control | Uni-ZAP XR | LP04 |
| HNGF HNGG HNGH HNGI HNGJ | | | |
| HNHA HNHB HNHC HNHD HNHE | Neutrophils IL-1 and LPS induced | Uni-ZAP XR | LP04 |
| HNHF HNHG HNHH HNHI HNHJ | | | |
| HSDB HSDC | STRIATUM DEPRESSION | Uni-ZAP XR | LP04 |
| HHPT | Hypothalamus | Uni-ZAP XR | LP04 |
| HSAT HSAU HSAV HSAW HSAX | Anergic T-cell | Uni-ZAP XR | LP04 |
| HSAY HSAZ | | | |
| HBMS HBMT HBMU HBMV | Bone marrow | Uni-ZAP XR | LP04 |
| HBMW HBMX | | | |
| HOEA HOEB HOEC HOED HOEE | Osteoblasts | Uni-ZAP XR | LP04 |
| HOEF HOEJ | | | |
| HAIA HAIB HAIC HAID HAIE | Epithelial-TNFa and INF induced | Uni-ZAP XR | LP04 |
| HAIF | | | |
| HTGA HTGB HTGC HTGD | Apoptotic T-cell | Uni-ZAP XR | LP04 |
| HMCA HMCB HMCC HMCD | Macrophage-oxLDL | Uni-ZAP XR | LP04 |
| HMCE | | | |
| HMAA HMAB HMAC HMAD | Macrophage (GM-CSF treated) | Uni-ZAP XR | LP04 |
| HMAE HMAF HMAG | | | |
| HPHA | Normal Prostate | Uni-ZAP XR | LP04 |
| HPIA HPIB HPIC | LNCAP prostate cell line | Uni-ZAP XR | LP04 |
| HPJA HPJB HPJC | PC3 Prostate cell line | Uni-ZAP XR | LP04 |
| HOSE HOSF HOSG | Human Osteoclastoma, re-excision | Uni-ZAP XR | LP04 |
| HTGE HTGF | Apoptotic T-cell, re-excision | Uni-ZAP XR | LP04 |
| HMAJ HMAK | H Macrophage (GM-CSF treated), re- | Uni-ZAP XR | LP04 |
| | excision | | |
| HACB HACC HACD | Human Adipose Tissue, re-excision | Uni-ZAP XR | LP04 |
| HFPA | H. Frontal Cortex, Epileptic | Uni-ZAP XR | LP04 |
| HFAA HFAB HFAC HFAD HFAE | Alzheimers, spongy change | Uni-ZAP XR | LP04 |
| HFAM | Frontal Lobe, Dementia | Uni-ZAP XR | LP04 |
| HMIA HMIB HMIC | Human Manic Depression Tissue | Uni-ZAP XR | LP04 |
| HTSA HTSE HTSF HTSG HTSH | Human Thymus | pBS | LP05 |
| HPBA HPBB HPBC HPBD HPBE | Human Pineal Gland | pBS | LP05 |
| HSAA HSAB HSAC | HSA 172 Cells | pBS | LP05 |
| HSBA HSBB HSBC HSBM | HSC172 cells | pBS | LP05 |
| HJAA HJAB HJAC HJAD | Jurkat T-cell G1 phase | pBS | LP05 |
| HJBA HJBB HJBC HJBD | Jurkat T-Cell, S phase | pBS | LP05 |
| HAFA HAFB | Aorta endothelial cells + TNF-a | pBS | LP05 |
| HAWA HAWB HAWC | Human White Adipose | pBS | LP05 |
| HTNA HTNB | Human Thyroid | pBS | LP05 |
| HONA | Normal Ovary, Premenopausal | pBS | LP05 |
| HARA HARB | Human Adult Retina | pBS | LP05 |
| HLJA HLJB | Human Lung | pCMVSport 1 | LP06 |
| HOFM HOFN HOFO | H. Ovarian Tumor, II, OV5232 | pCMVSport 2.0 | LP07 |
| HOGA HOGB HOGC | OV 10-3-95 | pCMVSport 2.0 | LP07 |
| HCGL | CD34+ cells, II | pCMVSport 2.0 | LP07 |
| HDLA | Hodgkin's Lymphoma I | pCMVSport 2.0 | LP07 |
| HDTA HDTB HDTC HDTD HDTE | Hodgkin's Lymphoma II | pCMVSport 2.0 | LP07 |
| HKAA HKAB HKAC HKAD HKAE | Keratinocyte | pCMVSport 2.0 | LP07 |
| HKAF HKAG HKAH | | | |
| HCIM | CAPFINDER, Crohn's Disease, lib 2 | pCMVSport 2.0 | LP07 |
| HKAL | Keratinocyte, lib 2 | pCMVSport 2.0 | LP07 |
| HKAT | Keratinocyte, lib 3 | pCMVSport 2.0 | LP07 |
| HNDA | Nasal polyps | pCMVSport 2.0 | LP07 |
| HDRA | H. Primary Dendritic Cells, lib 3 | pCMVSport 2.0 | LP07 |
| HOHA HOHB HOHC | Human Osteoblasts II | pCMVSport 2.0 | LP07 |
| HLDA HLDB HLDC | Liver, Hepatoma | pCMVSport 3.0 | LP08 |
| HLDN HLDO HLDP | Human Liver, normal | pCMVSport 3.0 | LP08 |
| HMTA | pBMC stimulated w/poly I/C | pCMVSport 3.0 | LP08 |
| HNTA | NTERA2, control | pCMVSport 3.0 | LP08 |
| HDPA HDPB HDPC HDPD HDPF | Primary Dendritic Cells, lib 1 | pCMVSport 3.0 | LP08 |
| HDPG HDPH HDPI HDPJ HDPK | | | |
| HDPM HDPN HDPO HDPP | Primary Dendritic cells, frac 2 | pCMVSport 3.0 | LP08 |
| HMUA HMUB HMUC | Myoloid Progenitor Cell Line | pCMVSport 3.0 | LP08 |
| HHEA HHEB HHEC HHED | T Cell helper I | pCMVSport 3.0 | LP08 |
| HHEM HHEN HHEO HHEP | T cell helper II | pCMVSport 3.0 | LP08 |
| HEQA HEQB HEQC | Human endometrial stromal cells | pCMVSport 3.0 | LP08 |
| HJMA HJMB | Human endometrial stromal cells- | pCMVSport 3.0 | LP08 |
| | treated with progesterone | | |
| HSWA HSWB HSWC | Human endometrial stromal cells- | pCMVSport 3.0 | LP08 |
| | treated with estradiol | | |
| HSYA HSYB HSYC | Human Thymus Stromal Cells | pCMVSport 3.0 | LP08 |
| HLWA HLWB HLWC | Human Placenta | pCMVSport 3.0 | LP08 |
| HRAA HRAB HRAC | Rejected Kidney, lib 4 | pCMVSport 3.0 | LP08 |
| HMTM | PCR, pBMC I/C treated | PCRII | LP09 |
| HMJA | H. Meniingima, M6 | pSport 1 | LP10 |
| HMKA HMKB HMKC HMKD | H. Meningima, M1 | pSport 1 | LP10 |
| HMKE | | | |
| HUSG HUSI | Human umbilical vein endothelial cells, | pSport 1 | LP10 |
| | IL-4 induced | | |
| HUSX HUSY | Human Umbilical Vein Endothelial | pSport 1 | LP10 |
| | Cells, uninduced | | |
| HOFA | Ovarian Tumor I, OV5232 | pSport 1 | LP10 |
| HCFA HCFB HCFC HCFD | T-Cell PHA 16 hrs | pSport 1 | LP10 |
| HCFL HCFM HCFN HCFO | T-Cell PHA 24 hrs | pSport 1 | LP10 |
| HADA HADC HADD HADE HADF | Human Adipose | pSport 1 | LP10 |
| HADG | | | |
| HOVA HOVB HOVC | Human Ovary | pSport 1 | LP10 |
| HTWB HTWC HTWD HTWE | Resting T-Cell Library, II | pSport 1 | LP10 |
| HTWF | | | |
| HMMA | Spleen metastic melanoma | pSport 1 | LP10 |
| HLYA HLYB HLYC HLYD HLYE | Spleen, Chronic lymphocytic leukemia | pSport 1 | LP10 |
| HCGA | CD34+ cell, I | pSport 1 | LP10 |
| HEOM HEON | Human Eosinophils | pSport 1 | LP10 |
| HTDA | Human Tonsil, Lib 3 | pSport 1 | LP10 |
| HSPA | Salivary Gland, Lib 2 | pSport 1 | LP10 |
| HCHA HCHB HCHC | Breast Cancer cell line, MDA 36 | pSport 1 | LP10 |
| HCHM HCHN | Breast Cancer Cell line, angiogenic | pSport 1 | LP10 |
| HCIA | Crohn's Disease | pSport 1 | LP10 |
| HDAA HDAB HDAC | HEL cell line | pSport 1 | LP10 |
| HABA | Human Astrocyte | pSport 1 | LP10 |
| HUFA HUFB HUFC | Ulcerative Colitis | pSport 1 | LP10 |
| HNTM | NTERA2 + retinoic acid, 14 days | pSport 1 | LP10 |
| HDQA | Primary Dendritic cells, CapFinder2, | pSport 1 | LP10 |
| | frac 1 | | |
| HDQM | Primary Dendritic Cells, CapFinder, | pSport 1 | LP10 |
| | frac 2 | | |
| HLDX | Human Liver, normal, | pSport 1 | LP10 |
| HULA HULB HULC | Human Dermal Endothelial | pSport 1 | LP10 |
| | Cells, untreated | | |
| HUMA | Human Dermal Endothelial cells, treated | pSport 1 | LP10 |
| HCJA | Human Stromal Endometrial | pSport 1 | LP10 |
| | fibroblasts, untreated | | |
| HCJM | Human Stromal endometrial fibroblasts, | pSport 1 | LP10 |
| | treated w/estradiol | | |
| HEDA | Human Stromal endometrial fibroblasts, | pSport 1 | LP10 |
| | treated with progesterone | | |
| HFNA | Human ovary tumor cell OV350721 | pSport 1 | LP10 |
| HKGA HKGB HKGC HKGD | Merkel Cells | pSport 1 | LP10 |
| HISA HISB HISC | Pancreas Islet Cell Tumor | pSport 1 | LP10 |
| HLSA | Skin, burned | pSport 1 | LP10 |
| HBZA | Prostate, BPH, Lib 2 | pSport 1 | LP10 |
| HBZS | Prostate BPH, Lib 2, subtracted | pSport 1 | LP10 |
| HFIA HFIB HFIC | Synovial Fibroblasts (control) | pSport 1 | LP10 |
| HFIH HFII HFIJ | Synovial hypoxia | pSport 1 | LP10 |
| HFIT HFIU HFIV | Synovial IL-1/TNF stimulated | pSport 1 | LP10 |
| HGCA | Messangial cell, frac 1 | pSport 1 | LP10 |
| HMVA HMVB HMVC | Bone Marrow Stromal Cell, untreated | pSport 1 | LP10 |
| HFIX HFIY HFIZ | Synovial Fibroblasts (Il1/TNF), subt | pSport 1 | LP10 |
| HFOX HFOY HFOZ | Synovial hypoxia-RSF subtracted | pSport 1 | LP10 |
| HMQA HMQB HMQC HMQD | Human Activated Monocytes | Uni-ZAP XR | LP11 |
| HLIA HLIB HLIC | Human Liver | pCMVSport 1 | LP012 |
| HHBA HHBB HHBC HHBD HHBE | Human Heart | pCMVSport 1 | LP012 |
| HBBA HBBB | Human Brain | pCMVSport 1 | LP012 |
| HLJA HLJB HLJC HLJD HLJE | Human Lung | pCMVSport 1 | LP012 |
| HOGA HOGB HOGC | Ovarian Tumor | pCMVSport 2.0 | LP012 |
| HTJM | Human Tonsils, Lib 2 | pCMVSport 2.0 | LP012 |
| HAMF HAMG | KMH2 | pCMVSport 3.0 | LP012 |
| HAJA HAJB HAJC | L428 | pCMVSport 3.0 | LP012 |
| HWBA HWBB HWBC HWBD | Dendritic cells, pooled | pCMVSport 3.0 | LP012 |
| HWBE | | | |
| HWAA HWAB HWAC HWAD | Human Bone Marrow, treated | pCMVSport 3.0 | LP012 |
| HWAE | | | |
| HYAA HYAB HYAC | B Cell lymphoma | pCMVSport 3.0 | LP012 |
| HWHG HWHH HWHI | Healing groin wound, 6.5 hours post | pCMVSport 3.0 | LP012 |
| | incision | | |
| HWHP HWHQ HWHR | Healing groin wound; 7.5 hours post | pCMVSport 3.0 | LP012 |
| | incision | | |
| HARM | Healing groin wound - zero hr post- | pCMVSport 3.0 | LP012 |
| | incision (control) | | |
| HBIM | Olfactory epithelium; nasalcavity | pCMVSport 3.0 | LP012 |
| HWDA | Healing Abdomen wound; 70&90 min | pCMVSport 3.0 | LP012 |
| | post incision | | |
| HWEA | Healing Abdomen Wound; 15 days post | pCMVSport 3.0 | LP012 |
| | incision | | |
| HWJA | Healing Abdomen Wound; 21&29 days | pCMVSport 3.0 | LP012 |
| HNAL | Human Tongue, frac 2 | pSport 1 | LP012 |
| HMJA | H. Meniingima, M6 | pSport 1 | LP012 |
| HMKA HMKB HMKC HMKD | H. Meningima, M1 | pSport 1 | LP012 |
| HMKE | | | |
| HOFA | Ovarian Tumor I, OV5232 | pSport 1 | LP012 |
| HCFA HCFB HCFC HCFD | T-Cell PHA 16 hrs | pSport 1 | LP012 |
| HCFL HCFM HCFN HCFO | T-Cell PHA 24 hrs | pSport 1 | LP012 |
| HMMA HMMB HMMC | Spleen metastic melanoma | pSport 1 | LP012 |
| HTDA | Human Tonsil, Lib 3 | pSport 1 | LP012 |
| HDBA | Human Fetal Thymus | pSport 1 | LP012 |
| HDUA | Pericardium | pSport 1 | LP012 |
| HBZA | Prostate, BPH, Lib 2 | pSport 1 | LP012 |
| HWCA | Larynx tumor | pSport 1 | LP012 |
| HWKA | Normal lung | pSport 1 | LP012 |
| HSMB | Bone marrow stroma, treated | pSport 1 | LP012 |
| HBHM | Normal trachea | pSport 1 | LP012 |
| HLFC | Human Larynx | pSport 1 | LP012 |
| HLRB | Siebben Polyposis | pSport 1 | LP012 |
| HNIA | Mammary Gland | pSport 1 | LP012 |
| HNJB | Palate carcinoma | pSport 1 | LP012 |
| HNKA | Palate normal | pSport 1 | LP012 |
| HMZA | Pharynx carcinoma | pSport 1 | LP012 |
| HABG | Cheek Carcinoma | pSport 1 | LP012 |
| HMZM | Pharynx Carcinoma | pSport 1 | LP012 |
| HDRM | Larynx Carcinoma | pSport 1 | LP012 |
| HVAA | Pancreas normal PCA4 No | pSport 1 | LP012 |
| HICA | Tongue carcinoma | pSport 1 | LP012 |
| HUKA HUKB HUKC HUKD HUKE | Human Uterine Cancer | Lambda ZAP II | LP013 |
| HFFA | Human Fetal Brain, random primed | Lambda ZAP II | LP013 |
| HTUA | Activated T-cell labeled with 4-thioluri | Lambda ZAP II | LP013 |
| HBQA | Early Stage Human Brain, random | Lambda ZAP II | LP013 |
| | primed | | |
| HMEB | Human microvascular Endothelial cells, | Lambda ZAP II | LP013 |
| | fract. B | | |
| HUSH | Human Umbilical Vein Endothelial | Lambda ZAP II | LP013 |
| | cells, fract. A, re-excision | | |
| HLQC HLQD | Hepatocellular tumor, re-excision | Lambda ZAP II | LP013 |
| HTWJ HTWK HTWL | Resting T-cell, re-excision | Lambda ZAP II | LP013 |
| HF6S | Human Whole 6 week Old Embryo (II), | pBluescript | LP013 |
| | subt | | |
| HHPS | Human Hippocampus, subtracted | pBluescript | LP013 |
| HL1S | LNCAP, differential expression | pBluescript | LP013 |
| HLHS HLHT | Early Stage Human Lung, Subtracted | pBluescript | LP013 |
| HSUS | Supt cells, cyclohexamide treated, | pBluescript | LP013 |
| | subtracted | | |
| HSUT | Supt cells, cyclohexamide treated, | pBluescript | LP013 |
| | differentially expressed | | |
| HSDS | H. Striatum Depression, subtracted | pBluescript | LP013 |
| HPTZ | Human Pituitary, Subtracted VII | pBluescript | LP013 |
| HSDX | H. Striatum Depression, subt II | pBluescript | LP013 |
| HSDZ | H. Striatum Depression, subt | pBluescript | LP013 |
| HPBA HPBB HPBC HPBD HPBE | Human Pineal Gland | pBluescript SK- | LP013 |
| HRTA | Colorectal Tumor | pBluescript SK- | LP013 |
| HSBA HSBB HSBC HSBM | HSC172 cells | pBluescript SK- | LP013 |
| HJAA HJAB HJAC HJAD | Jurkat T-cell G1 phase | pBluescript SK- | LP013 |
| HJBA HJBB HJBC HJBD | Jurkat T-cell, S1 phase | pBluescript SK- | LP013 |
| HTNA HTNB | Human Thyroid | pBluescript SK- | LP013 |
| HAHA HAHB | Human Adult Heart | Uni-ZAP XR | LP013 |
| HE6A | Whole 6 week Old Embryo | Uni-ZAP XR | LP013 |
| HFCA HFCB HFCC HFCD HFCE | Human Fetal Brain | Uni-ZAP XR | LP013 |
| HFKC HFKD HFKE HFKF HFKG | Human Fetal Kidney | Uni-ZAP XR | LP013 |
| HGBA HGBD HGBE HGBF HGBG | Human Gall Bladder | Uni-ZAP XR | LP013 |
| HPRA HPRB HPRC HPRD | Human Prostate | Uni-ZAP XR | LP013 |
| HTEA HTEB HTEC HTED HTEE | Human Testes | Uni-ZAP XR | LP013 |
| HTTA HTTB HTTC HTTD HTTE | Human Testes Tumor | Uni-ZAP XR | LP013 |
| HYBA HYBB | Human Fetal Bone | Uni-ZAP XR | LP013 |
| HFLA | Human Fetal Liver | Uni-ZAP XR | LP013 |
| HHFB HHFC HHFD HHFE HHFF | Human Fetal Heart | Uni-ZAP XR | LP013 |
| HUVB HUVC HUVD HUVE | Human Umbilical Vein, End. remake | Uni-ZAP XR | LP013 |
| HTHB HTHC HTHD | Human Thymus | Uni-ZAP XR | LP013 |
| HSTA HSTB HSTC HSTD | Human Skin Tumor | Uni-ZAP XR | LP013 |
| HTAA HTAB HTAC HTAD HTAE | Human Activated T-cells | Uni-ZAP XR | LP013 |
| HFEA HFEB HFEC | Human Fetal Epithelium (skin) | Uni-ZAP XR | LP013 |
| HJPA HJPB HJPC HJPD | Human Jurkat Membrane Bound | Uni-ZAP XR | LP013 |
| | Polysomes | | |
| HESA | Human Epithelioid Sarcoma | Uni-ZAP XR | LP013 |
| HALS | Human Adult Liver, Subtracted | Uni-ZAP XR | LP013 |
| HFTA HFTB HFTC HFTD | Human Fetal Dura Mater | Uni-ZAP XR | LP013 |
| HCAA HCAB HCAC | Cem cells, cyclohexamide treated | Uni-ZAP XR | LP013 |
| HRGA HRGB HRGC HRGD | Raji Cells, cyclohexamide treated | Uni-ZAP XR | LP013 |
| HE9A HE9B HE9C HE9D HE9E | Nine Week Old Early Stage Human | Uni-ZAP XR | LP013 |
| HSFA | Human Fibrosarcoma | Uni-ZAP XR | LP013 |
| HATA HATB HATC HATD HATE | Human Adrenal Gland Tumor | Uni-ZAP XR | LP013 |
| HTRA | Human Trachea Tumor | Uni-ZAP XR | LP013 |
| HE2A HE2D HE2E HE2H HE2I | 12 Week Old Early Stage Human | Uni-ZAP XR | LP013 |
| HE2B HE2C HE2F HE2G HE2P | 12 Week Old Early Stage Human, II | Uni-ZAP XR | LP013 |
| HNEA HNEB HNEC HNED HNEE | Human Neutrophil | Uni-ZAP XR | LP013 |
| HBGA | Human Primary Breast Cancer | Uni-ZAP XR | LP013 |
| HPTS HPTT HPTU | Human Pituitary, subtracted | Uni-ZAP XR | LP013 |
| HMQA HMQB HMQC HMQD | Human Activated Monocytes | Uni-ZAP XR | LP013 |
| HOAA HOAB HOAC | Human Osteosarcoma | Uni-ZAP XR | LP013 |
| HTOA HTOD HTOE HTOF HTOG | human tonsils | Uni-ZAP XR | LP013 |
| HMGB | Human OB MG63 control fraction I | Uni-ZAP XR | LP013 |
| HOPB | Human OB HOS control fraction I | Uni-ZAP XR | LP013 |
| HOQB | Human OB HOS treated (1 nM E2) | Uni-ZAP XR | LP013 |
| | fraction I | | |
| HAUA HAUB HAUC | Amniotic Cells - TNF induced | Uni-ZAP XR | LP013 |
| HAQA HAQB HAQC HAQD | Amniotic Cells - Primary Culture | Uni-ZAP XR | LP013 |
| HROA HROC | HUMAN STOMACH | Uni-ZAP XR | LP013 |
| HBJA HBJB HBJC HBJD HBJE | HUMAN B CELL LYMPHOMA | Uni-ZAP XR | LP013 |
| HODA HODB HODC HODD | human ovarian cancer | Uni-ZAP XR | LP013 |
| HCPA | Corpus Callosum | Uni-ZAP XR | LP013 |
| HSOA | stomach cancer (human) | Uni-ZAP XR | LP013 |
| HERA | SKIN | Uni-ZAP XR | LP013 |
| HMDA | Brain-medulloblastoma | Uni-ZAP XR | LP013 |
| HGLA HGLB HGLD | Glioblastoma | Uni-ZAP XR | LP013 |
| HWTA HWTB HWTC | wilm's tumor | Uni-ZAP XR | LP013 |
| HEAA | H. Atrophic Endometrium | Uni-ZAP XR | LP013 |
| HAPN HAPO HAPP HAPQ HAPR | Human Adult Pulmonary; re-excision | Uni-ZAP XR | LP013 |
| HLTG HLTH | Human T-cell lymphoma; re-excision | Uni-ZAP XR | LP013 |
| HAHC HAHD HAHE | Human Adult Heart; re-excision | Uni-ZAP XR | LP013 |
| HAGA HAGB HAGC HAGD HAGE | Human Amygdala | Uni-ZAP XR | LP013 |
| HSJA HSJB HSJC | Smooth muscle-ILb induced | Uni-ZAP XR | LP013 |
| HSHA HSHB HSHC | Smooth muscle, IL1b induced | Uni-ZAP XR | LP013 |
| HPWA HPWB HPWC HPWD | Prostate BPH | Uni-ZAP XR | LP013 |
| HPWE | | | |
| HPIA HPIB HPIC | LNCAP prostate cell line | Uni-ZAP XR | LP013 |
| HPJA HPJB HPJC | PC3 Prostate cell line | Uni-ZAP XR | LP013 |
| HBTA | Bone Marrow Stroma, TNF&LPS ind | Uni-ZAP XR | LP013 |
| HMCF HMCG HMCH HMCI HMCJ | Macrophage-oxLDL; re-excision | Uni-ZAP XR | LP013 |
| HAGG HAGH HAGI | Human Amygdala; re-excision | Uni-ZAP XR | LP013 |
| HACA | H. Adipose Tissue | Uni-ZAP XR | LP013 |
| HKFB | K562 + PMA (36 hrs), re-excision | ZAP Express | LP013 |
| HCWT HCWU HCWV | CD34 positive cells (cord blood), re-ex | ZAP Express | LP013 |
| HBWA | Whole brain | ZAP Express | LP013 |
| HBXA HBXB HBXC HBXD | Human Whole Brain #2 - Oligo dT > | ZAP Express | LP013 |
| | 1.5 Kb | | |
| HAVM | Temporal cortex-Alzheizmer | pT-Adv | LP014 |
| HAVT | Hippocampus, Alzheimer Subtracted | pT-Adv | LP014 |
| HHAS | CHME Cell Line | Uni-ZAP XR | LP014 |
| HAJR | Larynx normal | pSport 1 | LP014 |
| HWLE HWLF HWLG HWLH | Colon Normal | pSport 1 | LP014 |
| HCRM HCRN HCRO | Colon Carcinoma | pSport 1 | LP014 |
| HWLI HWLJ HWLK | Colon Normal | pSport 1 | LP014 |
| HWLQ HWLR HWLS HWLT | Colon Tumor | pSport 1 | LP014 |
| HBFM | Gastrocnemius Muscle | pSport 1 | LP014 |
| HBOD HBOE | Quadriceps Muscle | pSport 1 | LP014 |
| HBKD HBKE | Soleus Muscle | pSport 1 | LP014 |
| HCCM | Pancreatic Langerhans | pSport 1 | LP014 |
| HWGA | Larynx carcinoma | pSport 1 | LP014 |
| HWGM HWGN | Larynx carcinoma | pSport 1 | LP014 |
| HWLA HWLB HWLC | Normal colon | pSport 1 | LP014 |
| HWLM HWLN | Colon Tumor | pSport 1 | LP014 |
| HVAM HVAN HVAO | Pancreas Tumor | pSport 1 | LP014 |
| HWGQ | Larynx carcinoma | pSport 1 | LP014 |
| HAQM HAQN | Salivary Gland | pSport 1 | LP014 |
| HASM | Stomach; normal | pSport 1 | LP014 |
| HBCM | Uterus; normal | pSport 1 | LP014 |
| HCDM | Testis; normal | pSport 1 | LP014 |
| HDJM | Brain; normal | pSport 1 | LP014 |
| HEFM | Adrenal Gland, normal | pSport 1 | LP014 |
| HBAA | Rectum normal | pSport 1 | LP014 |
| HFDM | Rectum tumor | pSport 1 | LP014 |
| HGAM | Colon, normal | pSport 1 | LP014 |
| HHMM | Colon, tumor | pSport 1 | LP014 |
| HCLB HCLC | Human Lung Cancer | Lambda Zap II | LP015 |
| HRLA | L1 Cell line | ZAP Express | LP015 |
| HHAM | Hypothalamus, Alzheimer's | pCMVSport 3.0 | LP015 |
| HKBA | Ku 812F Basophils Line | pSport 1 | LP015 |
| HS2S | Saos2, Dexamethosome Treated | pSport 1 | LP016 |
| HA5A | Lung Carcinoma A549 TNFalpha | pSport 1 | LP016 |
| | activated | | |
| HTFM | TF-1 Cell Line GM-CSF Treated | pSport 1 | LP016 |
| HYAS | Thyroid Tumor | pSport 1 | LP016 |
| HUTS | Larynx Normal | pSport 1 | LP016 |
| HXOA | Larynx Tumor | pSport 1 | LP016 |
| HEAH | Ea.hy.926 cell line | pSport 1 | LP016 |
| HINA | Adenocarcinoma Human | pSport 1 | LP016 |
| HRMA | Lung Mesothelium | pSport 1 | LP016 |
| HLCL | Human Pre-Differentiated Adipocytes | Uni-Zap XR | LP017 |
| HS2A | Saos2 Cells | pSport 1 | LP020 |
| HS2I | Saos2 Cells; Vitamin D3 Treated | pSport 1 | LP020 |
| HUCM | CHME Cell Line, untreated | pSport 1 | LP020 |
| HEPN | Aryepiglottis Normal | pSport 1 | LP020 |
| HPSN | Sinus Piniformis Tumor | pSport 1 | LP020 |
| HNSA | Stomach Normal | pSport 1 | LP020 |
| HNSM | Stomach Tumor | pSport 1 | LP020 |
| HNLA | Liver Normal Met5No | pSport 1 | LP020 |
| HUTA | Liver Tumor Met 5 Tu | pSport 1 | LP020 |
| HOCN | Colon Normal | pSport 1 | LP020 |
| HOCT | Colon Tumor | pSport 1 | LP020 |
| HTNT | Tongue Tumor | pSport 1 | LP020 |
| HLXN | Larynx Normal | pSport 1 | LP020 |
| HLXT | Larynx Tumor | pSport 1 | LP020 |
| HTYN | Thymus | pSport 1 | LP020 |
| HPLN | Placenta | pSport 1 | LP020 |
| HTNG | Tongue Normal | pSport 1 | LP020 |
| HZAA | Thyroid Normal (SDCA2 No) | pSport 1 | LP020 |
| HWES | Thyroid Thyroiditis | pSport 1 | LP020 |
| HFHD | Ficolled Human Stromal Cells, 5Fu | pTrip1Ex2 | LP021 |
| | treated | | |
| HFHM, HFHN | Ficolled Human Stromal Cells, | pTrip1Ex2 | LP021 |
| | Untreated | | |
| HPCI | Hep G2 Cells, lambda library | lambda Zap-CMV | LP021 |
| | | XR | |
| HBCA, HBCB, HBCC | H. Lymph node breast Cancer | Uni-ZAP XR | LP021 |
| HCOK | Chondrocytes | pSport 1 | LP022 |
| HDCA, HDCB, HDCC | Dendritic Cells From CD34 Cells | pSport 1 | LP022 |
| HDMA, HDMB | CD40 activated monocyte dendritic | pSport 1 | LP022 |
| | cells | | |
| HDDM, HDDN, HDDO | LPS activated derived dendritic cells | pSport 1 | LP022 |
| HPCR | Hep G2 Cells, PCR library | lambda Zap-CMV | LP022 |
| | | XR | |
| HAAA, HAAB, HAAC | Lung, Cancer (4005313A3): Invasive | pSport 1 | LP022 |
| | Poorly Differentiated Lung | | |
| | Adenocarcinoma | | |
| HIPA, HIPB, HIPC | Lung, Cancer (4005163 B7): Invasive, | pSport 1 | LP022 |
| | Poorly Diff. Adenocarcinoma, | | |
| | Metastatic | | |
| HOOH, HOOI | Ovary, Cancer: (4004562 B6) Papillary | pSport 1 | LP022 |
| | Serous Cystic Neoplasm, Low | | |
| | Malignant Pot | | |
| HIDA | Lung, Normal: (4005313 B1) | pSport 1 | LP022 |
| HUJA, HUJB, HUJC, HUJD, HUJE | B-Cells | pCMVSport 3.0 | LP022 |
| HNOA, HNOB, HNOC, HNOD | Ovary, Normal: (9805C040R) | pSport 1 | LP022 |
| HNLM | Lung, Normal: (4005313 B1) | pSport 1 | LP022 |
| HSCL | Stromal Cells | pSport 1 | LP022 |
| HAAX | Lung, Cancer: (4005313 A3) Invasive | pSport 1 | LP022 |
| | Poorly-differentiated Metastatic lung | | |
| | adenocarcinoma | | |
| HUUA, HUUB, HUUC, HUUD | B-cells (unstimulated) | pTrip1Ex2 | LP022 |
| HWWA, HWWB, HWWC, HWWD, H | B-cells (stimulated) | pSport 1 | LP022 |
| WWE, HWWF, HWWG | | | |
| HCCC | Colon, Cancer: (9808C064R) | pCMVSport 3.0 | LP023 |
| HPDO HPDP HPDQ HPDR HPD | Ovary, Cancer (9809C332): Poorly | pSport 1 | LP023 |
| | differentiated adenocarcinoma | | |
| HPCO HPCP HPCQ HPCT | Ovary, Cancer (15395A1F): Grade II | pSport 1 | LP023 |
| | Papillary Carcinoma | | |
| HOCM HOCO HOCP HOCQ | Ovary, Cancer: (15799A1F) Poorly | pSport 1 | LP023 |
| | differentiated carcinoma | | |
| HCBM HCBN HCBO | Breast, Cancer: (4004943 A5) | pSport 1 | LP023 |
| HNBT HNBU HNBV | Breast, Normal: (4005522B2) | pSport 1 | LP023 |
| HBCP HBCQ | Breast, Cancer: (4005522 A2) | pSport 1 | LP023 |
| HBCJ | Breast, Cancer: (9806C012R) | pSport 1 | LP023 |
| HSAM HSAN | Stromal cells 3.88 | pSport 1 | LP023 |
| HVCA HVCB HVCC HVCD | Ovary, Cancer: (4004332 A2) | pSport 1 | LP023 |
| HSCK HSEN HSEO | Stromal cells (HBM3.18) | pSport 1 | LP023 |
| HSCP HSCQ | stromal cell clone 2.5 | pSport 1 | LP023 |
| HUXA | Breast Cancer: (4005385 A2) | pSport 1 | LP023 |
| HCOM HCON HCOO HCOP HCOQ | Ovary, Cancer (4004650 A3): Well- | pSport 1 | LP023 |
| | Differentiated Micropapillary Serous | | |
| | Carcinoma | | |
| HBNM | Breast, Cancer: (9802C020E) | pSport 1 | LP023 |
| HVVA HVVB HVVC HVVD HVVE | Human Bone Marrow, treated | pSport 1 | LP023 |

[0902] Two nonlimiting examples are provided below for isolating a particular clone from the deposited sample of plasmid cDNAs cited for that clone in Table 7. First, a plasmid is directly isolated by screening the clones using a polynucleotide probe corresponding to the nucleotide sequence of SEQ ID NO: X.

[0903] Particularly, a specific polynucleotide with 30-40 nucleotides is synthesized using an Applied Biosystems DNA synthesizer according to the sequence reported. The oligonucleotide is labeled, for instance, with ³²P-γ-ATP using T4 polynucleotide kinase and purified according to routine methods. (E.g., Maniatis et al., Molecular Cloning: A Laboratory Manual, Cold Spring Harbor Press, Cold Spring, N.Y. (1982).) The plasmid mixture is transformed into a suitable host, as indicated above (such as XL-1 Blue (Stratagene)) using techniques known to those of skill in the art, such as those provided by the vector supplier or in related publications or patents cited above. The transformants are plated on 1.5% agar plates (containing the appropriate selection agent, e.g., ampicillin) to a density of about 150 transformants (colonies) per plate. These plates are screened using Nylon membranes according to routine methods for bacterial colony screening (e.g., Sambrook et al., Molecular Cloning: A Laboratory Manual, 2nd Edit., (1989), Cold Spring Harbor Laboratory Press, pages 1.93 to 1.104), or other techniques known to those of skill in the art.

[0904] Alternatively, two primers of 17-20 nucleotides derived from both ends of the nucleotide sequence of SEQ ID NO: X are synthesized and used to amplify the desired cDNA using the deposited cDNA plasmid as a template. The polymerase chain reaction is carried out under routine conditions, for instance, in 25 μl of reaction mixture with 0.5 ug of the above cDNA template. A convenient reaction mixture is 1.5-5 mM MgCl₂, 0.01% (w/v) gelatin, 20 μM each of dATP, dCTP, dGTP, dTTP, 25 pmol of each primer and 0.25 Unit of Taq polymerase. Thirty five cycles of PCR (denaturation at 94° C. for 1 min; annealing at 55° C. for 1 min; elongation at 72° C. for 1 min) are performed with a Perkin-Elmer Cetus automated thermal cycler. The amplified product is analyzed by agarose gel electrophoresis and the DNA band with expected molecular weight is excised and purified. The PCR product is verified to be the selected sequence by subcloning and sequencing the DNA product.

[0905] Several methods are available for the identification of the 5′ or 3′ non-coding portions of a gene which may not be present in the deposited clone. These methods include but are not limited to, filter probing, clone enrichment using specific probes, and protocols similar or identical to 5′ and 3′ “RACE” protocols which are well known in the art. For instance, a method similar to 5′ RACE is available for generating the missing 5′ end of a desired full-length transcript. (Fromont-Racine et al., Nucleic Acids Res. 21(7):1683-1684 (1993).)

[0906] Briefly, a specific RNA oligonucleotide is ligated to the 5′ ends of a population of RNA presumably containing full-length gene RNA transcripts. A primer set containing a primer specific to the ligated RNA oligonucleotide and a primer specific to a known sequence of the gene of interest is used to PCR amplify the 5′ portion of the desired full-length gene. This amplified product may then be sequenced and used to generate the full length gene.

[0907] This above method starts with total RNA isolated from the desired source, although poly-A+ RNA can be used. The RNA preparation can then be treated with phosphatase if necessary to eliminate 5′ phosphate groups on degraded or damaged RNA which may interfere with the later RNA ligase step. The phosphatase should then be inactivated and the RNA treated with tobacco acid pyrophosphatase in order to remove the cap structure present at the 5′ ends of messenger RNAs. This reaction leaves a 5′ phosphate group at the 5′ end of the cap cleaved RNA which can then be ligated to an RNA oligonucleotide using T4 RNA ligase.

[0908] This modified RNA preparation is used as a template for first strand cDNA synthesis using a gene specific oligonucleotide. The first strand synthesis reaction is used as a template for PCR amplification of the desired 5′ end using a primer specific to the ligated RNA oligonucleotide and a primer specific to the known sequence of the gene of interest. The resultant product is then sequenced and analyzed to confirm that the 5′ end sequence belongs to the desired gene.

### Example 2

### Isolation of Genomic Clones Corresponding to a Polynucleotide

[0909] A human genomic P1 library (Genomic Systems, Inc.) is screened by PCR using primers selected for the sequence corresponding to SEQ ID NO: X according to the method described in Example 1. (See also, Sambrook et al., Molecular Cloning: A Laboratory Manual, 2nd Edn., (1989), Cold Spring Harbor Laboratory Press).

### Example 3

### Tissue Specific Expression Analysis

[0910] The Human Genome Sciences, Inc. (HGS) database is derived from sequencing tissue and/or disease specific cDNA libraries. Libraries generated from a particular tissue are selected and the specific tissue expression pattern of EST groups or assembled contigs within these libraries is determined by comparison of the expression patterns of those groups or contigs within the entire database. ESTs and assembled contigs which show tissue specific expression are selected.

[0911] The original clone from which the specific EST sequence was generated, or in the case of an assembled contig, the clone from which the 5′ most EST sequence was generated, is obtained from the catalogued library of clones and the insert amplified by PCR using methods known in the art. The PCR product is denatured and then transferred in 96 or 384 well format to a nylon membrane (Schleicher and Scheull) generating an array filter of tissue specific clones. Housekeeping genes, maize genes, and known tissue specific genes are included on the filters. These targets can be used in signal normalization and to validate assay sensitivity. Additional targets are included to monitor probe length and specificity of hybridization.

[0912] Radioactively labeled hybridization probes are generated by first strand cDNA synthesis per the manufacturer's instructions (Life Technologies) from mRNA/RNA samples prepared from the specific tissue being analyzed (e.g., ovarian and/or breast tissue, ovarian and/or breast cancer, etc.). The hybridization probes are purified by gel exclusion chromatography, quantitated, and hybridized with the array filters in hybridization bottles at 65° C. overnight. The filters are washed under stringent conditions and signals are captured using a Fuji phosphorimager.

[0913] Data is extracted using AIS software and following background subtraction, signal normalization is performed. This includes a normalization of filter-wide expression levels between different experimental runs. Genes that are differentially expressed in the tissue of interest are identified.

### Example 4

### Chromosomal Mapping of the Polynucleotides

[0914] An oligonucleotide primer set is designed according to the sequence at the 5′ end of SEQ ID NO: X. This primer preferably spans about 100 nucleotides. This primer set is then used in a polymerase chain reaction under the following set of conditions: 30 seconds, 95° C.; 1 minute, 56° C.; 1 minute, 70° C. This cycle is repeated 32 times followed by one 5 minute cycle at 70° C. Human, mouse, and hamster DNA is used as template in addition to a somatic cell hybrid panel containing individual chromosomes or chromosome fragments (Bios, Inc). The reactions are analyzed on either 8% polyacrylamide gels or 3.5% agarose gels. Chromosome mapping is determined by the presence of an approximately 100 bp PCR fragment in the particular somatic cell hybrid.

### Example 5

### Bacterial Expression of a Polypeptide

[0915] A polynucleotide encoding a polypeptide of the present invention is amplified using PCR oligonucleotide primers corresponding to the 5′ and 3′ ends of the DNA sequence, as outlined in Example 1, to synthesize insertion fragments. The primers used to amplify the cDNA insert should preferably contain restriction sites, such as BamHI and XbaI, at the 5′ end of the primers in order to clone the amplified product into the expression vector. For example, BamHI and XbaI correspond to the restriction enzyme sites on the bacterial expression vector pQE-9. (Qiagen, Inc., Chatsworth, Calif.). This plasmid vector encodes antibiotic resistance (Amp^{r}), a bacterial origin of replication (ori), an IPTG-regulatable promoter/operator (P/O), a ribosome binding site (RBS), a 6-histidine tag (6-His), and restriction enzyme cloning sites.

[0916] The pQE-9 vector is digested with BamHI and XbaI and the amplified fragment is ligated into the pQE-9 vector maintaining the reading frame initiated at the bacterial RBS. The ligation mixture is then used to transform the E. coli strain M15/rep4 (Qiagen, Inc.) which contains multiple copies of the plasmid pREP4, which expresses the lacd repressor and also confers kanamycin resistance (Kan^{r}). Transformants are identified by their ability to grow on LB plates and ampicillin/kanamycin resistant colonies are selected. Plasmid DNA is isolated and confirmed by restriction analysis.

[0917] Clones containing the desired constructs are grown overnight (O/N) in liquid culture in LB media supplemented with both Amp (100 ug/ml) and Kan (25 ug/ml). The O/N culture is used to inoculate a large culture at a ratio of 1:100 to 1:250. The cells are grown to an optical density 600 (O.D.⁶⁰⁰) of between 0.4 and 0.6. IPTG (Isopropyl-B-D-thiogalacto pyranoside) is then added to a final concentration of 1 mM. IPTG induces by inactivating the lacI repressor, clearing the P/O leading to increased gene expression.

[0918] Cells are grown for an extra 3 to 4 hours. Cells are then harvested by centrifugation (20 mins at 6000×g). The cell pellet is solubilized in the chaotropic agent 6 Molar Guanidine HCl by stirring for 3-4 hours at 4° C. The cell debris is removed by centrifugation, and the supernatant containing the polypeptide is loaded onto a nickel-nitrilo-tri-acetic acid (“Ni-NTA”) affinity resin column (available from QIAGEN, Inc., supra). Proteins with a 6×His tag bind to the Ni-NTA resin with high affinity and can be purified in a simple one-step procedure (for details see: The QIAexpressionist (1995) QIAGEN, Inc., supra).

[0919] Briefly, the supernatant is loaded onto the column in 6 M guanidine-HCIl, pH 8. The column is first washed with 10 volumes of 6 M guanidine-HCl, pH 8, then washed with 10 volumes of 6 M guanidine-HCl pH 6, and finally the polypeptide is eluted with 6 M guanidine-HCl, pH 5.

[0920] The purified protein is then renatured by dialyzing it against phosphate-buffered saline (PBS) or 50 mM Na-acetate, pH 6 buffer plus 200 mM NaCl. Alternatively, the protein can be successfully refolded while immobilized on the Ni-NTA column. The recommended conditions are as follows: renature using a linear 6M-1M urea gradient in 500 mM NaCl, 20% glycerol, 20 mM Tris/HCl pH 7.4, containing protease inhibitors. The renaturation should be performed over a period of 1.5 hours or more. After renaturation the proteins are eluted by the addition of 250 mM immidazole. Immidazole is removed by a final dialyzing step against PBS or 50 mM sodium acetate pH 6 buffer plus 200 mM NaCl. The purified protein is stored at 4° C. or frozen at −80° C.

[0921] In addition to the above expression vector, the present invention further includes an expression vector, called pHE4a (ATCC Accession Number 209645, deposited on Feb. 25, 1998) which contains phage operator and promoter elements operatively linked to a polynucleotide of the present invention. This vector contains: 1) a neomycinphosphotransferase gene as a selection marker, 2) an E. coli origin of replication, 3) a T5 phage promoter sequence, 4) two lac operator sequences, 5) a Shine-Delgarno sequence, and 6) the lactose operon repressor gene (lacIq). The origin of replication (oriC) is derived from pUC19 (LTI, Gaithersburg, Md.). The promoter and operator sequences are made synthetically.

[0922] DNA can be inserted into the pHE4a by restricting the vector with NdeI and XbaI, BamHI, XhoI, or Asp718, running the restricted product on a gel, and isolating the larger fragment (the stuffer fragment should be about 310 base pairs). The DNA insert is generated according to the PCR protocol described in Example 1, using PCR primers having restriction sites for NdeI (5′ primer) and XbaI, BamHI, XhoI, or Asp718 (3′ primer). The PCR insert is gel purified and restricted with compatible enzymes. The insert and vector are ligated according to standard protocols.

[0923] The engineered vector could easily be substituted in the above protocol to express protein in a bacterial system.

### Example 6

### Purification of a Polypeptide from an Inclusion Body

[0924] The following alternative method can be used to purify a polypeptide expressed in E coli when it is present in the form of inclusion bodies. Unless otherwise specified, all of the following steps are conducted at 4-10° C.

[0925] Upon completion of the production phase of the E. coli fermentation, the cell culture is cooled to 4-10° C and the cells harvested by continuous centrifugation at 15,000 rpm (Heraeus Sepatech). On the basis of the expected yield of protein per unit weight of cell paste and the amount of purified protein required, an appropriate amount of cell paste, by weight, is suspended in a buffer solution containing 100 mM Tris, 50 mM EDTA, pH 7.4. The cells are dispersed to a homogeneous suspension using a high shear mixer.

[0926] The cells are then lysed by passing the solution through a microfluidizer (Microfuidics, Corp. or APV Gaulin, Inc.) twice at 4000-6000 psi. The homogenate is then mixed with NaCl solution to a final concentration of 0.5 M NaCl, followed by centrifugation at 7000×g for 15 min. The resultant pellet is washed again using 0.5M NaCl, 100 mM Tris, 50 mM EDTA, pH 7.4.

[0927] The resulting washed inclusion bodies are solubilized with 1.5 M guanidine hydrochloride (GuHCl) for 2-4 hours. After 7000×g centrifugation for 15 min., the pellet is discarded and the polypeptide containing supernatant is incubated at 4° C. overnight to allow further GuHCl extraction.

[0928] Following high speed centrifugation (30,000×g) to remove insoluble particles, the GuHCl solubilized protein is refolded by quickly mixing the GuHCl extract with 20 volumes of buffer containing 50 mM sodium, pH 4.5, 150 mM NaCl, 2 mM EDTA by vigorous stirring. The refolded diluted protein solution is kept at 4° C. without mixing for 12 hours prior to further purification steps.

[0929] To clarify the refolded polypeptide solution, a previously prepared tangential filtration unit equipped with 0.16 μm membrane filter with appropriate surface area (e.g., Filtron), equilibrated with 40 mM sodium acetate, pH 6.0 is employed. The filtered sample is loaded onto a cation exchange resin (e.g., Poros HS-50, Perseptive Biosystems). The column is washed with 40 mM sodium acetate, pH 6.0 and eluted with 250 mM, 500 mM, 1000 mM, and 1500 mM NaCl in the same buffer, in a stepwise manner. The absorbance at 280 nm of the effluent is continuously monitored. Fractions are collected and further analyzed by SDS-PAGE.

[0930] Fractions containing the polypeptide are then pooled and mixed with 4 volumes of water. The diluted sample is then loaded onto a previously prepared set of tandem columns of strong anion (Poros HQ-50, Perseptive Biosystems) and weak anion (Poros CM-20, Perseptive Biosystems) exchange resins. The columns are equilibrated with 40 mM sodium acetate, pH 6.0. Both columns are washed with 40 mM sodium acetate, pH 6.0, 200 mM NaCl. The CM-20 column is then eluted using a 10 column volume linear gradient ranging from 0.2 M NaCl, 50 mM sodium acetate, pH 6.0 to 1.0 M NaCl, 50 mM sodium acetate, pH 6.5. Fractions are collected under constant A₂₈₀ monitoring of the effluent. Fractions containing the polypeptide (determined, for. instance, by 16% SDS-PAGE) are then pooled.

[0931] The resultant polypeptide should exhibit greater than 95% purity after the above refolding and purification steps. No major contaminant bands should be observed from Commassie blue stained 16% SDS-PAGE gel when 5 μg of purified protein is loaded. The purified protein can also be tested for endotoxin/LPS contamination, and typically the LPS content is less than 0.1 ng/ml according to LAL assays.

### Example 7

### Cloning and Expression of a Polypeptide in a Baculovirus Expression System

[0932] In this example, the plasmid shuttle vector pA2 is used to insert a polynucleotide into a baculovirus to express a polypeptide. This expression vector contains the strong polyhedrin promoter of the Autographa californica nuclear polyhedrosis virus (AcMNPV) followed by convenient restriction sites such as BamHI, Xba I and Asp718. The polyadenylation site of the simian virus 40 (“SV40”) is used for efficient polyadenylation. For easy selection of recombinant virus, the plasmid contains the beta-galactosidase gene from E. coli under control of a weak Drosophila promoter in the same orientation, followed by the polyadenylation signal of the polyhedrin gene. The inserted genes are flanked on both sides by viral sequences for cell-mediated homologous recombination with wild-type viral DNA to generate a viable virus that express the cloned polynucleotide.

[0933] Many other baculovirus vectors can be used in place of the vector above, such as pAc373, pVL941, and pAcIM1, as one skilled in the art would readily appreciate, as long as the construct provides appropriately located signals for transcription, translation, secretion and the like, including a signal peptide and an in-frame AUG as required. Such vectors are described, for instance, in Luckow et al., Virology 170:31-39 (1989).

[0934] Specifically, the cDNA sequence contained in the deposited clone, including the AUG initiation codon, is amplified using the PCR protocol described in Example 1. If a naturally occurring signal sequence is used to produce the polypeptide of the present invention, the pA2 vector does not need a second signal peptide. Alternatively, the vector can be modified (pA2 GP) to include a baculovirus leader sequence, using the standard methods described in Summers et al., “A Manual of Methods for Baculovirus Vectors and Insect Cell Culture Procedures,” Texas Agricultural Experimental Station Bulletin No. 1555 (1987).

[0935] The amplified fragment is isolated from a 1% agarose gel using a commercially available kit (“Geneclean,” BIO 101 Inc., La Jolla, Calif.). The fragment then is digested with appropriate restriction enzymes and again purified on a 1% agarose gel.

[0936] The plasmid is digested with the corresponding restriction enzymes and optionally, can be dephosphorylated using calf intestinal phosphatase, using routine procedures known in the art. The DNA is then isolated from a 1% agarose gel using a commercially available kit (“Geneclean” BIO 101 Inc., La Jolla, Calif.).

[0937] The fragment and the dephosphorylated plasmid are ligated together with T4 DNA ligase. E. coli HB101 or other suitable E. coli hosts such as XL-1 Blue (Stratagene Cloning Systems, La Jolla, Calif.) cells are transformed with the ligation mixture and spread on culture plates. Bacteria containing the plasmid are identified by digesting DNA from individual colonies and analyzing the digestion product by gel electrophoresis. The sequence of the cloned fragment is confirmed by DNA sequencing.

[0938] Five μg of a plasmid containing the polynucleotide is co-transfected with 1.0 μg of a commercially available linearized baculovirus DNA (“BaculoGold™ baculovirus DNA”, Pharmingen, San Diego, Calif.), using the lipofection method described by Felgner et al., Proc. Natl. Acad. Sci. USA 84:7413-7417 (1987). One μg of BaculoGold™ virus DNA and 5 μg of the plasmid are mixed in a sterile well of a microtiter plate containing 50 μl of serum-free Grace's medium (Life Technologies Inc., Gaithersburg, Md.). Afterwards, 10 μl Lipofectin plus 90 μl Grace's medium are added, mixed and incubated for 15 minutes at room temperature. Then the transfection mixture is added drop-wise to Sf9 insect cells (ATCC CRL 1711) seeded in a 35 mm tissue culture plate with 1 ml Grace's medium without serum. The plate is then incubated for 5 hours at 27° C. The transfection solution is then removed from the plate and 1 ml of Grace's insect medium supplemented with 10% fetal calf serum is added. Cultivation is then continued at 27° C. for four days.

[0939] After four days the supernatant is collected and a plaque assay is performed, as described by Summers and Smith, supra. An agarose gel with “Blue Gal” (Life Technologies Inc., Gaithersburg) is used to allow easy identification and isolation of gal-expressing clones, which produce blue-stained plaques. (A detailed description of a “plaque assay” of this type can also be found in the user's guide for insect cell culture and baculovirology distributed by Life Technologies Inc., Gaithersburg, page 9-10.) After appropriate incubation, blue stained plaques are picked with the tip of a micropipettor (e.g., Eppendorf). The agar containing the recombinant viruses is then resuspended in a microcentrifuge tube containing 200 μl of Grace's medium and the suspension containing the recombinant baculovirus is used to infect Sf9 cells seeded in 35 mm dishes. Four days later the supernatants of these culture dishes are harvested and then they are stored at 4° C.

[0940] To verify the expression of the polypeptide, Sf9 cells are grown in Grace's medium supplemented with 10% heat-inactivated FBS. The cells are infected with the recombinant baculovirus containing the polynucleotide at a multiplicity of infection (“MOI”) of about 2. If radiolabeled proteins are desired, 6 hours later the medium is removed and is replaced with SF900 II medium minus methionine and cysteine (available from Life Technologies Inc., Rockville, Md.). After 42 hours, 5 μCi of ³⁵S-methionine and 5 μCi ³⁵S-cysteine (available from Amersham) are added. The cells are further incubated for 16 hours and then are harvested by centrifugation. The proteins in the supernatant as well as the intracellular proteins are analyzed by SDS-PAGE followed by autoradiography (if radiolabeled).

[0941] Microsequencing of the amino acid sequence of the amino terminus of purified protein may be used to determine the amino terminal sequence of the produced protein.

### Example 8

### Expression of a Polypeptide in Mammalian Cells

[0942] The polypeptide of the present invention can be expressed in a mammalian cell. A typical mammalian expression vector contains a promoter element, which mediates the initiation of transcription of mRNA, a protein coding sequence, and signals required for the termination of transcription and polyadenylation of the transcript. Additional elements include enhancers, Kozak sequences and intervening sequences flanked by donor and acceptor sites for RNA splicing. Highly efficient transcription is achieved with the early and late promoters from SV40, the long terminal repeats (LTRs) from Retroviruses, e.g., RSV, HTLVI, HIVI and the early promoter of the cytomegalovirus (CMV). However, cellular elements can also be used (e.g., the human actin promoter).

[0943] Suitable expression vectors for use in practicing the present invention include, for example, vectors such as pSVL and pMSG (Pharmacia, Uppsala, Sweden), pRSVcat (ATCC 37152), pSV2dhfr (ATCC 37146), pBC12MI (ATCC 67109), pCMVSport 2.0, and pCMVSport 3.0. Mammalian host cells that could be used include, human Hela, 293, H9 and Jurkat cells, mouse NIH3T3 and C127 cells, Cos 1, Cos 7 and CV1, quail QC1-3 cells, mouse L cells and Chinese hamster ovary (CHO) cells.

[0944] Alternatively, the polypeptide can be expressed in stable cell lines containing the polynucleotide integrated into a chromosome. The co-transfection with a selectable marker such as DHFR, gpt, neomycin, or hygromycin allows the identification and isolation of the transfected cells.

[0945] The transfected gene can also be amplified to express large amounts of the encoded protein. The DHFR (dihydrofolate reductase) marker is useful in developing cell lines that carry several hundred or even several thousand copies of the gene of interest. (See, e.g., Alt, F. W., et al., J. Biol. Chem. 253:1357-1370 (1978); Hamlin, J. L. and Ma, C., Biochem. et Biophys. Acta, 1097:107-143 (1990); Page, M. J. and Sydenham, M. A., Biotechnology 9:64-68 (1991).) Another useful selection marker is the enzyme glutamine synthase (GS) (Murphy et al., Biochem J. 227:277-279 (1991); Bebbington et al., Bio/Technology 10:169-175 (1992). Using these markers, the mammalian cells are grown in selective medium and the cells with the highest resistance are selected. These cell lines contain the amplified gene(s) integrated into a chromosome. Chinese hamster ovary (CHO) and NSO cells are often used for the production of proteins.

[0946] Derivatives of the plasmid pSV2-dhfr (ATCC Accession No. 37146), the expression vectors pC4 (ATCC Accession No. 209646) and pC6 (ATCC Accession No.209647) contain the strong promoter (LTR) of the Rous Sarcoma Virus (Cullen et al., Molecular and Cellular Biology, 438-447 (March, 1985)) plus a fragment of the CMV-enhancer (Boshart et al., Cell 41:521-530 (1985).) Multiple cloning sites, e.g., with the restriction enzyme cleavage sites BamHI, XbaI and Asp718, facilitate the cloning of the gene of interest. The vectors also contain the 3′ intron, the polyadenylation and termination signal of the rat preproinsulin gene, and the mouse DHFR gene under control of the SV40 early promoter.

[0947] Specifically, the plasmid pC6, for example, is digested with appropriate restriction enzymes and then dephosphorylated using calf intestinal phosphates by procedures known in the art. The vector is then isolated from a 1% agarose gel.

[0948] A polynucleotide of the present invention is amplified according to the protocol outlined in Example 1. If a naturally occurring signal sequence is used to produce the polypeptide of the present invention, the vector does not need a second signal peptide. Alternatively, if a naturally occurring signal sequence is not used, the vector can be modified to include a heterologous signal sequence. (See, e.g., International Publication No. WO 96/34891.)

[0949] The amplified fragment is isolated from a 1% agarose gel using a commercially available kit (“Geneclean,” BIO 101 Inc., La Jolla, Calif.). The fragment then is digested with appropriate restriction enzymes and again purified on a 1% agarose gel.

[0950] The amplified fragment is then digested with the same restriction enzyme and purified on a 1% agarose gel. The isolated fragment and the dephosphorylated vector are then ligated with T4 DNA ligase. E. coli HB101 or XL-1 Blue cells are then transformed and bacteria are identified that contain the fragment inserted into plasmid pC6 using, for instance, restriction enzyme analysis.

[0951] Chinese hamster ovary cells lacking an active DHFR gene is used for transfection. Five μg of the expression plasmid pC6 or pC4 is cotransfected with 0.5 μg of the plasmid pSVneo using lipofectin (Felgner et al., supra). The plasmid pSV2-neo contains a dominant selectable marker, the neo gene from Tn5 encoding an enzyme that confers resistance to a group of antibiotics including G418. The cells are seeded in alpha minus MEM supplemented with 1 mg/ml G418. After 2 days, the cells are trypsinized and seeded in hybridoma cloning plates (Greiner, Germany) in alpha minus MEM supplemented with 10, 25, or 50 ng/ml of methotrexate plus 1 mg/ml G418. After about 10-14 days single clones are trypsinized and then seeded in 6-well petri dishes or 10 ml flasks using different concentrations of methotrexate (50 nM, 100 nM, 200 nM, 400 nM, 800 nM). Clones growing at the highest concentrations of methotrexate are then transferred to new 6-well plates containing even higher concentrations of methotrexate (1 μM, 2 μM, 5 μM, 10 mM, 20 mM). The same procedure is repeated until clones are obtained which grow at a concentration of 100-200 μM. Expression of the desired gene product is analyzed, for instance, by SDS-PAGE and Western blot or by reversed phase HPLC analysis.

### Example 9

### Protein Fusions

[0952] The polypeptides of the present invention are preferably fused to other proteins. These fusion proteins can be used for a variety of applications. For example, fusion of the present polypeptides to His-tag, HA-tag, protein A, IgG domains, and maltose binding protein facilitates purification. (See Example 5; see also EP A 394,827; Traunecker, et al., Nature 331:84-86 (1988).) Similarly, fusion to IgG-1, IgG-3, and albumin increases the halflife time in vivo. Nuclear localization signals fused to the polypeptides of the present invention can target the protein to a specific subcellular localization, while covalent heterodimer or homodimers can increase or decrease the activity of a fusion protein. Fusion proteins can also create chimeric molecules having more than one function. Finally, fusion proteins can increase solubility and/or stability of the fused protein compared to the non-fused protein. All of the types of fusion proteins described above can be made by modifying the following protocol, which outlines the fusion of a polypeptide to an IgG molecule, or the protocol described in Example 5.

[0953] Briefly, the human Fc portion of the IgG molecule can be PCR amplified, using primers that span the 5′ and 3′ ends of the sequence described below. These primers also should have convenient restriction enzyme sites that will facilitate cloning into an expression vector, preferably a mammalian expression vector.

[0954] For example, if pC4 (ATCC Accession No. 209646) is used, the human Fe portion can be ligated into the BamHI cloning site. Note that the 3′ BamHI site should be destroyed. Next, the vector containing the human Fe portion is re-restricted with BamHI, linearizing the vector, and a polynucleotide of the present invention, isolated by the PCR protocol described in Example 1, is ligated into this BamHI site. Note that the polynucleotide is cloned without a stop codon, otherwise a fusion protein will not be produced.

[0955] If the naturally occurring signal sequence is used to produce the polypeptide of the present invention, pC4 does not need a second signal peptide. Alternatively, if the naturally occurring signal sequence is not used, the vector can be modified to include a heterologous signal sequence. (See, e.g., International Publication No. WO 96/34891.)

Human IgG Fc region:

| | |
|---|---|
| GGGATCCGGAGCCCAAATCTTCTGACAAAACTCACAC | (SEQ ID NO:1) |
| ATGCCCACCGTGCCCAGCACCTGAATTCGAGGGTGCA | |
| CCGTCAGTCTTCCTCTTCCCCCCAAAACCCAAGGACA | |
| CCCTCATGATCTCCCGGACTCCTGAGGTCACATGCGT | |
| GGTGGTGGACGTAAGCCACGAAGACCCTGAGGTCAAG | |
| TTCAACTGGTACGTGGACGGCGTGGAGGTGCATAATG | |
| CCAAGACAAAGCCGCGGGAGGAGCAGTACAACAGCAC | |
| GTACCGTGTGGTCAGCGTCCTCACCGTCCTGCACCAG | |
| GACTGGCTGAATGGCAAGGAGTACAAGTGCAAGGTCT | |
| CCAACAAAGCCCTCCCAACCCCCATCGAGAAAACCAT | |
| CTCCAAAGCCAAAGGGCAGCCCCGAGAACCACAGGTG | |
| TACACCCTGCCCCCATCCCGGGATGAGCTGACCAAGA | |
| ACCAGGTCAGCCTGACCTGCCTGGTCAAAGGCTTCTA | |
| TCCAAGCGACATCGCCGTGGAGTGGGAGAGCAATGGG | |
| CAGCCGGAGAACAACTACAAGACCACGCCTCCCGTGC | |
| TGGACTCCGACGGCTCCTTCTTCCTCTACAGCAAGCT | |
| CACCGTGGACAAGAGCAGGTGGCAGCAGGGGAACGTC | |
| TTCTCATGCTCCGTGATGCATGAGGCTCTGCACAACC | |
| ACTACACGCAGAAGAGCCTCTCCCTGTCTCCGGGTAA | |
| ATGAGTGCGACGGCCGCGACTCTAGAGGAT | |

### Example 10

### Production of an Antibody from a Polypeptide Hybridoma Technology

[0956] The antibodies of the present invention can be prepared by a variety of methods. (See, Current Protocols, Chapter 2.) As one example of such methods, cells expressing the ovarian antigen are administered to an animal to induce the production of sera containing polyclonal antibodies. In a preferred method, a preparation of the ovarian antigen is prepared and purified to render it substantially free of natural contaminants. Such a preparation is then introduced into an animal in order to produce polyclonal antisera of greater specific activity.

[0957] Monoclonal antibodies specific for the ovarian are prepared using hybridoma technology (Kohler et al., Nature 256:495 (1975); Kohler et al., Eur. J. Immunol. 6:511 (1976); Kohler et al., Eur. J. Immunol. 6:292 (1976); Hammerling et al., in: Monoclonal Antibodies and T-Cell Hybridomas, Elsevier, N.Y., pp. 563-681 (1981)). In general, an animal (preferably a mouse) is immunized with the ovarian antigen or, more preferably, with a secreted ovarian antigen -expressing cell. Such polypeptide-expressing cells are cultured in any suitable tissue culture medium, preferably in Earle's modified Eagle's medium supplemented with 10% fetal bovine serum (inactivated at about 56° C.), and supplemented with about 10 g/l of nonessential amino acids, about 1,000 U/ml of penicillin, and about 100 μg/ml of streptomycin.

[0958] The splenocytes of such mice are extracted and fused with a suitable myeloma cell line. Any suitable myeloma cell line may be employed in accordance with the present invention; however, it is preferable to employ the parent myeloma cell line (SP2O), available from the ATCC. After fusion, the resulting hybridoma cells are selectively maintained in HAT medium, and then cloned by limiting dilution as described by Wands et al. (Gastroenterology 80:225-232 (1981)). The hybridoma cells obtained through such a selection are then assayed to identify clones which secrete antibodies capable of binding the ovarian antigen.

[0959] Alternatively, additional antibodies capable of binding to the ovarian antigen can be produced in a two-step procedure using anti-idiotypic antibodies. Such a method makes use of the fact that antibodies are themselves antigens, and therefore, it is possible to obtain an antibody which binds to a second antibody. In accordance with this method, protein specific antibodies are used to immunize an animal, preferably a mouse. The splenocytes of such an animal are then used to produce hybridoma cells, and the hybridoma cells are screened to identify clones which produce an antibody whose ability to bind to the ovarian antigen-specific antibody can be blocked by the ovarian antigen. Such antibodies comprise anti-idiotypic antibodies to the ovarian antigen-specific antibody and are used to immunize an animal to induce formation of further ovarian antigen-specific antibodies.

[0960] For in vivo use of antibodies in humans, an antibody is “humanized”. Such antibodies can be produced using genetic constructs derived from hybridoma cells producing the monoclonal antibodies described above. Methods for producing chimeric and humanized antibodies are known in the art and are discussed herein. (See, for review, Morrison, Science 229:1202 (1985); Oi et al., BioTechniques 4:214 (1986); Cabilly et al., U.S. Pat. No. 4,816,567;fTaniguchi et al., EP 171496; Morrison et al., EP 173494; Neuberger et al., WO 8601533; Robinson et al., International Publication No. WO 8702671; Boulianne et al., Nature 312:643 (1984); Neuberger et al., Nature 314:268 (1985).)

[0961] Isolation Of Antibody Fragments Directed Against the Ovarian Antigen from a Library of scFvs

[0962] Naturally occurring V-genes isolated from human PBLs are constructed into a library of antibody fragments which contain reactivities against the ovarian antigen to which the donor may or may not have been exposed (see e.g., U.S. Pat. 5,885,793 incorporated herein by reference in its entirety).

[0963] Rescue of the Library. A library of scFvs is constructed from the RNA of human PBLs as described in International Publication No. WO 92/01047. To rescue phage displaying antibody fragments, approximately 10⁹ E. Coli harboring the phagemid are used to inoculate 50 ml of 2×TY containing 1% glucose and 100 μg/ml of ampicillin (2×TY-AMP-GLU) and grown to an O.D. of 0.8 with shaking. Five ml of this culture is used to inoculate 50 ml of 2×TY-AMP-GLU, 2×108 TU of delta gene 3 helper (M13 delta gene III, see International Publication No. WO 92/01047) are added and the culture incubated at 37° C. for 45 minutes without shaking and then at 37° C. for 45 minutes with shaking. The culture is centrifuged at 4000 r.p.m. for 10 min. and the pellet resuspended in 2 liters of 2×TY containing 100 μg/ml ampicillin and 50 ug/mi kanamycin and grown overnight. Phage are prepared as described in International Application No. WO 92/01047.

[0964] M13 delta gene III is prepared as follows: M13 delta gene III helper phage does not encode gene III protein, hence the phage(mid) displaying antibody fragments have a greater avidity of binding to antigen. Infectious M13 delta gene III particles are made by growing the helper phage in cells harboring a pUC19 derivative supplying the wild type gene III protein during phage morphogenesis. The culture is incubated for 1 hour at 37° C. without shaking and then for a further hour at 37° C. with shaking. Cells are spun down (IEC-Centra 8,400 r.p.m. for 10 min), resuspended in 300 ml 2×TY broth containing 100 μg ampicillin/ml and 25 [g kanamycin/ml (2xTY-AMP-KAN) and grown overnight, shaking at 37° C. Phage particles are purified and concentrated from the culture medium by two PEG-precipitations. (Sambrook et al., 1990),.resuspended in 2 ml PBS and passed through a 0.45 μm filter (Minisart NML; Sartorius) to give a final concentration of approximately 10¹³ transducing units/ml (ampicillin-resistant clones).

[0965] Panning of the Library. Immunotubes (Nunc) are coated overnight in PBS with 4 ml of either 100 μg/ml or 10 μg/ml of a polypeptide of the present invention. Tubes are blocked with 2% Marvel-PBS for 2 hours at 37° C. and then washed 3 times in PBS. Approximately 10¹³ TU of phage is applied to the tube and incubated for 30 minutes at room temperature tumbling on an over and under turntable and then left to stand for another 1.5 hours. Tubes are washed 10 times with PBS 0.1% Tween-20 and 10 times with PBS. Phage are eluted by adding 1 ml of 100 mM triethylamine and rotating 15 minutes on an under and over turntable after which the solution is immediately neutralized with 0.5 ml of 1.OM Tris-HCI, pH 7.4. Phage are then used to infect 10 ml of mid-log E. coli TG1 by incubating eluted phage with bacteria for 30 minutes at 37° C. The E. coli are then plated on TYE plates containing 1% glucose and 100 μg/ml ampicillin. The resulting bacterial library is then rescued with delta gene 3 helper phage as described above to prepare phage for a subsequent round of selection. This process is then repeated for a total of 4 rounds of affinity purification with tube-washing increased to 20 times with PBS, 0.1% Tween-20 and 20 times with PBS for rounds 3 and 4.

[0966] Characterization of Binders. Eluted phage from the 3rd and 4th rounds of selection are used to infect E. coli HB 2151 and soluble scFv is produced (Marks, et al., 1991) from single colonies for assay. ELISAs are performed with microtitre plates coated with 10 pg/ml of the polypeptide of the present invention in 50 mM bicarbonate pH 9.6. Clones positive in ELISA are further characterized by PCR fingerprinting (see, e.g., International Application No. WO 92/01047) and then by sequencing. These ELISA positive clones may also be further characterized by techniques known in the art, such as, for example, epitope mapping, binding affinity, receptor signal transduction, ability to block or competitively inhibit antibody/antigen binding, and competitive agonistic or antagonistic activity.

### Example 11

### Method of Determining Alterations in a Gene Corresponding to a Polynucleotide

[0967] RNA isolated from entire families or individual patients presenting with a phenotype of interest (such as a disease) is isolated. cDNA is then generated from these RNA samples using protocols known in the art. (See, Sambrook.) The cDNA is then used as a template for PCR, employing primers surrounding regions of interest in SEQ ID NO: X; and/or the nucleotide sequence of the cDNA contained in Clone ID NO: Z. Suggested PCR conditions consist of 35 cycles at 95 degrees C. for 30 seconds; 60-120 seconds at 52-58 degrees C.; and 60-120 seconds at 70 degrees C., using buffer solutions described in Sidransky et al., Science 252:706 (1991).

[0968] PCR products are then sequenced using primers labeled at their 5′ end with T4 polynucleotide kinase, employing SequiTherm Polymerase (Epicentre Technologies). The intron-exon boundaries of selected exons is also determined and genomic PCR products analyzed to confirm the results. PCR products harboring suspected mutations are then cloned and sequenced to validate the results of the direct sequencing.

[0969] PCR products are cloned into T-tailed vectors as described in Holton et al., Nucleic Acids Research, 19:1156 (1991) and sequenced with T7 polymerase (United States Biochemical). Affected individuals are identified by mutations not present in unaffected individuals.

[0970] Genomic rearrangements are also observed as a method of determining alterations in a gene corresponding to a polynucleotide. Genomic clones isolated according to Example 2 are nick-translated with digoxigenindeoxy-uridine 5′-triphosphate (Boehringer Manheim), and FISH performed as described in Johnson et al., Methods Cell Biol. 35:73-99 (1991). Hybridization with the labeled probe is carried out using a vast excess of human cot-1 DNA for specific hybridization to the corresponding genomic locus.

[0971] Chromosomes are counterstained with 4,6-diamino-2-phenylidole and propidium iodide, producing a combination of C- and R-bands. Aligned images for precise mapping are obtained using a triple-band filter set (Chroma Technology, Brattleboro, Vt.) in combination with a cooled charge-coupled device camera (Photometrics, Tucson, Ariz.) and variable excitation wavelength filters. (Johnson et al., Genet. Anal. Tech. Appl., 8:75 (1991).) Image collection, analysis and chromosomal fractional length measurements are performed using the ISee Graphical Program System. (Inovision Corporation, Durham, N.C.) Chromosome alterations of the genomic region hybridized by the probe are identified as insertions, deletions, and translocations. These alterations are used as a diagnostic marker for an associated disease.

### Example 12

### Method of Detecting Abnormal Levels of a Polypeptide in a Biological Sample

[0972] A polypeptide of the present invention can be detected in a biological sample, and if an increased or decreased level of the polypeptide is detected, this polypeptide is a marker for a particular phenotype. Methods of detection are numerous, and thus, it is understood that one skilled in the art can modify the following assay to fit their particular needs.

[0973] For example, antibody-sandwich ELISAs are used to detect polypeptides in a sample, preferably a biological sample. Wells of a microtiter plate are coated with specific antibodies, at a final concentration of 0.2 to 10 ug/ml. The antibodies are either monoclonal or polyclonal and are produced by the method described in Example 10. The wells are blocked so that non-specific binding of the polypeptide to the well is reduced.

[0974] The coated wells are then incubated for >2 hours at RT with a sample containing the polypeptide. Preferably, serial dilutions of the sample should be used to validate results. The plates are then washed three times with deionized or distilled water to remove unbound polypeptide.

[0975] Next, 50 ul of specific antibody-alkaline phosphatase conjugate, at a concentration of 25-400 ng, is added and incubated for 2 hours at room temperature. The plates are again washed three times with deionized or distilled water to remove unbound conjugate.

[0976] Add 75 ul of 4-methylumbelliferyl phosphate (MUP) or p-nitrophenyl phosphate (NPP) substrate solution to each well and incubate 1 hour at room temperature. Measure the reaction by a microtiter plate reader. Prepare a standard curve, using serial dilutions of a control sample, and plot polypeptide concentration on the X-axis (log scale) and fluorescence or absorbance of the Y-axis (linear scale). Interpolate the concentration of the polypeptide in the sample using the standard curve.

### Example 13

### Formulation

[0977] The invention also provides methods of treatment and/or prevention of diseases or disorders (such as, for example, any one or more of the diseases or disorders disclosed herein) by administration to a subject of an effective amount of a Therapeutic. By therapeutic is meant polynucleotides or polypeptides of the invention (including fragments and variants), agonists or antagonists thereof, and/or antibodies thereto, in combination with a pharmaceutically acceptable carrier type (e.g., a sterile carrier).

[0978] The Therapeutic will be formulated and dosed in a fashion consistent with good medical practice, taking into account the clinical condition of the individual patient (especially the side effects of treatment with the Therapeutic alone), the site of delivery, the method of administration, the scheduling of administration, and other factors known to practitioners. The “effective amount” for purposes herein is thus determined by such considerations.

[0979] As a general proposition, the total pharmaceutically effective amount of the Therapeutic administered parenterally per dose will be in the range of about 1 ug/kg/day to 10 mg/kg/day of patient body weight, although, as noted above, this will be subject to therapeutic discretion. More preferably, this dose is at least 0.01 mg/kg/day, and most preferably for humans between about 0.01 and 1 mg/kg/day for the hormone. If given continuously, the Therapeutic is typically administered at a dose rate of about 1 ug/kg/hour to about 50 ug/kg/hour, either by 1-4 injections per day or by continuous subcutaneous infusions, for example, using a mini-pump. An intravenous bag solution may also be employed. The length of treatment needed to observe changes and the interval following treatment for responses to occur appears to vary depending on the desired effect.

[0980] Therapeutics can be are administered orally, rectally, parenterally, intracistemally, intravaginally, intraperitoneally, topically (as by powders, ointments, gels, drops or transdermal patch), bucally, or as an oral or nasal spray. “Pharmaceutically acceptable carrier” refers to a non-toxic solid, semisolid or liquid filler, diluent, encapsulating material or formulation auxiliary of any. The term “parenteral” as used herein refers to modes of administration which include intravenous, intramuscular, intraperitoneal, intrastemal, subcutaneous and intraarticular injection and infusion.

[0981] Therapeutics of the invention are also suitably administered by sustained-release systems. Suitable examples of sustained-release Therapeutics are administered orally, rectally, parenterally, intracistemally, intravaginally, intraperitoneally, topically (as by powders, ointments, gels, drops or transdermal patch), bucally, or as an oral or nasal spray. “Pharmaceutically acceptable carrier” refers to a non-toxic solid, semisolid or liquid filler, diluent, encapsulating material or formulation auxiliary of any type. The term “parenteral” as used herein refers to modes of administration which include intravenous, intramuscular, intraperitoneal, intrastemal, subcutaneous and intraarticular injection and infusion.

[0982] Therapeutics of the invention are also suitably administered by sustained-release systems. Suitable examples of sustained-release Therapeutics include suitable polymeric materials (such as, for example, semi-permeable polymer matrices in the form of shaped articles, e.g., films, or mirocapsules), suitable hydrophobic materials (for example as an emulsion in an acceptable oil) or ion exchange resins, and sparingly soluble derivatives (such as, for example, a sparingly soluble salt).

[0983] Sustained-release matrices include polylactides (U.S. Pat. No. 3,773,919, EP 58,481), copolymers of L-glutamic acid and gamma-ethyl-L-glutamate (Sidman et al., Biopolymers 22:547-556 (1983)), poly (2-hydroxyethyl methacrylate) (Langer et al., J. Biomed. Mater. Res. 15:167-277 (1981), and Langer, Chem. Tech. 12:98-105 (1982)), ethylene vinyl acetate (Langer et al., Id.) or poly-D-(−)-3-hydroxybutyric acid (EP 133,988).

[0984] Sustained-release Therapeutics also include liposomally entrapped Therapeutics of the invention (see generally, Langer, Science 249:1527-1533 (1990); Treat et al., in Liposomes in the Therapy of Infectious Disease and Cancer, Lopez-Berestein and Fidler (eds.), Liss, New York, pp. 317 -327 and 353-365 (1989)). Liposomes containing the Therapeutic are prepared by methods known per se: DE 3,218,121; Epstein et al., Proc. Natl. Acad. Sci. (USA) 82:3688-3692 (1985); Hwang et al., Proc. Natl. Acad. Sci.(USA) 77:4030-4034 (1980); EP 52,322; EP 36,676; EP 88,046; EP 143,949; EP 142,641; Japanese Pat. Appl. 83-118008; U.S. Pat. Nos. 4,485,045 and 4,544,545; and EP 102,324. Ordinarily, the liposomes are of the small (about 200-800 Angstroms) unilamellar type in which the lipid content is greater than about 30 mol percent cholesterol, the selected proportion being adjusted for the optimal Therapeutic.

[0985] In yet an additional embodiment, the Therapeutics of the invention are delivered by way of a pump..(see Langer, supra; Sefton, CRC Crit. Ref. Biomed. Eng. 14:201 (1987); Buchwald et al., Surgery 88:507 (1980); Saudek et al., N. Engl. J. Med. 321:574 (1989)).

[0986] Other controlled release systems are discussed in the review by Langer (Science 249:1527-1533 (1990)).

[0987] For parenteral administration, in one embodiment, the Therapeutic is formulated generally by mixing it at the desired degree of purity, in a unit dosage injectable form (solution, suspension, or emulsion), with a pharmaceutically acceptable carrier, i.e., one that is non-toxic to recipients at the dosages and concentrations employed and is compatible with other ingredients of the formulation. For example, the formulation preferably does not include oxidizing agents and other compounds that are known to be deleterious to the Therapeutic.

[0988] Generally, the formulations are prepared by contacting the Therapeutic uniformly and intimately with liquid carriers or finely divided solid carriers or both. Then, if necessary, the product is shaped into the desired formulation. Preferably the carrier is a parenteral carrier, more preferably a solution that is isotonic with the blood of the recipient. Examples of such carrier vehicles include water, saline, Ringer's solution, and dextrose solution. Non-aqueous vehicles such as fixed oils and ethyl oleate are also useful herein, as well as liposomes.

[0989] The carrier suitably contains minor amounts of additives such as substances that enhance isotonicity and chemical stability. Such materials are non-toxic to recipients at the dosages and concentrations employed, and include buffers such as phosphate, citrate, succinate, acetic acid, and other organic acids or their salts; antioxidants such as ascorbic acid; low molecular weight (less than about ten residues) polypeptides, e.g., polyarginine or tripeptides; proteins, such as serum albumin, gelatin, or immunoglobulins; hydrophilic polymers such as polyvinylpyrrolidone; amino acids, such as glycine, glutamic acid, aspartic acid, or arginine; monosaccharides, disaccharides, and other carbohydrates including cellulose or its derivatives, glucose, manose, or dextrins; chelating agents such as EDTA; sugar alcohols such as mannitol or sorbitol; counterions such as sodium; and/or nonionic surfactants such as polysorbates, poloxamers, or PEG.

[0990] The Therapeutic is typically formulated in such vehicles at a concentration of about 0.1 mg/ml to 100 mg/ml, preferably 1-10 mg/ml,-at a pH of about 3 to 8. It will be understood that the use of certain of the foregoing excipients, carriers, or stabilizers will result in the formation of polypeptide salts.

[0991] Any pharmaceutical used for therapeutic administration can be sterile. Sterility is readily accomplished by filtration through sterile filtration membranes (e.g., 0.2 micron membranes). Therapeutics generally are placed into a container having a sterile access port, for example, an intravenous solution bag or vial having a stopper pierceable by a hypodermic injection needle.

[0992] Therapeutics ordinarily will be stored in unit or multi-dose containers, for example, sealed ampoules or vials, as an aqueous solution or as a lyophilized formulation for reconstitution. As an example of a lyophilized formulation, 10-ml vials are filled with 5 ml of sterile-filtered 1% (w/v) aqueous Therapeutic solution, and the resulting mixture is lyophilized. The infusion solution is prepared by reconstituting the lyophilized Therapeutic using bacteriostatic Water-for-Injection.

[0993] The invention also provides a pharmaceutical pack or kit comprising one or more containers filled with one or more of the ingredients of the Therapeutics of the invention. Associated with such container(s) can be a notice in the form prescribed by a governmental agency regulating the manufacture, use or sale of pharmaceuticals or biological products, which notice reflects approval by the agency of manufacture, use or sale for human administration. In addition, the Therapeutics may be employed in conjunction with other therapeutic compounds.

[0994] The Therapeutics of the invention may be administered alone or in combination with adjuvants. Adjuvants that may be administered with the Therapeutics of the invention include, but are not limited to, alum, alum plus deoxycholate (ImmunoAg), MTP-PE (Biocine Corp.), QS21 (Genentech, Inc.), BCG (e.g., THERACYS®), MPL and nonviable prepartions of Corynebacterium parvum. In a specific embodiment, Therapeutics of the invention are administered in combination with alum. In another specific embodiment, Therapeutics of the invention are administered in combination with QS-21. Further adjuvants that may be administered with the Therapeutics of the invention include, but are not limited to, Monophosphoryl lipid immunomodulator, AdjuVax 100a, QS-21, QS-18, CRL1005, Aluminum salts, MF-59, and Virosomal adjuvant technology. Vaccines>that may be administered with the Therapeutics of the invention include, but are not limited to, vaccines directed toward protection against MMR (measles, mumps, rubella), polio, varicella, tetanus/diptheria, hepatitis A, hepatitis B, haemophilus influenzae B, whooping cough, pneumonia, influenza, Lyme's Disease, rotavirus, cholera, yellow fever, Japanese encephalitis, poliomyelitis, rabies, typhoid fever, and pertussis. Combinations may be administered either concomitantly, e.g., as an admixture, separately but simultaneously or concurrently; or sequentially. This includes presentations in which the combined agents are administered together as a therapeutic mixture, and also procedures in which the combined agents are administered separately but simultaneously, e.g., as through separate intravenous lines into the same individual. Administration “in combination” further includes the separate administration of one of the compounds or agents given first, followed by the second.

[0995] The Therapeutics of the invention may be administered alone or in combination with other therapeutic agents. Therapeutic agents that may be administered in combination with the Therapeutics of the invention, include but not limited to, chemotherapeutic agents, antibiotics, steroidal and non-steroidal anti-inflammatories, conventional immunotherapeutic agents, and/or therapeutic treatments described below. Combinations may be administered either concomitantly, e.g., as an admixture, separately but simultaneously or concurrently; or sequentially. This includes presentations in which the combined agents are administered together as a therapeutic mixture, and also procedures in which the combined agents are administered separately but simultaneously, e.g., as through separate intravenous lines into the same individual. Administration “in combination” further includes the separate administration of one of the compounds or agents given first, followed by the second.

[0996] In certain embodiments, Therapeutics of the invention are administered in combination with antiretroviral agents, nucleoside/nucleotide reverse transcriptase inhibitors (NRTIs), non-nucleoside reverse transcriptase inhibitors (NNRTIs), and/or protease inhibitors (PIs). NRTIs that may be administered in combination with the Therapeutics of the invention, include, but are not limited to, RETROVIR™ (zidovudine/AZT), VIDEX™ (didanosine/ddI), HIVID™ (zalcitabine/ddC), ZERIT™ (stavudine/d4T), EPIVIR™ (lamivudine/3TC), and COMBIVIR™ (zidovudine/lamivudine). NNRTIs that may be administered in combination with the Therapeutics of the invention, include, but are not limited to, VIRAMUNE™ (nevirapine), RESCRIPTOR™ (delavirdine), and SUSTIVA™ (efavirenz). Protease inhibitors that may be administered in combination with the Therapeutics of the invention, include, but are not limited to, CRIXIVAN™ (indinavir), NORVIR™ (ritonavir), INVIRASE™ (saquinavir), and VIRACEPT™ (nelfinavir). In a specific embodiment, antiretroviral agents, nucleoside reverse transcriptase inhibitors, non-nucleoside reverse transcriptase inhibitors, and/or protease inhibitors may be used in any combination with Therapeutics of the invention to treat AIDS and/or to prevent or treat HIV infection.

[0997] Additional NRTIs include LODENOSINE™ (F-ddA; an acid-stable adenosine NRTI; Triangle/Abbott; COVIRACIL™ (emtricitabine/FTC; structurally related to lamivudine (3TC) but with 3- to 10-fold greater activity in vitro; Triangle/Abbott); dOTC (BCH-10652, also structurally related to lamivudine but retains activity against a substantial proportion of lamivudine-resistant isolates; Biochem Pharma); Adefovir (refused approval for anti-HIV therapy by FDA; Gilead Sciences); PREVEON® (Adefovir Dipivoxil, the active prodrug of adefovir; its active form is PMEA-pp); TENOFOVIR™ (bis-POC PMPA, a PMPA prodrug; Gilead); DAPD/DXG (active metabolite of DAPD; Triangle/Abbott); D-D4FC (related to 3TC, with activity against AZT/3TC-resistant virus); GW420867X (Glaxo Wellcome); ZIAGEN™ (abacavir/159U89; Glaxo Wellcome Inc.); CS-87 (3′azido-2′,3′-dideoxyuridine; WO 99/66936); and S-acyl-2-thioethyl (SATE)-bearing prodrug forms of β-L-FD4C and β-L-FddC (WO 98/17281).

[0998] Additional NNRTIs include COACTINON™ (Emivinne/MKC-442, potent NNRTI of the HEPT class; Triangle/Abbott); CAPRAVIRINE™ (AG-1549/S-1153, a next generation NNRTI with activity against viruses containing the K103N mutation; Agouron); PNU-142721 (has 20- to 50-fold greater activity than its predecessor delavirdine and is active against K103N mutants; Pharmacia & Upjohn); DPC-961 and DPC-963 (second-generation derivatives of efavirenz, designed to be active against viruses with the K103N mutation; DuPont); GW-420867X (has 25-fold greater activity than HBY097 and is active against K103N mutants; Glaxo Wellcome); CALANOLIDE A (naturally occurring agent from the latex tree; active against viruses containing either or both the Y181C and K103N mutations); and Propolis (WO 99/49830).

[0999] Additional protease inhibitors include LOPINAVIR™ (ABT378/r; Abbott Laboratories); BMS-232632 (an azapeptide; Bristol-Myres Squibb); TIPRANAVIR™ (PNU-140690, a non-peptic dihydropyrone; Pharmacia & Upjohn); PD-178390 (a nonpeptidic dihydropyrone; Parke-Davis); BMS 232632 (an azapeptide; Bristol-Myers Squibb); L-756,423 (an indinavir analog; Merck); DMP-450 (a cyclic urea compound; Avid & DuPont); AG-1776 (a peptidomimetic with in vitro activity against protease inhibitor-resistant viruses; Agouron); VX-175/GW-433908 (phosphate prodrug of amprenavir; Vertex & Glaxo Welcome); CGP61755 (Ciba); and AGENERASE™ (amprenavir; Glaxo Wellcome Inc.).

[1000] Additional antiretroviral agents include fusion inhibitors/gp41 binders. Fusion inhibitors/gp41 binders include T-20 (a peptide from residues 643-678 of the HIV gp41 transmembrane protein ectodomain which binds to gp41 in its resting state and prevents transformation to the fuisogenic state; Trimeris) and T-1249 (a second-generation fusion inhibitor; Trimeris).

[1001] Additional antiretroviral agents include fusion inhibitors/chemokine receptor antagonists. Fusion inhibitors/chemokine receptor antagonists include CXCR4 antagonists such as AMD 3100 (a bicyclam), SDF-1 and its analogs, and ALX40-4C (a cationic peptide), T22 (an 18 amino acid peptide; Trimeris) and the T22 analogs T134 and T140; CCR5 antagonists such as RANTES (9-68), AOP-RANTES, NNY-RANTES, and TAK-779; and CCR5/CXCR4 antagonists such as NSC 651016 (a distamycin analog). Also included are CCR2B, CCR3, and CCR6 antagonists. Chemokine recpetor agonists such as RANTES, SDF-1, MIP-1α, MIP-1β, etc., may also inhibit fusion.

[1002] Additional antiretroviral agents include integrase inhibitors. Integrase inhibitors include dicaffeoylquinic (DFQA) acids; L-chicoric acid (a dicaffeoyltartaric (DCTA) acid); quinalizarin (QLC) and related anthraquinones; ZINTEVIR™ (AR 177, an oligonucleotide that probably acts at cell surface rather than being a true integrase inhibitor; Arondex); and naphthols such as those disclosed in WO 98/50347.

[1003] Additional antiretroviral agents include hydroxyurea-like compunds such as BCX-34 (a purine nucleoside phosphorylase inhibitor; Biocryst); ribonucleotide reductase inhibitors such as DIDOX™ (Molecules for Health); inosine monophosphate dehydrogenase (IMPDH) inhibitors sucha as VX-497 (Vertex); and myvopholic acids such as CellCept (mycophenolate mofetil; Roche).

[1004] Additional antiretroviral agents include inhibitors of viral integrase, inhibitors of viral genome nuclear translocation such as arylene bis(methylketone) compounds; inhibitors of HIV entry such as AOP-RANTES, NNY-RANTES, RANTES-IgG fusion protein, soluble complexes of RANTES and glycosaminoglycans (GAG), and AMD-3100; nucleocapsid zinc finger inhibitors such as dithiane compounds; targets of HIV Tat and Rev; and pharnacoenhancers such as ABT-378.

[1005] Other antiretroviral therapies and adjunct therapies include cytokines and lymphokines such as MIP-1α, MIP-1β, SDF-1α, IL-2, PROLEUKIN™ (aldesleukin/L2-7001; Chiron), IL-4, IL-10, IL-12, and IL-13; interferons such as IFN-α2a; antagonists of TNFs, NFκB, GM-CSF, M-CSF, and.IL-10; agents that modulate immune activation such as cyclosporin and prednisone; vaccines such as Remune™ (HIV Immunogen), APL 400-003 (Apollon), recombinant gp120 and fragments, bivalent (B/E) recombinant envelope glycoprotein, rgp120CM235, MN rgp120, SF-2 rgp120, gp120/soluble CD4 complex, Delta JR-FL protein, branched synthetic peptide derived from discontinuous gp120 C3/C4 domain, fusion-competent immunogens, and Gag, Pol, Nef, and Tat vaccines; gene-based therapies such as genetic suppressor elements (GSEs; WO 98/54366), and intrakines (genetically modified CC chemokines targetted to the ER to block surface expression of newly synthesized CCR5 (Yang et al., PNAS 94:11567-72 (1997); Chen et al., Nat. Med. 3:1110-16 (1997)); antibodies such as the anti-CXCR4 antibody 12G5, the anti-CCR5 antibodies 2D7, 5C7, PA8, PA9, PA10, PA11, PA12, and PA14, the anti-CD4 antibodies Q4120 and RPA-T4, the anti-CCR3 antibody 7B11, the anti-gp120 antibodies 17b, 48d, 447-52D, 257-D, 268-D and 50.1, anti-Tat antibodies, anti-TNF-α antibodies, and monoclonal antibody 33A; aryl hydrocarbon (AH) receptor agonists and antagonists such as TCDD, 3,3′,4,4′,5-pentachlorobiphenyl, 3,3′,4,4′-tetrachlorobiphenyl, and α-naphthoflavone (WO 98/30213); and antioxidants such as γ-L-glutamyl-L-cysteine ethyl ester (γ-GCE; WO 99/56764).

[1006] In a further embodiment, the Therapeutics of the invention are administered in combination with an antiviral agent. Antiviral agents that may be administered with the Therapeutics of the invention include, but are not limited to, acyclovir, ribavirin, amantadine, and remantidine.

[1007] In other embodiments, Therapeutics of the invention may be administered in combination with anti-opportunistic infection agents. Anti-opportunistic agents that may be administered in combination with the Therapeutics of the invention, include, but are not limited to, TRIMETHOPRIM-SULFAMETHOXAZOLE™, DAPSONE™, PENTAMIDINE™, ATOVAQUONE™, ISONIAZID™, RIFAMPIN™, PYRAZINAMIDE™, ETHAMBUTOL™, RIFABUTIN™, CLARITHROMYCIN™, AZITHROMYCIN™, GANCICLOVIR™, FOSCARNET™, CIDOFOVIR™, FLUCONAZOLE™, ITRACONAZOLE™, KETOCONAZOLE™, ACYCLOVIR™, FAMCICOLVIR™, PYRIMETHAMINE™, LEUCOVORIN™, NEUPOGEN™ (filgrastim/G-CSF), and LEUKINE™ (sargramostim/GM-CSF). In a specific embodiment, Therapeutics of the invention are used in any combination with TRIMETHOPRIM-SULFAMETHOXAZOLE™, DAPSONE™, PENTAMIDINE™, and/or ATOVAQUONE™ to prophylactically treat or prevent an opportunistic Pneumocystis carinii pneumonia infection. In another specific embodiment, Therapeutics of the invention are used in any combination with ISONIAZID™, RIFAMPIN™, PYRAZINAMIDE™, and/or ETHAMBUTOL™ to prophylactically treat or prevent an opportunistic Mycobacterium avium complex infection. In another specific embodiment, Therapeutics of the invention are used in any combination with RIFABUTIN™, CLARITHROMYCIN™, and/or AZITHROMYCIN™ to prophylactically treat or prevent an opportunistic Mycobacterium tuberculosis infection. In another specific embodiment, Therapeutics of the invention are used in any combination with GANCICLOVIR™, FOSCARNET™, and/or CIDOFOVIR™ to prophylactically treat or prevent an opportunistic cytomegalovirus infection. In another specific embodiment, Therapeutics of the invention are used in any combination with FLUCONAZOLE™, ITRACONAZOLE™, and/or KETOCONAZOLE™ to prophylactically treat or prevent an opportunistic fungal infection. In another specific embodiment, Therapeutics of the invention are used in any combination with ACYCLOVIR™ and/or FAMCICOLVIR™ to prophylactically treat or prevent an opportunistic herpes simplex virus type I and/or type II infection. In another specific embodiment, Therapeutics of the invention are used in any combination with PYRIMETHAMINE™ and/or LEUCOVORIN™ to prophylactically treat or prevent an opportunistic Toxoplasma gondii infection. In another specific embodiment, Therapeutics of the invention are used in any combination with LEUCOVORIN™ and/or NEUPOGEN™ to prophylactically treat or prevent an opportunistic bacterial infection.

[1008] In a further embodiment, the Therapeutics of the invention are administered in combination with an antibiotic agent. Antibiotic agents that may be administered with the Therapeutics of the invention include, but are not limited to, amoxicillin, beta-lactamases, aminoglycosides, beta-lactam (glycopeptide), beta-lactamases, Clindamycin, chloramphenicol, cephalosporins, ciprofloxacin, ciprofloxacin, erythromycin, fluoroquinolones, macrolides, metronidazole, penicillins, quinolones, rapamycin, rifampin, streptomycin, sulfonamide, tetracyclines, trimethoprim, trimethoprim-sulfamthoxazole, and vancomycin.

[1009] In other embodiments, Therapeutics of the invention are administered in combination with immunosuppressive agents. Immunosuppressive agents that may be administered in combination with the Therapeutics of the invention include, but are not limited to, steroids, cyclosporine, cyclosporine analogs, cyclophosphamide methylprednisone, prednisone, azathioprine, FK-506, 15-deoxyspergualin, and other immunosuppressive agents that act by suppressing the function of responding T cells. Other immunosuppressive agents that may be administered in combination with the Therapeutics of the invention include, but are not limited to, prednisolone, methotrexate, thalidomide, methoxsalen, rapamycin, leflunomide, mizoribine (BREDININ™), brequinar, deoxyspergualin, and azaspirane (SKF 105685), ORTHOCLONE OKT® 3 (muromonab-CD3), SANDIMMIUNE™, NEORAL™, SANGDYA™ (cyclosporine), PROGRAF® (FK506, tacrolimus), CELLCEPT® (mycophenolate motefil, of which the active metabolite is mycophenolic acid), IMURAN™ (azathioprine), glucocorticosteroids, adrenocortical steroids such as DELTASONE™ (prednisone) and HYDELTRASOL™ (prednisolone), FOLEX™ and MEXATE™ (methotrxate), OXSORALEN-ULTRA™ (methoxsalen) and RAPAMUNE™ (sirolimus). In a specific embodiment, immunosuppressants may be used to prevent rejection of organ or bone marrow transplantation.

[1010] In an additional embodiment, Therapeutics of the invention are administered alone or in combination with one or more intravenous immune globulin preparations. Intravenous immune globulin preparations that may be administered with the Therapeutics of the invention include, but not limited to, GAMMAR™, IVEEGAM™, SANDOGLOBULIN™, GAMMAGARD S/D™, ATGAM™ (antithymocyte glubulin), and GAMIMUNE™. In a specific embodiment, Therapeutics of the invention are administered in combination with intravenous immune globulin preparations in transplantation therapy (e.g., bone marrow transplant).

[1011] In certain embodiments, the Therapeutics of the invention are administered alone or in combination with an anti-inflammatory agent. Anti-inflammatory agents that may be administered with the Therapeutics of the invention include, but are not limited to, corticosteroids (e.g. betamethasone, budesonide, cortisone, dexamethasone, hydrocortisone, methylprednisolone, prednisolone, prednisone, and triamcinolone), nonsteroidal anti-inflammatory drugs (e.g., diclofenac, diflunisal, etodolac, fenoprofen, floctafenine, flurbiprofen, ibuprofen, indomethacin, ketoprofen, meclofenamate, mefenamic acid, meloxicam, nabumetone, naproxen, oxaprozin, phenylbutazone, piroxicam, sulindac, tenoxicam, tiaprofenic acid, and tolmetin.), as well as antihistamines, aminoarylcarboxylic acid derivatives, arylacetic acid derivatives, arylbutyric acid derivatives, arylcarboxylic acids, arylpropionic acid derivatives, pyrazoles, pyrazolones, salicylic acid derivatives, thiazinecarboxamides, e-acetamidocaproic acid, S-adenosylmethionine, 3-amino-4-hydroxybutyric acid, amixetrine, bendazac, benzydamine, bucolome, difenpiramide, ditazol, emorfazone, guaiazulene, nabumetone, nimesulide, orgotein, oxaceprol, paranyline, perisoxal, pifoxime, proquazone, proxazole, and tenidap.

[1012] In an additional embodiment, the compositions of the invention are administered alone or in combination with an anti-angiogenic agent. Anti-angiogenic agents that may be administered with the compositions of the invention include, but are not limited to, Angiostatin (Entremed, Rockville, Md.), Troponin-1 (Boston Life Sciences, Boston, Mass.), anti-Invasive Factor, retinoic acid and derivatives thereof, paclitaxel (Taxol), Suramin, Tissue Inhibitor of Metalloproteinase-1, Tissue Inhibitor of Metalloproteinase-2, VEGI, Plasminogen Activator Inhibitor-1, Plasminogen Activator Inhibitor-2, and various forms of the lighter “d group” transition metals.

[1013] Lighter “d group” transition metals include, for example, vanadium, molybdenum, tungsten, titanium, niobium, and tantalum species. Such transition metal species may form transition metal complexes. Suitable complexes of the above-mentioned transition metal species include oxo transition metal complexes.

[1014] Representative examples of vanadium complexes include oxo vanadium complexes such as vanadate and vanadyl complexes. Suitable vanadate complexes include metavanadate and orthovanadate complexes such as, for example, ammonium metavanadate, sodium metavanadate, and sodium orthovanadate. Suitable vanadyl complexes include, for example, vanadyl acetylacetonate and vanadyl sulfate including vanadyl sulfate hydrates such as vanadyl sulfate mono- and trihydrates.

[1015] Representative examples of tungsten and molybdenum complexes also include oxo complexes. Suitable oxo tungsten complexes include tungstate and tungsten oxide complexes. Suitable tungstate complexes include ammonium tungstate, calcium tungstate, sodium tungstate dihydrate, and tungstic acid. Suitable tungsten oxides include tungsten (IV) oxide and tungsten (VI) oxide. Suitable oxo molybdenum complexes include molybdate, molybdenum oxide, and molybdenyl complexes. Suitable molybdate complexes include ammonium molybdate and its hydrates, sodium molybdate and its hydrates, and potassium molybdate and its hydrates. Suitable molybdenum oxides include molybdenum (VI) oxide, molybdenum (VI) oxide, and molybdic acid. Suitable molybdenyl complexes include, for example, molybdenyl acetylacetonate. Other suitable tungsten and molybdenum complexes include hydroxo derivatives derived from, for example, glycerol, tartaric acid, and sugars.

[1016] A wide variety of other anti-angiogenic factors may also be utilized within the context of the present invention. Representative examples include, but are not limited to, platelet factor 4; protamine sulphate; sulphated chitin derivatives (prepared from queen crab shells), (Murata et al., Cancer Res. 51:22-26, (1991)); Sulphated Polysaccharide Peptidoglycan Complex (SP-PG) (the function of this compound may be enhanced by the presence of steroids such as estrogen, and tamoxifen citrate); Staurosporine; modulators of matrix metabolism, including for example, proline analogs, cishydroxyproline, d,L-3,4-dehydroproline, Thiaproline, alpha,alpha-dipyridyl, aminopropionitrile fumarate; 4-propyl-5-(4-pyridinyl)-2(3H)-oxazolone; Methotrexate; Mitoxantrone; Heparin; Interferons; 2 Macroglobulin-serum; ChIMP-3 (Pavloff et al., J. Bio. Chem. 267:17321-17326, (1992)); Chymostatin (Tomkinson et al., Biochem J. 286:475-480, (1992)); Cyclodextrin Tetradecasulfate; Eponemycin; Camptothecin; Fumagillin (Ingber et al., Nature 348:555-557, (1990)); Gold Sodium Thiomalate (“GST”; Matsubara and Ziff, J. Clin. Invest. 79:1440-1446, (1987)); anticollagenase-serum; alpha2-antiplasmin (Holmes et al., J. Biol. Chem. 262(4):1659-1664, (1987)); Bisantrene (National Cancer Institute); Lobenzarit disodium (N-(2)-carboxyphenyl-4-chloroanthronilic acid disodium or “CCA”; (Takeuchi et al., Agents Actions 36:312-316, (1992)); and metalloproteinase inhibitors such as BB94.

[1017] Additional anti-angiogenic factors that may also be utilized within the context of the present invention include Thalidomide, (Celgene, Warren, N.J.); Angiostatic steroid; AGM-1470 (H. Brem and J. Folkman J Pediatr. Surg. 28:445-51 (1993)); an integrin alpha v beta 3 antagonist (C. Storgard et al., J Clin. Invest. 103:47-54 (1999)); carboxynaminolmidazole; Carboxyamidotriazole (CAI) (National Cancer Institute, Bethesda, Md.); Conbretastatin A-4 (CA4P) (OXiGENE, Boston, Mass.); Squalamine (Magainin Pharmaceuticals, Plymouth Meeting, Pa.); TNP-470, (Tap Pharmaceuticals, Deerfield, Ill.); ZD-0101 AstraZeneca (London, UK); APRA (CT2584); Benefin, Byrostatin-1 (SC339555); CGP-41251 (PKC 412); CM101; Dexrazoxane (ICRF187); DMXAA; Endostatin; Flavopridiol; Genestein; GTE; ImmTher; Iressa (ZD1839); Octreotide (Somatostatin); Panretin; Penacillamine; Photopoint; PI-88; Prinomastat (AG-3340) Purlytin; Suradista (FCE26644); Tamoxifen (Nolvadex); Tazarotene; Tetrathiomolybdate; Xeloda (Capecitabine); and 5-Fluorouracil.

[1018] Anti-angiogenic agents that may be administed in combination with the compounds of the invention may work through a variety of mechanisms including, but not limited to, inhibiting proteolysis of the extracellular matrix, blocking the function of endothelial cell-extracellular matrix adhesion molecules, by antagonizing the function of angiogenesis inducers such as growth factors, and inhibiting integrin receptors expressed on proliferating endothelial cells. Examples of anti-angiogenic inhibitors that interfere with extracellular matrix proteolysis and which may be administered in combination with the compositons of the invention include, but are not Imited to, AG-3340 (Agouron, La Jolla, Calif.), BAY-12-9566 (Bayer, West Haven, Conn.), BMS-275291 (Bristol Myers Squibb, Princeton, N.J.), CGS-27032A (Novartis, East Hanover, N.J.), Marimastat (British Biotech, Oxford, UK), and Metastat (Aetema, St-Foy, Quebec). Examples of anti-angiogenic inhibitors that act by blocking the function of endothelial cell-extracellular matrix adhesion molecules and which may be administered in combination with the compositons of the invention include, but are not Imited to, EMD-121974 (Merck KcgaA Darmstadt, Germany) and Vitaxin (Ixsys, La Jolla, Calif./Medimmune, Gaithersburg, Md.). Examples of anti-angiogenic agents that act by directly antagonizing or inhibiting angiogenesis inducers and which may be administered in combination with the compositons of the invention include, but are not lmited to, Angiozyme (Ribozyme, Boulder, Colo.), Anti-VEGF antibody (Genentech, S. San Francisco, Calif.), PTK-787/ZK-225846 (Novartis, Basel, Switzerland), SU-101 (Sugen, S. San Francisco, Calif/), SU-5416 (Sugen/Pharmacia Upjohn, Bridgewater, N.J.), and SU-6668 (Sugen). Other anti-angiogenic agents act to indirectly inhibit angiogenesis. Examples of indirect inhibitors of angiogenesis which may be administered in combination with the compositons of the invention include, but are not limited to, IM-862 (Cytran, Kirkland, Wash.), Interferon-alpha, IL-12 (Roche, Nutley, N.J.), and Pentosan polysulfate (Georgetown University, Washington, D.C.).

[1019] In particular embodiments, the use of compositions of the invention in combination with anti-angiogenic agents is contemplated for the treatment, prevention, and/or amelioration of an autoimmune disease, such as for example, an autoimmune disease described herein.

[1020] In a particular embodiment, the use of compositions of the invention in combination with anti-angiogenic agents is contemplated for the treatment, prevention, and/or amelioration of arthritis. In a more particular embodiment, the use of compositions of the invention in combination with anti-angiogenic agents is contemplated for the treatment, prevention, and/or amelioration of rheumatoid arthritis.

[1021] In another embodiment, the polynucleotides encoding a polypeptide of the present invention are administered in combination with an angiogenic protein, or polynucleotides encoding an angiogenic protein. Examples of angiogenic proteins that may be administered with the compositions of the invention include, but are not limited to, acidic and basic fibroblast growth factors, VEGF-1, VEGF-2, VEGF-3, epidermal growth factor alpha and beta, platelet-derived endothelial cell growth factor, platelet-derived growth factor, tumor necrosis factor alpha, hepatocyte growth factor, insulin-like growth factor, colony stimulating factor, macrophage colony stimulating factor, granulocyte/macrophage colony stimulating factor, and nitric oxide synthase.

[1022] In additional embodiments, compostions of the invention are administered in combination with a chemotherapeutic agent. Chemotherapeutic agents that may be administered with the Therapeutics of the invention include, but are not limited to alkylating agents such as nitrogen mustards (for example, Mechlorethamine, cyclophosphamide, Cyclophosphamide Ifosfamide, Melphalan (L-sarcolysin), and Chlorambucil), ethylenimines and methylmelamines (for example, Hexamethylmelamine and Thiotepa), alkyl sulfonates (for example, Busulfan), nitrosoureas (for example, Carmustine (BCNU), Lomustine (CCNU), Semustine (methyl-CCNU), and Streptozocin (streptozotocin)), triazenes (for example, Dacarbazine (DTIC; dimethyltriazenoimidazolecarboxamide)), folic acid analogs (for example, Methotrexate (amethopterin)), pyrimidine analogs (for example, Fluorouacil (5-fluorouracil; 5-FU), Floxuridine (fluorodeoxyuridine; FudR), and Cytarabine (cytosine arabinoside)), purine analogs and related inhibitors (for example, Mercaptopurine (6-mercaptopurine; 6-MP), Thioguanine (6-thioguanine; TG), and Pentostatin (2′-deoxycoformycin)), vinca alkaloids (for example, Vinblastine (VLB, vinblastine sulfate) and Vincristine (vincristine sulfate)), epipodophyllotoxins (for example, Etoposide and Teniposide), antibiotics (for example, Dactinomycin (actinomycin D), Daunorubicin (daunomycin; rubidomycin), Doxorubicin, Bleomycin, Plicamycin (mithramycin), and Mitomycin (mitomycin C), enzymes (for example, L-Asparaginase), biological response modifiers (for example, Interferon-alpha and interferon-alpha-2b), platinum coordination compounds (for example, Cisplatin (cis-DDP) and Carboplatin), anthracenedione (Mitoxantrone), substituted ureas (for example, Hydroxyurea), methylhydrazine derivatives (for example, Procarbazine (N-methylhydrazine; MIH), adrenocorticosteroids (for example, Prednisone), progestins (for example, Hydroxyprogesterone caproate, Medroxyprogesterone, Medroxyprogesterone acetate, and Megestrol acetate), estrogens (for example, Diethylstilbestrol (DES), Diethylstilbestrol diphosphate, Estradiol, and Ethinyl estradiol), antiestrogens (for example, Tamoxifen), androgens (Testosterone proprionate, and Fluoxymesterone), antiandrogens (for example, Flutamide), gonadotropin-releasing horomone analogs (for example, Leuprolide), other hormones and hormone analogs (for example, methyltestosterone, estramustine, estramustine phosphate sodium, chlorotrianisene, and testolactone), and others (for example, dicarbazine, glutamic acid, and mitotane).

[1023] In one embodiment, the compositions of the invention are administered in combination with one or more of the following drugs: infliximab (also known as Remicade™ Centocor, Inc.), Trocade (Roche, RO-32-3555), Leflunomide (also known as Arava™ from Hoechst Marion Roussel), Kineret™ (an IL-1 Receptor antagonist also known as Anakinra from Amgen, Inc.).

[1024] In a specific embodiment, compositions of the invention are administered in combination with CHOP (cyclophosphamide, doxorubicin, vincristine, and prednisone) or combination of one or more of the components of CHOP. In one embodiment, the compositions of the invention are administered in combination with anti-CD20 antibodies, human monoclonal anti-CD20 antibodies. In another embodiment, the compositions of the invention are administered in combination with anti-CD20 antibodies and CHOP, or anti-CD20 antibodies and any combination of one or more of the components of CHOP, particularly cyclophosphamide and/or prednisone. In a specific embodiment, compositions of the invention are administered in combination with Rituximab. In a further embodiment, compositions of the invention are administered with Rituximab and CHOP, or Rituximab and any combination of one or more of the components of CHOP, particularly cyclophosphamide and/or prednisone. In a specific embodiment, compositions of the invention are administered in combination with tositumomab. In a further embodiment, compositions of the invention are administered with tositumomab and CHOP, or tositumomab and any combination of one or more of the components of CHOP, particularly cyclophosphamide and/or prednisone. The anti-CD20 antibodies may optionally be associated with radioisotopes, toxins or cytotoxic prodrugs.

[1025] In another specific embodiment, the compositions of the invention are administered in combination Zevalin™. In a further embodiment, compositions of the invention are administered with Zevalin™ and CHOP, or Zevalin™ and any combination of one or more of the components of CHOP, particularly cyclophosphamide and/or prednisone. Zevalin™ may be associated with one or more radisotopes. Particularly preferred isotopes are ⁹⁰Y and ¹¹¹In.

[1026] In an additional embodiment, the Therapeutics of the invention are administered in combination with cytokines. Cytokines that may be administered with the Therapeutics of the invention include, but are not limited to, IL2, IL3, IL4, IL5, IL6, IL7, IL10, IL12, IL13, IL15, anti-CD40, CD40L, IFN-gamma and TNF-alpha. In another embodiment, Therapeutics of the invention may be administered with any interleukin, including, but not limited to, IL-1alpha, IL-1beta, IL-2, IL-3, IL-4, IL-5, IL-6, IL-7, IL-8, IL-9, IL-10, IL-11, IL-12, IL-13, IL-14, IL-15, IL-16, IL-17, IL-18, IL-19, IL-20, and IL-21.

[1027] In one embodiment, the Therapeutics of the invention are administered in combination with members of the TNF family. TNF, TNF-related or TNF-like molecules that may be administered with the Therapeutics of the invention include, but are not limited to, soluble forms of TNF-alpha, lymphotoxin-alpha (LT-alpha, also known as TNF-beta), LT-beta (found in complex heterotrimer LT-alpha2-beta), OPGL, FasL, CD27L, CD30L, CD40L, 4-1BBL, DcR3, OX40L, TNF-gamma (International Publication No. WO 96/14328), A1M-I (International Publication No. WO 97/33899), endokine-alpha (International Publication No. WO 98/07880), OPG, and neutrokine-alpha (International Publication No. WO 98/18921, OX40, and nerve growth factor (NGF), and soluble forms of Fas, CD30, CD27, CD40 and 4-IBB, TR2 (International Publication No. WO 96/34095), DR3 (International Publication No. WO 97/33904), DR4 (International Publication No. WO 98/32856), TR5 (International Publication No. WO 98/30693), TRANK, TR9 (International Publication No. WO 98/56892),TR10 (International Publication No. WO 98/54202), 312C2 (International Publication No. WO 98/06842), and TR12, and soluble forms CD154, CD70, and CD153.

[1028] In an additional embodiment, the Therapeutics of the invention are administered in combination with angiogenic proteins. Angiogenic proteins that may be administered with the Therapeutics of the invention include, but are not limited to, Glioma Derived Growth Factor (GDGF), as disclosed in European Patent Number EP-399816; Platelet Derived Growth Factor-A (PDGF-A), as disclosed in European Patent Number EP-682110; Platelet Derived Growth Factor-B (PDGF-B), as disclosed in European Patent Number EP-282317; Placental Growth Factor (PIGF), as disclosed in International Publication Number WO 92/06194; Placental Growth Factor-2 (PIGF-2), as disclosed in Hauser et al., Growth Factors, 4:259-268 (1993); Vascular Endothelial Growth Factor (VEGF), as disclosed in International Publication Number WO 90/13649; Vascular Endothelial Growth Factor-A (VEGF-A), as disclosed in European Patent Number EP-506477; Vascular Endothelial Growth Factor-2 (VEGF-2), as disclosed in International Publication Number WO 96/39515; Vascular Endothelial Growth Factor B (VEGF-3); Vascular Endothelial Growth Factor B-186 (VEGF-B186), as disclosed in International Publication Number WO 96/26736; Vascular Endothelial Growth Factor-D (VEGF-D), as disclosed in International Publication Number WO 98/02543; Vascular Endothelial Growth Factor-D (VEGF-D), as disclosed in International Publication Number WO 98/07832; and Vascular Endothelial Growth Factor-E (VEGF-E), as disclosed in German Patent Number DE19639601. The above mentioned references are herein incorporated by reference in their entireties.

[1029] In an additional embodiment, the Therapeutics of the invention are administered in combination with Fibroblast Growth Factors. Fibroblast Growth Factors that may be administered with the Therapeutics of the invention include, but are not limited to, FGF-1, FGF-2, FGF-3, FGF-4, FGF-5, FGF-6, FGF-7, FGF-8, FGF-9, FGF-10, FGF-11, FGF-12, FGF-13, FGF-14, and FGF-15.

[1030] In an additional embodiment, the Therapeutics of the invention are administered in combination with hematopoietic growth factors. Hematopoietic growth factors that may be administered with the Therapeutics of the invention include, but are not limited to, granulocyte macrophage colony stimulating factor (GM-CSF) (sargramostim, LEUKINE™, PROKINE™), granulocyte colony stimulating factor (G-CSF) (filgrastim, NEUPOGEN™), macrophage colony stimulating factor (M-CSF, CSF-1) erythropoietin (epoetin alfa, EPOGEN™, PROCRIT™), stem cell factor (SCF, c-kit ligand, steel factor), megakaryocyte colony stimulating factor, PIXY321 (a GMCSF/IL-3 fusion protein), interleukins, especially any one or more of IL-1 through IL-12, interferon-gamma, or thrombopoietin.

[1031] In certain embodiments, Therapeutics of the present invention are administered in combination with adrenergic blockers, such as, for example, acebutolol, atenolol, betaxolol, bisoprolol, carteolol, labetalol, metoprolol, nadolol, oxprenolol, penbutolol, pindolol, propranolol, sotalol, and timolol.

[1032] In another embodiment, the Therapeutics of the invention are administered in combination with an antiarrhytbmic drug (e.g., adenosine, amidoarone, bretylium, digitalis, digoxin, digitoxin, diliazem, disopyramide, esmolol, flecainide, lidocaine, mexiletine, moricizine, phenytoin, procainamide, N-acetyl procainamide, propafenone, propranolol, quinidine, sotalol, tocainide, and verapamil).

[1033] In another embodiment, the Therapeutics of the invention are administered in combination with diuretic agents, such as carbonic anhydrase-inhibiting agents (e.g., acetazolamide, dichlorphenamide, and methazolamide), osmotic diuretics (e.g., glycerin, isosorbide, mannitol, and urea), diuretics that inhibit Na⁺-K⁺-2Cl⁻ symport (e.g., furosemide, bumetanide, azosemide, piretanide, tripamide, ethacrynic acid, muzolimine, and torsemide), thiazide and thiazide-like diuretics (e.g., bendroflumethiazide, benzthiazide, chlorothiazide, hydrochlorothiazide, hydroflumethiazide, methyclothiazide, polythiazide, trichornethiazide, chlorthalidone, indapamide, metolazone, and quinethazone), potassium sparing diuretics (e.g., amiloride and triamterene), and mineralcorticoid receptor antagonists (e.g., spironolactone, canrenone, and potassium canrenoate).

[1034] In one embodiment, the Therapeutics of the invention are administered in combination with treatments for endocrine and/or hormone imbalance disorders. Treatments for endocrine and/or hormone imbalance disorders include, but are not limited to, ¹²⁷I, radioactive isotopes of iodine such as ¹³¹I and ¹²³I; recombinant growth hormone, such as HUMATROPE™ (recombinant somatropin); growth hormone analogs such as PROTROPIN™ (somatrem); dopamine agonists such as PARLODEL™ (bromocriptine); somatostatin analogs such as SANDOSTATIN™ (octreotide); gonadotropin preparations such as PREGNYL™, A.P.L.™ and PROFASIT (chorionic gonadotropin (CG)), PERGONAL™ (menotropins), and METRODIN™ (urofollitropin (uFSH)); synthetic human gonadotropin releasing hormone preparations such as FACTREL™ and LUTREPULSE™ (gonadorelin hydrochloride); synthetic gonadotropin agonists such as LUPRON™ (leuprolide acetate), SUPPRELIN™ (histrelin acetate), SYNAREL™ (nafarelin acetate), and ZOLADEX™ (goserelin acetate); synthetic preparations of thyrotropin-releasing hormone such as RELEFACT TRH™ and THYPINONE™ (protirelin); recombinant human TSH such as THYROGEN™; synthetic preparations of the sodium salts of the natural isomers of thyroid hormones such as L-T₄™, SYNTHROID™ and LEVOTHROID™ (levothyroxine sodium), L-T₃™, CYTOMEL™ and TRIOSTAT™ (liothyroine sodium), and THYROLAR™ (liotrix); antithyroid compounds such as 6-n-propylthiouracil (propylthiouracil), 1 -methyl-2-mercaptoimidazole and TAPAZOLE™ (methimazole), NEO-MERCAZOLE™ (carbimazole); beta-adrenergic receptor antagonists such as propranolol and esmolol; Ca²⁺ channel blockers; dexamethasone and iodinated radiological contrast agents such as TELEPAQUE™ (iopanoic acid) and ORAGRAFIN™ (sodium ipodate); estrogens or congugated estrogens such as ESTRACE™ (estradiol), ESTINYL™ (ethinyl estradiol), PREMARIN™, ESTRATAB™, ORTHO-EST™, OGEN™ and estropipate (estrone), ESTROVIS™ (quinestrol), ESTRADERM™ (estradiol), DELESTROGEN™ and VALERGEN™ (estradiol valerate), DEPO-ESTRADIOL CYPIONATE™ and ESTROJECT LA™ (estradiol cypionate); antiestrogens such as NOLVADEX™ (tamoxifen), SEROPHENE™ and CLOMID™ (clomiphene); progestins such as DURALUTIN™ (hydroxyprogesterone caproate), MPA™ and DEPO-PROVERA™ (medroxyprogesterone acetate), PROVERA™ and CYCRIN™ (MPA), MEGACE™ (megestrol acetate), NORLUTIN™ (norethindrone), and NORLUTATE™ and AYGESTIN™ (norethindrone acetate); progesterone implants such as NORPLANT SYSTEM™ (subdermal implants of norgestrel); antiprogestins such as RU 486™ (mifepristone); hormonal contraceptives such as ENOVID™ (norethynodrel plus mestranol), PROGESTASERT™ (intrauterine device that releases progesterone), LOESTRIN™, BREVICON™, MODICON™, GENORA™, NELONA™, NORINYL™, OVACON-35™ and OVACON-50™ (ethinyl estradiol/norethindrone), LEVLEN™, NORDETTE™, TRI-LEVLEN™ and TRIPHASIL-21™ (ethinyl estradiol/levonorgestrel) LO/OVRAL™ and OVRAL™ (ethinyl estradiol/norgestrel), DEMULEN™ (ethinyl estradiol/ethynodiol diacetate), NORINYL™, ORTHO-NOVUM , NORETHIN™, GENORA™, and NELOVA™ (norethindrone/mestranol), DESOGEN™ and ORTHO-CEPT™ (ethinyl estradiol/desogestrel), ORTHO-CYCLEN™ and ORTHO-TRICYCLEN™ (ethinyl estradiol/norgestimate), MICRONOR™ and NOR-QD™ (norethindrone), and OVRETTE™ (norgestrel); testosterone esters such as methenolone acetate and testosterone undecanoate; parenteral and oral androgens such as TESTOJECT-50™ (testosterone), TESTEX™ (testosterone propionate), DELATESTRYL™ (testosterone enanthate), DEPO-TESTOSTERONE™ (testosterone cypionate), DANOCRINE™ (danazol), HALOTESTIN™ (fluoxymesterone), ORETON METHYL™, TESTRED™ and VIRILON™ (methyltestosterone), and OXANDRIN™ (oxandrolone); testosterone transdermal systems such as TESTODERM™; androgen receptor antagonist and 5-alpha-reductase inhibitors such as ANDROCUR™ (cyproterone acetate), EULEXIM™ (flutamide), and PROSCAR™ (finasteride); adrenocorticotropic hormone preparations such as CORTROSYN™ (cosyntropin); adrenocortical steroids and their synthetic analogs such as ACLOVATE™ (aldlometasone dipropionate), CYCLOCORT™ (amcinonide), BECLOVENT™ and VANCERIL™ (beclomethasone dipropionate), CELESTONE™ (betamethasone), BENISONE™ and UTICORT™ (betamethasone benzoate), DIPROSONE™ (betamethasone dipropionate), CELESTONE PHOSPHATE™ (betamethasone sodium phosphate), CELESTONE SOLUSPAN™ (betamethasone sodium phosphate and acetate), BETA-VAL™ and VALISONE™ (betamethasone valerate), TEMOVATE™ (clobetasol propionate), CLODERM™ (clocortolone pivalate), CORTEF™ and HYDROCORTONE™ (cortisol (hydrocortisone)), HYDROCORTONE ACETATE™ (cortisol (hydrocortisone) acetate), LOCOID™ (cortisol (hydrocortisone) butyrate), HYDROCORTONE PHOSPHATE™ (cortisol (hydrocortisone) sodium phosphate), A-HYDROCORT™ and SOLU CORTEF™ (cortisol (hydrocortisone) sodium succinate), WESTCORT™ (cortisol (hydrocortisone) valerate), CORTISONE ACETATE™ (cortisone acetate), DESOWEN™ and TRIDESILON™ (desonide), TOPICORT™ (desoximetasone), DECADRON™ (dexamethasone), DECADRON LA™ (dexamethasone acetate), DECADRON PHOSPHATE™ and HEXADROL PHOSPHATE™ (dexamethasone sodium phosphate), FLORONE™ and MAXIFLOR™ (diflorasone diacetate), FLORINEF ACETATE™ (fludrocortisone acetate), AEROBID™ and NASALIDE™ (flunisolide), FLUONID™ and SYNALAR™ (fluocinolone acetonide), LIDEX™ (fluocinonide), FLUOR-OP™ and FML™ (fluorometholone), CORDRAN™ (flurandrenolide), HALOG™ (halcinonide), HMS LIZUIFILM™ (medrysone), MEDROL™ (methylprednisolone), DEPO-MEDROL™ and MEDROL ACETATE™ (methylprednisone acetate), A-METHAPRED™ and SOLUMEDROL™ (methylprednisolone sodium succinate), ELOCON™ (mometasone furoate), HALDRONE™ (paramethasone acetate), DELTA-CORTEF™ (prednisolone), ECONOPRED™ (prednisolone acetate), HYDELTRASOL™ (prednisolone sodium phosphate), HYDELTRA-T.B.A™ (prednisolone tebutate), DELTASONE™ (prednisone), ARISTOCORT™ and KENACORT™ (triamcinolone), KENALOG™ (triamcinolone acetonide), ARISTOCORT™ and KENACORT DIACETATE™ (triamcinolone diacetate), and ARISTOSPAN™ (triamcinolone hexacetonide); inhibitors of biosynthesis and action of adrenocortical steroids such as CYTADREN™ (aminoglutethimide), NIZORAL™ (ketoconazole), MODRASTANE™ (trilostane), and METOPIRONE™ (metyrapone); bovine, porcine or human insulin or mixtures thereof; insulin analogs; recombinant human insulin such as HUMULIN™ and NOVOLIN™; oral hypoglycemic agents such as ORAMIDE™ and ORINASE™ (tolbutamide), DIABINESE™ (chlorpropamide), TOLAMIDE™ and TOLINASE™ (tolazamide), DYMELOR™ (acetohexamide), glibenclamide, MICRONASE™, DIBETA™ and GLYNASE™ (glyburide), GLUCOTROL™ (glipizide), and DIAMICRON™ (gliclazide), GLUCOPHAGE™ (metformin), ciglitazone, pioglitazone, and alpha-glucosidase inhibitors; bovine or porcine glucagon; somatostatins such as SANDOSTATIN™ (octreotide); and diazoxides such as PROGLYCEM™ (diazoxide).

[1035] In one embodiment, the Therapeutics of the invention are administered in combination with treatments for uterine motility disorders. Treatments for uterine motility disorders include, but are not limited to, estrogen drugs such as conjugated estrogens (e.g., PREMARIN® and ESTRATAB®), estradiols (e.g., CLIMARA® and ALORA®), estropipate, and chlorotrianisene; progestin drugs (e.g., AMEN® (medroxyprogesterone), MICRONOR® (norethidrone acetate), PROMETRIUM® progesterone, and megestrol acetate); and estrogen/progesterone combination therapies such as, for example, conjugated estrogens/medroxyprogesterone (e.g., PREMPRO™ and PREMPHASE®) and norethindrone acetate/ethinyl estsradiol (e.g., FEMHRT™).

[1036] In an additional embodiment, the Therapeutics of the invention are administered in combination with drugs effective in treating iron deficiency and hypochromic anemias, including but not limited to, ferrous sulfate (iron sulfate, FEOSOL™), ferrous fumarate (e.g., FEOSTAT™), ferrous gluconate (e.g., FERGON™), polysaccharide-iron complex (e.g., NIFEREX™), iron dextran injection (e.g., INFED™), cupric sulfate, pyroxidine, riboflavin, Vitamin B₁₂, cyancobalamin injection (e.g., REDISOL™, RUBRAMIN PC™), hydroxocobalamin, folic acid (e.g., FOLVITE™), leucovorin (folinic acid, 5-CHOH4PteGlu, citrovorum factor) or WELLCOVORIN (Calcium salt of leucovorin), transferrin or ferritin.

[1037] In certain embodiments, the Therapeutics of the invention are administered in combination with agents used to treat psychiatric disorders. Psychiatric drugs that may be administered with the Therapeutics of the invention include, but are not limited to, antipsychotic agents (e.g., chlorpromazine, chlorprothixene, clozapine, fluphenazine, haloperidol, loxapine, mesoridazine, molindone, olanzapine, perphenazine, pimozide, quetiapine, risperidone, thioridazine, thiothixene, trifluoperazine, and triflupromazine), antimanic agents (e.g., carbamazepine, divalproex sodium, lithium carbonate, and lithium citrate), antidepressants (e.g., amitriptyline, amoxapine, bupropion, citalopram, clomipramine, desipramine, doxepin, fluvoxamine, fluoxetine, imipramine, isocarboxazid, maprotiline, mirtazapine, nefazodone, nortriptyline, paroxetine, phenelzine, protriptyline, sertraline, tranylcypromine, trazodone, trimipramine, and venlafaxine), antianxiety agents (e.g., alprazolam, buspirone, chlordiazepoxide, clorazepate, diazepam, halazepam, lorazepam, oxazepam, and prazepam), and stimulants (e.g., d-amphetamine, methylphenidate, and pemoline).

[1038] In other embodiments, the Therapeutics of the invention are administered in combination with agents used to treat neurological disorders. Neurological agents that may be administered with the Therapeutics of the invention include, but are not limited to, antiepileptic agents (e.g., carbamazepine, clonazepam, ethosuximide, phenobarbital, phenytoin, primidone, valproic acid, divalproex sodium, felbamate, gabapentin, lamotrigine, levetiracetam, oxcarbazepine, tiagabine, topiramate, zonisamide, diazepam, lorazepam, and clonazepam), antiparkinsonian agents (e.g., levodopa/carbidopa, selegiline, amantidine, bromocriptine, pergolide, ropinirole, pramipexole, benztropine; biperiden; ethopropazine; procyclidine; trihexyphenidyl, tolcapone), and ALS therapeutics (e.g. riluzole).

[1039] In another embodiment, Therapeutics of the invention are administered in combination with vasodilating agents and/or calcium channel blocking agents. Vasodilating agents that may be administered with the Therapeutics of the invention include, but are not limited to, Angiotensin Converting Enzyme (ACE) inhibitors (e.g., papaverine, isoxsuprine, benazepril, captopril, cilazapril, enalapril, enalaprilat, fosinopril, lisinopril, moexipril, perindopril, quinapril, ramipril, spirapril, trandolapril, and nylidrin), and nitrates (e.g., isosorbide dinitrate, isosorbide mononitrate, and nitroglycerin). Examples of calcium channel blocking agents that may be administered in combination with the Therapeutics of the invention include, but are not limited to amlodipine, bepridil, diltiazem, felodipine, flunarizine, isradipine, nicardipine, nifedipine, nimodipine, and verapamil.

[1040] In additional embodiments, the Therapeutics of the invention are administered in combination with other therapeutic or prophylactic regimens, such as, for example, radiation therapy.

### Example 14

### Method of Treating Decreased Levels of the Polypeptide

[1041] The present invention relates to a method for treating an individual in need of an increased level of a polypeptide of the invention in the body comprising administering to such an individual a composition comprising a therapeutically effective amount of an agonist of the invention (including polypeptides of the invention). Moreover, it will be appreciated that conditions caused by a decrease in the standard or normal expression level of a polypeptide of the present invention in an individual can be treated by administering the agonist or antagonist of the present invention. Thus, the invention also provides a method of treatment of an individual in need of an increased level of the polypeptide comprising administering to such an individual a Therapeutic comprising an amount of the agonist or antagonist to increase the activity level of the polypeptide in such an individual.

[1042] For example, a patient with decreased levels of a polypeptide receives a daily dose 0.1-100 ug/kg of the agonist or antagonist for six consecutive days. The exact details of the dosing scheme, based on administration and formulation, are provided in Example 13.

### Example 15

### Method of Treating Increased Levels of the Polypeptide

[1043] The present invention also relates to a method of treating an individual in need of a decreased level of a polypeptide of the invention in the body comprising administering to such an individual a composition comprising a therapeutically effective amount of an antagonist of the invention (including polypeptides and antibodies of the invention).

[1044] In one example, antisense technology is used to inhibit production of a polypeptide of the present invention. This technology is one example of a method of decreasing levels of a polypeptide, due to a variety of etiologies, such as cancer.

[1045] For example, a patient diagnosed with abnormally increased levels of a polypeptide is administered intravenously antisense polynucleotides at 0.5, 1.0, 1.5, 2.0 and 3.0 mg/kg day for 21 days. This treatment is repeated after a 7-day rest period if the treatment was well tolerated. The formulation of the antisense polynucleotide is provided in Example 13.

### Example 16

### Method of Treatment Using Gene Therapy—Ex Vivo

[1046] One method of gene therapy transplants fibroblasts, which are capable of expressing a polypeptide, onto a patient. Generally, fibroblasts are obtained from a subject by skin biopsy. The resulting tissue is placed in tissue-culture medium and separated into small pieces. Small chunks of the tissue are placed on a wet surface of a tissue culture flask, approximately ten pieces are placed in each flask. The flask is turned upside down, closed tight and left at room temperature over night. After 24 hours at room temperature, the flask is inverted and the chunks of tissue remain fixed to the bottom of the flask and fresh media (e.g., Ham's F12 media, with 10% FBS, penicillin and streptomycin) is added. The flasks are then incubated at 37 degree C. for approximately one week.

[1047] At this time, fresh media is added and subsequently changed every several days. After an additional two weeks in culture, a monolayer of fibroblasts emerge. The monolayer is trypsinized and scaled into larger flasks.

[1048] pMV-7 (Kirschmeier, P. T. et al., DNA, 7:219-25 (1988)), flanked by the long terminal repeats of the Moloney murine sarcoma virus, is digested with EcoRI and HindIII and subsequently treated with calf intestinal phosphatase. The linear vector is fractionated on agarose gel and purified, using glass beads.

[1049] The cDNA encoding a polypeptide of the present invention can be amplified using PCR primers which correspond to the 5′ and 3′ end sequences respectively as set forth in Example 1 using primers and having appropriate restriction sites and initiation/stop codons, if necessary. Preferably, the 5′ primer contains an EcoRI site and the 3′ primer includes a HindIII site. Equal quantities of the Moloney murine sarcoma virus linear backbone and the amplified EcoRI and HindIII fragment are added together, in the presence of T4 DNA ligase. The resulting mixture is maintained under conditions appropriate for ligation of the two fragments. The ligation mixture is then used to transform bacteria HB101, which are then plated onto agar containing kanamycin for the purpose of confirming that the vector has the gene of interest properly inserted.

[1050] The amphotropic pA317 or GP+am12 packaging cells are grown in tissue culture to confluent density in Dulbecco's Modified Eagles Medium (DMEM) with 10% calf serum (CS), penicillin and streptomycin. The MSV vector containing the gene is then added to the media and the packaging cells transduced with the vector. The packaging cells now produce infectious viral particles containing the gene (the packaging cells are now referred to as producer cells).

[1051] Fresh media is added to the transduced producer cells, and subsequently, the media is harvested from a 10 cm plate of confluent producer cells. The spent media, containing the infectious viral particles, is filtered through a millipore filter to remove detached producer cells and this media is then used to infect fibroblast cells. Media is removed from a sub-confluent plate of fibroblasts and quickly replaced with the media from the producer cells. This media is removed and replaced with fresh media. If the titer of virus is high, then virtually all fibroblasts will be infected and no selection is required. If the titer is very low, then it is necessary to use a retroviral vector that has a selectable marker, such as neo or his. Once the fibroblasts have been efficiently infected, the fibroblasts are analyzed to determine whether protein is produced.

[1052] The engineered fibroblasts are then transplanted onto the host, either alone or after having been grown to confluence on cytodex 3 microcarrier beads.

### Example 17

### Gene Therapy Using Endogenous Genes Corresponding to Polynucleotides of the Invention

[1053] Another method of gene therapy according to the present invention involves operably associating the endogenous polynucleotide sequence of the invention with a promoter via homologous recombination as described, for example, in U.S. Pat. No.: 5,641,670, issued Jun. 24, 1997; International Publication NO: WO 96/29411, published Sep. 26, 1996; International Publication NO: WO 94/12650, published Aug. 4, 1994; Koller et al., Proc. Natl. Acad. Sci. USA, 86:8932-8935 (1989); and Zijlstra et al., Nature, 342:435-438 (1989). This method involves the activation of a gene which is present in the target cells, but which is not expressed in the cells, or is expressed at a lower level than desired.

[1054] Polynucleotide constructs are made which contain a promoter and targeting sequences, which are homologous to the 5′ non-coding sequence of endogenous polynucleotide sequence, flanking the promoter. The targeting sequence will be sufficiently near the 5′ end of the polynucleotide sequence so the promoter will be operably linked to the endogenous sequence upon homologous recombination. The promoter and the targeting sequences can be amplified using PCR. Preferably, the amplified promoter contains distinct restriction enzyme sites on the 5′ and 3′ ends. Preferably, the 3′ end of the first targeting sequence contains the same restriction enzyme site as the 5′ end of the amplified promoter and the 5′ end of the second targeting sequence contains the same restriction site as the 3′ end of the amplified promoter.

[1055] The amplified promoter and the amplified targeting sequences are digested with the appropriate restriction enzymes and subsequently treated with calf intestinal phosphatase. The digested promoter and digested targeting sequences are added together in the presence of T4 DNA ligase. The resulting mixture is maintained under conditions appropriate for ligation of the two fragments. The construct is size fractionated on an agarose gel, then purified by phenol extraction and ethanol precipitation.

[1056] In this Example, the polynucleotide constructs are administered as naked polynucleotides via electroporation. However, the polynucleotide constructs may also be administered with transfection-facilitating agents, such as liposomes, viral sequences, viral particles, precipitating agents, etc. Such methods of delivery are known in the art.

[1057] Once the cells are transfected, homologous recombination will take place which results in the promoter being operably linked to the endogenous polynucleotide sequence. This results in the expression of polynucleotide corresponding to the polynucleotide in the cell. Expression may be detected by immunological staining, or any other method known in the art.

[1058] Fibroblasts are obtained from a subject by skin biopsy. The resulting tissue is placed in DMEM+10% fetal calf serum. Exponentially growing or early stationary phase fibroblasts are trypsinized and rinsed from the plastic surface with nutrient medium. An aliquot of the cell suspension is removed for counting, and the remaining cells are subjected to centrifugation. The supernatant is aspirated and the pellet is resuspended in 5 ml of electroporationbuffer (20 mM HEPES pH 7.3, 137 mM NaCl, 5 mM KCl, 0.7 mM Na₂ HPO₄, 6 mM dextrose). The cells are recentrifuged, the supernatant aspirated, and the cells resuspended in electroporation buffer containing 1 mg/ml acetylated bovine serum albumin. The final cell suspension contains approximately 3×10⁶ cells/ml. Electroporation should be performed immediately following resuspension.

[1059] Plasmid DNA is prepared according to standard techniques. For example, to construct a plasmid for targeting to the locus corresponding to the polynucleotide of the invention, plasmid pUC18 (MBI Fermnentas, Amherst, N.Y.) is digested with HindIII. The CMV promoter is amplified by PCR with an XbaI site on the 5′ end and a BamHI site on the 3′ end. Two non-coding sequences are amplified via PCR: one non-coding sequence (fragment 1) is amplified with a HindIII site at the 5′ end and an Xba site at the 3′end; the other non-coding sequence (fragment 2) is amplified with a BamHI site at the 5′end and a HindIII site at the 3′end. The CMV promoter and the fragments (1 and 2) are digested with the appropriate enzymes (CMV promoter—XbaI and BamHI; fragment 1—XbaI; fragment 2—BamHI) and ligated together. The resulting ligation product is digested with HindIII, and ligated with the HindIII-digested pUC18 plasmid.

[1060] Plasmid DNA is added to a sterile cuvette with a 0.4 cm electrode gap (Bio-Rad). The final DNA concentration is generally at least 120 μg/ml. 0.5 ml of the cell suspension (containing approximately 1.5.×10⁶ cells) is then added to the cuvette, and the cell suspension and DNA solutions are gently mixed. Electroporation is performed with a Gene-Pulser apparatus (Bio-Rad). Capacitance and voltage are set at 960 μF and 250-300 V, respectively. As voltage increases, cell survival decreases, but the percentage of surviving cells that stably incorporate the introduced DNA into their genome increases dramatically. Given these parameters, a pulse time of approximately 14-20 mSec should be observed.

[1061] Electroporated cells are maintained at room temperature for approximately 5 min, and the contents of the cuvette are then gently removed with a sterile transfer pipette. The cells are added directly to 10 ml of prewarmed nutrient media (DMEM with 15% calf serum) in a 10 cm dish and incubated at 37 degree C. The following day, the media is aspirated and replaced with 10 ml of fresh media and incubated for a further 16-24 hours.

[1062] The engineered fibroblasts are then injected into the host, either alone or after having been grown to confluence on cytodex 3 microcarrier beads. The fibroblasts now produce therprotein product. The fibroblasts can then be introduced into a patient as described above.

### Example 18

### Method of Treatment Using Gene Therapy—In vivo

[1063] Another aspect of the present invention is using in vivo gene therapy methods to treat disorders, diseases and conditions. The gene therapy method relates to the introduction of naked nucleic acid (DNA, RNA, and antisense DNA or RNA) sequences into an animal to increase or decrease the expression of the polypeptide. The polynucleotide of the present invention may be operatively linked to (i.e., associated with) a promoter or any other genetic elements necessary for the expression of the polypeptide by the target tissue. Such gene therapy and delivery techniques and methods are known in the art, see, for example, WO90/11092, WO98/11779; U.S. Pat. Nos. 5,693,622, 5,705,151, 5,580,859; Tabata et al., Cardiovasc. Res. 35(3):470-479 (1997); Chao et al., Pharmacol. Res. 35(6):517-522 (1997); Wolff, Neuromuscul. Disord. 7(5):314-318 (1997); Schwartz et al., Gene Ther. 3(5):405-411 (1996); Tsurumi et al., Circulation 94(12):3281-3290 (1996) (incorporated herein by reference).

[1064] The polynucleotide constructs may be delivered by any method that delivers injectable materials to the cells of an animal, such as, injection into the interstitial space of tissues (heart, muscle, skin, lung, liver, intestine and the like). The polynucleotide constructs can be delivered in a pharmaceutically acceptable liquid or aqueous carrier.

[1065] The term “naked” polynucleotide, DNA or RNA, refers to sequences that are free from any delivery vehicle that acts to assist, promote, or facilitate entry into the cell, including viral sequences, viral particles, liposome formulations, lipofectin or precipitating agents and the like. However, the polynucleotides of the present invention may also be delivered in liposome formulations (such as those taught in Felgner P. L. et al. (1995) Ann. NY Acad. Sci. 772:126-139 and Abdallah B. et al. (1995) Biol. Cell 85(1):1-7) which can be prepared by methods well known to those skilled in the art.

[1066] The polynucleotide vector constructs used in the gene therapy method are preferably constructs that will not integrate into the host genome nor will they contain sequences that allow for replication. Any strong promoter known to those skilled in the art can be used for driving the expression of DNA. Unlike other gene therapy techniques, one major advantage of introducing naked nucleic acid sequences into target cells is the transitory nature of the polynucleotide synthesis in the cells. Studies have shown that non-replicating DNA sequences can be introduced into cells to provide production of the desired polypeptide for periods of up to six months.

[1067] The polynucleotide construct can be delivered to the interstitial space of tissues within an animal, including muscle, skin, brain, lung, liver, spleen, bone marrow, thymus, heart, lymph, blood, bone, cartilage, pancreas, kidney, gall bladder, stomach, intestine, testis, ovary, uterus, rectum, nervous system, eye, gland, and connective tissue. Interstitial space of the tissues comprises the intercellular fluid, mucopolysaccharide matrix among the reticular fibers of organ tissues, elastic fibers in the walls of vessels or chambers, collagen fibers of fibrous tissues, or that same matrix within connective tissue ensheathing muscle cells or in the lacunae of bone. It is similarly the space occupied by the plasma of the circulation and the lymph fluid of the lymphatic channels. Delivery to the interstitial space of muscle tissue is preferred for the reasons discussed below. They may be conveniently delivered by injection into the tissues comprising these cells. They are preferably delivered to and expressed in persistent, non-dividing cells which are differentiated, although delivery and expression may be achieved in non-differentiated or less completely differentiated cells, such as, for example, stem cells of blood or skin fibroblasts. In vivo muscle cells are particularly competent in their ability to take up and express polynucleotides.

[1068] For the naked polynucleotide injection, an effective dosage amount of DNA or RNA will be in the range of from about 0.05 g/kg body weight to about 50 mg/kg body weight. Preferably the dosage will be from about 0.005 mg/kg to about 20 mg/kg and more preferably from about 0.05 mg/kg to about 5 mg/kg. Of course, as the artisan of ordinary skill will appreciate, this dosage will vary according to the tissue site of injection. The appropriate and effective dosage of nucleic acid sequence can readily be determined by those of ordinary skill in the art and may depend on the condition being treated and the route of administration. The preferred route of administration is by the parenteral route of injection into the interstitial space of tissues. However, other parenteral routes may also be used, such as, inhalation of an aerosol formulation particularly for delivery to lungs or bronchial tissues, throat or mucous membranes of the nose. In addition, naked polynucleotide constructs can be delivered to arteries during angioplasty by the catheter used in the procedure.

[1069] The dose response effects of injected polynucleotide in muscle in vivo is determined as follows. Suitable template DNA for production of mRNA coding for polypeptide of the present invention is prepared in accordance with a standard recombinant DNA methodology. The template DNA, which may be either circular or linear, is either used as naked DNA or complexed with liposomes. The quadriceps muscles of mice are then injected with various amounts of the template DNA.

[1070] Five to six week old female and male Balb/C mice are anesthetized by intraperitoneal injection with 0.3 ml of 2.5% Avertin. A 1.5 cm incision is made on the anterior thigh, and the quadriceps muscle is directly visualized. The template DNA is injected in 0.1 ml of carrier in a 1 cc syringe through a 27 gauge needle over one minute, approximately 0.5 cm from the distal insertion site of the muscle into the knee and about 0.2 cm deep. A suture is placed over the injection site for future localization, and the skin is closed with stainless steel clips.

[1071] After an appropriate incubation time (e.g., 7 days) muscle extracts are prepared by excising the entire quadriceps. Every fifth 15 um cross-section of the individual quadriceps muscles is histochemically stained for protein expression. A time course for protein expression may be done in a similar fashion except that quadriceps from different mice are harvested at different times. Persistence of DNA in muscle following injection may be determined by Southern blot analysis after preparing total cellular DNA and HIRT supernatants from injected and control mice. The results of the above experimentation in mice can be used to extrapolate proper dosages and other treatment parameters in humans and other animals using naked DNA.

### Example 19

### Transgenic Animals

[1072] The polypeptides of the invention can also be expressed in transgenic animals. Animals of any species, including, but not limited to, mice, rats, rabbits, hamsters, guinea pigs, pigs, micro-pigs, goats, sheep, cows and non-human primates, e.g., baboons, monkeys, and chimpanzees may be used to generate transgenic animals. In a specific embodiment, techniques described herein or otherwise known in the art, are used to express polypeptides of the invention in humans, as part of a gene therapy protocol.

[1073] Any technique known in the art may be used to introduce the transgene (i.e., polynucleotides of the invention) into animals to produce the founder lines of transgenic animals. Such techniques include, but are not limited to, pronuclear microinjection (Paterson et al., Appl. Microbiol. Biotechnol. 40:691-698 (1994); Carver et al., Biotechnology (NY) 11:1263-1270 (1993); Wright et al., Biotechnology (NY) 9:830-834 (1991); and Hoppe et al., U.S. Pat. No. 4,873,191 (1989)); retrovirus mediated gene transfer into germ lines (Van der Putten et al., Proc. Natl. Acad. Sci., USA 82:6148-6152 (1985)), blastocysts or embryos; gene targeting in embryonic stem cells (Thompson et al., Cell 56:313-321 (1989)); electroporation of cells or embryos (Lo, 1983, Mol Cell. Biol. 3:1803-1814 (1983)); introduction of the polynucleotides of the invention using a gene gun (see, e.g., Ulmer et al., Science 259:1745 (1993); introducing nucleic acid constructs into embryonic pleuripotent stem cells and transferring the stem cells back into the blastocyst; and sperm-mediated gene transfer (Lavitrano et al., Cell 57:717-723 (1989); etc. For a review of such techniques, see Gordon, “Transgenic Animals,” Intl. Rev. Cytol. 115:171-229 (1989), which is incorporated by reference herein in its entirety.

[1074] Any technique known in the art may be used to produce transgenic clones containing polynucleotides of the invention, for example, nuclear transfer into enucleated oocytes of nuclei from cultured embryonic, fetal, or adult cells induced to quiescence (Campell et al., Nature 380:64-66 (1996); Wilmut et al., Nature 385:810-813 (1997)).

[1075] The present invention provides for transgenic animals that carry the transgene in all their cells, as well as animals which carry the transgene in some, but not all their cells, i.e., mosaic animals or chimeric. The transgene may be integrated as a single transgene or as multiple copies such as in concatamers, e.g., head-to-head tandems or head-to-tail tandems. The transgene may also be selectively introduced into and activated in a particular cell type by following, for example, the teaching of Lasko et al. (Lasko et al., Proc. Natl. Acad. Sci. USA 89:6232-6236 (1992)). The regulatory sequences required for such a cell-type specific activation will depend upon the particular cell type of interest, and will be apparent to those of skill in the art. When it is desired that the polynucleotide transgene be integrated into the chromosomal site of the endogenous gene, gene targeting is preferred. Briefly, when such a technique is to be utilized, vectors containing some nucleotide sequences homologous to the endogenous gene are designed for the purpose of integrating, via homologous recombination with chromosomal sequences, into and disrupting the function of the nucleotide sequence of the endogenous gene. The transgene may also be selectively introduced into a particular cell type, thus inactivating the endogenous gene in only that cell type, by following, for example, the teaching of Gu et al. (Gu et al., Science 265:103-106 (1994)). The regulatory sequences required for such a cell-type specific inactivation will depend upon the particular cell type of interest, and will be apparent to those of skill in the art.

[1076] Once transgenic animals have been generated, the expression of the recombinant gene may be assayed utilizing standard techniques. Initial screening may be accomplished by Southern blot analysis or PCR techniques to analyze animal tissues to verify that integration of the transgene has taken place. The level of mRNA expression of the transgene in the tissues of the transgenic animals may also be assessed using techniques which include, but are not limited to, Northern blot analysis of tissue samples obtained from the animal, in situ hybridization analysis, and reverse transcriptase-PCR (rt-PCR). Samples of transgenic gene-expressing tissue may also be evaluated immunocytochemically or immunohistochemically using antibodies specific for the transgene product.

[1077] Once the founder animals are produced, they may be bred, inbred, outbred, or crossbred to produce colonies of the particular animal. Examples of such breeding strategies include, but are not limited to: outbreeding of founder animals with more than one integration site in order to establish separate lines; inbreeding of separate lines in order to produce compound transgenics that express the transgene at higher levels because of the effects of additive expression of each transgene; crossing of heterozygous transgenic animals to produce animals homozygous for a given integration site in order to both augment expression and eliminate the need for screening of animals by DNA analysis; crossing of separate homozygous lines to produce compound heterozygous or homozygous lines; and breeding to place the transgene on a distinct background that is appropriate for an experimental model of interest.

[1078] Transgenic animals of the invention have uses which include, but are not limited to, animal model systems useful in elaborating the biological function of polypeptides of the present invention, studying conditions and/or disorders associated with aberrant expression, and in screening for compounds effective in ameliorating such conditions and/or disorders.

### Example 20

### Knock-Out Animals

[1079] Endogenous gene expression can also be reduced by inactivating or “knocking out” the gene and/or its promoter using targeted homologous recombination. (See e.g., Smithies et al., Nature 317:230-234 (1985); Thomas & Capecchi, Cell 51:503-512 (1987); Thompson et al., Cell 5:313-321 (1989); each of which is incorporated by reference herein in its entirety.) For example, a mutant, non-functional polynucleotide of the invention (or a completely unrelated DNA sequence) flanked by DNA homologous to the endogenous polynucleotide sequence (either the coding regions or regulatory regions of the gene) can be used, with or without a selectable marker and/or a negative selectable marker, to transfect cells that express polypeptides of the invention in vivo. In another embodiment, techniques known in the art are used to generate knockouts in cells that contain, but do not express the gene of interest. Insertion of the DNA construct, via targeted homologous recombination, results in inactivation of the targeted gene. Such approaches are particularly suited in research and agricultural fields where modifications to embryonic stem cells can be used to generate animal offspring with an inactive targeted gene (e.g., see Thomas & Capecchi 1987 and Thompson 1989, supra). However this approach can be routinely adapted for use in humans provided the recombinant DNA constructs are directly administered or targeted to the required site in vivo using appropriate viral vectors that will be apparent to those of skill in the art.

[1080] In further embodiments of the invention, cells that are genetically engineered to express the polypeptides of the invention, or alternatively, that are genetically engineered not to express the polypeptides of the invention (e.g., knockouts) are administered to a patient in vivo. Such cells may be obtained from the patient (i.e., animal, including human) or an MHC compatible donor and can include, but are not limited to fibroblasts, bone marrow cells, blood cells (e.g., lymphocytes), adipocytes, muscle cells, endothelial cells etc. The cells are genetically engineered in vitro using recombinant DNA techniques to introduce the coding sequence of polypeptides of the invention into the cells, or alternatively, to disrupt the coding sequence and/or endogenous regulatory sequence associated with the polypeptides of the invention, e.g., by transduction (using viral vectors, and preferably vectors that integrate the transgene into the cell genome) or transfection procedures, including, but not limited to, the use of plasmids, cosmids, YACs, naked DNA, electroporation, liposomes, etc. The coding sequence of the polypeptides of the invention can be placed under the control of a strong constitutive or inducible promoter or promoter/enhancer to achieve expression, and preferably secretion, of the polypeptides of the invention. The engineered cells which express and preferably secrete the polypeptides of the invention can be introduced into the patient systemically, e.g., in the circulation, or intraperitoneally.

[1081] Alternatively, the cells can be incorporated into a matrix and implanted in the body, e.g., genetically engineered fibroblasts can be implanted as part of a skin graft; genetically engineered endothelial cells can be implanted as part of a lymphatic or vascular graft. (See, for example, Anderson et al. U.S. Pat. No. 5,399,349; and Mulligan & Wilson, U.S. Pat. No. 5,460,959 each of which is incorporated by reference herein in its entirety).

[1082] When the cells to be administered are non-autologous or non-MHC compatible cells, they can be administered using well known techniques which prevent the development of a host immune response against the introduced cells. For example, the cells may be introduced in an encapsulated form which, while allowing for an exchange of components with the immediate extracellular environment, does not allow the introduced cells to be recognized by the host immune system.

[1083] Transgenic and “knock-out” animals of the invention have uses which include, but are not limited to, animal model systems useful in elaborating the biological function of polypeptides of the present invention, studying conditions and/or disorders associated with aberrant expression, and in screening for compounds effective in ameliorating such conditions and/or disorders.

### Example 21

### Assays Detecting Stimulation or Inhibition of B cell Proliferation and Differentiation

[1084] Generation of functional humoral immune responses requires both soluble and cognate signaling between B-lineage cells and their microenvironment. Signals may impart a positive stimulus that allows a B-lineage cell to continue its programmed development, or a negative stimulus that instructs the cell to arrest its current developmental pathway. To date, numerous stimulatory and inhibitory signals have been found to influence B cell responsiveness including IL-2, IL-4, IL-5, IL-6, IL-7, IL10, IL-13, IL-14 and IL-15. Interestingly, these signals are by themselves weak effectors but can, in combination with various co-stimulatory proteins, induce activation, proliferation, differentiation, homing, tolerance and death among B cell populations.

[1085] One of the best studied classes of B-cell co-stimulatory proteins is the TNF-superfamily. Within this family CD40, CD27, and CD30 along with their respective ligands CD154, CD70, and CD153 have been found to regulate a variety of immune responses. Assays which allow for the detection and/or observation of the proliferation and differentiation of these B-cell populations and their precursors are valuable tools in determining the effects various proteins may have on these B-cell populations in terms of proliferation and differentiation. Listed below are two assays designed to allow for the detection of the differentiation, proliferation, or inhibition of B-cell populations and their precursors.

[1086] In vitro Assay-Agonists or antagonists of the invention can be assessed for its ability to induce activation, proliferation, differentiation or inhibition and/or death in B-cell populations and their precursors. The activity of the agonists or antagonists of the invention on purified human tonsillar B cells, measured qualitatively over the dose range from 0.1 to 10,000 ng/mL, is assessed in a standard B-lymphocyte co-stimulation assay in which purified tonsillar B cells are cultured in the presence of either formalin-fixed Staphylococcus aureus Cowan I (SAC) or immobilized anti-human IgM antibody as the priming agent. Second signals such as IL-2 and IL-15 synergize with SAC and IgM crosslinking to elicit B cell proliferation as measured by tritiated-thymidine incorporation. Novel synergizing agents can be readily identified using this assay. The assay involves isolating human tonsillar B cells by magnetic bead (MACS) depletion of CD3-positive cells. The resulting cell population is greater than 95% B cells as assessed by expression of CD45R(B220).

[1087] Various dilutions of each sample are placed into individual wells of a 96-well plate to which are.added 10⁵ B-cells suspended in culture. medium (RPMI 1640 containing 10% FBS, 5×10⁻⁵M 2ME, 100 U/ml penicillin, 10 ug/ml streptomycin, and 10⁻⁵ dilution of SAC) in a total volume of 150 ul. Proliferation or inhibition is quantitated by a 20 h pulse (1uCi/well) with 3H-thymidine (6.7 Ci/mM) beginning 72 h post factor addition. The positive and negative controls are IL2 and medium respectively.

[1088] In vivo Assay-BALB/c mice are injected (i.p.) twice per day with buffer only, or 2 mg/Kg of agonists or antagonists of the invention, or truncated forms thereof. Mice receive this treatment for 4 consecutive days, at which time they are sacrificed and various tissues and serum collected for analyses. Comparison of H&E sections from normal spleens and spleens treated with agonists or antagonists of the invention identify the results of the activity of the agonists or antagonists on spleen cells, such as the diffusion of peri-arterial lymphatic sheaths, and/or significant increases in the nucleated cellularity of the red pulp regions, which may indicate the activation of the differentiation and proliferation of B-cell populations. Immunohistochemical studies using a B cell marker, anti-CD45R(B220), are used to determine whether any physiological changes to splenic cells, such as splenic disorganization, are due to increased B-cell representation within loosely defined B-cell zones that infiltrate established T-cell regions.

[1089] Flow cytometric analyses of the spleens from mice treated with agonist or antagonist is used to indicate whether the agonists or antagonists specifically increases the proportion of ThB+, CD45R(B220)dull B cells over that which is observed in control mice.

[1090] Likewise, a predicted consequence of increased mature B-cell representation in vivo is a relative increase in serum Ig titers. Accordingly, serum IgM and IgA levels are compared between buffer and agonists or antagonists-treated mice.

[1091] The studies described in this example tested activity of agonists or antagonists of the invention. However, one skilled in the art could easily modify the exemplified studies to test the activity of polynucleotides or polypeptides of the invention (e.g., gene therapy).

### Example 22

### T Cell Proliferation Assay

[1092] A CD3-induced proliferation assay is performed on PBMCs and is measured by the uptake of ³H-thymidine. The assay is performed as follows. Ninety-six well plates are coated with 100 μl/well of mAb to CD3 (HIT3a, Pharmingen) or isotype-matched control mAb (B33.1) overnight at 4 degrees C. (1 μg/ml in 0.05M bicarbonate buffer, pH 9.5), then washed three times with PBS. PBMC are isolated by F/H gradient centrifugation from human peripheral blood and added to quadruplicate wells (5×10⁴/well) of mAb coated plates in RPMI containing 10% FCS and P/S in the presence of varying concentrations of agonists or antagonists of the invention (total volume 200 ul). Relevant protein buffer and medium alone are controls. After 48 hr. culture at 37 degrees C., plates are spun for 2 min. at 1000 rpm and 100 μl of supernatant is removed and stored −20 degrees C. for measurement of IL-2 (or other cytokines) if effect on proliferation is observed. Wells are supplemented with 100 ul of medium containing 0.5 uCi of ³H-thymidine and cultured at 37 degrees C. for 18-24 hr. Wells are harvested and incorporation of ³H-thymidine used as a measure of proliferation. Anti-CD3 alone is the positive control for proliferation. IL-2 (100 U/ml) is also used as a control which enhances proliferation. Control antibody which does not induce proliferation of T cells is used as the negative control for the effects of agonists or antagonists of the invention.

[1093] The studies described in this example tested activity of agonists or antagonists of the invention. However, one skilled in the art could easily modify the exemplified studies to test the activity of polynucleotides or polypeptides of the invention (e.g., gene therapy).

### Example 23

### Effect of Agonists or Antagonists of the Invention on the Expression of MHC Class II, Costimulatory and Adhesion Molecules and Cell Differentiation of Monocytes and Monocyte-Derived Human Dendritic Cells

[1094] Dendritic cells are generated by the expansion of proliferating precursors found in the peripheral blood: adherent PBMC or elutriated monocytic fractions are cultured for 7-10 days with GM-CSF (50 ng/ml) and IL-4 (20 ng/ml). These dendritic cells have the characteristic phenotype of immature cells (expression of CD1, CD80, CD86, CD40 and MHC class II antigens). Treatment with activating factors, such as TNF-α, causes a rapid change in surface phenotype (increased expression of MHC class I and II, costimulatory and adhesion molecules, downregulation of FCγRII, upregulation of CD83). These changes correlate with increased antigen-presenting capacity and with functional maturation of the dendritic cells.

[1095] FACS analysis of surface antigens is performed as follows. Cells are treated 1-3 days with increasing concentrations of agonist or antagonist of the invention or LPS (positive control), washed with PBS containing 1% BSA and 0.02 mM sodium azide, and then incubated with 1:20 dilution of appropriate FITC- or PE-labeled monoclonal antibodies for 30 minutes at 4 degrees C. After an additional wash, the labeled cells are analyzed by flow cytometry on a FACScan (Becton Dickinson).

[1096] Effect on the production of cytokines. Cytokines generated by dendritic cells, in particular IL-12, are important in the initiation of T-cell dependent immune responses. IL-12 strongly influences the development of Th1 helper T-cell immune response, and induces cytotoxic T and NK cell function. An ELISA is used to measure the IL-12 release as follows. Dendritic cells (10⁶/ml) are treated with increasing concentrations of agonists or antagonists of the invention for 24 hours. LPS (100 ng/ml) is added to the cell culture as positive control. Supernatants from the cell cultures are then collected and analyzed for IL-12 content using commercial ELISA kit (e.g., R & D Systems (Minneapolis, Minn.)). The standard protocols provided with the kits are used.

[1097] Effect on the expression of MHC Class II, costimulatory and adhesion molecules. Three major families of cell surface antigens can be identified on monocytes: adhesion molecules, molecules involved in antigen presentation, and Fc receptor. Modulation of the expression of MHC class II antigens and other costimulatory molecules, such as B7 and ICAM-1, may result in changes in the antigen presenting capacity of monocytes and ability to induce T cell activation. Increased expression of Fc receptors may correlate with improved monocyte cytotoxic activity, cytokine release and phagocytosis.

[1098] FACS analysis is used to examine the surface antigens as follows. Monocytes are treated 1-5 days with increasing concentrations of agonists or antagonists of the invention or LPS (positive control), washed with PBS containing 1% BSA and 0.02 mM sodium azide, and then incubated with 1:20 dilution of appropriate FITC- or PE-labeled monoclonal antibodies for 30 minutes at 4 degrees C. After an additional wash, the labeled cells are analyzed by flow cytometry on a FACScan (Becton Dickinson).

[1099] Monocyte activation and/or increased survival. Assays for molecules that activate (or alternatively, inactivate) monocytes and/or increase monocyte survival (or alternatively, decrease monocyte survival) are known in the art and may routinely be applied to determine whether a molecule of the invention functions as an inhibitor or activator of monocytes. Agonists or antagonists of the invention can be screened using the three assays described below. For each of these assays, Peripheral blood mononuclear cells (PBMC) are purified from single donor leukopacks (American Red Cross, Baltimore, Md.) by centrifugation through a Histopaque gradient (Sigma). Monocytes are isolated from PBMC by counterflow centrifugal elutriation.

[1100] Monocyte Survival Assay. Human peripheral blood monocytes progressively lose viability when cultured in absence of serum or other stimuli. Their death results from internally regulated processes (apoptosis). Addition to the culture of activating factors, such as TNF-alpha dramatically improves cell survival and prevents DNA fragmentation. Propidium iodide (PI) staining is used to measure apoptosis as follows. Monocytes are cultured for 48 hours in polypropylene tubes in serum-free medium (positive control), in the presence of 100 ng/ml TNF-alpha (negative control), and in the presence of varying concentrations of the compound to be tested. Cells are suspended at a concentration of 2×10⁶/ml in PBS containing PI at a final concentration of 5 μg/ml, and then incubated at room temperature for 5 minutes before FACScan analysis. PI uptake has been demonstrated to correlate with DNA fragmentation in this experimental paradigm.

[1101] Effect on cytokine release. An important function of monocytes/macrophages is their regulatory activity on other cellular populations of the immune system through the release of cytokines after stimulation. An ELISA to measure cytokine release is performed as follows. Human monocytes are incubated at a density of 5×10⁵ cells/ml with increasing concentrations of agonists or antagonists of the invention and under the same conditions, but in the absence of agonists or antagonists. For IL-12 production, the cells are primed overnight with IFN (100 U/ml) in the presence of agonist or antagonist of the invention. LPS (10 ng/ml) is then added. Conditioned media are collected after 24 h and kept frozen until use. Measurement of TNF-alpha, IL-10, MCP-1 and IL-8 is then performed using a commercially available ELISA kit (e.g., R & D Systems (Minneapolis, Minn.)) and applying the standard protocols provided with the kit.

[1102] Oxidative burst. Purified monocytes are plated in 96-w plate at 2-1×10⁵ cell/well. Increasing concentrations of agonists or antagonists of the invention are added to the wells in a total volume of 0.2 ml culture medium (RPMI 1640+10% FCS, glutamine and antibiotics). After 3 days incubation, the plates are centrifuged and the medium is removed from the wells. To the macrophage monolayers, 0.2 ml per well of phenol red solution (140 mM NaCl, 10 mM potassium phosphate buffer pH 7.0, 5.5 mM dextrose, 0.56 mM phenol red and 19 U/ml of HRPO) is added, together with the stimulant (200 nM PMA). The plates are incubated at 37° C. for 2 hours and the reaction is stopped by adding 20 μl IN NaOH per well. The absorbance is read at 610 nm. To calculate the amount of H₂O₂ produced by the macrophages, a standard curve of a H₂O₂ solution of known molarity is performed for each experiment.

[1103] The studies described in this example tested activity of agonists or antagonists of the invention. However, one skilled in the art could easily modify the exemplified studies to test the activity of polynucleotides or polypeptides of the invention (e.g., gene therapy).

### Example 24

### Biological Effects of Agonists or Antagonists of the Invention

[1104] Astrocyte and Neuronal Assays

[1105] Agonists or antagonists of the invention, expressed in Escherichia coli and purified as described above, can be tested for activity in promoting the survival, neurite outgrowth, or phenotypic differentiation of cortical neuronal cells and for inducing the proliferation of glial fibrillary acidic protein immunopositive cells, astrocytes. The selection of cortical cells for the bioassay is based on the prevalent expression of FGF-1 and FGF-2 in cortical structures and on the previously reported enhancement of cortical neuronal survival resulting from FGF-2 treatment. A thymidine incorporation assay, for example, can be used to elucidate an agonist or antagonist of the invention's activity on these cells.

[1106] Moreover, previous reports describing the biological effects of FGF-2 (basic FGF) on cortical or hippocampal neurons in vitro have demonstrated increases in both neuron survival and neurite outgrowth (Walicke et al., “Fibroblast growth factor promotes survival of dissociated hippocampal neurons and enhances neurite extension.” Proc. Natl. Acad. Sci. USA 83:3012-3016. (1986), assay herein incorporated by reference in its entirety). However, reports from experiments done on PC-12 cells suggest that these two responses are not necessarily synonymous and may depend on not only which FGF is being tested but also on which receptor(s) are expressed on the target cells. Using the primary cortical neuronal culture paradigm, the ability of an agonist or antagonist of the invention to induce neurite outgrowth can be compared to the response achieved with FGF-2 using, for example, a thymidine incorporation assay.

[1107] Fibroblast and endothelial cell assays

[1108] Human lung fibroblasts are obtained from Clonetics (San Diego, Calif.) and maintained in growth media from Clonetics. Dermal microvascular endothelial cells are obtained from Cell Applications (San Diego, Calif.). For proliferation assays, the human lung fibroblasts and dermal microvascular endothelial cells can be cultured at 5,000 cells/well in a 96-well plate for one day in growth medium. The cells are then incubated for one day in 0.1% BSA basal medium. After replacing the medium with fresh 0.1% BSA medium, the cells are incubated with the test proteins for 3 days. Alamar Blue (Alamar Biosciences, Sacramento, Calif.) is added to each well to a final concentration of 10%. The cells are incubated for 4 hr. Cell viability is measured by reading in a CytoFluor fluorescence reader. For the PGE₂ assays, the human lung fibroblasts are cultured at 5,000 cells/well in a 96-well plate for one day. After a medium change to 0.1% BSA basal medium, the cells are incubated with FGF-2 or agonists or antagonists of the invention with or without IL-1α for 24 hours. The supernatants are collected and assayed for PGE₂ by EIA kit (Cayman, Ann Arbor, Mich.). For the IL-6 assays, the human lung fibroblasts are cultured at 5,000 cells/well in a 96-well plate for one day. After a medium change to 0.1% BSA basal medium, the cells are incubated with FGF-2 or with or without agonists or antagonists of the invention IL-1α for 24 hours. The supernatants are collected and assayed for IL-6 by ELISA kit (Endogen, Cambridge, Mass.).

[1109] Human lung fibroblasts are cultured with FGF-2 or agonists or antagonists of the invention for 3 days in basal medium before the addition of Alamar Blue to assess effects on growth of the fibroblasts. FGF-2 should show a stimulation at 10-2500 ng/ml which can be used to compare stimulation with agonists or antagonists of the invention.

[1110] Parkinson Models

[1111] The loss of motor function in Parkinson's disease is attributed to a deficiency of striatal dopamine resulting from the degeneration of the nigrostriatal dopaminergic projection neurons. An animal model for Parkinson's that has been extensively characterized involves the systemic administration of 1-methyl-4 phenyl 1,2,3,6-tetrahydropyridine (MPTP). In the CNS, MPTP is taken-up by astrocytes and catabolized by monoamine oxidase B to 1-methyl-4-phenyl pyridine (MPP⁺) and released. Subsequently, MPP⁺ is actively accumulated in dopaminergic neurons by the high-affinity reuptake transporter for dopamine. MPP⁺ is then concentrated in mitochondria by the electrochemical gradient and selectively inhibits nicotidamide adenine disphosphate: ubiquinone oxidoreductionase (complex I), thereby interfering with electron transport and eventually generating oxygen radicals.

[1112] It has been demonstrated in tissue culture paradigms that FGF-2 (basic FGF) has trophic activity towards nigral dopaminergic neurons (Ferrari et al., Dev. Biol. 1989). Recently, Dr. Unsicker's group has demonstrated that administering FGF-2 in gel foam implants in the striatum results in the near complete protection of nigral dopaminergic neurons from the toxicity associated with MPTP exposure (Otto and Unsicker, J. Neuroscience, 1990).

[1113] Based on the data with FGF-2, agonists orantagonists of the invention can be evaluated to determine whether it has an action similar to that of FGF-2 in enhancing dopaminergic neuronal survival in vitro and it can also be tested in vivo for protection of dopaminergic neurons in the striatum from the damage associated with MPTP treatment. The potential effect of an agonist or antagonist of the invention is first examined in vitro in a dopaminergic neuronal cell culture paradigm. The cultures are prepared by dissecting the midbrain floor plate from gestation day 14 Wistar rat embryos. The tissue is dissociated with trypsin and seeded at a density of 200,000 cells/cm² on polyorthinine-laminin coated glass coverslips. The cells are maintained in Dulbecco's Modified Eagle's medium and F12 medium containing hormonal supplements (N1). The cultures are fixed with paraformaldehyde after 8 days in vitro and are processed for tyrosine hydroxylase, a specific marker for dopaminergic neurons, immunohistochemical staining. Dissociated cell cultures are prepared from embryonic rats. The culture medium is changed every third day and the factors are also added at that time.

[1114] Since the dopaminergic neurons are isolated from animals at gestation day 14, a developmental time which is past the stage when the dopaminergic precursor cells are proliferating, an increase in the number of tyrosine hydroxylase immunopositive neurons would represent an increase in the number of dopaminergic neurons surviving in vitro. Therefore, if an agonist or antagonist of the invention acts to prolong the survival of dopaminergic neurons, it would suggest that the agonist or antagonist may be involved in Parkinson's Disease.

[1115] The studies described in this example tested activity of agonists or antagonists of the invention. However, one skilled in the art could easily modify the exemplified studies to test the activity of polynucleotides or polypeptides of the invention (e.g., gene therapy).

### Example 25

### The Effect of Agonists or Antagonists of the Invention on the Growth of Vascular Endothelial Cells

[1116] On day 1, human umbilical vein endothelial cells (HUVEC) are seeded at 2-5×10⁴ cells/35 mm dish density in M199 medium containing 4% fetal bovine serum (FBS), 16 units/ml heparin, and 50 units/ml endothelial cell growth supplements (ECGS, Biotechnique, Inc.). On day 2, the medium is replaced with M199 containing 10% FBS, 8 units/ml heparin. An agonist or antagonist of the invention, and positive controls, such as VEGF and basic FGF (bFGF) are added, at varying concentrations. On days 4 and 6, the medium is replaced. On day 8, cell number is determined with a Coulter Counter.

[1117] An increase in the number of HUVEC cells indicates that the compound of the invention may proliferate vascular endothelial cells, while a decrease in the number of HUVEC cells indicates that the compound of the invention inhibits vascular endothelial cells.

[1118] The studies described in this example tested activity of a polypeptide of the invention. However, one skilled in the art could easily modify the exemplified studies to test the activity of polynucleotides (e.g., gene therapy), agonists, and/or antagonists of the invention.

### Example 26

### Rat Corneal Wound Healing Model

[1119] This animal model shows the effect of an agonist or antagonist of the invention on neovascularization. The experimental protocol includes:

[1120] (a) Making a 1-1.5 mm long incision from the center of cornea into the stromal layer.

[1121] (b) Inserting a spatula below the lip of the incision facing the outer comer of the eye.

[1122] (c) Making a pocket (its base is 1-1.5 mm form the edge of the eye).

[1123] (d) Positioning a pellet, containing 50 ng-5 ug of an agonist or antagonist of the invention, within the pocket.

[1124] Treatment with an agonist or antagonist of the invention can also be applied topically to the corneal wounds in a dosage range of 20 mg-500 mg (daily treatment for five days).

[1125] The studies described in this example tested activity of agonists or antagonists of the invention. However, one skilled in the art could easily modify the exemplified studies to test the activity of polynucleotides or polypeptides of the invention (e.g., gene therapy).

### Example 27

### Diabetic Mouse and Glucocorticoid-Impaired Wound Healing Models

[1126] Diabetic db+/db+ Mouse Model

[1127] To demonstrate that an agonist or antagonist of the invention accelerates the healing process, the genetically diabetic mouse model of wound healing is used. The full thickness wound healing model in the db+/db+ mouse is a well characterized, clinically relevant and reproducible model of impaired wound healing. Healing of the diabetic wound is dependent on formation of granulation tissue and re-epithelialization rather than contraction (Gartner, M. H. et al., J. Surg. Res. 52:389 (1992); Greenhalgh, D. G. et al., Am. J Pathol. 136:1235 (1990)).

[1128] The diabetic animals have many of the characteristic features observed in Type II diabetes mellitus. Homozygous (db+/db+) mice are obese in comparison to their normal heterozygous (db+/+m) littermates. Mutant diabetic (db+/db+) mice have a single autosomal recessive mutation on chromosome 4 (db+) (Coleman et al. Proc. Natl. Acad. Sci. USA 77:283-293 (1982)). Animals show polyphagia, polydipsia and polyuria. Mutant diabetic mice (db+/db+) have elevated blood glucose, increased or normal insulin levels, and suppressed cell-mediated immunity (Mandel et al., J. Immunol. 120:1375 (1978); Debray-Sachs, M. et al., Clin. Exp. Immunol. 51(1):1-7 (1983); Leiter et al., Am. J. of Pathol. 114:46-55 (1985)). Peripheral neuropathy, myocardial complications, and microvascular lesions, basement membrane thickening and glomerular filtration abnormalities have been described in these animals (Norido, F. et al., Exp. Neurol. 83(2):221-232 (1984); Robertson et al., Diabetes 29(1):60-67 (1980); Giacomelli et.al., Lab Invest. 40(4):460-473 (1979); Coleman, D. L., Diabetes 31 (Suppl.):1-6 (1982)). These homozygous diabetic mice develop hyperglycemia that is resistant to insulin analogous to human type II diabetes (Mandel et al., J. Immunol. 120:1375-1377 (1978)).

[1129] The characteristics observed in these animals suggests that healing in this model may be similar to the healing observed in human diabetes (Greenhalgh, et al., Am. J of Pathol. 136:1235-1246 (1990)).

[1130] Genetically diabetic female C57BL/KsJ (db+/db+) mice and their non-diabetic (db+/+m) heterozygous littermates are used in this study (Jackson Laboratories). The animals are purchased at 6 weeks of age and are 8 weeks old at the beginning of the study. Animals are individually housed and received food and water ad libitum. All manipulations are performed using aseptic techniques. The experiments are conducted according to the rules and guidelines of Human Genome Sciences, Inc. Institutional Animal Care and Use Committee and the Guidelines for the Care and Use of Laboratory Animals.

[1131] Wounding protocol is performed according to previously reported methods (Tsuboi, R. and Rifkin, D. B., J. Exp. Med. 172:245-251 (1990)). Briefly, on the day of wounding, animals are anesthetized with an intraperitoneal injection of Avertin (0.01 mg/mL), 2,2,2-tribromoethanol and 2-methyl-2-butanol dissolved in deionized water. The dorsal region of the animal is shaved and the skin washed with 70% ethanol solution and iodine. The surgical area is dried with sterile gauze prior to wounding. An 8 mm full-thickness wound is then created using a Keyes tissue punch. Immediately following wounding, the surrounding skin is gently stretched to eliminate wound expansion. The wounds are left open for the duration of the experiment. Application of the treatment is given topically for 5 consecutive days commencing on the day of wounding. Prior to treatment, wounds are gently cleansed with sterile saline and gauze sponges.

[1132] Wounds are visually examined and photographed at a fixed distance at the day of surgery and at two day intervals thereafter. Wound closure is determined by daily measurement on days 1-5 and on day 8. Wounds are measured horizontally and vertically using a calibrated Jameson caliper. Wounds are considered healed if granulation tissue is no longer visible and the wound is covered by a continuous epithelium.

[1133] An agonist or antagonist of the invention is administered using at a range different doses, from 4 mg to 500 mg per wound per day for 8 days in vehicle. Vehicle control groups received 50 mL of vehicle solution.

[1134] Animals are euthanized on day 8 with an intraperitoneal injection of sodium pentobarbital (300 mg/kg). The wounds and surrounding skin are then harvested for histology and immunohistochemistry. Tissue specimens are placed in 10% neutral buffered formalin in tissue cassettes between biopsy sponges for further processing.

[1135] Three groups of 10 animals each (5 diabetic and 5 non-diabetic controls) are evaluated: 1) Vehicle placebo control, 2) untreated group, and 3) treated group.

[1136] Wound closure is analyzed by measuring the area in the vertical and horizontal axis and obtaining the total square area of the wound. Contraction is then estimated by establishing the differences between the initial wound area (day 0) and that of post treatment (day 8). The wound area on day 1 is 64 mm², the corresponding size of the dermal punch: Calculations are made using the following formula:

[Open area on day 8]−[Open area on day 1]/[Open area on day 1]

[1137] Specimens are fixed in 10% buffered formalin and paraffin embedded blocks are sectioned perpendicular to the wound surface (5 mm) and cut using a Reichert-Jung microtome. Routine hematoxylin-eosin (H&E) staining is performed on cross-sections of bisected wounds. Histologic examination of the wounds are used to assess whether the healing process and the morphologic appearance of the repaired skin is altered by treatment with an agonist or antagonist of the invention. This assessment included verification of the presence of cell accumulation, inflammatory cells, capillaries, fibroblasts, re-epithelialization and epidermal maturity (Greenhalgh, D. G. et al., Am. J. Pathol. 136:1235 (1990)). A calibrated lens micrometer is used by a blinded observer.

[1138] Tissue sections are also stained immunohistochemically with a polyclonal rabbit anti-human keratin antibody using ABC Elite detection system. Human skin is used as a positive tissue control while non-immune IgG is used as a negative control. Keratinocyte growth is determined by evaluating the extent of reepithelialization of the wound using a calibrated lens micrometer.

[1139] Proliferating cell nuclear antigen/cyclin (PCNA) in skin specimens is demonstrated by using anti-PCNA antibody (1:50) with an ABC Elite detection system. Human colon cancer served as a positive tissue control and human brain tissue is used as a negative tissue control. Each specimen included a section with omission of the primary antibody and substitution with non-immune mouse IgG. Ranking of these sections is based on the extent of proliferation on a scale of 0-8, the lower side of the scale reflecting slight proliferation to the higher side reflecting intense proliferation.

[1140] Experimental data are analyzed using an unpaired t test. A p value of <0.05 is considered significant.

[1141] Steroid Impaired Rat Model

[1142] The inhibition of wound healing by steroids has been well documented in various in vitro and in vivo systems (Wahl, Glucocorticoids and Wound healing. In: Anti-Inflammatory Steroid Action: Basic and Clinical Aspects. 280-302 (1989); Wahlet al., J. Immunol. 115: 476-481 (1975); Werb et al., J. Exp. Med. 147:1684-1694 (1978)). Glucocorticoids retard wound healing by inhibiting angiogenesis, decreasing vascular permeability (Ebert et al., An. Intern. Med. 37:701-705 (1952)), fibroblast proliferation, and collagen synthesis (Beck et al., Growth Factors. 5: 295-304 (1991); Haynes et al., J. Clin. Invest. 61: 703-797 (1978)) and producing a transient reduction of circulating monocytes (Haynes et al., J. Clin. Invest. 61: 703-797 (1978); Wahl, “Glucocorticoids and wound healing”, In: Antiinflammatory Steroid Action: Basic and Clinical Aspects, Academic Press, New York, pp. 280-302 (1989)). The systemic administration of steroids to impaired wound healing is a well establish phenomenon in rats (Beck et al., Growth Factors. 5: 295-304 (1991); Haynes et al., J. Clin. Invest. 61: 703-797 (1978); Wahl, “Glucocorticoids and wound healing”, In: Antiinflammatory Steroid Action: Basic and Clinical Aspects, Academic Press, New York, pp. 280-302 (1989); Pierce et al., Proc. Natl. Acad. Sci. USA 86: 2229-2233 (1989)).

[1143] To demonstrate that an agonist or antagonist of the invention can accelerate the healing process, the effects of multiple topical applications of the agonist or antagonist on full thickness excisional skin wounds in rats in which healing has been impaired by the systemic administration of methylprednisolone is assessed.

[1144] Young adult male Sprague Dawley rats weighing 250-300 g (Charles River Laboratories) are used in this example. The animals are purchased at 8 weeks of age and are 9 weeks old at the beginning of the study. The healing response of rats is impaired by the systemic administration of methylprednisolone (17 mg/kg/rat intramuscularly) at the time of wounding. Animals are individually housed and received food and water ad libitum. All manipulations are performed using aseptic techniques. This study is conducted according to the rules and guidelines of Human Genome Sciences, Inc. Institutional Animal Care and Use Committee and the Guidelines for the Care and Use of Laboratory Animals.

[1145] The wounding protocol is followed according to section A, above. On the day of wounding, animals are anesthetized with an intramuscular injection of ketamine (50 mg/kg) and xylazine (5 mg/kg). The dorsal region of the animal is shaved and the skin washed with 70% ethanol and iodine solutions. The surgical area is dried with sterile gauze prior to wounding. An 8 mm full-thickness wound is created using a Keyes tissue punch. The wounds are left open for the duration of the experiment. Applications of the testing materials are given topically once a day for 7 consecutive days commencing on the day of wounding and subsequent to methylprednisolone administration. Prior to treatment, wounds are gently cleansed with sterile saline and gauze sponges.

[1146] Wounds are visually examined and photographed at a fixed distance at the day of wounding and at the end of treatment. Wound closure is determined by daily measurement on days 1-5 and on day 8. Wounds are measured horizontally and vertically using a calibrated Jameson caliper. Wounds are considered healed if granulation tissue is no longer visible and the wound is covered by a continuous epithelium.

[1147] The agonist or antagonist of the invention is administered using at a range different doses, from 4 mg to 500 mg per wound per day for 8 days in vehicle. Vehicle control groups received 50 mL of vehicle solution.

[1148] Animals are euthanized on day 8 with an intraperitoneal injection of sodium pentobarbital (300 mg/kg). The wounds and surrounding skin are then harvested for histology. Tissue specimens are placed in 10% neutral buffered formalin in tissue cassettes between biopsy sponges for further processing.

[1149] Three groups of 10 animals each (5 with methylprednisolone and 5 without glucocorticoid) are evaluated: 1) Untreated group 2) Vehicle placebo control 3) treated groups.

[1150] Wound closure is analyzed by measuring the area in the vertical and horizontal axis and obtaining the total area of the wound. Closure is then estimated by establishing the differences between the initial wound area (day 0) and that of post treatment (day 8). The wound area on day 1 is 64 mm², the corresponding size of the dermal punch. Calculations are made using the following formula:

[Open area on day 8]−[Open area on day 1]/[Open area on day 1]

[1151] Specimens are fixed in 10% buffered formalin and paraffin embedded blocks are sectioned perpendicular to the wound surface (5 mm) and cut-using an Olympus microtome. Routine hematoxylin-eosin (H&E) staining is performed on cross-sections of bisected wounds. Histologic examination of the wounds allows assessment of whether the healing process and the morphologic appearance of the repaired skin is improved by treatment with an agonist or antagonist of the invention. A calibrated lens micrometer is used by a blinded observer to determine the distance of the wound gap.

[1152] Experimental data are analyzed using an unpaired t test. A p value of <0.05 is considered significant.

[1153] The studies described in this example tested activity of agonists or antagonists of the invention. However, one skilled in the art could easily modify the exemplified studies to test the activity of polynucleotides or polypeptides of the invention (e.g., gene therapy).

### Example 28

### Lymphadema Animal Model

[1154] The purpose of this experimental approach is to create an appropriate and consistent lymphedema model for testing the therapeutic effects of an agonist or antagonist of the invention in lymphangiogenesis and re-establishment of the lymphatic circulatory system in the rat hind limb. Effectiveness is measured by swelling volume of the affected limb, quantification of the amount of lymphatic vasculature, total blood plasma protein, and histopathology. Acute lymphedema is observed for 7-10 days. Perhaps more importantly, the chronic progress of the edema is followed for up to 3-4 weeks.

[1155] Prior to beginning surgery, blood sample is drawn for protein concentration analysis. Male rats weighing approximately ˜350 g are dosed with Pentobarbital. Subsequently, the right legs are shaved from knee to hip. The shaved area is swabbed with gauze soaked in 70% EtOH. Blood is drawn for serum total protein testing. Circumference and volumetric measurements are made prior to injecting dye into paws after marking 2 measurement levels (0.5 cm above heel, at mid-pt of dorsal paw). The intradermal dorsum of both right and left paws are injected with 0.05 ml of 1% Evan's Blue. Circumference and volumetric measurements are then made following injection of dye into paws.

[1156] Using the knee joint as a landmark, a mid-leg inguinal incision is made circumferentially allowing the femoral vessels to be located. Forceps and hemostats are used to dissect and separate the skin flaps. After locating the femoral vessels, the lymphatic vessel that runs along side and underneath the vessel(s) is located. The main lymphatic vessels in this area are then electrically coagulated or suture ligated.

[1157] Using a microscope, muscles in back of the leg (near the semitendinosis and adductors) are bluntly dissected. The popliteal lymph node is then located. The 2 proximal and 2 distal lymphatic vessels and distal blood supply of the popliteal node are then ligated by suturing. The popliteal lymph node, and any accompanying adipose tissue, is then removed by cutting connective tissues.

[1158] Care is taken to control any mild bleeding resulting from this procedure. After lymphatics are occluded, the skin flaps are sealed by using liquid skin (Vetbond) (A J Buck). The separated skin edges are sealed to the underlying muscle tissue while leaving a gap of ˜0.5 cm around the leg. Skin also may be anchored by suturing to underlying muscle when necessary.

[1159] To avoid infection, animals are housed individually with mesh (no bedding). Recovering animals are checked daily through the optimal edematous peak, which typically occurred by day 5-7. The plateau edematous peak are then observed. To evaluate the intensity of the lymphedema, the circumference and volumes of 2 designated places on each paw before operation and daily for 7 days are measured. The effect of plasma proteins on lymphedema is determined and whether protein analysis is a useful testing perimeter is also investigated. The weights of both control and edematous limbs are evaluated at 2 places. Analysis is performed in a blind manner.

[1160] Circumference Measurements: Under brief gas anesthetic to prevent limb movement, a cloth tape is used to measure limb circumference. Measurements are done at the ankle bone and dorsal paw by 2 different people and those 2 readings are averaged. Readings are taken from both control and edematous limbs.

[1161] Volumetric Measurements: On the day of surgery, animals are anesthetized with Pentobarbital and are tested prior to surgery. For daily volumetrics animals are under brief halothane anesthetic (rapid immobilization and quick recovery), and both legs are shaved and equally marked using waterproof marker on legs. Legs are first dipped in water, then dipped into instrument to each marked level, then measured by Buxco edema software(Chen/Victor). Data is recorded by one person, while the other is dipping the limb to marked area.

[1162] Blood-plasma protein measurements: Blood is drawn, spun, and serum separated prior to surgery and then at conclusion for total protein and Ca2⁺ comparison.

[1163] Limb Weight Comparison: After drawing blood, the animal is prepared for tissue collection. The limbs are amputated using a quillitine, then both experimental and control legs are cut at the ligature and weighed. A second weighing is done as the tibio-cacaneal joint is disarticulated and the foot is weighed.

[1164] Histological Preparations: The transverse muscle located behind the knee (popliteal) area is dissected and arranged in a metal mold, filled with freezeGel, dipped into cold methylbutane, placed into labeled sample bags at −80 EC until sectioning. Upon sectioning, the muscle is observed under fluorescent microscopy for lymphatics..

[1165] The studies described in this example tested activity of agonists or antagonists of the invention. However, one skilled in the art could easily modify the exemplified studies to test the activity of polynucleotides or polypeptides of the invention (e.g., gene therapy).

### Example 29

### Suppression of TNF Alpha-induced Adhesion Molecule Expression by a Agonist or Antagonist of the Invention

[1166] The recruitment of lymphocytes to areas of inflammation and angiogenesis involves specific receptor-ligand interactions between cell surface adhesion molecules (CAMs) on lymphocytes and the vascular endothelium. The adhesion process, in both normal and pathological settings, follows a multi-step cascade that involves intercellular adhesion molecule-1 (ICAM-1), vascular cell adhesion molecule-1 (VCAM-1), and endothelial leukocyte adhesion molecule-1 (E-selectin) expression on endothelial cells (EC). The expression of these molecules and others on the vascular endothelium determines the efficiency with which leukocytes may adhere to the local vasculature and extravasate into the local tissue during the development of an inflammatory response. The local concentration of cytokines and growth factor participate in the modulation of the expression of these CAMs.

[1167] Tumor necrosis factor alpha (TNF-a), a potent proinflammatory cytokine, is a stimulator of all three CAMs on endothelial cells and may be involved in a wide variety of inflammatory responses, often resulting in a pathological outcome.

[1168] The potential of an agonist or antagonist of the invention to mediate a suppression of TNF-a induced CAM expression can be examined. A modified ELISA assay which uses ECs as a solid phase absorbent is employed to measure the amount of CAM expression on TNF-a treated ECs when co-stimulated with a member of the FGF family of proteins.

[1169] To perform the experiment, human umbilical vein endothelial cell (HUVEC) cultures are obtained from pooled cord harvests and maintained in growth medium (EGM-2; Clonetics, San Diego, Calif.) supplemented with 10% FCS and 1% penicillin/streptomycin in a 37 degree C. humidified incubator containing 5% CO₂. HUVECs are seeded in 96-well plates at concentrations of 1×10⁴ cells/well in EGM medium at 37 degree C. for 18-24 hrs or until confluent. The monolayers are subsequently washed 3 times with a serum-free solution of RPMI-1640 supplemented with 100 U/ml penicillin and 100 mg/ml streptomycin, and treated with a given cytokine and/or growth factor(s) for 24 h at 37 degree C. Following incubation, the cells are then evaluated for CAM expression.

[1170] Human Umbilical Vein Endothelial cells (HtVECs) are grown in a standard 96 well plate to confluence. Growth medium is removed from the cells and replaced with 90 ul of 199 Medium (10% FBS). Samples for testing and positive or negative controls are added to the plate in triplicate (in 10 ul volumes). Plates are incubated at 37 degree C. for either 5 h (selectin and integrin expression) or 24 h (integrin expression only). Plates are aspirated to remove medium and 100 μl of 0.1% paraformaldehyde-PBS(with Ca++ and Mg++) is added to each well. Plates are held at 4° C. for 30 min.

[1171] Fixative is then removed from the wells and wells are washed 1×with PBS(+Ca,Mg)+0.5% BSA and drained. Do not allow the wells to dry. Add 10 μl of diluted primary antibody to the test and control wells. Anti-ICAM-1-Biotin, Anti-VCAM-1-Biotin and Anti-E-selectin-Biotin are used at a concentration of 10 μg/ml (1:10 dilution of 0.1 mg/ml stock antibody). Cells are incubated at 37° C. for 30 min. in a humidified environment. Wells are washed×3 with PBS(+Ca,Mg)+0.5% BSA.

[1172] Then add 20 μl of diluted ExtrAvidin-Alkaline Phosphotase (1:5,000 dilution) to each well and incubated at 37° C. for 30 min. Wells are washed×3 with PBS(+Ca,Mg)+0.5% BSA. 1 tablet of p-Nitrophenol Phosphate pNPP is dissolved in 5 ml of glycine buffer (pH 10.4). 100 μl of pNPP substrate in glycine buffer is added to each test well. Standard wells in triplicate are prepared from the working dilution of the ExtrAvidin-Alkaline Phosphotase in glycine buffer: 1:5,000 (10⁰)>10^{-0.5}>10⁻¹>10^{-1.5}0.5 μl of each dilution is added to triplicate wells and the resulting AP content in each well is 5.50 ng, 1.74 ng, 0.55 ng, 0.18 ng. 100 μl of pNNP reagent must then be added to each of the standard wells. The plate must be incubated at 37° C. for 4 h. A volume of 50 μl of 3M NaOH is added to all wells. The results are quantified on a plate reader at 405 nm. The background subtraction option is used on blank wells filled with glycine buffer only. The template is set up to indicate the concentration of AP-conjugate in each standard well [5.50 ng; 1.74 ng; 0.55 ng; 0.18 ng]. Results are indicated as amount of bound AP-conjugate in each sample.

[1173] The studies described in this example tested activity of agonists or antagonists of the invention. However, one skilled in the art could easily modify the exemplified studies to test the activity of polynucleotides or polypeptides of the invention (e.g., gene therapy).

### Example 30

### Production Of Polypeptide of the Invention For High-Throughput Screening Assays

[1174] The following protocol produces a supernatant containing polypeptide of the present invention to be tested. This supernatant can then be used in the Screening Assays described in Examples 32-41.

[1175] First, dilute Poly-D-Lysine (644 587 Boehringer-Mannheim) stock solution (1 mg/ml in PBS) 1:20 in PBS (w/o calcium or magnesium 17-516F Biowhittaker) for a working solution of 50 ug/ml. Add 200 ul of this solution to each well (24 well plates) and incubate at RT for 20 minutes. Be sure to distribute the solution over each well (note: a 12-channel pipetter may be used with tips on every other channel). Aspirate off the Poly-D-Lysine solution and rinse with 1 ml PBS (Phosphate Buffered Saline). The PBS should remain in the well until just prior to plating the cells and plates may be poly-lysine coated in advance for up to two weeks.

[1176] Plate 293T cells (do not carry cells past P+20) at 2×10⁵ cells/well in 0.5 ml DMEM(Dulbecco's Modified Eagle Medium)(with 4.5 G/L glucose and L-glutamine (12-604F Biowhittaker))/10% heat inactivated FBS(14-503F Biowhittaker)/1×Penstrep(17-602E Biowhittaker). Let the cells grow overnight.

[1177] The next day, mix together in a sterile solution basin: 300 ul Lipofectamine (18324-012 Gibco/BRL) and 5 ml Optimem I (31985070 Gibco/BRL)/96-well plate. With a small volume multi-channel pipetter, aliquot approximately 2 ug of an expression vector containing a polynucleotide insert, produced by the methods described in Examples 8-10, into an appropriately labeled 96-well round bottom plate. With a multi-channel pipetter, add 50 ul of the Lipofectamine/Optimem I mixture to each well. Pipette up and down gently to mix. Incubate at RT 15-45 minutes. After about 20 minutes, use a multi-channel pipetter to add 150 ul Optimem I to each well. As a control, one plate of vector DNA lacking an insert should be transfected with each set of transfections.

[1178] Preferably, the transfection should be performed by tag-teaming the following tasks. By tag-teaming, hands on time is cut in half, and the cells do not spend too much time on PBS. First, person A aspirates off the media from four 24-well plates of cells, and then person B rinses each well with 0.5-1 ml PBS. Person A then aspirates off PBS rinse, and person B, using a 12-channel pipetter with tips on every other channel, adds the 200 ul of DNA/Lipofectamine/Optimem I complex to the odd wells first, then to the even wells, to each row on the 24-well plates. Incubate at 37 degree C. for 6 hours.

[1179] While cells are incubating, prepare appropriate media, either 1% BSA in DMEM with 1×penstrep, or HGS CHO-5 media (116.6 mg/L of CaCl2 (anhyd); 0.00130 mg/L CuSO₄-5H₂O; 0.050 mg/L of Fe(NO₃)₃-9H₂O; 0.417 mg/L of FeSO₄-7H₂O; 311.80 mg/L of Kcl; 28.64 mg/L of MgCl₂; 48.84 mg/L of MgSO₄; 6995.50 mg/L of NaCl; 2400.0 mg/L of NaHCO₃; 62.50 mg/L of NaH₂PO₄—H₂O; 71.02 mg/L of Na₂HPO4; 0.4320 mg/L of ZnSO₄-7H₂O; 0.002 mg/L of Arachidonic Acid; 1.022 mg/L of Cholesterol; 0.070 mg/L of DL-alpha-Tocopherol-Acetate; 0.0520 mg/L of Linoleic Acid; 0.010 mg/L of Linolenic Acid; 0.010 mg/L of Myristic Acid; 0.010 mg/L of Oleic Acid; 0.010 mg/L of Palmitric Acid; 0.010 mg/L of Palmitic Acid; 100 mg/L of Pluronic F-68; 0.010 mg/L of Stearic Acid; 2.20 mg/L of Tween 80; 4551 mg/L of D-Glucose; 130.85 mg/ml of L-Alanine; 147.50 mg/ml of L-Arginine-HCL; 7.50 mg/ml of L-Asparagine-H₂O; 6.65 mg/ml of L-Aspartic Acid; 29.56 mg/ml of L-Cystine-2HCL-H₂O; 31.29 mg/ml of L-Cystine-2HCL; 7.35 mg/ml of L-Glutamic Acid; 365.0 mg/ml of L-Glutamine; 18.75 mg/ml of Glycine; 52.48 mg/ml of L-Histidine-HCL-H₂O; 106.97 mg/ml of L-Isoleucine; 111.45 mg/ml of L-Leucine; 163.75 mg/ml of L-Lysine HCL; 32.34 mg/ml of L-Methionine; 68.48 mg/ml of L-Phenylalainine; 40.0 mg/ml of L-Proline; 26.25 mg/ml of L-Serine; 101.05 mg/ml of L-Threonine; 19.22 mg/ml of L-Tryptophan; 91.79 mg/ml of L-Tryrosine-2Na-2H₂O; and 99.65 mg/ml of L-Valine; 0.0035 mg/L of Biotin; 3.24 mg/L of D-Ca Pantothenate; 11.78 mg/L of Choline Chloride; 4.65 mg/L of Folic Acid; 15.60 mg/L of i-Inositol; 3.02 mg/L of Niacinamide; 3.00 mg/L of Pyridoxal HCL; 0.031 mg/L of Pyridoxine HCL; 0.319 mg/L of Riboflavin; 3.17 mg/L of Thiamine HCL; 0.365 mg/L of Thymidine; 0.680 mg/L of Vitamin B₁₂; 25 mM of HEPES Buffer; 2.39 mg/L of Na Hypoxanthine; 0.105 mg/L of Lipoic Acid; 0.081 mg/L of Sodium Putrescine-2HCL; 55.0 mg/L of Sodium Pyruvate; 0.0067 mg/L of Sodium Selenite; 20 uM of Ethanolamine; 0.122 mg/L of Ferric Citrate; 41.70 mg/L of Methyl-B-Cyclodextrin complexed with Linoleic Acid; 33.33 mg/L of Methyl-B-Cyclodextrin complexed with Oleic Acid; 10 mg/L of Methyl-B-Cyclodextrin complexed with Retinal Acetate. Adjust osmolarity to 327 mOsm) with 2 mm glutamine and 1×penstrep. (BSA (81-068-3 Bayer) 100 gm dissolved in 1L DMEM for a 10% BSA stock solution). Filter the media and collect 50 ul for endotoxin assay in 15 ml polystyrene conical.

[1180] The transfection reaction is terminated, preferably by tag-teaming, at the end of the incubation period. Person A aspirates off the transfection media, while person B adds 1.5 ml appropriate media to each well. Incubate at 37 degree C. for 45 or 72 hours depending on the media used: 1% BSA for 45 hours or CHO-5 for 72 hours.

[1181] On day four, using a 300 ul multichannel pipetter, aliquot 600 ul in one 1 ml deep well plate and the remaining supernatant into a 2 ml deep well. The supernatants from each well can then be used in the assays described in Examples 32-39.

[1182] It is specifically understood that when activity is obtained in any of the assays described below using a supernatant, the activity originates from either the polypeptide of the present invention directly (e.g., as a secreted protein) or by polypeptide of the present invention inducing expression of other proteins, which are then secreted into the supernatant. Thus, the invention further provides a method of identifying the protein in the supernatant characterized by an activity in a particular assay.

### Example 31

### Construction of GAS Reporter Construct

[1183] One signal transduction pathway involved in the differentiation and proliferation of cells is called the Jaks-STATs pathway. Activated proteins in the Jaks-STATs pathway bind to gamma activation site “GAS” elements or interferon-sensitive responsive element (“ISRE”), located in the promoter of many genes. The binding of a protein to these elements alter the expression of the associated gene.

[1184] GAS and ISRE elements are recognized by a class of transcription factors called Signal Transducers and Activators of Transcription, or “STATs.” There are six members of the STATs family. Stat1 and Stat3 are present in many cell types, as is Stat2 (as response to IFN-alpha is widespread). Stat4 is more restricted and is not in many cell types though it has been found in T helper class I, cells after treatment with IL-12. Stat5 was originally called mammary growth factor, but has been found at higher concentrations in other cells including myeloid cells. It can be activated in tissue culture cells by many cytokines.

[1185] The STATs are activated to translocate from the cytoplasm to the nucleus upon tyrosine phosphorylation by a set of kinases known as the Janus Kinase (“Jaks”) family. Jaks represent a distinct family of soluble tyrosine kinases and include Tyk2, Jak1, Jak2, and Jak3. These kinases display significant sequence similarity and are generally catalytically inactive in resting cells.

[1186] The Jaks are activated by a wide range of receptors summarized in the Table below. (Adapted from review by Schidler and Darnell, Ann. Rev. Biochem. 64:621-51 (1995).) A cytokine receptor family, capable of activating Jaks, is divided into two groups: (a) Class 1 includes receptors for IL-2, IL-3, IL-4, IL-6, IL-7, IL-9, IL-11, IL-12, IL15, Epo, PRL, GH, G-CSF, GM-CSF, LIF, CNTF, and thrombopoietin; and (b) Class 2 includes IFN-a, IFN-g, and IL-10. The Class 1 receptors share a conserved cysteine motif (a set of four conserved cysteines and one tryptophan) and a WSXWS motif (a membrane proximal region encoding Trp-Ser-Xaa-Trp-Ser (SEQ ID NO: 2)).

[1187] Thus, on binding of a ligand to a receptor, Jaks are activated, which in turn activate STATs, which then translocate and bind to GAS elements. This entire process is encompassed in the Jaks-STATs signal transduction pathway.

[1188] Therefore, activation of the Jaks-STATs pathway, reflected by the binding of the GAS or the ISRE element, can be used to indicate proteins involved in the proliferation and differentiation of cells. For example, growth factors and cytokines are known to activate the Jaks-STATs pathway. (See Table below.) Thus, by using GAS elements linked to reporter molecules, activators of the Jaks-STATs pathway can be identified.

| | | JAKs | | | | |
|---|---|---|---|---|---|---|
| Ligand | tyk2 | Jak1 | Jak2 | Jak3 | STATS | GAS (elements) or ISRE |

IFN family

| | | | | | | |
|---|---|---|---|---|---|---|
| IFN-a/B | + | + | − | − | 1, 2, 3 | ISRE |
| IFN-g | | + | + | − | 1 | GAS (IRF1 > Lys6 > IFP) |
| Il-10 | + | ? | ? | − | 1, 3 | |

gp130 family

| | | | | | | |
|---|---|---|---|---|---|---|
| IL-6 (Pleiotrohic) | + | + | + | ? | 1, 3 | GAS (IRF1 > Lys6 > IFP) |
| Il-11 (Pleiotrohic) | ? | + | ? | ? | 1, 3 | |
| OnM (Pleiotrohic) | ? | + | + | ? | 1, 3 | |
| LIF (Pleiotrohic) | ? | + | + | ? | 1, 3 | |
| CNTF (Pleiotrohic) | −/+ | + | + | ? | 1, 3 | |
| G-CSF (Pleiotrohic) | ? | + | ? | ? | 1, 3 | |
| IL-12 (Pleiotrohic) | + | − | + | + | 1, 3 | |

g-C family

| | | | | | | |
|---|---|---|---|---|---|---|
| IL-2 (lymphocytes) | − | + | − | + | 1, 3, 5 | GAS |
| IL-4 (lymph/myeloid) | − | + | − | + | 6 | GAS (IRF1 = IFP >> Ly6)(IgH) |
| IL-7 (lymphocytes) | − | + | − | + | 5 | GAS |
| IL-9 (lymphocytes) | − | + | − | + | 5 | GAS |
| IL-13 (lymphocyte) | − | + | ? | ? | 6 | GAS |
| IL-15 | ? | + | ? | + | 5 | GAS |

gp140 family

| | | | | | | |
|---|---|---|---|---|---|---|
| IL-3 (myeloid) | − | − | + | − | 5 | GAS (IRF1 > IFP >> Ly6) |
| IL-5 (myeloid) | − | − | + | − | 5 | GAS |
| GM-CSF (myeloid) | − | − | + | − | 5 | GAS |

Growth hormone family

| | | | | | | |
|---|---|---|---|---|---|---|
| GH | ? | − | + | − | 5 | |
| PRL | ? | +/− | + | − | 1, 3, 5 | |
| EPO | ? | − | + | − | 5 | GAS (B-CAS > IRF1 = IFP >> Ly6) |

Receptor Tyrosine Kinases

| | | | | | | |
|---|---|---|---|---|---|---|
| EGF | ? | + | + | − | 1, 3 | GAS (IRF1) |
| PDGF | ? | + | + | − | 1, 3 | |
| CSF-1 | ? | + | + | − | 1, 3 | GAS (not IRF1) |

[1189] To construct a synthetic GAS containing promoter element, which is used in the Biological Assays described in Examples 32-33, a PCR based strategy is employed to generate a GAS-SV40 promoter sequence. The 5′ primer contains four tandem copies of the GAS binding site found in the IRF1 promoter and previously demonstrated to bind STATs upon induction with a range of cytokines (Rothman et al., Immunity 1:457-468 (1994).), although other GAS or ISRE elements can be used instead. The 5′ primer also contains 18 bp of sequence complementary to the SV40 early promoter sequence and is flanked with an XhoI site. The sequence of the 5′ primer is:

[1190] 5′:GCGCCTCGAGATTTCCCCGAAATCTAGATTTCCCCGAAATGATTTCCCCG AAATGATTTCCCCGAAATATCTGCCATCTCAATTAG:3′ (SEQ ID NO: 3)

[1191] The downstream primer is complementary to the SV40 promoter and is flanked with a Hind III site: 5′:GCGGCAAGCTTTTTGCAAAGCCTAGGC:3′ (SEQ ID NO: 4)

[1192] PCR amplification is performed using the SV40 promoter template present in the B-gal:promoter plasmid obtained from Clontech. The resulting PCR fragment is digested with XhoI/Hind III and subcloned into BLSK2-. (Stratagene.) Sequencing with forward and reverse primers confirms that the insert contains the following sequence:

| | |
|---|---|
| 5′:CTCGAGATTTCCCCGAAATCTAGATTTCCCCGAA | (SEQ ID NO:5) |
| ATGATTTCCCCGAAATGATTTCCCCGAAATATCTGCC | |
| ATCTCAATTAGTCAGCAACCATAGTCCCGCCCCTAAC | |
| TCCGCCCATCCCGCCCCTAACTCCGCCCAGTTCCGCC | |
| CATTCTCCGCCCCATGGCTGACTAATTTTTTTTATTT | |
| ATGCAGAGGCCGAGGCCGCCTCGGCCTCTGAGCTATT | |
| CCAGAAGTAGTGAGGAGGCTTTTTTGGAGGCCTAGGC | |
| TTTTGCAAAAAGCTT:3′ | |

[1193] With this GAS promoter element linked to the SV40 promoter, a GAS:SEAP2 reporter construct is next engineered. Here, the reporter molecule is a secreted alkaline phosphatase, or “SEAP.” Clearly, however, any reporter molecule can be used instead of SEAP, in this or in any of the other Examples. Well known reporter molecules that can be used instead of SEAP include chloramphenicol acetyltransferase (CAT), luciferase, alkaline phosphatase, B-galactosidase, green fluorescent protein (GFP), or any protein detectable by an antibody.

[1194] The above sequence confirmed synthetic GAS-SV40 promoter element is subcloned into the pSEAP-Promoter vector obtained from Clontech using HindIII and XhoI, effectively replacing the SV40 promoter with the amplified GAS:SV40 promoter element, to create the GAS-SEAP vector. However, this vector does not contain a neomycin resistance gene, and therefore, is not preferred for mammalian expression systems.

[1195] Thus, in order to generate mammalian stable cell lines expressing the GAS-SEAP reporter, the GAS-SEAP cassette is removed from the GAS-SEAP vector using SalI and NotI, and inserted into a backbone vector containing the neomycin resistance gene, such as pGFP-1 (Clontech), using these restriction sites in the multiple cloning site, to create the GAS-SEAP/Neo vector. Once this vector is transfected into mammalian cells, this vector can then be used as a reporter molecule for GAS binding as described in Examples 32-33.

[1196] Other constructs can be made using the above description and replacing GAS with a different promoter sequence. For example, construction of reporter molecules containing NFK-B and EGR promoter sequences are described in Examples 34 and 35. However, many other promoters can be substituted using the protocols described in these Examples. For instance, SRE, IL-2, NFAT, or Osteocalcin promoters can be substituted, alone or in combination (e.g., GAS/NF-KB/EGR, GAS/NF-KB, I1-2/NFAT, or NF-KB/GAS). Similarly, other cell lines can be used to test reporter construct activity, such as HELA (epithelial), HUVEC (endothelial), Reh (B-cell), Saos-2 (osteoblast), HUAC (aortic), or Cardiomyocyte.

### Example 32

### High-Throughput Screening Assay for T-cell Activity

[1197] The following protocol is used to assess T-cell activity by identifying factors, and determining whether supernate containing a polypeptide of the invention proliferates and/or differentiates T-cells. T-cell activity is assessed using the GAS/SEAP/Neo construct produced in Example 31. Thus, factors that increase SEAP activity indicate the ability to activate the Jaks-STATS signal transduction pathway. The T-cell used in this assay is Jurkat T-cells (ATCC Accession No. TIB-152), although Molt-3 cells (ATCC Accession No. CRL-1552) and Molt-4 cells (ATCC Accession No. CRL-1582) cells can also be used.

[1198] Jurkat T-cells are lymphoblastic CD4+ Th1 helper cells. In order to generate stable cell lines, approximately 2 million Jurkat cells are transfected with the GAS-SEAP/neo vector using DMRIE-C (Life Technologies)(transfection procedure described below). The transfected cells are seeded to a density of approximately 20,000 cells per well and transfectants resistant to 1 mg/ml genticin selected. Resistant colonies are expanded and then tested for their response to increasing concentrations of interferon gamma. The dose response of a selected clone is demonstrated.

[1199] Specifically, the following protocol will yield sufficient cells for 75 wells containing 200 ul of cells. Thus, it is either scaled up, or performed in multiple to generate sufficient cells for multiple 96 well plates. Jurkat cells are maintained in RPMI+10% serum with 1% Pen-Strep. Combine 2.5 mls of OPTI-MEM (Life Technologies) with 10 ug of plasmid DNA in a T25 flask. Add 2.5 ml OPTI-MEM containing 50 ul of DMRIE-C and incubate at room temperature for 15-45 mins.

[1200] During the incubation period, count cell concentration, spin down the required number of cells (10⁷ per transfection), and resuspend in OPTI-MEM to a final concentration of 10⁷ cells/ml. Then add 1 ml of 1×10⁷ cells in OPTI-MEM to T25 flask and incubate at 37 degree C. for 6 hrs. After the incubation, add 10 ml of RPMI+15% serum.

[1201] The Jurkat:GAS-SEAP stable reporter lines are maintained in RPMI+10% serum, 1 mg/ml Genticin, and 1% Pen-Strep. These cells are treated with supernatants containing polypeptide of the present invention or polypeptide of the present invention induced polypeptides as produced by the protocol described in Example 30.

[1202] On the day of treatment with the supernatant, the cells should be washed and resuspended in fresh RPMI+10% serum to a density of 500,000 cells per ml. The exact number of cells required will depend on the number of supernatants being screened. For one 96 well plate, approximately 10 million cells (for 10 plates, 100 million cells) are required.

[1203] Transfer the cells to a triangular reservoir boat, in order to dispense the cells into a 96 well dish, using a 12 channel pipette. Using a 12 channel pipette, transfer 200 ul of cells into each well (therefore adding 100,000 cells per well).

[1204] After all the plates have been seeded, 50 ul of the supernatants are transferred directly from the 96 well plate containing the supernatants into each well using a 12 channel pipette. In addition, a dose of exogenous interferon gamma (0.1, 1.0, 10 ng) is added to wells H9, H10, and H 11 to serve as additional positive controls for the assay.

[1205] The 96 well dishes containing Jurkat cells treated with supernatants are placed in an incubator for 48 hrs (note: this time is variable between 48-72 hrs). 35 ul samples from each well are then transferred to an opaque 96 well plate using a 12 channel pipette. The opaque plates should be covered (using sellophene covers) and stored at −20 degree C. until SEAP assays are performed according to Example 36. The plates containing the remaining treated cells are placed at 4 degree C. and serve as a source of material for repeating the assay on a specific well if desired.

[1206] As a positive control, 100 Unit/ml interferon gamma can be used which is known to activate Jurkat T cells. Over 30 fold induction is typically observed in the positive control wells.

[1207] The above protocol may be used in the generation of both transient, as well as stable, transfected cells, which would be apparent to those of skill in the art.

### Example 33

### High-Throughput Screening Assay Identifying Myeloid Activity

[1208] The following protocol is used to assess myeloid activity of polypeptide of the present invention by determining whether polypeptide of the present invention proliferates and/or differentiates myeloid cells. Myeloid cell activity is assessed using the GAS/SEAP/Neo construct produced in Example 31. Thus, factors that increase SEAP activity indicate the ability to activate the Jaks-STATS signal transduction pathway. The myeloid cell used in this assay is U937, a pre-monocyte cell line, although TF-1, HL60, or KG1 can be used.

[1209] To transiently transfect U937 cells with the GAS/SEAP/Neo construct produced in Example 31, a DEAE-Dextran method (Kharbanda et. al., 1994, Cell Growth & Differentiation, 5:259-265) is used. First, harvest 2×10⁷ U937 cells and wash with PBS. The U937 cells are usually grown in RPMI 1640 medium containing 10% heat-inactivated fetal bovine serum (FBS) supplemented with 100 units/ml penicillin and 100 mg/ml streptomycin.

[1210] Next, suspend the cells in 1 ml of 20 mM Tris-HCl (pH 7.4) buffer containing 0.5 mg/ml DEAE-Dextran, 8 ug GAS-SEAP2 plasmid DNA, 140 mM NaCl, 5 mM KCl, 375 uM Na₂HPO₄.7H₂O, 1 mM MgCl₂, and 675 uM CaCl₂. Incubate at 37 degrees C. for 45 min.

[1211] Wash the cells with RPMI 1640 medium containing 10% FBS and then resuspend in 10 ml complete medium and incubate at 37 degree C. for 36 hr.

[1212] The GAS-SEAP/U937 stable cells are obtained by growing the cells in 400 ug/ml G418. The G418-free medium is used for routine growth but every one to two months, the cells should be re-grown in 400 ug/ml G418 for couple of passages.

[1213] These cells are tested by harvesting 1×10⁸ cells (this is enough for ten 96-well plates assay) and wash with PBS. Suspend the cells in 200 ml above described growth medium, with a final density of 5×10⁵ cells/ml. Plate 200 ul cells per well in the 96-well plate (or 1×10⁵ cells/well).

[1214] Add 50 ul of the supernatant prepared by the protocol described in Example 30. Incubate at 37 degee C. for 48 to 72 hr. As a positive control, 100 Unit/ml interferon gamma can be used which is known to activate U937 cells. Over 30 fold induction is typically observed in the positive control wells. SEAP assay the supernatant according to the protocol described in Example 36.

### Example 34

### High-Throughput Screening Assay Identifying Neuronal Activity

[1215] When cells undergo differentiation and proliferation, a group of genes are activated through many different signal transduction pathways. One of these genes, EGR1 (early growth response gene 1), is induced in various tissues and cell types upon activation. The promoter of EGR1 is responsible for such induction. Using the EGR1 promoter linked to reporter molecules, activation of cells can be assessed by polypeptide of the present invention.

[1216] Particularly, the following protocol is used to assess neuronal activity in PC12 cell lines. PC12 cells (rat phenochromocytoma cells) are known to proliferate and/or differentiate by activation with a number of mitogens, such as TPA (tetradecanoyl phorbol acetate), NGF (nerve growth factor), and EGF (epidermal growth factor). The EGR1 gene expression is activated during this treatment. Thus, by stably transfecting PC12 cells with a construct containing an EGR promoter linked to SEAP reporter, activation of PC12 cells by polypeptide of the present invention can be assessed.

[1217] The EGR/SEAP reporter construct can be assembled by the following protocol. The EGR-1 promoter sequence (−633 to+1)(Sakamoto K et al., Oncogene 6:867-871 (1991)) can be PCR amplified from human genomic DNA using the following primers:

[1218] 5′ GCGCTCGAGGGATGACAGCGATAGAACCCCGG -3′ (SEQ ID NO: 6) 5′ GCGAAGCTTCGCGACTCCCCGGATCCGCCTC-3′ (SEQ ID NO: 7)

[1219] Using the GAS:SEAP/Neo vector produced in Example 31, EGR1 amplified product can then be inserted into this vector. Linearize the GAS:SEAP/Neo vector using restriction enzymes XhoI/HindIII, removing the GAS/SV40 stuffer. Restrict the EGR1 amplified product with these same enzymes. Ligate the vector and the EGR1 promoter.

[1220] To prepare 96 well-plates for cell culture, two mls of a coating solution (1:30 dilution of collagen type I (Upstate Biotech Inc. Cat#08-115) in 30% ethanol (filter sterilized)) is added per one 10 cm plate or 50 ml per well of the 96-well plate, and allowed to air dry for 2 hr.

[1221] PC12 cells are routinely grown in RPMI-1640 medium (Bio Whittaker) containing 10% horse serum (JRH BIOSCIENCES, Cat. #12449-78P), 5% heat-inactivated fetal bovine serum (FBS) supplemented with 100 units/ml penicillin and 100 ug/ml streptomycin on a precoated 10 cm tissue culture dish. One to four split is done every three to four days. Cells are removed from the plates by scraping and resuspended with pipetting up and down for more than 15 times.

[1222] Transfect the EGR/SEAP/Neo construct into PC12 using the Lipofectamine protocol described in Example 30. EGR-SEAP/PC12 stable cells are obtained by growing the cells in 300 ug/ml G418. The G418-free medium is used for routine growth but every one to two months, the cells should be re-grown in 300 ug/ml G418 for couple of passages.

[1223] To assay for neuronal activity, a 10 cm plate with cells around 70 to 80% confluent is screened by removing the old medium. Wash the cells once with PBS (Phosphate buffered saline). Then starve the cells in low serum medium (RPMI-1640 containing 1% horse serum and 0.5% FBS with antibiotics) overnight.

[1224] The next morning,, remove the medium and wash the cells with PBS. Scrape off the cells from the plate, suspend the cells well in 2 ml low serum medium. Count the cell number and add more low serum medium to reach final cell density as 5×10⁵ cells/ml.

[1225] Add 200 ul of the cell suspension to each well of 96-well plate (equivalent to 1×10⁵ cells/well). Add 50 ul supernatant produced by Example 30, 37 degree C. for 48 to 72 hr. As a positive control, a growth factor known to activate PC12 cells through EGR can be used, such as 50 ng/ul of Neuronal Growth Factor (NGF). Over fifty-fold induction of SEAP is typically seen in the positive control wells. SEAP assay the supernatant according to Example 36.

### Example 35

### High-Throughput Screening Assay for T-cell Activity

[1226] NF-KB (Nuclear Factor KB) is a transcription factor activated by a wide variety of agents including the inflammatory cytokines IL-1 and TNF, CD30 and CD40, lymphotoxin-alpha and lymphotoxin-beta, by exposure to LPS or thrombin, and by expression of certain viral gene products. As a transcription factor, NF-KB regulates the expression of genes involved in immune cell activation, control of apoptosis (NF-KB appears to shield cells from apoptosis), B and T-cell development, anti-viral and antimicrobial responses, and multiple stress responses.

[1227] In non-stimulated conditions, NF-KB is retained in the cytoplasm with I-KB (Inhibitor KB). However, upon stimulation, I-KB is phosphorylated and degraded, causing NF-KB to shuttle to the nucleus, thereby activating transcription of target genes. Target genes activated by NF-KB include IL-2, IL-6, GM-CSF, ICAM-1 and class 1 MHC.

[1228] Due to its central role and ability to respond to a range of stimuli, reporter constructs utilizing the NF-KB promoter element are used to screen the supernatants produced in Example 30. Activators or inhibitors of NF-KB would be useful in treating, preventing, and/or diagnosing diseases. For example, inhibitors of NF-KB could be used to treat those diseases related to the acute or chronic activation of NF-KB, such as rheumatoid arthritis.

[1229] To construct a vector containing the NF-KB promoter element, a PCR based strategy is employed. The upstream primer contains four tandem copies of the NF-KB binding site (GGGGACTTTCCC) (SEQ ID NO: 8), 18 bp of sequence complementary to the 5′ end of the SV40 early promoter sequence, and is flanked with an XhoI site:

[1230] 5 ′:GCGGCCTCGAGGGGACTTTCCCGGGGACTTTCCGGGGACTTTCCGGGAC TTTCCATCCTGCCATCTCAATTAG:3′ (SEQ ID NO: 9)

[1231] The downstream primer is complementary to the 3′ end of the SV40 promoter and is flanked with a Hind III site:

[1232] 5′:GCGGCAAGCTTTTTGCAAAGCCTAGGC:3′ (SEQ ID NO: 4)

[1233] PCR amplification is performed using the SV40 promoter template present in the pB-gal:promoter plasmid obtained from Clontech. The resulting PCR fragment is digested with XhoI and Hind III and subcloned into BLSK2-. (Stratagene) Sequencing with the T7 and T3 primers confirms the insert contains the following sequence:

| | |
|---|---|
| 5′:CTCGAGGGGACTTTCCCGGGGACTTTCCGGGGA | (SEQ ID NO:10) |
| CTTTCCGGGACTTTCCATCTGCCATCTCAATTAGTC | |
| AGCAACCATAGTCCCGCCCCTAACTCCGCCCATCCC | |
| GCCCCTAACTCCGCCCAGTTCCGCCCATTCTCCGCC | |
| CCATGGCTGACTAATTTTTTTTATTTATGCAGAGGC | |
| CGAGGCCGCCTCGGCCTCTGAGCTATTCCAGAAGTA | |
| GTGAGGAGGCTTTTTTGGAGGCCTAGGCTTTTGCAA | |
| AAAGCTT:3′ | |

[1234] Next, replace the SV40 minimal promoter element present in the pSEAP2-promoter plasmid (Clontech) with this NE-KB/SV40 fragment using XhoI and HindIII. However, this vector does not contain a neomycin resistance gene, and therefore, is not preferred for mammalian expression systems.

[1235] In order to generate stable mammalian cell lines, the NF-KB/SV40/SEAP cassette is removed from the above NF-KB/SEAP vector using restriction enzymes SalI and NotI, and inserted into a vector containing neomycin resistance. Particularly, the NF-KB/SV40/SEAP cassette was inserted into pGFP-1 (Clontech), replacing the GFP gene, after restricting pGFP-1 with SalI and NotI.

[1236] Once NF-KB/SV40/SEAP/Neo vector is created, stable Jurkat T-cells are created and maintained according to the protocol described in Example 32. Similarly, the method for assaying supernatants with these stable Jurkat T-cells is also described in Example 32. As a positive control, exogenous TNF alpha (0.1,1, 10 ng) is added to wells H9, H10, and H 11, with a 5-10 fold activation typically observed.

### Example 36

### Assay for SEAP Activity

[1237] As a reporter molecule for the assays described in Examples 32-35, SEAP activity is assayed using the Tropix Phospho-light Kit (Cat. BP-400) according to the following general procedure. The Tropix Phospho-light Kit supplies the Dilution, Assay, and Reaction Buffers used below.

[1238] Prime a dispenser with the 2.5×Dilution Buffer and dispense 15 ul of 2.5×dilution buffer into Optiplates containing 35 ul of a supernatant. Seal the plates with a plastic sealer and incubate at 65 degree C. for 30 min. Separate the Optiplates to avoid uneven heating.

[1239] Cool the samples to room temperature for 15 minutes. Empty the dispenser and prime with the Assay Buffer. Add 50 ml Assay Buffer and incubate at room temperature 5 min. Empty the dispenser and prime with the Reaction Buffer (see the Table below). Add 50 ul Reaction Buffer and incubate at room temperature for 20 minutes. Since the intensity of the chemiluminescent signal is time dependent, and it takes about 10 minutes to read 5 plates on a luminometer, thus one should treat 5 plates at each time and start the second set 10 minutes later.

[1240] Read the relative light unit in the luminometer. Set H12 as blank, and print the results. An increase in chemiluminescence indicates reporter activity.

[1241] Reaction Buffer Formulation:

| # of plates | Rxn buffer diluent (ml) | CSPD (ml) |
|---|---|---|
| 10 | 60 | 3 |
| 11 | 65 | 3.25 |
| 12 | 70 | 3.5 |
| 13 | 75 | 3.75 |
| 14 | 80 | 4 |
| 15 | 85 | 4.25 |
| 16 | 90 | 4.5 |
| 17 | 95 | 4.75 |
| 18 | 100 | 5 |
| 19 | 105 | 5.25 |
| 20 | 110 | 5.5 |
| 21 | 115 | 5.75 |
| 22 | 120 | 6 |
| 23 | 125 | 6.25 |
| 24 | 130 | 6.5 |
| 25 | 135 | 6.75 |
| 26 | 140 | 7 |
| 27 | 145 | 7.25 |
| 28 | 150 | 7.5 |
| 29 | 155 | 7.75 |
| 30 | 160 | 8 |
| 31 | 165 | 8.25 |
| 32 | 170 | 8.5 |
| 33 | 175 | 8.75 |
| 34 | 180 | 9 |
| 35 | 185 | 9.25 |
| 36 | 190 | 9.5 |
| 37 | 195 | 9.75 |
| 38 | 200 | 10 |
| 39 | 205 | 10.25 |
| 40 | 210 | 10.5 |
| 41 | 215 | 10.75 |
| 42 | 220 | 11 |
| 43 | 225 | 11.25 |
| 44 | 230 | 11.5 |
| 45 | 235 | 11.75 |
| 46 | 240 | 12 |
| 47 | 245 | 12.25 |
| 48 | 250 | 12.5 |
| 49 | 255 | 12.75 |
| 50 | 260 | 13 |

### Example 37

### High-Throughput Screening Assay Identifying Changes in Small Molecule Concentration and Membrane Permeability

[1242] Binding of a ligand to a receptor is known to alter intracellular levels of small molecules, such as calcium, potassium, sodium, and pH, as well as alter membrane potential. These alterations can be measured in an assay to identify supernatants which bind to receptors of a particular cell. Although the following protocol describes an assay for calcium, this protocol can easily be modified to detect changes in potassium, sodium, pH, membrane potential, or any other small molecule which is detectable by a fluorescent probe.

[1243] The following assay uses Fluorometric Imaging Plate Reader (“FLIPR”) to measure changes in fluorescent molecules (Molecular Probes) that bind small molecules. Clearly, any fluorescent molecule detecting a small molecule can be used instead of the calcium fluorescent molecule, fluo-4 (Molecular Probes, Inc.; catalog no. F-14202), used here.

[1244] For adherent cells, seed the cells at 10,000-20,000 cells/well in a Co-star black 96-well plate with clear bottom. The plate is incubated in a CO₂ incubator for 20 hours. The adherent cells are washed two times in Biotek washer with 200 ul of HBSS (Hank's Balanced Salt Solution) leaving 100 ul of buffer after the final wash.

[1245] A stock solution of 1 mg/ml fluo-4 is made in 10% pluronic acid DMSO. To load the cells with fluo-4 , 50 ul of 12 ug/ml fluo-4 is added to each well. The plate is incubated at 37 degrees C. in a CO₂ incubator for 60 min. The plate is washed four times in the Biotek washer with HBSS leaving 100 ul of buffer.

[1246] For non-adherent cells, the cells are spun down from culture media. Cells are re-suspended to 2-5×10⁶ cells/ml with HBSS in a 50-ml conical tube. 4 ul of 1 mg/ml fluo-4 solution in 10% pluronic acid DMSO is added to each ml of cell suspension. The tube is then placed in a 37 degrees C. water bath for 30-60 min. The cells are washed twice with HBSS, resuspended to 1×10⁶ cells/ml, and dispensed into a microplate, 100 ul/well. The plate is centrifuged at 1000 rpm for 5 min. The plate is then washed once in Denley Cell Wash with 200 ul, followed by an aspiration step to 100 ul final volume.

[1247] For a non-cell based assay, each well contains a fluorescent molecule, such as fluo-4 . The supernatant is added to the well, and a change in fluorescence is detected.

[1248] To measure the fluorescence of intracellular calcium, the FLIPR is set for the following parameters: (1) System gain is 300-800 mW; (2) Exposure time is 0.4 second; (3) Camera F/stop is F/2; (4) Excitation is 488 nm; (5) Emission is 530 nm; and (6) Sample addition is 50 ul. Increased emission at 530 nm indicates an extracellular signaling event caused by the a molecule, either polypeptide of the present invention or a molecule induced by polypeptide of the present invention, which has resulted in an increase in the intracellular Ca⁺⁺ concentration.

### Example 38

### High-Throughput Screening Assay Identifying Tyrosine Kinase Activity

[1249] The Protein Tyrosine Kinases (PTK) represent a diverse group of transmembrane and cytoplasmic kinases. Within the Receptor Protein Tyrosine Kinase RPTK) group are receptors for a range of mitogenic and metabolic growth factors including the PDGF, FGF, EGF, NGF, HGF and Insulin receptor subfamilies. In addition there are a large family of RPTKs for which the corresponding ligand is unknown. Ligands for RPTKs include mainly secreted small proteins, but also membrane-bound and extracellular matrix proteins.

[1250] Activation of RPTK by ligands involves ligand-mediated receptor dimerization, resulting in transphosphorylation of the receptor subunits and activation of the cytoplasmic tyrosine kinases. The cytoplasmic tyrosine kinases include receptor associated tyrosine kinases of the src-family (e.g., src, yes, lck, lyn, fyn) and non-receptor linked and cytosolic protein tyrosine kinases, such as the Jak family, members of which mediate signal transduction triggered by the cytokine superfamily of receptors (e.g., the Interleukins, Interferons, GM-CSF, and Leptin).

[1251] Because of the wide range of known factors capable of stimulating tyrosine kinase activity, identifying whether polypeptide of the present invention or a molecule induced by polypeptide of the present invention is capable of activating tyrosine kinase signal transduction pathways is of interest. Therefore, the following protocol is designed to identify such molecules capable of activating the tyrosine kinase signal transduction pathways.

[1252] Seed target cells (e.g., primary keratinocytes) at a density of approximately 25,000 cells per well in a 96 well Loprodyne Silent Screen Plates purchased from Nalge Nunc (Naperville, Ill.). The plates are sterilized with two 30 minute rinses with 100% ethanol, rinsed with water and dried overnight. Some plates are coated for 2 hr with 100 ml of cell culture grade type I collagen (50 mg/ml), gelatin (2%) or polylysine (50 mg/ml), all of which can be purchased from Sigma Chemicals (St. Louis, Mo.) or 10% Matrigel purchased from Becton Dickinson (Bedford, Mass.), or calf serum, rinsed with PBS and stored at 4 degree C. Cell growth on these plates is assayed by seeding 5,000 cells/well in growth medium and indirect quantitation of cell number through use of alamarBlue as described by the manufacturer Alamar Biosciences, Inc. (Sacramento, Calif.) after 48 hr. Falcon plate covers #3071 from Becton Dickinson (Bedford, Mass.) are used to cover the Loprodyne Silent Screen Plates. Falcon Microtest III cell culture plates can also be used in some proliferation experiments.

[1253] To prepare extracts, A431 cells are seeded onto the nylon membranes of Loprodyne plates (20,000/200ml/well) and cultured overnight in complete medium. Cells are quiesced by incubation in serum-free basal medium for 24 hr. After 5-20 minutes treatment with EGF (60 ng/ml) or 50 ul of the supernatant produced in Example 30, the medium was removed and 100 ml of extraction buffer ((20 mM HEPES pH 7.5, 0.15 M NaCl, 1% Triton X-100, 0.1% SDS, 2 mM Na3VO4, 2 mM Na4P2O7 and a cocktail of protease inhibitors (#1836170) obtained from Boeheringer Mannheim (Indianapolis, Ind.)) is added to each well and the plate is shaken on a rotating shaker for 5 minutes at 4° C. The plate is then placed in a vacuum transfer manifold and the extract filtered through the 0.45 mm membrane bottoms of each well using house vacuum. Extracts are collected in a 96-well catch/assay plate in the bottom of the vacuum manifold and immediately placed on ice. To obtain extracts clarified by centrifugation, the content of each well, after detergent solubilization for 5 minutes, is removed and centrifuged for 15 minutes at 4 degree C. at 16,000×g.

[1254] Test the filtered extracts for levels of tyrosine kinase activity. Although many methods of detecting tyrosine kinase activity are known, one method is described here.

[1255] Generally, the tyrosine kinase activity of a supernatant is evaluated by determining its ability to phosphorylate a tyrosine residue on a specific substrate (a biotinylated peptide). Biotinylated peptides that can be used for this purpose include PSK1 (corresponding to amino acids 6-20 of the cell division kinase cdc2-p34) and PSK2 (corresponding to amino acids 1-17 of gastrin). Both peptides are substrates for a range of tyrosine kinases and are available from Boehringer Mannheim.

[1256] The tyrosine kinase reaction is set up by adding the following components in order. First, add 10 ul of 5 uM Biotinylated Peptide, then 10 ul ATP/Mg₂₊ (5 mM ATP/50 mM MgCl₂), then 10 ul of 5×Assay Buffer (40 mM imidazole hydrochloride, pH7.3, 40 mM beta-glycerophosphate, 1 mM EGTA, 100 mM MgCl₂, 5 mM MnCl₂, 0.5 mg/ml BSA), then 5 ul of Sodium Vanadate (1 mM), and then 5 ul of water. Mix the components gently and preincubate the reaction mix at 30 degree C. for 2 min. Initial the reaction by adding 10 ul of the control enzyme or the filtered supernatant.

[1257] The tyrosine kinase assay reaction is then terminated by adding 10 ul of 120 mm EDTA and place the reactions on ice.

[1258] Tyrosine kinase activity is determined by transferring 50 ul aliquot of reaction mixture to a microtiter plate (MTP) module and incubating at 37 degree C. for 20 min. This allows the streptavidin coated 96 well plate to associate with the biotinylated peptide. Wash the MTP module with 300 ul/well of PBS four times. Next add 75 ul of anti-phospotyrosine antibody conjugated to horse radish peroxidase (anti-P-Tyr-POD(0.5 u/ml)) to each well and incubate at 37 degree C. for one hour. Wash the well as above.

[1259] Next add 100 ul of peroxidase substrate solution (Boehringer Mannheim) and incubate at room temperature for at least 5 mins (up to 30 min). Measure the absorbance of the sample at 405 nm by using ELISA reader. The level of bound peroxidase activity is quantitated using an ELISA reader and reflects the level of tyrosine kinase activity.

### Example 39

### High-Throughput Screening Assay Identifying Phosphorylation Activity

[1260] As a potential alternative and/or complement to the assay of protein tyrosine kinase activity described in Example 38, an assay which detects activation (phosphorylation) of major intracellular signal transduction intermediates can also be used. For example, as described below one particular assay can detect tyrosine phosphorylation of the Erk-1 and Erk-2 kinases. However, phosphorylation of other molecules, such as Raf, JNK, p38 MAP, Map kinase kinase (MEK), MEK kinase, Src, Muscle specific kinase (MuSK), IRAK, Tec, and Janus, as well as any other phosphoserine, phosphotyrosine, or phosphothreonine molecule, can be detected by substituting these molecules for Erk-1 or Erk-2 in the following assay.

[1261] Specifically, assay plates are made by coating the wells of a 96-well ELISA plate with 0.1 ml of protein G (1 ug/ml) for 2 hr at room temp, (RT). The plates are then rinsed with PBS and blocked with 3% BSA/PBS for 1 hr at RT. The protein G plates are then treated with 2 commercial monoclonal antibodies (100 ng/well) against Erk-1 and Erk-2 (1 hr at RT) (Santa Cruz Biotechnology). (To detect other molecules, this step can easily be modified by substituting a monoclonal antibody detecting any of the above described molecules.) After 3-5 rinses with PBS, the plates are stored at 4 degree C. until use.

[1262] A431 cells are seeded at 20,000/well in a 96-well Loprodyne filterplate and cultured overnight in growth medium. The cells are then starved for 48 hr in basal medium (DMEM) and then treated with EGF (6 ng/well) or 50 ul of the supernatants obtained in Example 30 for 5-20 minutes. The cells are then solubilized and extracts filtered directly into the assay plate.

[1263] After incubation with the extract for 1 hr at RT, the wells are again rinsed. As a positive control, a commercial preparation of MAP kinase (10 ng/well) is used in place of A431 extract. Plates are then treated with a commercial polyclonal (rabbit) antibody (1 ug/ml) which specifically recognizes the phosphorylated epitope of the Erk-1 and Erk-2 kinases (1 hr at RT). This antibody is biotinylated by standard procedures. The bound polyclonal antibody is then quantitated by successive incubations with Europium-streptavidin and Europium fluorescence enhancing reagent in the Wallac DELFIA instrument (time-resolved fluorescence). An increased fluorescent signal over background indicates a phosphorylation by polypeptide of the present invention or a molecule induced by polypeptide of the present invention.

### Example 40

### Assay for the Stimulation of Bone Marrow CD34+ Cell Proliferation

[1264] This assay is based on the ability of human CD34+ to proliferate in the presence of hematopoietic growth factors and evaluates the ability of isolated polypeptides expressed in manunalian cells to stimulate proliferation of CD34+ cells.

[1265] It has been previously shown that most mature precursors will respond to only a single signal. More immature precursors require at least two signals to respond. Therefore, to test the effect of polypeptides on hematopoietic activity of a wide range of progenitor cells, the assay contains a given polypeptide in the presence or absence of other hematopoietic growth factors. Isolated cells are cultured for 5 days in the presence of Stem Cell Factor (SCF) in combination with tested sample. SCF alone has a very limited effect on the proliferation of bone marrow (BM) cells, acting in such conditions only as a “survival” factor. However, combined with any factor exhibiting stimulatory effect on these cells (e.g., IL-3), SCF will cause a synergistic effect. Therefore, if the tested polypeptide has a stimulatory effect on hematopoietic progenitors, such activity can be easily detected. Since normal BM cells have a low level of cycling cells, it is likely that any inhibitory effect of a given polypeptide, or agonists or antagonists thereof, might not be detected. Accordingly, assays for an inhibitory effect on progenitors is preferably tested in cells that are first subjected to in vitro stimulation with SCF+IL+3, and then contacted with the compound that is being evaluated for inhibition of such induced proliferation.

[1266] Briefly, CD34+ cells are isolated using methods known in the art. The cells are thawed and resuspended in medium (QBSF 60 serum-free medium with 1% L-glutamine (500 ml) Quality Biological, Inc., Gaithersburg, Md. Cat#160-204-101). After several gentle centrifugation steps at 200×g, cells are allowed to rest for one hour. The cell count is adjusted to 2.5×10⁵ cells/ml. During this time, 100 μl of sterile water is added to the peripheral wells of a 96-well plate. The cytokines that can be tested with a given polypeptide in this assay is rhSCF (R&D Systems, Minneapolis, Minn., Cat#255-SC) at 50 ng/ml alone and in combination with rhSCF and rhIL-3 (R&D Systems, Minneapolis, Minn., Cat#203-ML) at 30 ng/ml. After one hour, 10 μl of prepared cytokines, 50 μl of the supernatants prepared in Example 30 (supernatants at 1:2 dilution=50 μl) and 20 μl of diluted cells are added to the media which is already present in the wells to allow for a final total volume of 100 μl. The plates are then placed in a 37° C./5% CO₂ incubator for five days.

[1267] Eighteen hours before the assay is harvested, 0.5 μCi/well of [3H] Thymidine is added in a 10 μl volume to each well to determine the proliferation rate. The experiment is terminated by harvesting the cells from each 96-well plate to a filtermat using the Tomtec Harvester 96. After harvesting, the filtermats are dried, trimmed and placed into OmniFilter assemblies consisting of one OmniFilter plate and one OmniFilter Tray. 60 μl Microscint is added to each well and the plate sealed with TopSeal-A press-on sealing film A bar code 15 sticker is affixed to the first plate for counting. The sealed plates are then loaded and the level of radioactivity determined via the Packard Top Count and the printed data collected for analysis. The level of radioactivity reflects the amount of cell proliferation.

[1268] The studies described in this example test the activity of a given polypeptide to stimulate bone marrow CD34+ cell proliferation. One skilled in the art could easily modify the exemplified studies to test the activity of polynucleotides (e.g., gene therapy), antibodies, agonists, and/or antagonists and fragments and variants thereof. As a nonlimiting example, potential antagonists tested in this assay would be expected to inhibit cell proliferation in the presence of cytokines and/or to increase the inhibition of cell proliferation in the presence of cytokines and a given polypeptide. In contrast, potential agonists tested in this assay would be expected to enhance cell proliferation and/or to decrease the inhibition of cell proliferation in the presence of cytokines and a given polypeptide.

[1269] The ability of a gene to stimulate the proliferation of bone marrow CD34+ cells indicates that polynucleotides and polypeptides corresponding to the gene are useful for the diagnosis and treatment of disorders affecting the immune system and hematopoiesis. Representative uses are described in the “Immune Activity” and “Infectious Disease” sections above, and elsewhere herein.

### Example 41

### Assay for Extracellular Matrix Enhanced Cell Response (EMECR)

[1270] The objective of the Extracellular Matrix Enhanced Cell Response (EMECR) assay is to identify gene products (e.g., isolated polypeptides) that act on the hematopoietic stem cells in the context of the extracellular matrix (ECM) induced signal.

[1271] Cells respond to the regulatory factors in the context of signal(s) received from the surrounding microenvironment. For example, fibroblasts, and endothelial and epithelial stem cells fail to replicate in the absence of signals from the ECM. Hematopoietic stem cells can undergo self-renewal in the bone marrow, but not in in vitro suspension culture. The ability of stem cells to undergo self-renewal in vitro is dependent upon their interaction with the stromal cells and the ECM protein fibronectin (ffi). Adhesion of cells to fn is mediated by the α₅.β₁ and α₄.β₁ integrin receptors, which are expressed by human and mouse hematopoietic stem cells. The factor(s) which integrate with the ECM environment and are responsible for stimulating stem cell self-renewal have not yet been identified. Discovery of such factors should be of great interest in gene therapy and bone marrow transplant applications

[1272] Briefly, polystyrene, non tissue culture treated, 96-well plates are coated with fn fragment at a coating concentration of 0.2 μg/cm². Mouse bone marrow cells are plated (1,000 cells/well ) in 0.2 ml of serum-free medium. Cells cultured in the presence of IL-3 (5 ng/ml )+SCF (50 ng/ml ) would serve as the positive control, conditions under which little self-renewal but pronounced differentiation of the stem cells is to be expected. Gene products of the invention (e.g., including, but not limited to, polynucleotides and polypeptides of the present invention, and supernatants produced in Example 30), are tested with appropriate negative controls in the presence and absence of SCF(5.0 ng/ml), where test factor supernatants represent 10% of the total assay volume. The plated cells are then allowed to grow by incubating in a low oxygen environment (5% CO₂, 7% O₂, and 88% N₂ ) tissue culture incubator for 7 days. The number of proliferating cells within the wells is then quantitated by measuring thymidine incorporation into cellular DNA. Verification of the positive hits in the assay will require phenotypic characterization of the cells, which can be accomplished by scaling up of the culture system and using appropriate antibody reagents against cell surface antigens and FACScan.

[1273] One skilled in the art could easily modify the exemplified studies to test the activity of polynucleotides (e.g., gene therapy), antibodies, agonists, and/or antagonists and fragments and variants thereof.

[1274] If a particular polypeptide of the present invention is found to be a stimulator of hematopoietic progenitors, polynucleotides and polypeptides corresponding to the gene encoding said polypeptide may be useful for the diagnosis and treatment of disorders affecting the immune system and hematopoiesis. Representative uses are described in the “Immune Activity” and “Infectious Disease” sections above, and elsewhere herein. The gene product may also be useful in the expansion of stem cells and committed progenitors of various blood lineages, and in the differentiation and/or proliferation of various cell types.

[1275] Additionally, the polynucleotides and/or polypeptides of the gene of interest and/or agonists and/or antagonists thereof, may also be employed to inhibit the proliferation and differentiation of hematopoietic cells and therefore may be employed to protect bone marrow stem cells from chemotherapeutic agents during chemotherapy. This antiproliferative effect may allow administration of higher doses of chemotherapeutic agents and, therefore, more effective chemotherapeutic treatment.

[1276] Moreover, polynucleotides and polypeptides corresponding to the gene of interest may also be useful for the treatment and diagnosis of hematopoietic related disorders such as, for example, anemia, pancytopenia, leukopenia, thrombocytopenia or leukemia since stromal cells are important in the production of cells of hematopoietic lineages. The uses include bone marrow cell ex-vivo culture, bone marrow transplantation, bone marrow reconstitution, radiotherapy or chemotherapy of neoplasia.

### Example 42

### Human Dermal Fibroblast and Aortic Smooth Muscle Cell Proliferation

[1277] The polypeptide of interest is added to cultures of normal human dermal fibroblasts (NHDF) and human aortic smooth muscle cells (AoSMC) and two co-assays are performed with each sample. The first assay examines the effect of the polypeptide of interest on the proliferation of normal human dermal fibroblasts (NHDF) or aortic smooth muscle cells (AoSMC). Aberrant growth of fibroblasts or smooth muscle cells is a part of several pathological processes, including fibrosis, and restenosis. The second assay examines IL6 production by both NHDF and SMC. IL6 production is an indication of functional activation. Activated cells will have increased production of a number of cytokines and other factors, which can result in a proinflammatory or immunomodulatory outcome. Assays are run with and without co-TNFa stimulation, in order to check for costimulatory or inhibitory activity.

[1278] Briefly, on day 1, 96-well black plates are set up with 1000 cells/well (NHDF) or 2000 cells/well (AoSMC) in 100 μl culture media. NHDF culture media contains: Clonetics FB basal media, 1 mg/ml hFGF, 5 mg/ml insulin, 50 mg/ml gentamycin, 2%FBS, while AoSMC culture media contains Clonetics SM basal media, 0.5 μg/ml hEGF, 5 mg/ml insulin, 1 μg/ml hFGF, 50 mg/ml gentamycin, 50 μg/ml Amphotericin B, 5% FBS. After incubation at 37° C. for at least 4-5 hours culture media is aspirated and replaced with growth arrest media. Growth arrest media for NHDF contains fibroblast basal media, 50 mg/ml gentamycin, 2% FBS, while growth arrest media for AoSMC contains SM basal media, 50 mg/ml gentamycin, 50 μg/ml Amphotericin B, 0.4% FBS. Incubate at 37° C. until day 2.

[1279] On day 2, serial dilutions and templates of the polypeptide of interest are designed such that they always include media controls and known-protein controls. For both stimulation and inhibition experiments, proteins are diluted in growth arrest media. For inhibition experiments, TNFa is added to a final concentration of 2 ng/ml (NHDF) or 5 ng/ml (AoSMC). Add ⅓ vol media containing controls or polypeptides of the present invention and incubate at 37 degrees C./5% CO₂ until day 5.

[1280] Transfer 60 μl from each well to another labeled 96-well plate, cover with a plate-sealer, and store at 4 degrees C. until Day 6 (for IL6 ELISA). To the remaining 100 μl in the cell culture plate, aseptically add Alamar Blue in an amount equal to 10% of the culture volume (10 μl ). Return plates to incubator for 3 to 4 hours. Then measure fluorescence with excitation at 530 nm and emission at 590 nm using the CytoFluor. This yields the growth stimulation/inhibition data.

[1281] On day 5, the IL6 ELISA is performed by coating a 96 well plate with 50-100 ul/well of Anti-Human IL6 Monoclonal antibody diluted in PBS, pH 7.4, incubate ON at room temperature.

[1282] On day 6, empty the plates into the sink and blot on paper towels. Prepare Assay Buffer containing PBS with 4% BSA. Block the plates with 200 μl/well of Pierce Super Block blocking buffer in PBS for 1-2 hr and then wash plates with wash buffer (PBS, 0.05% Tween-20). Blot plates on paper towels. Then add 50 μl/well of diluted Anti-Human IL-6 Monoclonal, Biotin-labeled antibody at 0.50 mg/ml. Make dilutions of IL-6 stock in media (30, 10, 3, 1, 0.3, 0 ng/ml). Add duplicate samples to top row of plate. Cover the plates and incubate for 2 hours at RT on shaker.

[1283] Plates are washed with wash buffer and blotted on paper towels. Dilute EU-labeled Streptavidin 1:1000 in Assay buffer, and add 100 μl/well. Cover the plate and incubate 1 h at RT. Plates are again washed with wash buffer and blotted on paper towels.

[1284] Add 100 μl/well of Enhancement Solution. Shake for 5 minutes. Read the plate on the Wallac DELFIA Fluorometer. Readings from triplicate samples in each assay were tabulated and averaged.

[1285] A positive result in this assay suggests AoSMC cell proliferation and that the polypeptide of the present invention may be involved in dermal fibroblast proliferation and/or smooth muscle cell proliferation. A positive result also suggests many potential uses of polypeptides, polynucleotides, agonists and/or antagonists of the polynucleotide/polypeptide of the present invention which gives a positive result. For example, inflammation and immune responses, wound healing, and angiogenesis, as detailed throughout this specification. Particularly, polypeptides of the present invention and polynucleotides of the present invention may be used in wound healing and dermal regeneration, as well as the promotion of vasculogenesis, both of the blood vessels and lymphatics. The growth of vessels can be used in the treatment of, for example, cardiovascular diseases. Additionally, antagonists of polypeptides and polynucleotides of the invention may be useful in treating diseases, disorders, and/or conditions which involve angiogenesis by acting as an anti-vascular agent (e.g., anti-angiogenesis). These diseases, disorders, and/or conditions are known in the art and/or are described herein, such as, for example, malignancies, solid tumors, benign tumors, for example hemangiomas, acoustic neuromas, neurofibromas, trachomas, and pyogenic granulomas; artheroscleric plaques; ocular angiogenic diseases, for example, diabetic retinopathy, retinopathy of prematurity, macular degeneration, corneal graft rejection, neovascular glaucoma, retrolental fibroplasia, rubeosis, retinoblastoma, uvietis and Pterygia (abnormal blood vessel growth) of the eye; rheumatoid arthritis; psoriasis; delayed wound healing; endometriosis; vasculogenesis; granulations; hypertrophic scars (keloids); nonunion fractures; scleroderma; trachoma; vascular adhesions; myocardial angiogenesis; coronary collaterals; cerebral collaterals; arteriovenous malformations; ischemic limb angiogenesis; Osler-Webber Syndrome; plaque neovascularization; telangiectasia; hemophiliac joints; angiofibroma; fibromuscular dysplasia; wound granulation; Crohn's disease; and atherosclerosis. Moreover, antagonists of polypeptides and polynucleotides of the invention may be useful in treating anti-hyperproliferative diseases and/or anti-inflammatory known in the art and/or described herein.

[1286] One skilled in the art could easily modify the exemplified studies to test the activity of polynucleotides (e.g., gene therapy), antibodies, agonists, and/or antagonists and fragments and variants thereof.

### Example 43

### Cellular Adhesion Molecule (CAM) Expression on Endothelial Cells

[1287] The recruitment of lymphocytes to areas of inflammation and angiogenesis involves specific receptor-ligand interactions between cell surface adhesion molecules (CAMs) on lymphocytes and the vascular endothelium. The adhesion process, in both normal and pathological settings, follows a multi-step cascade that involves intercellular adhesion molecule-1 (ICAM-1), vascular cell adhesion molecule-1 (VCAM-1), and endothelial leukocyte adhesion molecule-1 (E-selectin) expression on endothelial cells (EC). The expression of these molecules and others on the vascular endothelium determines the efficiency with which leukocytes may adhere to the local vasculature and extravasate into the local tissue during the development of an inflammatory response. The local concentration of cytokines and growth factor participate in the modulation of the expression of these CAMs.

[1288] Briefly, endothelial cells (e.g., Human Umbilical Vein Endothelial cells (HUVECs)) are grown in a standard 96 well plate to confluence, growth medium is removed from the cells and replaced with 100 μl of 199 Medium (10% fetal bovine serum (FBS)). Samples for testing and positive or negative controls are added to the plate in triplicate (in 10 μl volumes). Plates are then incubated at 37° C. for either 5 h (selectin and integrin expression) or 24 h (integrin expression only). Plates are aspirated to remove medium and 100 μl of 0.1% paraformaldehyde-PBS(with Ca++ and Mg++) is added to each well. Plates are held at 4° C. for 30 min. Fixative is removed from the wells and wells are washed 1×with PBS(+Ca,Mg)+0.5% BSA and drained. 10 μl of diluted primary antibody is added to the test and control wells. Anti-ICAM-1-Biotin, Anti-VCAM-1-Biotin and Anti-E-selectin-Biotin are used at a concentration of 10 μg/ml (1:10 dilution of 0.1 mg/ml stock antibody). Cells are incubated at 37° C. for 30 min. in a humidified environment. Wells are washed three times with PBS(+Ca,Mg)+0.5% BSA. 20 μl of diluted ExtrAvidin-Alkaline Phosphatase (1:5,000 dilution, referred to herein as the working dilution) are added to each well and incubated at 37° C. for 30 min. Wells are washed three times with PBS(+Ca,Mg)+0.5% BSA. Dissolve 1 tablet of p-Nitrophenol Phosphate pNPP per 5 ml of glycine buffer (pH 10.4). 100 μl of pNPP substrate in glycine buffer is added to each test well. Standard wells in triplicate are prepared from the working dilution of the ExtrAvidin-Alkaline Phosphotase in glycine buffer: 1:5,000 (10⁰)>10^{-0.5}22 10⁻¹>10^{-1.5}0.5 μl of each dilution is added to triplicate wells and content in each well is 5.50 ng, 1.74 ng, 0.55 ng, 0.18 ng. 100 μl of pNNP reagent is then added to each of the standard wells. The plate is incubated at 37° C. for 4 h. A volume of 50 μl of 3M NaOH is added to all wells. The plate is read on a plate reader at 405 nm using the background subtraction option on blank wells filled with glycine buffer only. Additionally, the template is set up to indicate the concentration of AP-conjugate in each standard well [5.50 ng; 1.74 ng; 0.55 ng; 0.18 ng]. Results are indicated as amount of bound AP-conjugate in each sample.

### Example 44

### Alamar Blue Endothelial Cells Proliferation Assay

[1289] This assay may be used to quantitatively determine protein mediated inhibition of bFGF-induced proliferation of Bovine Lymphatic Endothelial Cells (LECs), Bovine Aortic Endothelial Cells (BAECs) or Human Microvascular Uterine Myometrial Cells (UTMECs). This assay incorporates a fluorometric growth indicator based on detection of metabolic activity. A standard Alamar Blue Proliferation Assay is prepared in EGM-2MV with 10 ng /ml of bFGF added as a source of endothelial cell stimulation. This assay may be used with a variety of endothelial cells with slight changes in growth medium and cell concentration. Dilutions of the protein batches to be tested are diluted as appropriate. Serum-free medium (GIBCO SFM) without bFGF is used as a non-stimulated control and Angiostatin or TSP-1 are included as a known inhibitory controls.

[1290] Briefly, LEC, BAECs or UTMECs are seeded in growth media at a density of 5000 to 2000 cells/well in a 96 well plate and placed at 37 degrees C. overnight. After the overnight incubation of the cells, the growth media is removed and replaced with GIBCO EC-SFM. The cells are treated with the appropriate dilutions of the protein of interest or control protein sample(s) (prepared in SFM ) in triplicate wells with additional bFGF to a concentration of 10 ng/ ml. Once the cells have been treated with the samples, the plate(s) is/are placed back in the 37° C. incubator for three days. After three days 10 ml of stock alamar blue (Biosource Cat#DAL 1100) is added to each well and the plate(s) is/are placed back in the 37° C. incubator for four hours. The plate(s) are then read at 530 nm excitation and 590 nm emission using the CytoFluor fluorescence reader. Direct output is recorded in relative fluorescence units.

[1291] Alamar blue is an oxidation-reduction indicator that both fluoresces and changes color in response to chemical reduction of growth medium resulting from cell growth. As cells grow in culture, innate metabolic activity results in a chemical reduction of the immediate surrounding environment. Reduction related to growth causes the indicator to change from oxidized (non-fluorescent blue) form to reduced (fluorescent red) form (i.e., stimulated proliferation will produce a stronger signal and inhibited proliferation will produce a weaker signal and the total signal is proportional to the total number of cells as well as their metabolic activity). The background level of activity is observed with the starvation medium alone. This is compared to the output observed from the positive control samples (bFGF in growth medium) and protein dilutions.

### Example 45

### Detection of Inhibition of a Mixed Lymphocyte Reaction

[1292] This assay can be used to detect and evaluate inhibition of a Mixed Lymphocyte Reaction (MLR) by gene products (e.g., isolated polypeptides). Inhibition of a MLR may be due to a direct effect on cell proliferation and viability, modulation of costimulatory molecules on interacting cells, modulation of adhesiveness between lymphocytes and accessory cells, or modulation of cytokine production by accessory cells. Multiple cells may be targeted by these polypeptides since the peripheral blood mononuclear fraction used in this assay includes T, B and natural killer lymphocytes, as well as monocytes and dendritic cells.

[1293] Polypeptides of interest found to inhibit the MLR may find application in diseases associated with lymphocyte and monocyte activation or proliferation. These include, but are not limited to, diseases such as asthma, arthritis, diabetes, inflammatory skin conditions, psoriasis, eczema, systemic lupus erythematosus, multiple sclerosis, glomerulonephritis, inflammatory bowel disease, crohn's disease, ulcerative colitis, arteriosclerosis, cirrhosis, graft vs. host disease, host vs. graft disease, hepatitis, leukemia and lymphoma.

[1294] Briefly, PBMCs from human donors are purified by density gradient centrifugation using Lymphocyte Separation Medium (LSM®, density 1.0770 g/ml, Organon Teknika Corporation, West Chester, Pa.). PBMCs from two donors are adjusted to 2×10⁶ cells/ml in RPMI-1640 (Life Technologies, Grand Island, N.Y.) supplemented with 10% FCS and 2 mM glutamine. PBMCs from a third donor is adjusted to 2×10⁵ cells/ml. Fifty microliters of PBMCs from each donor is added to wells of a 96-well round bottom microtiter plate. Dilutions of test materials (50 μl) is added in triplicate to microtiter wells. Test samples (of the protein of interest) are added for final dilution of 1:4; rhuIL-2 (R&D Systems, Minneapolis, Minn., catalog number 202-IL) is added to a final concentration of 1 μg/ml; anti-CD4 mAb (R&D Systems, clone 34930.11, catalog number MAB379) is added to a final concentration of 10 μg/ml. Cells are cultured for 7-8 days at 37° C. in 5% CO₂, and 1 μC of [³H] thymidine is added to wells for the last 16 hrs of culture. Cells are harvested and thymidine incorporation determined using a Packard TopCount. Data is expressed as the mean and standard deviation of triplicate determinations.

[1295] Samples of the protein of interest are screened in separate experiments and compared to the negative control treatment, anti-CD4 mAb, which inhibits proliferation of lymphocytes and the positive control treatment, IL-2 (either as recombinant material or supernatant), which enhances proliferation of lymphocytes.

[1296] One skilled in the art could easily modify the exemplified studies to test the activity of polynucleotides (e.g., gene therapy), antibodies, agonists, and/or antagonists and fragments and variants thereof.

### Example 46

### Assays for Protease Activity

[1297] The following assay may be used to assess protease activity of the polypeptides of the invention.

[1298] Gelatin and casein zymography are performed essentially as described (Heusen et al., Anal. Biochem., 102:196-202 (1980); Wilson et al., Journal of Urology, 149:653-658 (1993)). Samples are run on 10% polyacryamide/0.1% SDS gels containing 1% gelain orcasein, soaked in 2.5% triton at room temperature for 1 hour, and in 0.1M glycine, pH 8.3 at 37° C. 5 to 16 hours. After staining in amido black areas of proteolysis apear as clear areas agains the blue-black background. Trypsin (Sigma T8642) is used as a positive control.

[1299] Protease activity is also determined by monitoring the cleavage of n-a-benzoyl-L-arginine ethyl ester (BAEE) (Sigma B-4500. Reactions are set up in (25 mMNaPO₄, 1 mM EDTA, and 1 mM BAEE), pH 7.5. Samples are added and the change in adsorbance at 260 nm is monitored on the Beckman DU-6 spectrophotometer in the time-drive mode. Trypsin is used as a positive control.

[1300] Additional assays based upon the release of acid-soluble peptides from casein or hemoglobin measured as adsorbance at 280 nm or colorimetrically using the Folin method are performed as described in Bergmeyer, et al., Methods of Enzymatic Analysis, 5 (1984). Other assays involve the solubilization of chromogenic substrates (Ward, Applied Science, 251-317 (1983).

### Example 47

### Identifying Serine Protease Substrate Specificity

[1301] Methods known in the art or described herein may be used to determine the substrate specificity of the polypeptides of the present invention having serine protease activity. A preferred method of determining substrate specificity is by the use of positional scanning synthetic combinatorial libraries as described in GB 2 324 529 (incorporated herein in its entirety).

### Example 48

### Ligand Binding Assays

[1302] The following assay may be used to assess ligand binding activity of the polypeptides of the invention.

[1303] Ligand binding assays provide a direct method for ascertaining receptor pharmacology and are adaptable to a high throughput format. The purified ligand for a polypeptide is radiolabeled to high specific activity (50-2000 Ci/mmol) for binding studies. A determination is then made that the process of radiolabeling does not diminish the activity of the ligand towards its polypeptide. Assay conditions for buffers, ions, pH and other modulators such as nucleotides are optimized to establish a workable signal to noise ratio for both membrane and whole cell polypeptide sources. For these assays, specific polypeptide binding is defined as total associated radioactivity minus the radioactivity measured in the presence of an excess of unlabeled competing ligand. Where possible, more than one competing ligand is used to define residual nonspecific binding.

### Example 49

### Functional Assay in Xenopus Oocytes

[1304] Capped RNA transcripts from linearized plasmid templates encoding the polypeptides of the invention are synthesized in vitro with RNA polymerases in accordance with standard procedures. In vitro transcripts are suspended in water at a final concentration of 0.2 mg/mi. Ovarian lobes are removed from adult female toads, Stage V defolliculated oocytes are obtained, and RNA transcripts (10 ng/oocytc) are injected in a 50 nl bolus using a microinjection apparatus. Two electrode voltage clamps are used to measure the currents from individual Xenopus oocytes in response polypeptides and polypeptide agonist exposure. Recordings are made in Ca2+ free Barth's medium at room temperature. The Xenopus system can be used to screen known ligands and tissue/cell extracts for activating ligands.

### Example 50

### Microphysiometric Assays

[1305] Activation of a wide variety of secondary messenger systems results in extrusion of small amounts of acid from a cell. The acid formed is largely as a result of the increased metabolic activity required to fuel the intracellular signaling process. The pH changes in the media surrounding the cell are very small but are detectable by the CYTOSENSOR microphysiometer (Molecular Devices Ltd., Menlo Park, Calif.). The CYTOSENSOR is thus capable of detecting the activation of polypeptide which is coupled to an energy utilizing intracellular signaling pathway.

### Example 51

### Extract/Cell Supernatant Screening

[1306] A large number of mammalian receptors exist for which there remains, as yet, no cognate activating ligand (agonist). Thus, active ligands for these receptors may not be included within the ligands banks as identified to date. Accordingly, the polypeptides of the invention can also be functionally screened (using calcium, cAMP, microphysiometer, oocyte electrophysiology, etc., functional screens) against tissue extracts to identify its natural ligands. Extracts that produce positive functional responses can be sequentially subfractionated until an activating ligand is isolated and identified.

### Example 52

### Calcium and cAMP Functional Assays

[1307] Seven transmembrane receptors which are expressed in HEK 293 cells have been shown to be coupled functionally to activation of PLC and calcium mobilization and/or cAMP stimulation or inhibition. Basal calcium levels in the HEK 293 cells in receptor-transfected or vector control cells were observed to be in the normal, 100 nM to 200 nM, range. HEK 293 cells expressing recombinant receptors are loaded with fura 2 and in a single day >150 selected ligands or tissue/cell extracts are evaluated for agonist induced calcium mobilization. Similarly, HEK 293 cells expressing recombinant receptors are evaluated for the stimulation or inhibition of cAMP production using standard cAMP quantitation assays. Agonists presenting a calcium transient or cAMP fluctuation are tested in vector control cells to determine if the response is unique to the transfected cells expressing receptor.

### Example 53

### A TP-binding assay

[1308] The following assay may be used to assess ATP-binding activity of polypeptides of the invention.

[1309] ATP-binding activity of the polypeptides of the invention may be detected using the ATP-binding assay described in U.S. Pat. No. 5,858,719, which is herein incorporated by reference in its entirety. Briefly, ATP-binding to polypeptides of the invention is measured via photoaffinity labeling with 8-azido-ATP in a competition assay. Reaction mixtures containing 1 mg/ml of the ABC transport protein of the present invention are incubated with varying concentrations of ATP, or the non-hydrolyzable ATP analog adenyl-5′-imidodiphosphate for 10 minutes at 4° C. A mixture of 8-azido-ATP (Sigma Chem. Corp., St. Louis, Mo.) plus 8-azido-ATP (³²P-ATP) (5 mCi/μmol, ICN, Irvine Calif.) is added to a final concentration of 100 μM and 0.5 ml aliquots are placed in the wells of a porcelain spot plate on ice. The plate is irradiated using a short wave 254 nm UV lamp at a distance of 2.5 cm from the plate for two one-minute intervals with a one-minute cooling interval in between. The reaction is stopped by addition of dithiothreitol to a final concentration of 2 mM. The incubations are subjected to SDS-PAGE electrophoresis, dried, and autoradiographed. Protein bands corresponding to the particular polypeptides of the invention are excised, and the radioactivity quantified. A decrease in radioactivity with increasing ATP or adenly-5′-imidodiphosphate provides a measure of ATP affinity to the polypeptides.

### Example 54

### Small Molecule Screening

[1310] This invention is particularly useful for screening therapeutic compounds by using the polypeptides of the invention, or binding fragments thereof, in any of a variety of drug screening techniques. The polypeptide or fragment employed in such a test may be affixed to a solid support, expressed on a cell surface, free in solution, or located intracellularly. One method of drug screening utilizes eukaryotic or prokaryotic host cells which are stably transformed with recombinant nucleic acids expressing the polypeptide or fragment. Drugs are screened against such transformed cells in competitive binding assays. One may measure, for example, the formulation of complexes between the agent being tested and polypeptide of the invention.

[1311] Thus, the present invention provides methods of screening for drugs or any other agents which affect activities mediated by the polypeptides of the invention. These methods comprise contacting such an agent with a polypeptide of the invention or fragment thereof and assaying for the presence of a complex between the agent and the polypeptide or fragment thereof, by methods well known in the art. In such a competitive binding assay, the agents to screen are typically labeled. Following incubation, free agent is separated from that present in bound form, and the amount of free or uncomplexed label is a measure of the ability of a particular agent to bind to the polypeptides of the invention.

[1312] Another technique for drug screening provides high throughput screening for compounds having suitable binding affinity to the polypeptides of the invention, and is described in great detail in European Patent Application 84/03564, published on Sep. 13, 1984, which is herein incorporated by reference in its entirety. Briefly stated, large numbers of different small molecule test compounds are synthesized on a solid substrate, such as plastic pins or some other surface. The test compounds are reacted with polypeptides of the invention and washed. Bound polypeptides are then detected by methods well known in the art. Purified polypeptides are coated directly onto plates for use in the aforementioned drug screening techniques. In addition, non-neutralizing antibodies may be used to capture the peptide and immobilize it on the solid support.

[1313] This invention also contemplates the use of competitive drug screening assays in which neutralizing antibodies capable of binding polypeptides of the invention specifically compete with a test compound for binding to the polypeptides or fragments thereof. In this manner, the antibodies are used to detect the presence of any peptide which shares one or more antigenic epitopes with a polypeptide of the invention.

### Example 55

### Phosphorylation Assay

[1314] In order to assay for phosphorylation activity of the polypeptides of the invention, a phosphorylation assay as described in U.S. Pat. No. 5,958,405 (which is herein incorporated by reference) is utilized. Briefly, phosphorylation activity may be measured by phosphorylation of a protein substrate using gamma-labeled ³²P-ATP and quantitation of the incorporated radioactivity using a gamma radioisotope counter. The polypeptides of the invention are incubated with the protein substrate, ³²P-ATP, and a kinase buffer. The ³²P incorporated into the substrate is then separated from free ³²P-ATP by electrophoresis, and the incorporated ³²P is counted and compared to a negative control. Radioactivity counts above the negative control are indicative of phosphorylation activity of the polypeptides of the invention.

### Example 56

### Detection of Phosphorylation Activity (Activation) of the Polypeptides of the Invention in the Presence of Polypeptide Ligands

[1315] Methods known in the art or described herein may be used to determine the phosphorylation activity of the polypeptides of the invention. A preferred method of determining phosphorylation activity is by the use of the tyrosine phosphorylation assay as described in U.S. Pat. No. 5,817,471 (incorporated herein by reference).

### Example 57

### Identification of Signal Transduction Proteins that Interact with Polypeptides of the Present Invention

[1316] The purified polypeptides of the invention are research tools for the identification, characterization and purification of additional signal transduction pathway proteins or receptor proteins. Briefly, labeled receptor PTK polypeptide is useful as a reagent for the purification of molecules with which it interacts. In one embodiment of affinity purification, receptor PTK polypeptide is covalently coupled to a chromatography column. Cell-free extract derived from putative target cells, such as carcinoma tissues, is passed over the column, and molecules with appropriate affinity bind to the receptor PTK polypeptides, or specific phosphotyrosine-recognition domains thereof The receptor PTK polypeptide interacting protein-complex is recovered from the column, dissociated, and the recovered molecule subjected to N-terminal protein sequencing. This amino acid sequence is then used to identify the captured molecule or to design degenerate oligonucleotide probes for cloning the relevant gene from an appropriate cDNA library.

### Example 58

### IL-6 Bioassay

[1317] To test the proliferative effects of the polypeptides of the invention, the IL-6 Bioassay as described by Marz et al. is utilized (Proc. Natl. Acad. Sci., U.S.A., 95:3251-56 (1998), which is herein incorporated by reference). Briefly, IL-6 dependent B9 murine cells are washed three times in IL-6 free medium and plated at a concentration of 5,000 cells per well in 50 μl, and 50 μl of the IL-6-like polypeptide is added. After 68 hrs. at 37° C., the number of viable cells is measured by adding the tetrazolium salt thiazolyl blue (MTT) and incubating for a further 4 hrs. at 37° C. B9 cells are lysed by SDS and optical density is measured at 570 nm. Controls containing IL-6 (positive) and no cytokine (negative) are utilized. Enhanced proliferation in the test sample(s) relative to the negative control is indicative of proliferative effects mediated by polypeptides of the invention.

### Example 59

### Support of Chicken Embryo Neuron Survival

[1318] To test whether sympathetic neuronal cell viability is supported by polypeptides of the invention, the chicken embryo neuronal survival assay of Senaldi et al is utilized (Proc. Natl. Acad. Sci., U.S.A., 96:11458-63 (1998), which is herein incorporated by reference). Briefly, motor and sympathetic neurons are isolated from chicken embryos, resuspended in L15 medium (with 10% FCS, glucose, sodium selenite, progesterone, conalbumin, putrescine, and insulin; Life Technologies, Rockville, Md.) and Dulbecco's modified Eagles medium [with 10% FCS, glutamine, penicillin, and 25 mM Hepes buffer (pH 7.2); Life Technologies, Rockville, Md.], respectively, and incubated at 37° C. in 5% CO₂ in the presence of different concentrations of the purified IL-6-like polypeptide, as well as a negative control lacking any cytokine. After 3 days, neuron survival is determined by evaluation of cellular morphology, and through the use of the colorimetric assay of Mosmann (Mossman, T., J. Immunol. Methods, 65:55-63 (1983)). Enhanced neuronal cell viability as compared to the controls lacking cytokine is indicative of the ability of the inventive purified IL-6-like polypeptide(s) to enhance the survival of neuronal cells.

### Example 60

### Assay for Phosphatase Activity

[1319] The following assay may be used to assess serine/threonine phosphatase (PTPase) activity of the polypeptides of the invention.

[1320] In order to assay for serine/threonine phosphatase (PTPase) activity, assays can be utilized which are widely known to those skilled in the art. For example, the serine/threonine phosphatase (PSPase) activity is measured using a PSPase assay kit from New England Biolabs, Inc. Myelin basic protein (MyBP), a substrate for PSPase, is phosphorylated on serine and threonine residues with cAMP-dependent Protein Kinase in the presence of [³²P]ATP. Protein serine/threonine phosphatase activity is then determined by measuring the release of inorganic phosphate from 32P-labeled MyBP.

### Example 61

### Interaction of Serine/Threonine Phosphatases with other Proteins

[1321] The polypeptides of the invention with serine/threonine phosphatase activity as determined in Example 60 are research tools for the identification, characterization and purification of additional interacting proteins or receptor proteins, or other signal transduction pathway proteins. Briefly, labeled polypeptide(s) of the invention is useful as a reagent for the purification of molecules with which it interacts. In one embodiment of affinity purification, polypeptide of the invention is covalently coupled to a chromatography column. Cell-free extract derived from putative target cells, such as neural or liver cells, is passed over the column, and molecules with appropriate affinity bind to the polypeptides of the invention. The polypeptides of the invention-complex is recovered from the column, dissociated, and the recovered molecule subjected to N-terminal protein sequencing. This amino acid sequence is then used to identify the captured molecule or to design degenerate oligonucleotide probes for cloning the relevant gene from an appropriate cDNA library.

### Example 62

### Assaying for Heparanase Activity

[1322] In order to assay for heparanase activity of the polypeptides of the invention, the heparanase assay described by Vlodavsky et al is utilized (Vlodavsky, I., et al., Nat. Med., 5:793-802 (1999)). Briefly, cell lysates, conditioned media or intact cells (1×10⁶ cells per 35-mm dish) are incubated for 18 hrs at 37° C., pH 6.2-6.6, with ³⁵S-labeled ECM or soluble ECM derived peak I proteoglycans. The incubation medium is centrifuged and the supernatant is analyzed by gel filtration on a Sepharose CL-6B column (0.9×30 cm). Fractions are eluted with PBS and their radioactivity is measured. Degradation fragments of heparan sulfate side chains are eluted from Sepharose 6B at 0.5<Kₐᵥ<0.8 (peak II). Each experiment is done at least three times. Degradation fragments corresponding to “peak II,” as described by Vlodavsky et al., is indicative of the activity of the polypeptides of the invention in cleaving heparan sulfate.

### Example 63

### Immobilization of Biomolecules

[1323] This example provides a method for the stabilization of polypeptides of the invention in non-host cell lipid bilayer constucts (see, e.g., Bieri et al., Nature Biotech 17:1105-1108 (1999), hereby incorporated by reference in its entirety herein) which can be adapted for the study of polypeptides of the invention in the various functional assays described above. Briefly, carbohydrate-specific chemistry for biotinylation is used to confine a biotin tag to the extracellular domain of the polypeptides of the invention, thus allowing uniform orientation upon immobilization. A 50 uM solution of polypeptides of the invention in washed membranes is incubated with 20 mM NaIO4 and 1.5 mg/ml (4 mM) BACH or 2 mg/ml (7.5 mM) biotin-hydrazide for 1 hr at room temperature (reaction volume, 150 ul). Then the sample is dialyzed (Pierce Slidealizer Cassett, 10 kDa cutoff; Pierce Chemical Co., Rockford Ill.) at 4 C. first for 5 h, exchanging the buffer after each hour, and finally for 12 h against 500 ml buffer R (0.15 M NaCl, 1 mM MgC12, 10 mM sodium phosphate, pH7). Just before addition into a cuvette, the sample is diluted 1:5 in buffer ROG50 (Buffer R supplemented with 50 mM octylglucoside).

### Example 64

### TAQMAN

[1324] Quantitative PCR (QPCR). Total RNA from cells in culture are extracted by Trizol separation as recommended by the supplier (LifeTechnologies). (Total RNA is treated with DNase I (Life Technologies) to remove any contaminating genomic DNA before reverse transcription.) Total RNA (50 ng) is used in a one-step, 50 ul, RT-QPCR, consisting of Taqman Buffer A (Perkin-Elmer; 50 mM KCl/10 mM Tris, pH 8.3), 5.5 mM MgCl₂, 240 μM each dNTP, 0.4 units RNase inhibitor(Promega), 8%glycerol, 0.012% Tween-20, 0.05% gelatin, 0.3 uM primers, 0.1 uM probe, 0.025 units Amplitaq Gold (Perkin-Elmer) and 2.5 units Superscript II reverse transcriptase (Life Technologies). As a control for genomic contamination, parallel reactions are setup without reverse transcriptase. The relative abundance of (unknown) and 18S RNAs are assessed by using the Applied Biosystems Prism 7700 Sequence Detection System (Livak, K. J., Flood, S. J., Marmaro, J., Giusti, W. & Deetz, K. (1995) PCR Methods Appl. 4, 357-362). Reactions are carried out at 48° C. for 30 min, 95° C. for 10 min, followed by 40 cycles of 95° C. for 15 s, 60° C. for 1 min. Reactions are performed in triplicate.

[1325] Primers (f & r) and FRET probes sets are designed using Primer Express Software (Perkin-Elmer). Probes are labeled at the 5′-end with the reporter dye 6-FAM and on the 3′-end with the quencher dye TAMRA (Biosource International, Camarillo, Calif. or Perkin-Elmer).

### Example 65

### Assays for Metalloproteinase Activity

[1326] Metalloproteinases (EC 3.4.24.-) are peptide hydrolases which use metal ions, such as Zn²⁺, as the catalytic mechanism. Metalloproteinase activity of polypeptides of the present invention can be assayed according to the following methods.

[1327] Proteolysis of alpha-2-macroglobulin

[1328] To confirm protease activity, purified polypeptides of the invention are mixed with the substrate alpha-2-macroglobulin (0.2 unit/ml; Boehringer Mannheim, Germany) in 1×assay buffer (50 mM HEPES, pH 7.5, 0.2 M NaCl, 10 mM CaCl₂, 25 μM ZnCl₂ and 0.05% Brij-35) and incubated at 37° C. for 1-5 days. Trypsin is used as positive control. Negative controls contain only alpha-2-macroglobulin in assay buffer. The samples are collected and boiled in SDS-PAGE sample buffer containing 5% 2-mercaptoethanol for 5-min, then loaded onto 8% SDS-polyacrylamide gel. After electrophoresis the proteins are visualized by silver staining. Proteolysis is evident by the appearance of lower molecular weight bands as compared to the negative control.

[1329] Inhibition of alpha-2-macroglobulin Proteolysis by Inhibitors of Metalloproteinases

[1330] Known metalloproteinase inhibitors (metal chelators (EDTA, EGTA, AND HgCl₂), peptide metalloproteinase inhibitors (TIMP-1 and TIMP-2), and commercial small molecule MMP inhibitors) are used to characterize the proteolytic activity of polypeptides of the invention. The three synthetic MMP inhibitors used are: MMP inhibitor I, [IC₅₀=1.0 μM against MMP-1 and MMP-8; IC₅₀=30 μM against MMP-9; IC₅₀=150 μM against MMP-3]; MMP-3 (stromelysin-1) inhibitor I [IC₅₀=5 μM against MMP-3], and MMP-3 inhibitor II [Kᵢ=130 nM against MMP-3]; inhibitors available through Calbiochem, catalog #444250, 444218, and 444225, respectively). Briefly, different concentrations of the small molecule MMP inhibitors are mixed with purified polypeptides of the invention (50 μg/ml) in 22.9 μl of 1×HEPES buffer (50 mM HEPES, pH 7.5, 0.2 M NaCl, 10 mM CaCl₂, 25 μM ZnCl₂ and 0.05% Brij-35) and incubated at room temperature (24 ° C.) for 2-hr, then 7.1 μl of substrate alpha-2-macroglobulin (0.2 unit/ml) is added and incubated at 37° C. for 20-hr. The reactions are stopped by adding 4×sample buffer and boiled immediately for 5 minutes. After SDS-PAGE, the protein bands are visualized by silver stain.

[1331] Synthetic Fluorogenic Peptide Substrates Cleavage Assay

[1332] The substrate specificity for polypeptides of the invention with demonstrated metalloproteinase activity can be determined using synthetic fluorogenic peptide substrates (purchased from BACHEM Bioscience Inc). Test substrates include, M-1985, M-2225, M-2105, M-2110, and M-2255. The first four are MMP substrates and the last one is a substrate of tumor necrosis factor-α (TNF-α) converting enzyme (TACE). All the substrates are prepared in 1:1 dimethyl sulfoxide (DMSO) and water. The stock solutions are 50-500 μM. Fluorescent assays are performed by using a Perkin Elmer LS 50B luminescence spectrometer equipped with a constant temperature water bath. The excitation λ is 328 nm and the emission λ is 393 nm. Briefly, the assay is carried out by incubating 176 μl 1×HEPES buffer (0.2 M NaCl, 10 mM CaCl₂, 0.05% Brij-35 and 50 mM HEPES, pH 7.5) with 4 μl of substrate solution (50 μM) at 25° C. for 15 minutes, and then adding 20 μl of a purified polypeptide of the invention into the assay cuvett. The final concentration of substrate is 1 μM. Initial hydrolysis rates are monitored for 30-min.

### Example 66

### Characterization of the cDNA Contained in a Deposited Plasmid

[1333] The size of the cDNA insert contained in a deposited plasmid may be routinely determined using techniques known in the art, such as PCR amplification using synthetic primers hybridizable to the 3′ and 5′ ends of the cDNA sequence. For example, two primers of 17-30 nucleotides derived from each end of the cDNA (i.e., hybridizable to the absolute 5′ nucleotide or the 3′ nucleotide end of the sequence of SEQ ID NO: X, respectively) are synthesized and used to amplify the cDNA using the deposited cDNA plasmid as a template. The polymerase chain reaction is carried out under routine conditions, for instance, in 25 ul of reaction mixture with 0.5 ug of the above cDNA template. A convenient reaction mixture is 1.5-5 mM MgCl₂, 0.01% (w/v) gelatin, 20 uM each of dATP, dCTP, dGTP, dTTP, 25 pmol of each primer and 0.25 Unit of Taq polymerase. Thirty five cycles of PCR (denaturation at 94 degree C. for 1 min; annealing at 55 degree C. for 1 min; elongation at 72 degree C. for 1 min) are performed with a Perkin-Elmer Cetus automated thermal cycler. The amplified product is analyzed by agarose gel electrophoresis. The PCR product is verified to be the selected sequence by subcloning and sequencing the DNA product.

[1334] It will be clear that the invention may be practiced otherwise than as particularly described in the foregoing description and examples. Numerous modifications and variations of the present invention are possible in light of the above teachings and, therefore, are within the scope of the appended claims.

[1335] The entire disclosure of each document cited (including patents, patent applications, journal articles, abstracts, laboratory manuals, books, or other disclosures) in the Background of the Invention, Detailed Description, and Examples is hereby incorporated herein by reference. In addition, the CD-R copy of the sequence listing submitted herewith and the corresponding computer readable form are both incorporated herein by reference in their entireties. The specification and Sequence Listing of International Application No. PCT/US01/18569, filed on Jun. 7, 2001, is herein incorporated by reference in its entirety. Additionally, the specification and Sequence Listing of U.S. Provisional Application No. 60/209,467, filed on Jun. 7, 2000, are herein incorporated by reference in their entirety.

What is claimed is:

1. An isolated nucleic acid molecule comprising a polynucleotide having a nucleotide sequence at least 95% identical to a sequence selected from the group consisting of:
(a) a polynucleotide fragment of SEQ ID NO: X or a polynucleotide fragment of the cDNA sequence contained in Clone ID NO: Z, which is hybridizable to SEQ ID NO: X;
(b) a polynucleotide encoding a polypeptide fragment of SEQ ID NO: Y or a polypeptide fragment encoded by the cDNA sequence contained in cDNA Clone ID NO: Z, which is hybridizable to SEQ ID NO: X;
(c) a polynucleotide encoding a polypeptide fragment of a polypeptide encoded by SEQ ID NO: X or a polypeptide fragment encoded by the cDNA sequence contained in cDNA Clone ID NO: Z, which is hybridizable to SEQ ID NO: X;
(d) a polynucleotide encoding a polypeptide domain of SEQ ID NO: Y or a polypeptide domain encoded by the cDNA sequence contained in cDNA Clone ID NO: Z, which is hybridizable to SEQ ID NO: X;
(e) a polynucleotide encoding a polypeptide epitope of SEQ ID NO: Y or a polypeptide epitope encoded by the cDNA sequence contained in cDNA Clone ID NO: Z, which is hybridizable to SEQ ID NO: X;
(f) a polynucleotide encoding a polypeptide of SEQ ID NO: Y or the cDNA sequence contained in cDNA Clone ID NO: Z, which is hybridizable to SEQ ID NO: X, having biological activity;
(g) a polynucleotide which is a variant of SEQ ID NO: X;
(h) a polynucleotide which is an allelic variant of SEQ ID NO: X;
(i) a polynucleotide which encodes a species homologue of the SEQ ID NO: Y;
(j) a polynucleotide capable of hybridizing under stringent conditions to any one of the polynucleotides specified in (a)-(i), wherein said polynucleotide does not hybridize under stringent conditions to a nucleic acid molecule having a nucleotide sequence of only A residues or of only T residues.

2. The isolated nucleic acid molecule of claim 1, wherein the polynucleotide fragment comprises a nucleotide sequence encoding a protein.

3. The isolated nucleic acid molecule of claim 1, wherein the polynucleotide fragment comprises a nucleotide sequence encoding the sequence identified as SEQ ID NO: Y or the polypeptide encoded by the cDNA sequence contained in cDNA Clone ID NO: Z, which is hybridizable to SEQ ID NO: X.

4. The isolated nucleic acid molecule of claim 1, wherein the polynucleotide fragment comprises the entire nucleotide sequence of SEQ ID NO: X or the cDNA sequence-contained in cDNA Clone ID NO: Z, which is hybridizable to SEQ ID NO: X.

5. The isolated nucleic acid molecule of claim 2, wherein the nucleotide sequence comprises sequential nucleotide deletions from either the C-terminus or the N-terminus.

6. The isolated nucleic acid molecule of claim 3, wherein the nucleotide sequence comprises sequential nucleotide deletions from either the C-terminus or the N-terminus.

7. A recombinant vector comprising the isolated nucleic acid molecule of claim 1.

8. A method of making a recombinant host cell comprising the isolated nucleic acid molecule of claim 1.

9. A recombinant host cell produced by the method of claim 8.

10. The recombinant host cell of claim 9 comprising vector sequences.

11. An isolated polypeptide comprising an amino acid sequence at least 90% identical to a sequence selected from the group consisting of:
(a) a polypeptide fragment of SEQ ID NO: Y or the encoded sequence contained in cDNA Clone ID NO: Z;
(b) a polypeptide fragment of SEQ ID NO: Y or the encoded sequence contained in cDNA Clone ID NO: Z, having biological activity;
(c) a polypeptide domain of SEQ ID NO: Y or the encoded sequence contained in cDNA Clone ID NO: Z;
(d) a polypeptide epitope of SEQ ID NO: Y or the encoded sequence contained in cDNA Clone ID NO: Z;
(e) a full length protein of SEQ ID NO: Y or the encoded sequence contained in cDNA Clone ID NO: Z;
(f) a variant of SEQ ID NO: Y;
(g) an allelic variant of SEQ ID NO: Y; or
(h) a species homologue of the SEQ ID NO: Y.

12. The isolated polypeptide of claim 11, wherein the full length protein comprises sequential amino acid deletions from either the C-terminus or the N-terminus.

13. An isolated antibody that binds specifically to the isolated polypeptide of claim 11.

14. A recombinant host cell that expresses the isolated polypeptide of claim 11.

15. A method of making an isolated polypeptide comprising:
(a) culturing the recombinant host cell of claim 14 under conditions such that said polypeptide is expressed; and
(b) recovering said polypeptide.

16. The polypeptide produced by claim 15.

17. A method for preventing, treating, or ameliorating a medical condition, comprising administering to a mammalian subject a therapeutically effective amount of the polynucleotide of claim 1.

18. A method of diagnosing a pathological condition or a susceptibility to a pathological condition in a subject comprising:
(a) determining the presence or absence of a mutation in the polynucleotide of claim 1; and
(b) diagnosing a pathological condition or a susceptibility to a pathological condition based on the presence or absence of said mutation.

19. A method of diagnosing a pathological condition or a susceptibility to a pathological condition in a subject comprising:
(a) determining the presence or amount of expression of the polypeptide of claim 11 in a biological sample; and
(b) diagnosing a pathological condition or a susceptibility to a pathological condition based on the presence or amount of expression of the polypeptide.

20. A method for identifying a binding partner to the polypeptide of claim 11 comprising:
(a) contacting the polypeptide of claim 11 with a binding partner; and
(b) determining whether the binding partner effects an activity of the polypeptide.

21. The gene corresponding to the cDNA sequence of SEQ ID NO: Y.

22. A method of identifying an activity in a biological assay, wherein the method comprises:
(a) expressing SEQ ID NO: X in a cell;
(b) isolating the supernatant;
(c) detecting an activity in a biological assay; and
(d) identifying the protein in the supernatant having the activity.

23. The product produced by the method of claim 20.

24. A method for preventing, treating, or ameliorating a medical condition, comprising administering to a mammalian subject a therapeutically effective amount of the polypeptide of claim 11.

The application's sequence listing, which the Patent Office published only in electronic form, follows.

SEQUENCE LISTING (4360 sequences)

SEQ ID NO: 1 - DNA, 733 bp, Homo sapiens
gggatccggagcccaaatcttctgacaaaactcacacatgcccaccgtgcccagcacctgaattcgagggtgcaccgtcagtcttcctcttccccccaaaacccaaggacaccctcatgatctcccggactcctgaggtcacatgcgtggtggtggacgtaagccacgaagaccctgaggtcaagttcaactggtacgtggacggcgtggaggtgcataatgccaagacaaagccgcgggaggagcagtacaacagcacgtaccgtgtggtcagcgtcctcaccgtcctgcaccaggactggctgaatggcaaggagtacaagtgcaaggtctccaacaaagccctcccaacccccatcgagaaaaccatctccaaagccaaagggcagccccgagaaccacaggtgtacaccctgcccccatcccgggatgagctgaccaagaaccaggtcagcctgacctgcctggtcaaaggcttctatccaagcgacatcgccgtggagtgggagagcaatgggcagccggagaacaactacaagaccacgcctcccgtgctggactccgacggctccttcttcctctacagcaagctcaccgtggacaagagcaggtggcagcaggggaacgtcttctcatgctccgtgatgcatgaggctctgcacaaccactacacgcagaagagcctctccctgtctccgggtaaatgagtgcgacggccgcgactctagaggat

SEQ ID NO: 2 - protein, 5 aa, Homo sapiens
  MISC_FEATURE (3): Xaa equals any of the twenty naturally occurring L-amino acids
WSXWS

SEQ ID NO: 3 - DNA, 86 bp, Artificial Sequence
  Contains 4 tandem copies of the GAS binding site found in the IRF1 promoter (Rothman et al., Immunity 1:457-468 (1994)), 18 nucleotides complementary to the SV40 early promoter,and a Xho I restriction site.
gcgcctcgagatttccccgaaatctagatttccccgaaatgatttccccgaaatgatttccccgaaatatctgccatctcaattag

SEQ ID NO: 4 - DNA, 27 bp, Artificial Sequence
  Contains a Hind III restriction site.
gcggcaagctttttgcaaagcctaggc

SEQ ID NO: 5 - DNA, 271 bp, Artificial Sequence
  Contains GAS binding sites found in the IRF1 promoter (Rothman et al., Immunity 1:457-468 (1994)).
ctcgagatttccccgaaatctagatttccccgaaatgatttccccgaaatgatttccccgaaatatctgccatctcaattagtcagcaaccatagtcccgcccctaactccgcccatcccgcccctaactccgcccagttccgcccattctccgccccatggctgactaattttttttatttatgcagaggccgaggccgcctcggcctctgagctattccagaagtagtgaggaggcttttttggaggcctaggcttttgcaaaaagctt

SEQ ID NO: 6 - DNA, 32 bp, Artificial Sequence
  Contains a Xho I restriction site.
gcgctcgagggatgacagcgatagaaccccgg

SEQ ID NO: 7 - DNA, 31 bp, Artificial Sequence
  Contains a Hind III restriction site.
gcgaagcttcgcgactccccggatccgcctc

SEQ ID NO: 8 - DNA, 12 bp, Homo sapiens
ggggactttccc

SEQ ID NO: 9 - DNA, 73 bp, Artificial Sequence
  Contains 4 tandem copies of the NF-KB binding site, 18 nucleotides complementary to the 5' end of the SV40 early promoter sequence, and a XhoI restriction site.
gcggcctcgaggggactttcccggggactttccggggactttccgggactttccatcctgccatctcaattag

SEQ ID NO: 10 - DNA, 256 bp, Artificial Sequence
  Contains NF-KB binding sites.
ctcgaggggactttcccggggactttccggggactttccgggactttccatctgccatctcaattagtcagcaaccatagtcccgcccctaactccgcccatcccgcccctaactccgcccagttccgcccattctccgccccatggctgactaattttttttatttatgcagaggccgaggccgcctcggcctctgagctattccagaagtagtgaggaggcttttttggaggcctaggcttttgcaaaaagctt

SEQ ID NO: 11 - DNA, 328 bp, Homo sapiens
  misc_feature (148)..(148): n equals a,t,g, or c
ctctgccacccttgtaaacagcaagaccaacccttcctcctcttcttcctcagactgctcaacatgtaagatgatgatgatgaagagttttatgatgatccacttccacttaatgaatagtaaatatattttctcttccttatgattntcttaataacattttcttttctstactaaaaatacaaaaattagccaggcttggtggcacatgcctgtwatcccagctactcggcaggctgaggcacaggaattgcctgaacgcaggtgtaagagattgcagtcagccgagattgtgccacttcactccagccagggccaaacagcaaaa

SEQ ID NO: 12 - DNA, 354 bp, Homo sapiens
ggcacgagggaagagggggctatggtggaagaggctatggagatccatatggaggaggtggtggtggtggtggtggtggtggtggaggaggtggatatagaagatactaaaaactataaaaattagatagcagtgcttgcttctttatagatacattagaaatagtgttccaaataacatacttgaatatcatctttgaagtaaacaccatgttagactccctggtgataccactcttgaattggttaatatgtaagaacattgttttttattaccagttgatctctcaaatgaagtgatgactttttccatattctgtgtacccttgagcatgttgtgtctttttaaaaaaaa

SEQ ID NO: 13 - DNA, 2347 bp, Homo sapiens
aattcggcacgmgctgaggaccgcacggaaacggggaagtcaggtggccgctgccgccgccgccgccgcggtttgtcgccagaaggaagatggcggatctggaggagcagttgtctgatgaagagaaggtgcgtatagcagcaaaattcatcattcatgcccctcctggagaatttaatgaggttttcaatgatgttcggttactgcttaataatgacaatcttctcagggaaggagcagcccatgcatttgcacagtataacttggaccagtttactccagtaaaaattgaaggttatgaagatcaggtattgataacagaacatggcgacttgggaaatggaaagtttttggatccaaagaacagaatctgttttaaatttgatcacttaaggaaggaggcaactgatccaagaccctgtgaagtagaaaatgcagttgaatcatggagaacttcagtagaaactgctctgagagcttacgtaaaagaacattacccgaatggagtctgcactgtgtatggcaaaaaaatagatggacagcaaaccattattgcatgcatagaaagccatcagttccaagcaaaaaatttttggaatggtcgttggaggtcagaatggaagtttacaatcactccttcaaccactcaagtggttggcatcttgaaaattcaggttcattattatgaagatggtaatgttcagctagtgagtcataaagatatacaagattccctaacagtgtctaatgaagtgcaaacagcaaaagaatttataaagattgtagaagctgcagaaaatgaataccagactgccatcagtgagaattatcagacaatgtcggacactactttcaaagccttacgtcgacagttgccagttacacgcactaagattgattggaacaagatccttagctacaagattggcaaagagatgcagaatgcataagatgaacattgcatgaccggatcattttagtgtctttgcgttaaaaaatcattgcaaaagtattctgaactgtcaagctgcccagtcagatgggctgttgccatttaaaatcactgtaattaattagtttgattagagcacaaagcttagctaatcaaccattatttttcattttgtttgttctaagaggattgaaaatcagtttagtttaaatgtctttctgttaggcctttctttcttacaatgaagagatgattcttctagtttatggttaaaagtttttgaagtgtctcaaaaatattttactaactgtaaccctaaaattgatgtcttttggtttatgaaatcagtaatttttgatatttccccagttctttttaatggggtcaataatggacattctagtttaaggtggttgatggatttagccatatatgctgctaaagaaattgtctaccttttcttcctcacctgttccatttatgtaaagttgagattagagggaaagcattttctatatcaattgtgtttaaacctttcaagaaggttatttagctagcttagtgttgaactaaattttttttaaacaaggcaaggtctaatgctgttttgagattctgaaattaatgaaaatacttatttcagaaatgcatttaatgctttttttcttgtgacagttacgcaaatcagcttgaattccatatgtccctgagttatttttatcataaagccacaaatgtattataacaaggcaaattgtaatatatataatcctgaactcatgaccatgtctcggtttattttttttttcttggattgaaaagtactgaaattcaatgtgacattaaaatgcaaattttcctatttatttgagtagaaaatcacttaccagtgagcatatatattttaaaatactttctttggatattgtaattcttaactggttgtaaattagaaaagctgggattacatatggtgtgcggttacagtctaaattttttcatcctcctatgcatcataagcatgtttgtaatattttcaaaaatagttctactgatgctacaggaatttcaagcctgtggtgaatgttagtatttaccatagggagtgaagtggagttatggtttcattcaatagagtattgcygattatacttgagtggaatcctttcctcacgtactcccacagacgtctgggcctggaaattttttttttattttattttattgtttttttttttagaaaaacaccacttttattatgtacaataaaatatttcattagcttgaattgtatagatttttaaaaattcaatgaaagcatgttgtttaatttctttttaaaatcactgttgggctttgaaagcattgagaatataatatgaaattatgaaaaaa

SEQ ID NO: 14 - DNA, 878 bp, Homo sapiens
ttttttttttttttttttttttttttttttttttttttttttttttgagacagattcttgctttgtcacccaggctggagtacagcagcgcgatctcagctcacggcaaactcagcctcccgagttcaagtgattctcatgtgtgtcaccacacccggctaatttttgtatttttagtagagacagggtttcaccatgttggctggtctcttctgaactcccagcctcaagtgatctgcccacctcagcctcccaaagtgctgggattacaggtgtgagccgctgcacctggccggccagggacattgccaaacatcctacaacgcacaggaaagttccccatagcaaataaatatcagcccaaggccgggtgcagtggcctaatgcctacaatcccgacactctgtaaggctaagccaggagaattgctggaacccaggatttcaagaccagcctggacaacatagtgagracttgactctacaaggaaaaagaaagtcaaaacacatttagctaggtatatggtacatgcctatggtctcagctactcaggaggctcaggcaggagcctcctgttcaaggagcccaggagttcaggctgcaacgagctgtgatggctcgacagagtgaaactatctcagaaacaaaaagaaaaatccagcccaaaatgtcaatagtgccaaatttaagaaactgctctaacagagcaataacttccttaacacacctctccattacttgaaatttccagtctaaatgaaatttaagggctgggcgtgggagactcacgcctgtaatcccagcactttggcctaggcgggcggatcacctgaggtcaggagttcgagaccagcctgaccacggcacgagctcgtgcc

SEQ ID NO: 15 - DNA, 1314 bp, Homo sapiens
  misc_feature (572)..(572): n equals a,t,g, or c
  misc_feature (1177)..(1177): n equals a,t,g, or c
  misc_feature (1284)..(1284): n equals a,t,g, or c
  misc_feature (1295)..(1295): n equals a,t,g, or c
  misc_feature (1306)..(1306): n equals a,t,g, or c
gctgggggctggtggggagcaggggaagggaatgtgaccaggtctaggtctggagtttcagcttggacactgagccaagcagacaagcaaagcaagccaggacacaccatcctgccccaggcccagcttctctcctgccttccaacgccatggggagcaatctcagcccccaactctgcctgatgccctttatcttgggcctcttgtctggaggtgtgaccaccactccatggtctttggcccggccccagggatcctgctctctggagggggtagagatcaaaggcggctccttccgacttctccaagagggccaggcactggagtacgtgtgtccttctggcttctacccgtaccctgtgcagacacgtacctgcagatctacggggtcctggagcaccctgaagactcaagaccaaaagactgtcaggaaggcagagtgcagagcaatccactgtccaagaccacacgacttcgagaacggggaatactggccccggtctccctactacaatgtgagtgatgagatctctttccactgctatgacggttacactctccggggctctgcnaatcgcacctgccaagtgaatggccggtggagtgggcagacagcgatctgtgacaacggagcggggtactgctccaacccgggcatccccattggcacaaggaaggtgggcagccagtaccgccttgaagacagcgtcacctaccactgcagccgggggcttaccctgcgtggctcccagcggcgaacgtgtcaggaaggtggctcttggagcgggacggagccttcctgccaagactccttcatgtacgacacccctcaagaggtggccgaagctttcctgtcttccctgacagagaccatagaaggagtcgatgctgaggatgggcacggcccaggggaacaacagaagcggaagatcgtcctggacccttcaggctccatgaacatctacctggtgctagatggatcagacagcattggggccagcaacttcacaggagccaaaaagtgtctagtcaacttaattgagaaggtggcaagttatggtgtgaagccaagatatggtctagtgacatatgccacataccccaaaatttgggtcaaagtgtctgaagcagacagcagtaatgcaggactgggtcacggaagcagcttcaatgraantcaattwttgaagaccacaagtttgaagtcaggggcttaacaccaaggaagggccctccagggagttgttacagcattgatgaggttgggccagatggacgttcccntccttgaaggnttgggaaccgncacccgcc

SEQ ID NO: 16 - DNA, 439 bp, Homo sapiens
  misc_feature (10)..(10): n equals a,t,g, or c
  misc_feature (33)..(33): n equals a,t,g, or c
  misc_feature (68)..(68): n equals a,t,g, or c
tcccccgggnctggcaggaattcggccagtagncccaatgtctgttgttcccttctttgtgtttatgnagttctcatcatttagctcccacttataagtgagaacgtgtggtgtttggttttctgttcctttcttagtttgctgaggataatggcctcaagatccatctgtgttcctacaaaagagatgatcttgttcttttttatgattgcacatcttttgttctaacgtttggtccttcaccttggttcctgacacaaggattcctaaatcccttggaattttctgcatgataggagcgtcctttgttctcatgaggtgactcttggtgggctccttatttggggactggtcaccaaaaatacctaactatggttggaagcttagtgctttcagccccattccccatcctctggggtggggagcagagctggagctc

SEQ ID NO: 17 - DNA, 1108 bp, Homo sapiens
  misc_feature (389)..(389): n equals a,t,g, or c
  misc_feature (397)..(397): n equals a,t,g, or c
tgcttatccttgtgctgatgtttgtggtatggatgaaacgccgggataaagaacgccaggccaaacaacttttaattgatccagaagatgatgtaagagataatattttaaaatatgatgaagaaggtggaggagaagaagaccaggactatgacttgagccagctgcagcagcctgacactgtggagcctgatgccatcaagcctgtgggaatcygacgaatggatgaaagacccatccacgccgagccccagtatccggtccgatctgcagccccacaccctggagacattggggacttcattaatgagggccttaaagcggctgacaatgaccccacagctccaccatatgactccctgttagtgtttgactatgaaggcagtggntccactgntgggtccttgagctcccttaattcctcaagtagtggtggtgagcaggactatgattacctgaacgactgggggccacggttcaagaaacttgctgacatgtatggtggaggtgatgactgaacttcagggtgaacttggtttttggacaagtacaaacaatttcaactgatattcccaaaaagcattcagaagctaggctttaactttgtagtctactagcacagtgcttgctggaggctttggcataggctgcaaaccaatttgggctcagagggaatatcagtgatccatactgtttggaaaaacactgagctcagttacacttgaattttacagtacagaagcactgggattttatgtgcctttttgtacctttttcagattggaattagttttctgtttaaggctttaatggtactgatttctgaaacgataagtaaaagacaaaatattttgtggtgggagcagtaagttaaaccatgatatgcttcaacacgcttttgttacattgcatttgcttttattaaaatacaaaattaaacaaamaaaaaaactcatggagcgattttattatcttgggggatgagaccatgagattggaaaatgtacattacttctagttttagactttagtttgtttttttttttttttcactaaaatcttaaaacttactcagctggttgcaaataaagggagttttcatatcacc

SEQ ID NO: 18 - DNA, 1175 bp, Homo sapiens
gtacatccatagatgttttaacakkacaagaggattttagaaaaacattkggtattgatgkatggtgaaaatcagatggttttatctaacagttgaaactgattacttgttaaatcttkatwccatcctgcttcttgattataataggcacaaaattctgkaatgaacaaagaatgagtacttttccgtktaattttgcatactagctwwaattkttctttttaaaakaacttcaaggaaaaatggggtcaaccctgkgcyatgagattttgtactagtttattcaaaacagattccttttyttycctttgccaagtggagcacagtgtccatagacctagatggaaaataatctttgaggaaaaacaaggttttatttaaagaattacgcaggttgacatagtttaaactttggatgcccctctgaataaattgtatgtaaaataacgtagctatttaaaataacatgatttcccttatctcataatctaaaataagaatttctaagagtggttgagggaagggagtaggaaaagaaaagcattttttgtttgtttttgtcaaaattgttttaacattcacctcagaagctgtatatacatttcattcatataacccttaaagaaagcatttagctggccaaatctttgcatgtttatttaacatctatgaatacatccatatgttcatacagataatttccattttaatgtttgtttttactaaattacagcagtatggaatgtttaatcatttgagtcatgtttttgctttgcagtttcctcaagtgtctgataccacctatgtaagtggtttttcagaaaaagcttacaacatttctgaagatatttgtaaattttttaaaaaactggccgggcacagttggctcatgcctgtaatcccaacactttgggaggctgagacaggtggatcacctgaggccaggaatttgagaccagcccagacaacatggcgaaacctcatctctattaaaaatacaaaaattagccggatgtggtgacacacacctgtagtcccagctacttgagaggctgaggcaagaattactcaaacagggagacagacagaggttgcagtgagccgagattgcaccactgcaytccagcctgggcgacagagtgagactctgtcttaaaaaaaaaaaaaaaaaaaaa

SEQ ID NO: 19 - DNA, 347 bp, Homo sapiens
  misc_feature (288)..(288): n equals a,t,g, or c
  misc_feature (328)..(328): n equals a,t,g, or c
  misc_feature (335)..(335): n equals a,t,g, or c
gggtcgacccacgcgtccggaccgcgcggctagtggtgtgaggatctgagccccgtggtggggggtggaggcggctcctgcratctaaagggacttgagactctcaccggccgcgcgccatgagggccctgtgggtgctgggcctctcctgcrtcctgctgaccttcgggtcggtccgarctgaygatgaagtcgatgtggatggtacagtggaagaggatctgggtaaaagtagagaaggttcaaggacagatgatgaagtagtacagagagaggaagaagctattncagttggatggattaaatgcatcccaaataagagaacttnagagagnaagtccagaaaa

SEQ ID NO: 20 - DNA, 688 bp, Homo sapiens
gaggaaggcctctttgcagttgagataagaggaaggcatctgtctcctgctcgtccccgggaatggaatgtcttggtgtaaaacccgaacgtacattctatttactgagatgggagaaaactgccttatggctggaggtgagacatgctggcgacaatactgctctttactgcactgagatgtttgtgtaaagtcaaacataaatctggcctacaagcacatcgaggcacagcacctttccttaaacttatttatgacacagagtcctttgttcacatgttttcctgctgaccctctccccaccctgccacatccccctcaccaagatagtagagatagtgatcaataaatactgagggaactcagagaccagagccggtgcgggtcctccatatgctgagcgctggtcctctgggcccactgttctttctctatactttgtctctgtgtcttatttcttttctcagtctctcatcacacctgatgagaaatacccacaggtgtggaggggctggcccccttcaaagacaatcctaagcaaaaagaacaaaactggaggcatcatgctacctgacttcaaaggatactacaaggctacagtaaccaaaacagcatggtactggtaccaaaaacagagagattaaccaatggaagagaacagagcctcagaaataataccatacatcta

SEQ ID NO: 21 - DNA, 750 bp, Homo sapiens
  misc_feature (701)..(701): n equals a,t,g, or c
  misc_feature (731)..(731): n equals a,t,g, or c
gggtggcttccttgtggttcctcagtggtgcctgcaacccctggttcacctccttccaggttctggctccttccagccatggctctcagagtccttctgttaacagccttgaccttatgtcatgggttcaacttggacactgaaaacgcaatgaccttccaagagaacgcaaggggcttcgggcagagcgtggtccagcttcagggatccagggtggtggttggagccccccaggagatagtggctgccaaccaaaggggcagcctctaccagtgcgactacagcacaggctcatgcgagcccatccacctgcaggtccccgtggaggccgtgaacatgtccctgggcctgtccctggcagccaccaccagcccccctcagctgctggcctgtggtcccaccgtgcaccagacttgcagtgagaacacgtatgtgaaagggctctgcttcctgtttggatccaacctacggcagcagccccagaagttcccagaggccctccgagggtgtcctcaagargatagtgacattgccttcttgattgatggctctggtagcatcatcccacatgactttcggcggatgaaggartttgtctcaactgtgatggagcaattaaaaaagtccaaaaccttgttctctttgatgcagtactctgaagaattccggattcactttacttcaaagagttccagaacaancctaacccaagatcactggtgaagccaatnacgcagctgcttggggcgg

SEQ ID NO: 22 - DNA, 884 bp, Homo sapiens
ggcggatgaagccacgcgacgtgttgtgtctgagatcccggtgctgaagactaacgccggaccccgagatcgtgagttgtgggtgcagcgactgaaggaggaatatcagtcccttatccggtatgtggagaacaacaagaatgctgacaacgattggttccgactggagtccaacaaggaaggaactcggtggtttggaaaatgctggtatatccatgacctcctgaaatatgagtttgacatcgagtttgacattcctatcacatatcctactactgccccagaaattgcagttcctgagctggatggaaagacagcaaagatgtacaggggtggcaaaatatgcctgacggatcatttcaaacctttgtgggccaggaatgtgcccaaatttggactagctcatctcatggctctggggctgggtccatggctggcagtggaaatccctgatctgattcagaaggcgtcatccaacacaaagagaaatgcaaccaatgaagaatcaagccactgaggcagggcagagggacctttgataggctacgatactattttcctgtgcatcacacttaactcatctaactgcttccccggacaccctccacctctagttgttactaagtagctgcagtaggcattgctggggaagaaacaaacacacaccaaacagtactgctacttagtttctaaggctgcacagggaagggaaagactgggctttggacaatctagaggtaatttatatccgcccccaggtggagcaacatgcgattctggaggcacgggggtaactgaaagtgagtacatatagtctttctggtttctggagataacccatcaataaaagctgcttcctctggtaaaaaaaaaaaaaaaaaaaa

SEQ ID NO: 23 - DNA, 847 bp, Homo sapiens
  misc_feature (15)..(15): n equals a,t,g, or c
ccacgcgtccgcggnacgcgtgggtgaatctggggtagatttaggtgctaggaatattgtttcttgagttcttgacaggtgcagcttcggggctgcattccttctgtctcctaattttcatctctttatcmggtgatagtagaaaaggctcccaaagctcggataggagacctggacaaaaagaaatacctggtgccttctgatctcacagttggtcagttctacttcttgatccggaagcgaattcatctccgagctgaggatgccttgtttttctttgtcaacaatgtcattccacccaccagtgccacaatgggtcagctgtaccaggaacaccatgaagaagacttctttctctacattgcctacagtgacgaaagtgtctacggtctgtgaagctgctgcccctgagctggaggggggtctcattctacaaagagagaggtggcccccctttcttgacctcctcctccttcaagctcaaacaccacctcccttattcaggaccggcacttcttaatgtttgtggctttctctccagcctctcttaggaggggtaatggtggagttggcatcttgtaactctcctttctcctttcttcccctttctctgcccgcctttcccatcctgctgtagacttcttgattgtcagtctgtgtcacatccagtgattgttttggtttctgttccctttctgactgcccaaggggctcagaaccccagcaatcccttcctttcactaccttcttttttgggggtagttggaagggactgaaattgtggggggaaggtaggaggcacatcaataaagaggaaaccaccaagctaaaaaaaaaaaaaaaaaaa

SEQ ID NO: 24 - DNA, 516 bp, Homo sapiens
  misc_feature (457)..(457): n equals a,t,g, or c
gaattcggcacgagccaccctgcccgcgaacagccagcgctggaggagcgccgggagactctgccgtcggtgcgtgcgcggacacgcacccgtcccccttggtctcgccgccagccatggccgccgctacggcctccccccgcagcctccttgttctcctccaggtggtagtgctcgctctggcgcagattagaggtccaccgggagagcggggccccccgggtcccccgggaccgccgggagtgcctggatccgacggcatcgacggtgacaatgggccccctggaaaagctggccctccgggacccaagggcgagcctggcaaagctgggccagatgggccagacgggaagcccgggattgatggtttaactggagccaagggggagcctggccccatggggatccctggagtcaagggccagcccgggcttctggtcctcctggccttccgggncctggtttttctggaactctggggctcctggaactgttgcctccctggtaaattgaatc

SEQ ID NO: 25 - DNA, 544 bp, Homo sapiens
  misc_feature (2)..(2): n equals a,t,g, or c
  misc_feature (5)..(6): n equals a,t,g, or c
  misc_feature (10)..(10): n equals a,t,g, or c
  misc_feature (12)..(12): n equals a,t,g, or c
cnaanntgananaaccctcactaaagggaacaaaagctggagctccaccgcggtggcggccgctctagaactagtggatcccccgggctgcaggaattcggcacgagagaaaaattatttgtatataactttaaaaggagtagaagggctttttgcagagttattacgtttgaagtatactttatttcttgaaaaaattacagattttttgtaaataatgatgtaattcaactctcaaaatatttcctactgtttctttattccagttgtattcacatgtgaaagcatgtgatcagttattgctgcattaaaaacatgagtcttttttattaggtggccattatttatgatcttttctatgaaagagtaaggacattaaaatgtaagatgcatgatgaaaaattaagtgaagaggctctttatggttaatttatattgaataatgcattaggtaggtgttcagagtaatattttgcgttgtgagaacatttttaattttatttaaaattaaatgaaaataaattagtatattattgtactaatt

SEQ ID NO: 26 - DNA, 896 bp, Homo sapiens
ggcagagccccatgttaacccctccactcttcacccccaaaatcattacagacgtgagccactccatgtggtgtattctggacattttgacacacaaaaagggaaaatggcattcgaatagcagtagatttttaggtaactcctatactgatacttgagaagcactgctatagttctcccattatgaattttgcaagttgtatcccatggtgtaatgtaatgcattctttaatgtccctataaactgtcagttwagaatcwgatactttattgggtttgggggctgcaagattccctcaaatgttawtgtgtgctgctactgcttttaattagaaaatgcataatgttgggtgtgcccattcttagtggaatcatgaaagcttgcttcattcttccattaacaggagtctactcttcatcttgtgttgagacttcgtggtggtgctaagaaaaggaagaagaagtcttacaccactcccaagaagaataagcacaagagaaagaaggttaagctggctgtcctgaaatattataaggtgagccagttaaagggcagaatgtcagcaaagtcttggcttatttggaaaacttaatctttatagtacttgtcaatatttycttggacttaaacacccaatattatcccactttggtttaaatgaggtattctggaaatgagaaattcagactttctggggtttttcctgtttggtatttgaaatcagttatgtaatagggttctgagtttaaagtcgggtttgggttcaggtctttacctttgtctaccacttgcaaagctggcctttagtgttcaaaagtcccaagacttctgaatgttttcattgtagcaatgataactggtgagaatttagggtgctttggtttgtaagcaccaa

SEQ ID NO: 27 - DNA, 1012 bp, Homo sapiens
  misc_feature (583)..(583): n equals a,t,g, or c
  misc_feature (630)..(630): n equals a,t,g, or c
  misc_feature (638)..(638): n equals a,t,g, or c
  misc_feature (1009)..(1009): n equals a,t,g, or c
ggccaccccggccggacgcctgccacttgctgtcactgtgccgctgtcatggcrcgctccgggagtgccacgccacctgcccgggctccgggagcccctccacggagcccaccccagaggctgggatgtcagtgggcccctgagggagctgcgccctcggctctgccacctgcgaaagggacctcagggctatgggttcaacctgcatagtgacaagtcccggcccggccagtacatccgctctgtggacccgggctcacctgccgcccgctctggcctccgmgcccaggaccggctcattgaggtgaacgggcagaatgtggagggactgcgccatgctgaggtggtggccagcatcaaggcacgggaggacgaggcccggctgctggtcgtggaccccgagacagatgaacacttcaagcggcttcgggtcacacccaccgaggagcacgtggaaggtcctctgccgtcacccgtcaccaatggaaccagccctgcccagctcaatggtggctctgcgtgctcgtcccgaagtgacctgcctggttccgacaaggacactgaggatggcagtgcctggwangcaagatcccttccaggagagcggcctccacctgagccccacggcgnccgaggcnaaggagaaggctcgagccatgcagtcaacaagcgcgcgccacagatggactggaacaggaagcgtgaaatcttcagcaacttctgagccccttcctgcctgtctcgggaccctgggacccctcccgcacggaccttgggcctcagcctgccccgagctcccccagcctcagtggactggagggtggtcctgccattgcccagaaatcagccccagccccggtgagcccycatcctgcccctgcccaccaggtactgggggcctgtggyagcaagatagggggagagagacccagagatgtgagagagagtcagagacagagacagagagagagagagagagacacagagagagacagagagagagcgagcnagc

SEQ ID NO: 28 - DNA, 1024 bp, Homo sapiens
  misc_feature (5)..(5): n equals a,t,g, or c
  misc_feature (9)..(9): n equals a,t,g, or c
  misc_feature (16)..(16): n equals a,t,g, or c
  misc_feature (19)..(19): n equals a,t,g, or c
  misc_feature (21)..(21): n equals a,t,g, or c
cgggncttnagggggnatnanggaactctcggcctttacgttcaacattagcattgagatgtgaggtactattctattgtaacgctatttgttgcctgagtacctgaaaacctggaagcgttcccttgaaaactgacacaagacaaagatgccctctctcaccactcctattcaacacagtattagaaattctcaccaaggcaatcaggcaagagaaagaaagaaaagctattcaaataggaagacaggaagtcaaactatctttgtttgcagatgatatgatcctatatctagaaaactccatcatctcagctcaaaaacttcttagctgataagcaacttcaacaaagtctcaggatacaaaatcaatgtgcaaaagtcactagcattcctatacaccaacaacaggcaakccgagagaaaactcatgaattaactcccattcacaattgccacaagaagagtataatacctaggaatacagctaacaagaaaagtgaaggaccttttcaaggataactataaaccattattcaaagaaatcagagatgacacaaacaaatggaaaaacatatgctcacagacagkaaggttcaatatcgtgaaaatgaccacactgcccaaggcaatctgtaaattaaatgctaggcccattaaactactattcacattctttacagacctagaaaaagctattttaaaattcatatggaaccaaaaaagagcccaaatagccaagacaatcctaagcaagaagagcaaagctagaggcatcatgctacccagcttcaaacatactacaagactacagtaaccaaaacagcatagtgctggtacaagaaccgacacatagaccaatggaacagaatagagaacccagaaataagaccacacacctacaaccatgtgatctttgacaaacctgatcaaaggaagcaatggggaaaagattccctatttaataaatggtgctgggagaactggctagccatatgcagcaaattgctcgtgccgaattcggcac

SEQ ID NO: 29 - DNA, 442 bp, Homo sapiens
  misc_feature (419)..(419): n equals a,t,g, or c
  misc_feature (423)..(423): n equals a,t,g, or c
tcgacccacgcgtccgcctgtgggacgcggtggtggccgttgggtcgggagagtgagcggtatttgcmtcgtttttcttgcttgttttccccccgttagactttgtcggtagagcgcggttatgggccgcaagaagaagaagcagctgaagccgtggtgctggtattgtaatagagattttgatgatgagaagattcttatacaacaccaaaaagcaaaacattttaaatgtcatatatgtcataagaagttgtacacaggacctggcttagctattcattgcatgcaggtgcataaagagacaatagatgctgtaccaaatgcatacctgggagaacagacatkgattggaaatatatggtatggaargtattccagaaaaagatatkgatgaaagaagacgacttcttggaacaganaacnccagagagtccaaaaaaag

SEQ ID NO: 30 - DNA, 830 bp, Homo sapiens
ccacgcgtccgcatgcctatcatatagtaaaacccagcccatgacccctaacaggggccctctcagccctcctaatgacctccggcctagccatgtgatttcacttccactccataacgctcctcatactaggcctactaaccaacacactaaccatataccaatgatggcgcgatgtaacacgagaaagcacataccaaggccaccacacaccacctgtccaaaaaggccttcgatacgggataatcctatttattacctcagaagtttttttcttcgcaggatttttctgagccttttaccactccagcctagcccctaccccccaattaggagggcactggcccccaacaggcatcaccccgctaaatcccctagaagtcccactcctaaacacatccgtattactcgcatcaggagtatcaatcacctgagctcaccatagtctaatagaaaacaaccgaaaccaaataattcaagcactgcttattacaatttactgggtctctattttaccctcctacaagcctcagagtacttcgagtctcccttcaccatttccgacggcatctacggctcaacattttttgtagccacaggcttccacggacttcacgtcattattggctcaactttcctcactatctgcttcatccgccaactaatatttcactttacatccaaacatcactttggcttcgaagccgccgcctgatactggcattttgtagatgtggtttgactatttctgtatgtctccatctattgatgagggtcttaaaaaaaaaaaaaaaaaaaaaaaaaaaaaaaaaaaaaaaaaaaaaaaaaaa

SEQ ID NO: 31 - DNA, 667 bp, Homo sapiens
  misc_feature (82)..(82): n equals a,t,g, or c
  misc_feature (234)..(234): n equals a,t,g, or c
gcgggggaagcggggctgtagctgggcagggagagggcggacgaaatcggtagcgatctcggctgcggcgctgcccacttgncccggcccgcggggcgcgccctgacccttcatctttgggcaggctcgagggcgcgcgcacggttggcgttctggggcctcaaactcctgggccttgaccgggcaggccgcgtctccccgggtgtgagtccaccgggacccggccgccgcctnaagcgcgkgcgccacagaagcggcggcgcccgaagacgcgctcctggctcggcccgacagcctcgcttggccgccagttcttctgcagccgaaggcggttgttcttttaaagaattattgaagacgaaggtttttttctttttatttttttaatggytttacagaatcttaaatagaatacagtttgacatgacggcaaaaaatgttggtttgacttccacaaatgcagaagtaagaggatttatagatcagaatctcagtccaacaaaaggcaacatttcatttgttgcatttccagtttccaataccaactcacctacaaagattttaccaaaaaccttaggaccaataaatgtgaatgttggaccccaaatgtgatagaaaacgggctagaaaatttatagactctgatttttcagaaagtaaacgaagc

SEQ ID NO: 32 - DNA, 691 bp, Homo sapiens
  misc_feature (10)..(10): n equals a,t,g, or c
  misc_feature (579)..(579): n equals a,t,g, or c
  misc_feature (618)..(618): n equals a,t,g, or c
  misc_feature (639)..(639): n equals a,t,g, or c
  misc_feature (657)..(657): n equals a,t,g, or c
  misc_feature (672)..(672): n equals a,t,g, or c
attggcatcntctgaaagcgttttagacaggcagaatctctggtctcccctctctgcattccccacccagtgaatgaatgagaatctgcatttcttgagatcataagaatactgacatacagatgagataaaactcatgtgaatatcagttttaaggctggtggttcatttgttttggtcatattgagtcaggattgactaatgaactgtagaggttttgcattatgcaaatgctcttaatttcttgtattaggaattagacgctcccccccaagtcttaaataatgttttaatctgtatccttttattataagaagattagtaatattctacagataataacaacaactggtatagtatattttatttacattcttcattcttaggagaaaatgctgagaagcttctgcagttcaagcgttggttctggtcaatagtagagaagatgagcatgacagaacgacaagatcttgkttacttttggacwtcaagcccatcactgccagccagtgaagaaggattccagcctatgccctcaatcacaatawgaccaccagatgaccmacatcttcctactgnaaaatacttgcatttcttggactttaccttcccactctnttcctttaaacaggattcttnaaaccggaaattggttanctcgccatttagganccaaaaattttgggttttg

SEQ ID NO: 33 - DNA, 868 bp, Homo sapiens
  misc_feature (9)..(9): n equals a,t,g, or c
  misc_feature (40)..(40): n equals a,t,g, or c
  misc_feature (824)..(824): n equals a,t,g, or c
  misc_feature (838)..(838): n equals a,t,g, or c
  misc_feature (846)..(846): n equals a,t,g, or c
  misc_feature (868)..(868): n equals a,t,g, or c
ttcacaatnaactggctggaattgttgcttttgctgattntcgaaktgamaatmctctcatccgwttcctccgactcttcctttgcttcaactttggctggggctgcagcagcagcaggtgcagcagtggtggcagcggccacaggggcagcagccacaaatgcagatggatcagccaagaaggccttgaccttttcagcaagtggaaaggtgtaatcagtctccacagacaaagccaggacccgcttgtatccattgatgatagaatggggcactgatgccacagttgggtaacctatctgcagacatacgctggcaacattgcggacaccctccaggaagcgagaatgcagagtttcctctgtgatgtcaagcacttcagggttgtagatgctgccattgtcaaacacctgctggatgatcagcccaaaggagaagggggagatgttcagcatgttcagcagtgtggcttcactggctcccactttgtctccggtcttaatcagctgcacatcactcaggatttcaatggttcctctggagattttagtggtgatgcctaaagcctggaagaaggaggtcttctcgggccccagaccagtgttctgggctggcacagtgacctcacatggggctatggcaccagcacgggcggcagctggcaccttattggccagcagcatgtccctgatctcaagtgaggcctccttggtgaacacaaagccacattcccccggatatgaagtaacaggttttccagagctgggttggtcttcagatgcccttggatggccttgggcatcatgggggttcttgcccaatancacgaacaggcttnccacggangggcatgcggaactgctgaaan

SEQ ID NO: 34 - DNA, 824 bp, Homo sapiens
  misc_feature (523)..(523): n equals a,t,g, or c
gaattcggcacgaggagaaatttttcatttttgatttttaaaccattagagcagtagctgagcctttcaagtttctcagtcaagaattaggctatgagtagggacagttttcttctctgttttatttttatttttgttcccttagtgacattgcaggaatgctgctgaaatctacaggaagttttttagaatttggcttacaggagagctgtgctgaattttggactagtgcggatgacagcagtgcttccgacgaaatcaggttggagttgtgcttcctttccccttccacttcttatctcgtagtttccttcctcatggtgagatcctagaaggagccttgttcaaaccaaattgtgttggcctggaagaatttgggcagtagatgtaaagggatttatttataactgccttgtcttttcatgtgatttcttagttatggttttatgtgaaattttctttgaaggggaacttagaatttatttagtgtgataaaaatagtgccaactggctgggcgcggtngctcacgcctgtaatcccagtactttgggaggccgaggtgggtgaatcaccaggtcaggagttcaagaccagcctggccaagatggtgaaacctcgtctctactaaaaatacaaaaaaaacagctgggcgtggtggcacgcacccgtgatcccagctattcaggaggctgaggcagaaaatttcttgaacccaggaggcagaggttgcagtgagccaagatcatgccactgcactccagcctgggtgacagagcaagactccgtctcaaaaaaaaaaaaaaaaaaaaaaaaaaaaactcga

SEQ ID NO: 35 - DNA, 3353 bp, Homo sapiens
cccacgcgtccgggatgtgctgtgtcctgtctatgacctggacaacaacgtagccttcatcggcatgtaccagacgatgaccaagaaggcggccatcaccgtacagcgcaaagacttccccagcaacagcttttatgtggtggtggtggtgaagaccgaagaccaagcctgcgggggctccctgcctttctaccccttcgcagaagatgaaccggtcgatcaagggcaccgccagaaaaccctgtcagtgctggtgtctcaagcagtcacgtctgaggcatacgtcagtgggatgctcttttgcctgggtatatttctctccttttacctgctgaccgtcctcctggcctgctgggagaactggaggcagaagaagaagaccctgctggtggccattgaccgagcctgcccagaaagcggtcaccctcgagtcctggctgattcttttcctggcagttccccttatgagggttacaactatggctcctttgagaatgtttctggatctaccgatggtctggttgacagcgctggcactggggacctctcttacggttaccagggccgctcctttgaacctgtaggtactcggccccgagtggactccatgagctctgtggaggaggatgactacgacacattgaccgacatcgattccgacaagaatgtcattcgcaccaagcaatacctctatgtggctgacctggcacggaaggacaagcgtgttctgcggaaaaagtaccagatctacttctggaacattgccaccattgctgtcttctatgcccttcctgtggtgcagctggtgatcacctaccagacggtggtgaatgtcacagggaatcaggacatctgctactacaacttcctctgcgcccacccactgggcaatctcagtctgccttgtgttgccccttctagcgccttcaacaacatcctcagcaacctggggtacatcctgctggggctgcttttcctgctcatcatcctgcaacgggagatcaaccacaaccgggccctgctgcgcaatgacctctgtgccctggaatgtgggatccccaaacactttgggcttttctacgccatgggcacagccctgatgatggaggggctgctcagtgcttgctatcatgtgtgccccaactataccaatttccagtttgacacatcgttcatgtacatgatcgccggactctgcatgctgaagctctaccagaagcggcacccggacatcaacgccagcgcctacagtgcctacgcctgcctggccattgtcatcttcttctctgtgctgggcgtggtctttggcaaagggaacacggcgttctggatcgtcttctccatcattcacatcatcgccaccctgctcctcagcacgcagctctattacatgggccggtggaaactggactcggggatcttccgccgcatcctccacgtgctctacacagactgcatccggcagtgcagcgggccgctctacgtggaccgcatggtgctgctggtcatgggcaacgtcatcaactggtcgctggctgcctatgggcttatcatgcgccccaatgatttcgcttcctacttgttggccattggcatctgcaacctgctcctttacttcgccttctacatcatcatgaagctccggagtggggagaggatcaagctcatccccctgctctgcatcgtttgcacctccgtggtctggggcttcgcgctcttcttcttcttccagggactcagcacctggcagaaaacccctgcagagtcgagggagcacaaccgggactgcatcctcctcgacttctttgacgaccacgacatctggcacttcctctcctccatcgccatgttcgggtccttcctggtgttgctgacactggatgacgacctggatactgtgcagcgggacaagatctatgtcttctagcaggagctgggcccttcgcttcacctcaaggggccctgagctcctttgtgtcatagaccggtcactctgtcgtgctgtggggatgagtcccagcaccgctgcccagcactggatggcagcaggacagccaggtctagcttaggcttggcctgggacagccatggggtggcatggaaccttgcagctgccctctgccgaggagcaggcctgctcccctggaacccccagatgttggccaaattgctgctttcttctcagtgttggggccttccatgggcccctgtcctttggctctccatttgtccctttgcaagaggaaggatggaagggacaccctccccatttcatgccttgcattttgcccgtcctcctccccacaatgccccagcttgggactaaggcctctttttcctcccatactcccactccagggcctagtctggggcctgaatctctgtcctgtatcagggccccagttctctttgggctgtccctggctgccatcactgcccattccagtcagccaggatggatgggggtatgagattttgggggttggccagctggtgccagacttttggtgctaaggcctgcaaggggcctggggcagtgcgtattctcttccctctgacctgtgctcagggctggctctttagcaatgcgctcagcccaatttgagaaccgccttctgattcaagaggctgaattcagaggtcacctcttcatcccatcagctcccagactgatgccagcaccaggactggagggagaagcgcctcaccccttcccttccttctttccaggcccttagtcttgccaaaccccagctggtggcctttcagtgccattgacactgcccaagaatgtccaggggcaaaggagggatgatacagagttcagcccgttctgcctccatagctgtgggcaccccagtgcctaccttagaaaggggcttcaggaagggatgtgctgtttccctctacgtgcccagtcctagcctcgctctaggacccagggctggcttctaagtttccgtccagtcttcaggcaagttctgtgttagtcatgcacacacatacctatgaaaccttggagtttacaaagaattgccccagctctgggcaccctggccaccctggtccttggatccccttcgtcccacctggtccaccccagatgctgaggatgggggagctcaggcggggcctctgctttggggatgggaatgtgtttttctcccaaacttgtttttatagctctgcttgaagggctgggagatgaggtgggtctggatcttttctcagagcgtctccatgctatggttgcatttccgttttctatgaatgaatttgcattcaataaacaaccagactcagaaaaaaaaaaaaaaaaaaaaaaaaaaaaaaaaaaaaaaaaaaaaaaaaaa

SEQ ID NO: 36 - DNA, 1046 bp, Homo sapiens
aattcggcacgagcttctgttggtgttattttcaattctatttccagtgccacaatagagtgatatttaagcaactcctacaggcgaaggccctgcagttcctccagattgacagttgcagactgggcagtgtcaatgagaacctctcagtattgctgatggccaaaaagtttgaaattcctgtttgcccccatgctggtggagttggcctctgtgaactggtgcagcacctgattatatttgactacatatcagtttctgcaagccttgaaaatagggtgtgtgagtatgttgaccacctgcatgagcatttcaagtatcccgtgatgatccagcgggcttcctacatgcctcccaaggatcccggctactcaacagaaatgaaggaggaatctgtaaagaaacaccagtatccagatggtgaagtttggaagaaactccttcctgctcaagaaaattaagtgctcagccccaacaacttttttctttctgaagtgaaagggcttaaaatttcttggaaatagttttacaaaaatggatttaaaaaatcctaccgatcaagatgagttcagctagaagtcataccaccctcaggaatcagctaagtaattattacttgattcttttagcaaatcaatgcacgttatcctacttaatccttaaataagtttagatttaactaacccaaagtccaggaggatgttcttacaaaaatagctatatcaagggctggcacctagacattaaactgtaatttgaaaataagcaacatgttgcataacttgttggaataattccttgttctgtttaacacttgtcataaattagcagaataaaaatagtcgtgcaacaccgggggtatctggtatgcaacgaagggraaaatatttcactgattaaccccgaagtggttttgcatcttttccttgcttaatctaagcatattattagagaagtcacaccatgctgaagctaatgagggcaaaatggtagtccatagattattttaaaataaccctttaaggttataaaagtttaaaaaaaaa

SEQ ID NO: 37 - DNA, 419 bp, Homo sapiens
  misc_feature (384)..(384): n equals a,t,g, or c
cctgggcagagccggtggcaagggcctcccctgccgctgtgccaggcaggcagtgccaaatccggggagcctggagctggggggaaggccggggacagcccggccctgccccctcccccgctgggagcccagcaacttctgaggaaagtttggcacccatggcgtggcggtgccccaggatgggcagggtcccgctggcctggtgcttggcgctgtgcggctggggcgtgcatggcccccaggggcacgcargctgaagaaagtcccttcgtgggcaacccagggaatatcacaggtgcccggggactcacgggcacccttcggtgtcagctccaggttcagggagagccccccgaggtacattggcttcgggatggacagatnctggagctcgcggacagcacccagacccaggtgtt

SEQ ID NO: 38 - DNA, 921 bp, Homo sapiens
  misc_feature (851)..(851): n equals a,t,g, or c
  misc_feature (885)..(885): n equals a,t,g, or c
  misc_feature (895)..(895): n equals a,t,g, or c
  misc_feature (911)..(911): n equals a,t,g, or c
gccccctctgcagtacccccgcccctcttctcccaccacaatgagatcctaagatggcggtggctgcggcggttggcgctgcgtactgaggtcgaaaaggcggccactggggccgaggcagccaggaaacgtgtgggcctctctgctgcggtctccgagggccgaccgctgccggcggcgggtcgtgggggctgactgtcgctctgcctttgacaggagaggctgcttcttgtagaggaaacagctttgaagtgtggagcgggaaaggagcagtttctgagctgcaaaaactagtttctaaacagagagttaattgttaaatccagtatggccacaggaggaggtccctttgaagatggcatgaatgatcaggatttaccaaactggagtaatgagaatgttgatgacaggctcaacaatatggattggggtgcccaacagaagaaagcaaatagatcatcagaaaagaataagaaaaagtttggtgtagaaagtgataaaagagtaaccaatgatatttctccggagtcgtcaccaggagttggaaggcgaagaacaaagactccacatacgttcccacacagtagatacatgagtcagatgtctgtcccagagcaggcagaattagagaaactgaaacagcggataaacttcagtgatttagatcagagaagcattggaagtgattcccaaggtagagcaacagctgctaacaacaaacgtcagcttagtgaaaaccgaaagcccttcaactttttgcctatgcagattaatactaacaaggagcaaaggtgcattttacaagtcccccaaacagaggaaacggttgggttcagcacagtgttaaaggnttgttttgctttctggtttttaagtaattgaccnctttggccanacttttccgggtgttntgaaggaggt

SEQ ID NO: 39 - DNA, 834 bp, Homo sapiens
  misc_feature (533)..(533): n equals a,t,g, or c
  misc_feature (831)..(831): n equals a,t,g, or c
cctagaacgctttgcgtcccgacgcccgcaggtcctcgcggtgcgcaccgtttgcgacttggtacttggaaaaatggacaaggattgtgaaatgaaacgcaccacactggacagccctttggggaagctggagctgtctggttgtgagcagggtctgcacgaaataaagctcctgggcaaggggacgtctgcagctgatgccgtggaggtcccagcccccgctgcggttctcggaggtccggagcccctgatgcagtgcacagcctggctgaatgcctatttccaccagcccgaggctatcgaagagttccccgtgccggctcttcaccatcccgttttccagcaagagtcgttcaccagacaggtgttatggaagctgctgaaggttgtgaaattcggagaagtgatttcttaccagcaattagcagccctggcaggcaaccccaaagccgcgcgagcagtgggaggagcaatgagaggcaatcctgtccccatcctcatcccgtgccacagagtggtctgcagcagcgganccgtgggcaactactccggaggactggccgtgaaggaatggcttctggcccatgaaggccaccggttggggaagccaggcttgggagggagctcaggtctggcaggggcctggctcaagggagcgggagctacctcgggctccccscctgctggccgaaactgagtatgtgcagtaggatggatgtttgagcgacacacacgtgtaacactgcatcggatgcggggcgtggaggcaccgctgtattaaaggaagtggcagtgtcctgggaaaaaaaaaaaaaaaaaaaagaaaaaaanaaa

SEQ ID NO: 40 - DNA, 583 bp, Homo sapiens
  misc_feature (551)..(551): n equals a,t,g, or c
  misc_feature (574)..(574): n equals a,t,g, or c
ccccgggtcgacccacgcgtccgcccacgcgtccgcrcggccgactcgcaagatggcgccgcagaaagacaggaagcccaagaggtcaacctggaggtttaatttggaccttactcatccagtagaagatggaatttttgattctggaaattttgagcaatttctacgggagaaggttaaagtcaatggcaaaactggaaatctcgggaatgttgttcacattgaacgcttcaagaataaaatcacagttgtttctgagaaacagttctctaaaaggtatttgaaataccttaccaagaaataccttaagaagaacaatcttcgtgattggcttcgagtggttgcatctgacaaggagacctacgaacttcgttacttccagattagtcaagatgaagatgaatcagagtcggaggactaggcaaaggctccccttacagggctttgcttattaataaaataaatgaagtatacatgagaaataccaagaaattggcttttagtttatcagtgaataaaaaatattatactcttgaaaaaaaaaaaaaaanggcggccgttttaaagatccttnaggggccaa

SEQ ID NO: 41 - DNA, 454 bp, Homo sapiens
  misc_feature (425)..(425): n equals a,t,g, or c
  misc_feature (444)..(444): n equals a,t,g, or c
  misc_feature (451)..(451): n equals a,t,g, or c
gcgacggcgctggcttgcccggctgggagagggcgtaagcaaaatgatgcttcaacacccaggccaggtctctgcctcggaagtgagtgcttctgccatcgtcccctgcctgtcccctcctgggtcactggtgtttgaggattttgctaacctgacgccctttgtcaaggaagagctgaggtttgccatccagaacaagcacctctgccaccggatgtcctctgcgctggaatcagtcactgtcagcgacagacccctcggggtgtccatcacaaaagccgaggtagcccctgaagaagatgaaaggaaaaagaggcgacgagaaagaaataagattgcagctgcaaagtgccgaaacaagaagaaggagaagacggatgcctgcagaaagtgagtgccttctaaccttacccttctctcgctangcctgtctttaccaacttnatgtggntat

SEQ ID NO: 42 - DNA, 661 bp, Homo sapiens
  misc_feature (518)..(518): n equals a,t,g, or c
  misc_feature (567)..(568): n equals a,t,g, or c
  misc_feature (648)..(648): n equals a,t,g, or c
  misc_feature (660)..(660): n equals a,t,g, or c
acactatagaaatgtacgcctgcaggttaccggtccggaaattcccgggtcgacccacgcgtccggtggttgactctgaggatctgcccctgaaacatctcccgagaaatgctccagcagagcaaaatcttgtaaagtcattcgcaaaaacattgttaagaagtgccttgagctcttctctgagctggcagaagacaaggagaattacaagaaattctatgaggcattctctaaaaatctcaagcttggaatccacgaagactccactaaccgccgccgcctgtctgagctgctgcgctatcatacctcccagtctggagatgagatgacatctctgtcagagtatgtttctcgcatgaaggagacacagaagtccatctattacatcactggtgagagcaaagagcaggtggccaactcagcttttgtggarcgagtgcggaaacggggcttcsaagtggtwtatatgamcgarcccattgacrartwctgtgtgcagcarctcmaggaatttgawnggaararmctggtcycagttaccaaggaggtctggarctgcctgaggtnnaggagagaagaagaagatggaagagagcaaggcaagtttagaccttgcagctctgaagaatcttagttaaagttagaagngcatcccatagnt

SEQ ID NO: 43 - DNA, 1983 bp, Homo sapiens
gacctcagaggagtcaaggccccgcctgtcccagctgtctgtgactgacgtgaccaccagttcactgaggctcaactgggaggccccaccgggggccttcgactccttcctgctccgctttggggttccatcaccaagcactctggagccgcatccgcgtccactgctgcagcgcgagctgatggtgccggggacgcggcactcggccgtgctccgggacctgcgttccgggactctgtacagcctgacactgtatgggctgcgaggaccccacaaggccgacagcatccagggaaccgcccgcaccctcagcccagttctggagagcccccgtgacctccaattcagtgaaatcagggagacctcagccaaggtcaactggatgcccccaccatcccgggcggacagcttcaaagtctcctaccagctggcggacggaggggagcctcagagtgtgcaggtggatggccaggcccggacccagaaactccaggggctgatcccaggcgctcgctatgaggtgaccgtggtctcggtccgaggctttgaggagagtgagcctctcacaggcttcctcaccacggttcctgacggtcccacacagttgcgtgcactgaacttgaccgagggattcgccgtgctgcactggaagcccccccagaatcctgtrgacacctatgacrtccaggtcacagcccctggggccccgcctctgcaggcggagaccccaggcagcgcggtggactaccccctgcatgaccttgtcctccacaccaactacaccgccacagtgcgtggcctgcggggccccaacctcacttccccagccagcatcaccttcaccacagggctagaggcccctcgggacttggaggccaaggaagtgaccccccgcaccgccctgctcacttggactgagcccccagtccggcccgcaggctacctgctcagcttccacacccctggtggacagacccaggagatcctgctcccaggagggatcacatctcaccagctccttggcctctttccctccacctcctacaatgcacggytccaggccatgtggggccagagcctcctgccgcccgtktccacctctttcaccacgggtgggctgcggatccccttccccagggactgcggggaggagatgcagaacggagccggtgcctccaggaccagcaccatcttcctcaacggcaaccgcgagcggcccctgaacgtkttttgcgacatggagactgatgggggcggctggctggtgttccagcgycgcatggatggacagacagacttctggagggactgggaggactatgcccatggttttgggaacatctctggagagttctggctgggcaatgaggccctgcacagcctgacacaggcaggtgactactccatgcgcgtggacctgcgggctggggacgaggctgtgttcgcccagtacgactccttccacgtagactcggctgcggagtactaccgcctccacttggagggctaccacggcaccgcagggactccatgagctaccacagcggcagtgtcttctctgcccgtgatcgggaccccaacagcttgctcatctcctgcgctgtctcctaccgaggggcctggtggtacaggaactgccactacgccaacctcaacgggctctacgggagcacagtggaccatcagggagtgagctggtaccactggaagggcttcgagttctcggtgcccttcacggaaatgaagctgagaccaagaaactttcgctccccagcggggggaggctgagctgctgcccacctctctcgcaccccagtatgactgccgagcactgaggggtcgccccgagagaagagccagggtccttcaccacccagccgctggaggaagccttctctgccagcgatctcgcagcactgtgtttacaggggggaggggaggggttcgtacgggagcaataaaggagaaactgaggtacccgga

SEQ ID NO: 44 - DNA, 524 bp, Homo sapiens
  misc_feature (518)..(518): n equals a,t,g, or c
  misc_feature (524)..(524): n equals a,t,g, or c
gcgcatttggccgcctccctaccgctccaagcccagccctcagccatggcatgccccctggatcaggccattggcctcctcgtggccatcttccacaagtactccggcagggagggtgacaagcacaccctgagcaagaaggagctgaaggagctgatccagaaggagctcaccatkggctcgaagctgcaggatgctgaaattgcaaggctgatggaagacttggaccggaacaaggaccaggaggtgaacttccaggagtatgtcaccttcctgggggccttggctttgatctacaatgaagccctcaagggctgaaaataaatagggaagatggagacaccctctgggggtcctctctgagtcaaatccagtggtgggtaattgtacaataaattttttttggtcaaatttaaaaaaaaaaaaaaaaaaaaaaaaaaaaaaaaaaaaaaaaaaaaaaaaaaaaaaaaaaaaaaaaaaaaaaaacaaaaaaaaaaaaaaaaaaaaaaaaaaaaaanacaaan

SEQ ID NO: 45 - DNA, 749 bp, Homo sapiens
  misc_feature (2)..(2): n equals a,t,g, or c
  misc_feature (260)..(260): n equals a,t,g, or c
tntttttttttttttttttttttttttttttttttttttttttttttttttttttttttttttttttttttttttgtggaaaccattgatttttattaatttcataactgggaaattccatgtgaaagtgaaacaagcatgagtcaagtcaaccagggaaggaatctggggacaggccaaggagcgggaggtggggcagcgaggcagtcctgctggtaggagccctgaggatttcccagcttgtgtgcgctgcctctggnatcctagagacccggatttactcagctaggagagaggatggatcacagggtctaagggtggccattcagaggtagaagatggaggggcggcagattctggcagggcagcagagggctcagtggccatggctagaggggtaaaaaattcaggacatcccccaggtgctgcctcagccagggctgcatgcggaagagattgatgtgaaagtctcgtggcggcgggaccttgctacgaggggcccttttgcgggagtttttgtcagcagagccaaggcaggggttgtaaagaccccagctcaccagacccacctgaaaaacctgaatctccgctcaaggaaaactgctccgtttccgacctggrccggttcacccctccttaggcaacctggtggtccyccgctcccgggaggtcaccatattgatgccraacttagtgcggacacccgatcggcatagcgcactaacagcccagaactcctgggctcaagc

SEQ ID NO: 46 - DNA, 1546 bp, Homo sapiens
ggcacgagggcaggtgcaggcgccgcggggccggatcctccgcgcggccgagtccatctcctgggaaatggggcggacagtgtttccttgactgactattgtgagcgccctctctctccggcggacggagaccatggcccccactcagggcccccgggccccgctggaattcggagggcccctgggcgccgcggctctgctactgctgctgcccgccaccatgttccacctgctcctggcggcccgttcgggccccgcgcgcctgctgggtccacccgcgtccctgcccgggctggaggtgctgtggagcccacgggcgctgctgctgtggctcgcctggctcggcctgcaggcggcgctctacctactgccggcgcgcaaggtggccgaggggcaggaattgaaggacaagagtcgcctgcgctatcctattaacggcttccaggccctggtgctgacagccctgttggtggggctggggatgtcagcggggctgcctctgggggcgctcccggaaatgctcctgcccttggcgtttgtcgccaccctcaccgctttcatcttcagcctctttctctacatgaaggcgcaggtagccccagtttcggccctggcacctggggggaactcaggcaatccgatttacgacttttttctgggacgagagctcaaccctcgtatctgtttcttcgacttcaaatatttctgtgaactgcgacccggcctcatcggctgggtcctcatcaacctggccctgttgatgaaggaggcagagcttcgaggcagtccctcactggccatgtggctggtcaatggcttccagttgctctacgtgggtgatgccctctggcacgaggaggccgtcctcaccaccatggatatcacacatgacgggtttggcttcatgctggcgtttggggacatggcctgggtgcccttcacctacagcctgcaggcccagttcctgctgcaccacccgcagcccctggggttgccatggcctctgtcatctgcctcatcaatgggcttgagaccatctctacagccacagggcggaaactgctggtgtctgggtggtggggtatggtccgccatcccaactatcttggagacctcatcatggctctggcttggtccttgccctgcggggtgtcacacctgctgccctacttctacctcctctacttcaccgcgctgctggtgcaccgtgaggcccgggatgagcggcagtgcctgcagaagtacggcctggcctggcaggagtactgccggcgtgtgccttaccgcatcatgccctacatctactgaagcggctccaccaccccaggtgggggcatgtgcccactcatccaccagcacacccaggaccaggagcctcgacacacttgggactcaagggcttgcaccccacccagccctgaggatgaacaacctcagagaagaggtggtttagagcaaggcaaaaaatgaaaccagtgccaaaaaaaaaaaaaaaaaaaaaaaaaaaaaaaaaaaaaaaaaaaaaaaaaaaaaaaaaaaaaaaaaa

SEQ ID NO: 47 - DNA, 521 bp, Homo sapiens
taccagggtccggaatcccagggtcgacccacgcgtccgccggcaagatggcagaagtagagcagaagaagaagcggaccttccgcaagttcacctaccgcggcgtggacctcgaccagctgctggacatgtcctacgagcagctgatgcagctgtacagtgcgcgccaggcggcggctgaaccggggcctgcggcggaagcagcactccctgctgaagcgcctgcgcaaggccaagaaggaggcgccgcccatggagaagccggaagtggtgaagacgcacctgcgggacatgatcatcctacccgagatggtgggcagcatggtgggcgtytacaacggcaagaccttcaaccaggtggagatcaagcccgagatgatcggccactacctgggcgagttctccatcacctacaagcccgtaaagcatkgccggcccggcatcggggccacccactsctcccgmttcatccctctcaagtaatggctcagytaataaaggcgsacatgactccaaaaaaa

SEQ ID NO: 48 - DNA, 532 bp, Homo sapiens
  misc_feature (497)..(498): n equals a,t,g, or c
  misc_feature (502)..(502): n equals a,t,g, or c
  misc_feature (524)..(524): n equals a,t,g, or c
gactggacccgggagacatcacagcgctgggctaggggcgcggcttgaactcgcctaaagagctgcgccctctcacccgtgccgccccagccgctgccgcctgcaccggacccggagccgccatgcccaagtgtcccaagtgcaacaaggaggtgtacttcgccgagagggtgacctctctgggcaaggactggcatcggccctgcctgaagtgcgagaaatgtgggaagacgctgacctctgggggccacgctgagcacgaaggcaaaccctactgcaaccacccctgctacgcagccatgtttgggcctaaaggctttgggcggggcggagccgagagccacactttcaagtaaaccaggtggtggagaccccatccttggctgcttgcagggccactgtccaggcaaatgccaggccttgtccccagatgcccagggctcccttgttgcccctaatgctctcagtaaacctgaacacttggaaaaaaaaaaaanngggnggcgttttaaagattcctcganggggccaa

SEQ ID NO: 49 - DNA, 1382 bp, Homo sapiens
ggcgaatggggaaggatttgaagtcacctttgggtgtttggagtgatcagagctgtctgccctcttggggagtgacagtgccccactctgttaagtcccatgcctgcccccaactcagcttcagccacaatgatgtagcctcttttcctttccatccacagggcacctggcctgggtggagcccactcctcagcacccacctcacttcttgcagtattctgcagaccccagccctgtgcctgtgctcctggacagctggagataaggagtgggccctggaagatgctcattcaggccctgctcaagattccagtcctgattgctggactcgctgaagaragactacgcaggaaagccccagccacccatcaaatcagagagaaggaatccaccttcttacgctatggcaggtaagaaagtactcattgtctatgcacaccaggaacccaagtctttcaacggatccttgaagaatgtggctgtagatgaactgagcaggcagggctgcaccgtcacagtgtctgatttgtatgccatgaactttgagccgagggccacagacaaagatatcactggtactctttctaatcctgaggttttcaattatggagtggaaacccacgaagcctacaagcaaaggtctctggctagcgacatcactgatgagcagaaaaaggttcgggaggctgacctagtgatatttcagttcccgctgtactggttcagcgtgccggccatcctgaagggctggatggatagggtgctgtgccagggctttgcctttgacatcccaggattctacgattccggtttgctccagggtaaactagcgctcctttccgtaaccacgggaggcacggccgagatgtacacgaagacaggagtcaatggagattctcgatacttcctgtggccactccagcatggcacattacacttctgtggatttaaagtccttgcccctcagatcagctttgctcctgaaattgcatccgaagaagaaagaaaggggatggtggctgcgtggtcccagaggctgcagaccatctggaaggaagagcccatcccctgcacagcccactggcacttcgggcaataactctgtggcacgtgggcatcacgtaagcagcacactaggaggcccaggcgcaggcaaagagaagatggtgctgtcatgaaataaaattacaacatagctacctggggatacttttttctttctgttttttgtttgtttttaattttagctttaaggagcacatggccagtactgtttcaggggaatattgggtggcgctggggtttgggcttctattgatcccatcacccaaacagtgagcatagttcccaatagatagtttttcaacacttcctttcctccc

SEQ ID NO: 50 - DNA, 2240 bp, Homo sapiens
  misc_feature (1658)..(1658): n equals a,t,g, or c
  misc_feature (2061)..(2061): n equals a,t,g, or c
  misc_feature (2130)..(2131): n equals a,t,g, or c
  misc_feature (2146)..(2146): n equals a,t,g, or c
  misc_feature (2166)..(2166): n equals a,t,g, or c
  misc_feature (2171)..(2171): n equals a,t,g, or c
  misc_feature (2187)..(2187): n equals a,t,g, or c
ggaggaaggtaactctatggaagttcatagaagtcctcctcattcttttttacagctgcatgaaacttgtcatgtggttgtactgtaatttacttaatcactttgttatataatgacaagtacgcagtttccattattttgaaattacagccagtagagagtgactaatttgtgcctatgtattttcatattattggaggtgtactttcagtgtaaatacctagaagtgggattgctgggtcaaaggtatgaatggatagtaccaaataaaccaccctccaaaagcagtttgtgtcttcaccaacaacatgtaaatatgtctgttttccccacagcacctctaacagaatgactttgaaaagtttcatagtttttaatttttgccaatatattaggtgagaaatatatctcagaatagttttgtgtttctttaattataaatgagattgactatgttttcatatgtttactggtttactaatatacttattagtgagtagtatactcatatctttagctgacagacccttttcttctattaggtgcttgactttttgggttcaatttataagactttgttatattaggaatactagwctgttacctatgacctgtgttgcctatattttcttcctattttatttttttaccattcaaaagwttttagttaaaattatcaatttttaaaaattacatctagatctttgaatcacagktaaaagcttctccctacaaccaggatgtagagaaaccccttgtttcttaaaatacttgtctcatctttatttttttacatttaaattctcaatctatttggagtttattttagtgkatgttttgaaatgtggatttaatttcatccatccaaatgmctagctatgkgcccccagccctattttaaaaagtttatccatcctgctggtctgtttcctgtttcygtattgktatcattcctttattgtagacgctttatgatatgttttaatgtctgatacttctcttcttcccctatcttagcttctctttttcattgttttagagaatatttcttcctgtttgttttttcataggaactttagtatcagtttatctagctccctaaaaaagcttcttggtattttttattggaactgcctttatcttaccaattatctcagggagaattgacatctttatgatactgattttaactctaggttttgcctatatttttcataagtttatttctaagcattttttaaagctgaaaatttgtttttaaaaatttgaaattaaacttttaattttgagatattaataattatagatttacatgcagttataagaaatacagatttagcatctgaaatctaaaaatccagaatttgtaatgttccaagatttgaaactttttgagctgtgatatgatgctcaaaagaaatgctaattggagcattttggactttggattttcagattaggggtgctcagttggtaagtacaatgcaaatattccaaggtagggaagaggatggtttgcagagcttccatgccctctctgggcatgcatgctctcctgatgatcctagacctcagtgtgttcaccaacctggaaactcattcaatcttattgtttaggagctttatagagttttatagagcttaatckycaggcctanccgcttcctggaggttggtgtgtgtgcaaargttccaactaattacttggkgatcttttgaccagccttatcctaaggctttgtgggtgtctcaccctaagtcacttcactaaattcaggtatgatcaaaaggaacttgctgtgaataacaaaagatgctgatatcactcaggaaactccaaggattttaggaactgtgtgtgaggaactgtaacaccctaatgggttccccttcccccactgcctagacagagctgatttatcaagacactggaattgcaatagagaaagagtaattcatgcagagccagctatgcttgagcccagagttttattactcaaatcagtctccccaagcatttggggatcagagatttttaggataatttggtgggtgggggangtccagtgagtcaagagtgctgattagttgggtcagagatgaaatcatggggaattgaagctgtcctcnngcacttgagttagtnaagggaaagggaaaaaagantagangagaaagaaaatttcnctgggtggtgtcagctgatccatcaagtgcagggtctgcacggaatctcaagc

SEQ ID NO: 51 - DNA, 302 bp, Homo sapiens
  misc_feature (8)..(8): n equals a,t,g, or c
  misc_feature (226)..(226): n equals a,t,g, or c
  misc_feature (241)..(241): n equals a,t,g, or c
ctgcgggnaactgctgatggctcagggactgtcagcctctgctctggaaggcctgaagacggaagaagggagtgtcagaggcgccctgccagctgtgtcatctcccccagctccagtttcaccctcatcacccaccacacataatggggagctggagccgtcattctcccccttgctaggagaagggaagacgcccgagacgctgcttccccagaagtgctggggncagggaggcccaggnagatgagagagaaggtccgagtaggtggatagaagacaaggggggagaccgagccggagtg

SEQ ID NO: 52 - DNA, 772 bp, Homo sapiens
  misc_feature (547)..(547): n equals a,t,g, or c
  misc_feature (580)..(580): n equals a,t,g, or c
  misc_feature (719)..(719): n equals a,t,g, or c
ggcacgagcggcacgagccgagatcgttctggggctgctggtatggacgcttattgctggaactgagtacttccgggtccccgcatttggctgggtcatgtttgtagctgtattttactgggtcctcaccgtcttcttcctcattatctacataacaatgacctacaccaggattccccaggtgccctggacaacagtgggcctgtgctttaacggcagtgccttcgtcttgtacctctctgccgctgttgtagatgcatcttccgtctcccctgagaaggacagtcacaacttcaacagctgggcggcctcatcgttctttgccttcctggtcaccatctgctacgctggaaatacatatttcagttttatagcatggagatccaggaccatacagtgatttaccattttgataattaaaaggaaaaaaaaaggaagactctcactgtaaaaacagctgtaggtataatgtatattcccagagaattgtatttaactaattaatgttttttatattcttaaatttgctcacaaattgtggtttgtnacaattaaactggatacttatttgcaaagtgtngtagcttataatgaactcttaagtatcttattaatgtattaatgtcttcatagcatcatattttgcttagacaatgtttaaatagataaattgctaatattgagaatgtgtcaagtttgtaaacctaacttttaagatnccagattcttttttgattaaatgttgcaaaatcccaaaaaaaaaaaaaaaaaa

SEQ ID NO: 53 - DNA, 1003 bp, Homo sapiens
ggttcctgcagcagctgcagcttccttctttttagtgtaatgttgaatgcattgtctgtgtgaatatgtaatgtttctgattatgttgacttcagttgtgtttatctggaagcctccagtgctttgtggagatagcatgtgtatttgcacacatttagacagcagtggggttggagcataatcccagtgccttcagcagccctaggggctggaccatatgcagggcatatggtcattgaggatggccgtcggctctctgcatgatctttcatagggaagtcattccgagccatcacagatctctgctagggacctctgaggcagctgagaaatagctgtaatgtccctagatgggaacagccatcaggaagtctttcctagtcctatctgtagtttaattgaaaagggtcaacttgagctttattaagtctctcttgctcaagaagagctccaggctgacttctactagaaagtaaaaggggaattgggtgtggttagggagatggaacgggtgcggggaactcaagcaggacaggtgtcatcttcagtatgtctttgctgctaatagaaatcaagcacattgtctctaagaagagtaattgagatttttacttatttttgttgaaagcaagatattgtcatgttgccaattagtaaatatgctaataatttcagtaaagcctttcattcatactgtttttcataggaatctgtggagcttcctctcacccatcctgaatattatgaagagatgggtataaagcctcctaagggggtcaktctctatggtccacctggcacaggtatgctctgtttttgacactttccaggcacccagctggtctcttgagcagcagcattggctagttataattactgaactrataagagaggacaccacaaktscttagtttaaaacagggctgykcaacstkgtctgcatgttggaakcacsktgggagctttaaaaatactgatgaaaaaaaaaaaaaaaaaactcgag

SEQ ID NO: 54 - DNA, 803 bp, Homo sapiens
gaattcggcacgagggggaagagtgttcaggcagaggaagaagccagggcaatcgcccttaggtgggagtatggctggtgtgtttggagccacaaagagaacagagtgsctgttaatggagtaggagggagaattaattatagcagatgaggttagggctatgtgtatgggtgaaagtatgtcatcatgtatggccttgcttttatttttattttattttaattttattatatatccttgagatggggtcttgctctgtcacacaggctggagtgcggtggtgcgatcacggctcactgcagcccttgacttccccgggctcagtggatcctcccacctcagctttccaagtagctgggactacaggcactcstcaccatgcctggctgatttttgtatttttttgtagagacaggatttggccgtgttgcccaggctggtctcgaactcctgggctcaagggatctgcccgacttggcctcccaaaagtgctaggattccaggtgtgagccaccatgctgtgtctgggacttgcttttaaatccgtgatgttggggctattggcaagccatttggaacttgggacaaaattaagctgtattcatcctacccatctaagtaatcttttgataatcagatatttaaatgtaaaaattaaaaaattctaaaatgagtaagagaagatatgaatgaatatatcagtatggtgggagttgctctgaaccatttgtggttcaggatgctgcctgatttgccagaagaaaaaaagtaaaaatattagcatggtgataagttatgaagcc

SEQ ID NO: 55 - DNA, 1715 bp, Homo sapiens
  misc_feature (1689)..(1689): n equals a,t,g, or c
gcgccgccaactggacggcgggcttctgcgggccacgccgcccgcttgtgggcatccggccgcggcgcggcgccccgtcctcgtgctgaaaattcaacggaaaaggctgtgcaatgttcacgcgcacctctcttccgctcctctggggcctacgtcgtggcagctacctgcggtcctggtgcggcccggcgcgtcccccaggcctacctgacggcctccgtgtggctgaccttcgcgcagccggcatcaaccccgtcgtgtgcttcctcttcaacagggagctgagggactgcttcagggcccagttcccctgctgccagagcccccggaccacccaggcgacccatccctgcgacctgaaagcattggtttatgagggaggccccgscacatagacccccaacccagcctttccctttggctcggacggtgacgttgtatcttttccttctggcccctgtttaattttctaagctgccttcaaaatgactcgaagtggacagacacttggattgtactgactcctttgggggtggggtgggtgaggagtaggatgctcagcccactccagctccgcacattcgtcctcctaactcgactttcttcctgacaataggccctgcagtctttttgtagcggtactgacgtcttttattccatgtgtggttcctttttttctttttctataaaggctgtactaattttcttcatgcaacgtttcctaaagaccatggccagttttctacagaagctatttttgacaacctcaagtggcattacattttgcagtgaagtagaggaacctagggggacttcttcacaagttagatttcttgaggatcttctgttggaagcaggagaaagtggggggtggggggaagttgtccgaaatgccctctgaattgccggctgcagggtccttgtgctgcgctggttctttgaaagtctcagtgttgatattgaacttaaagagcagagatggagatcagtagcaaggcagtcatttttttaaagcagtaagtaacaagtaagatttggttcccggtttactttctgctgctaaaaaccacgtcagtgacaactgctctctgtattatagcaatcttgaatggaaacatttctgtcaagttgtaagttttaaaagagtaaagtgttttggttagtaatgatgtggagaaaaatacagtattgcatgtgttcgtgtgtatagattgtggttcgaggattgggagggctctgagaagcagagtactacrtcaaaattgttttaagtattttttgccaataaaaaattaattttatggaaatggcktgtgctttgagaagcccagttttattctgtcttatgaaactaatttccactttgaaaattgttcttctgttgtttatggtataaatgaatggaatataatgatatcctccttctaggaaacaaagcatttccttaaaatgtttgctaggttaagctgtgctgttctactgatggttgttttaaattaataatgagaactataatttaaataatatttctttgttagacattataatgttaaactgaaagactaaattctgcaagtactatataatatttttggcttataatgctacatttttattaatgtaccttccgttttgaggatttatatctgtatttctctttgcattatacaaatataccagtattttcanaaaaaaaaaaaaaaaaaaaaaaaaaa

SEQ ID NO: 56 - DNA, 927 bp, Homo sapiens
ggcagaggtaactatttgtggcaagccaggtcgaggtcactctctttgagggcatttactcactgcctagtgccccctttccactgggrcagacccagagacaaaccctagcagcttacttagctctcatgaactaagggctgtcccttagttctcccaaagtaacccacaatgcaaccctgatgggctgcatcttccaaaattgaaaggcctttgtctatcattccatgaaacaaaaaaagattatcttactttttaacatggcttaaccttaatacccactggatttcrgagaacagtggccactgcatggttctcatgcttacagtacgatcctgtagctagatttgttttgtaagaaggaagaagaatgagatgaaataccctatgtataatgttttatgttgctttggaaaagtacaacaatgtagaaaaaggtraaatcatgataaagtaagaaattaaaaactgtttggactgatttacaagaaaaagatgatgctatgatggttcagttaaaggaacctatgactcacccccctccactttatgggggagctgcagcagcactactggcgcctctccagagtccccaccaccaaaaagtcacaaatccggggcaacaggtatgatctctacttcttataacccaacaggggactccatttaggcagggtgtcacttcttatacccaacagggaactccatttagccggggagtcactctggttctgagaggcagtttccccataacaactgcttacaggaggtgttgctgccacaggccagcctataggatttatcttggtttattctctgttctccacttccaacctacttaattagaaaaataatatgcctatttattgagaagatctaaagtttatggaaggaacaggattgaaaaaaaaaaaaaaaaaactcgag

SEQ ID NO: 57 - DNA, 1253 bp, Homo sapiens
  misc_feature (370)..(370): n equals a,t,g, or c
ggtatttttgatgtttctgacaaatctgccctagtgagctcagtggatgcagcttgaagccaaccttaatgacagtgaatagtgacagaatatttgccacagtcatttttgttttactttgttgtttttcttttttgttctgttttgattttggtgctaaaccaaaaagaagattggaatcaggatctaaattcaccaagtatttaggttatctgtacacaaattttagtgatgactaatataaggaagtttttaaaaatgggtatctttaaaagaaatttgaaataattccttactaacctgatcctttttagttgctaagattatatttcacaaggtatatggtggtttggtggttaaattttcattntaaagtggtgatagttgcaaatattctaaaatagactaattataattactttcattcaaatactgaatgtgagagtatataatcatcttatttgtatgtggtaagaaagactactatgtatttttctgacaacatttagtggtagttatgattatttccatttctttggacttgttcacagaaatataactgtggttacttaagraaacatgttctagataaacataaagattatatcccatcttttttaaaaataggagcagatgtctcaagtattagatgccatgtttgaaaaattggtcaaagatggggagcatgtaattgatcaaggtgacgatggtgacaacttttatgtaattgataggtaagttttgcccaaccttactattgaaattgaaagaaccttttgtataaaatctcaaccttattacggcaactgacaggttaatataggatagttgttattgccgctactcttattattacataataggcactgtaaacctgttgtgagtacatgcagtgaaaccacagtggatcatgaaaagagacatagtttatagaggaactaatgacttttggttagtctaatctgtaaatgtcagtcatttaacatgagcatcttcatttgctgaattctaattgagagatattatgtagtagtattagtatgtactagatgcctgttacagtgagaacagcagtataatataacatctgagatattaattcacagtagacctcaattggtatttcttaaaaggttctttttttataaactgtgtaaaacatgctcatggtttaaaaaattcaaaaaaaaatctattttaaaaaaaaaaaaaaaaaactgcgagggggggacccgtacccaatagtccctaat

SEQ ID NO: 58 - DNA, 1654 bp, Homo sapiens
acgcgtccggggaagcgtgcggtgccgcagcaatggcggcgctcacaattgccacgggtactggcaattggttttcggctttggcgctcggggtgactcttctcaaatgccttctcatccccacataccattccacagattttgaagtacaccgaaactggcttgctatcactcacagtttgccaatatcacagtggtattatgaggcaacttcagagtggacgttggattacccccctttctttgcatggtttgagtatatcctgtcacatgttgccaaatattttgatcaagaaatgctgaatgtccataatttgaattactccagctcaaggaccttacttttccagagattttccgtcatctttatggatgtactctttgtgtatgctgtccgtgagtgctgtaaatgcattgatggaaaaaaagtgggtaaagaacttacagaaaagccaaaatttattctgtcggtattacttctgtggaacttcgggttattaattgtggaccatattcattttcagtacaatggctttttatttggattaatgctactctccattgcacgattatttcagaaaaggcatatggaaggagcatttctctttgctgttctcctacatttcaagcatatctacctctatgtagcaccagcttatggtgtatatctgctgcgatcctactgtttcactgcaaataaaccagatgggtctattcgatggaagagtttcagctttgttcgtgttatttccctgggactggttgttttcttagtttctgctctttcattgggtcctttcctggccttgaatcagctgcctcaagtcttttcccgactctttcctttcaagaggggcctctgtcatgcatattgggctccaaacttctgggctttgtacaatgctttggacaaagtgctgtctgtcatcggtttgaaattgaaatttcttgatcccaacaatattcccaaggcctcaatgacaagtggtttggttcagcagttccaacacacagtccttccctcagtgactcccttggcaaccctcatctgcacactgattgccatattgccctctattttctgtctttggtttaaaccccaagggcccagaggctttctccgatgtctaactctttgtgccttgagctcctttatgtttgggtggcatgttcatgaaaaagccatacttctagcaattctcccaatgagccttttgtctgtgggaaaagcaggagacgcttcgatttttctgattctgaccacaacaggacattattccctctttcctctgctcttcactgcaccagaacttcccattaaaatcttactcatgttactattcaccatatatagtatttcgtcactgaagactttattcagaaaagaaaaacctctttttaattggatggaaactttctacctgcttggcctggggcctctggaagtctgctgtgaatttgtattccctttcacctcctggaaggtgaagtaccccttcatccctttgttactaacctcagtgtattgtgcagtaggcatcacatatgcttggttcaaactgtatgtttcagtattgattgactctgctattggcaagacaaagaaacaatgaataaaggaactgcttagaaaaaaaaaaaaaaaaaaaaaaaa

SEQ ID NO: 59 - DNA, 490 bp, Homo sapiens
  misc_feature (8)..(8): n equals a,t,g, or c
  misc_feature (41)..(41): n equals a,t,g, or c
  misc_feature (465)..(465): n equals a,t,g, or c
  misc_feature (480)..(480): n equals a,t,g, or c
  misc_feature (484)..(484): n equals a,t,g, or c
aacgactnacctaatagggaaatttggcccctcgaaggccnaaaaaattccggcggcggattagccttcgcggggcaaaatggagctcgaggccatgagcagatataccagcccagtgaacccagctgtcttcccccatctgaccgtggtgcttttggccattggcatgttcttcaccgcctggttcttcgtttacgaggtcacctctaccaagtacactcgtgatatctataaagagctcctcatctccttagtggcctcactcttcatgggctttggagtcctcttcctgctgctctgggttggcatctacgtgtgagcacccaagggtaacaaccagatggcttcactgaaacctgcttttgtaaattacttttttttactgttgctggaagtgtcccacctgctgctcataataaatgcagatgtatagcaaaaaaaaaaaaaaaaaamytsggggggggnccggaacccaattcncccnaaaggg

SEQ ID NO: 60 - DNA, 2598 bp, Homo sapiens
  misc_feature (4)..(4): n equals a,t,g, or c
agtnccgggcgggctgcattcgtcggggaaacctctcctcgaccaggggcacctctactcgaccaggggcgacggcgtactttgggcttcatcatggaggactacctgcagggttgtcgagctgctctgcaggagtcccgacctctacatgttgtgctgggaaatraagcctgtgatttggactccacagtgtctgctcttgccctggctttttacctagcaaagaagtgacacagccctagaggaggcagtagcagaggtgctagaccatcgacccatcgagccgaaacactggcctccctgccatgtttcagttgagctggtggggtcctgtgctaccctggtgaccgagagaatcctgcagggggcaccagagatcttggacaggcaaactgcagcccttctgcatggaaccatcatcctggactgtgtcaacatggaccttaaaattggaaaggcaaccccaaaggacagcaaatatgtggagaaactagaggcccttttcccagacctacccaagagaaatgatatatttgattccctacaaaaggcaaagtttgatgtatcaggactgaccactgagcagatgctgagaaargaccagaagactatctatagacaaggcgtcaaggtggccattagtgcaatatatatggatttggagatctgtgaagtcctggaacgctcccactctccacccctgaagctgacccctgcctcaagtacccaccctaacctccatgcctatcttcaaggcaacacccaggtctctcgaaagaaacttctgcccctgctccaggaagccctgtcagcatattttgactccatgaagatcccttcaggacagcctgagacagcagatgtgtccagggagcaagtggacaaggaattggacagggcaagtaactccctgatttctggmctgagtcaagatgaggaggaccctccgctgcccccgacgcccatgaacagcttggtggatgagtgccctctagatcaggggctgcctaaactctctgctgaggccgtcttcgagaagtgcagtcagatctcactgtcacagtctaccacagcctccctgtccaagaagtgactgttgagaggcgaggaggtagtgggtgaggctacctgactcacttcaaatgcatgttttgagatgtttggagattcagcaattctgtcttcattgctccaggatctggtatactgttctcataaaactgagaggagaaaaaaagtgaaagaaagcagctgctttaagaatggttttccaccttttccccctaatctctaccaatcagacacattttattatttaaatctgcacctctctctattttatttgccaggggcacgatgtgacatatctgcagtcccagcacagtgggacaaaaagaatttagaccccaaaagtgtcctcggcatggatcttgaacagaaccagtatctgtcatggaactgaacattcatcgatggtctccatgtattcatttattcacttgttcattcaagtatttattgaatacctgcctcaagctagagagaaaagagagtgcgctttggaaatttattccagttttcagcctacagcagattatcagctcggtgacttttctttctgccaccatttaggtgatggtgtttgattcagagatggctgaatttctattcttagcttattgtgactgtttcagatctagtttgggaacagattagaggccattgtcttctgtcctgatcaggtggcctggctgtttctttggatccctctgtcccagagccacccagaaccctgactcttgagaatcaagaaaacacccagaaaggccttaatgacctcataggcactcttccaaaaagacaacagaactggaatgagaggcctgggtctgtctcctgccttagcaggcctatcaatttcttgtcaatctctttttttccttgctcacattaaaaggaagcatggagttctaatgctcccataaactatgtattttggcaagacacttcactactccaggtctcactttccccatctgtaaaacagggtttggactaggtgttccctggtattctgtgatctgcctcttgctgccattctttctctcctctgcttctctgtatttttcttctgttatccctgggggtgctcaggttcacttgattgtctgtatttctgtgtggttgtagcaaggactcagcctcatgtagcacgaataggggtgtggttcatggcgtgttgacccagcagagcactccctcccactaacttgttctgcatgtgtagagtctccccattttttttaacgcaaccctttcccctttttcctaccccacagctctgttccatgtaagttgccaacagtttcactgaacagtggggtatgtgatggttttggcatgacatcttcagtatgagggggacagtttgacttcactttgagggtgtgatgtctgtagctatgtggaaggtaaaaatagtggtgtgatcatgaaccaaaggaatttatgttttgtaacttgggtactttattttgcattttgttatactattaaataattttttcctgttaaaaaaaaaaaaaaaaaaaaaaaaaa

SEQ ID NO: 61 - DNA, 1502 bp, Homo sapiens
ggcacgagctcgtgccgaggaagtgtaggtacagattcaggtcatagaaaggcccatatgtcccaatattatttctcttacagagaaaacagatgaaattgacaattttttttgtctttccacagaccatcaccggcctcctgcaagagtttgatgtccaggcaagtagaggatgtggctttccttccccttcctcatcccgtcttctctttttcctttttctttccattggtttaagtagatcattgtgcaaacattgcgggcaaggggagagaaggcagtggtctcagctaggtcctcaccctcagctgctgctcccagacagaagctgacttgagtgctggccagagaatcaggaaccagtcacttcccacgaaagcaggacagagacaccgcctgtttcagtcccaaagagctggccagaacggtggggcgtgtgtggggaaaatggtgtgatgctgggctggcttgggaccctgtgaggggagggaacggaagcaaaagcttgatgttcttggctccacttgggaaactgaaaccagccttctctgtggtttactggcccagaactgaagtatctccattcccactcaggattgcagggtgggccagggggtgcagctcagctgtgtccaagaataggctctcaggagaacgggctgggctctctcagccgagggctgggtcagaacttcaggaaatctaagtcctggactcgttagccccaagctggggtgggtcccatgctgtgctggcctctggagggtggggcagaaagcctgagcatatggcgagcttgtggtctccttgaaggaggagaggcgcactcctggaccagccagagagccagaggtggctgaggtgttctcacctgaaccgtacccatgtgttgcacaggtgtccccagtttgggacccattctgcactctgcatctcactcctctattctacctccttacctcaaaacaactccgcttttcctcttgaatctctgatttcatgaatgctcccccatccatcccgaggcgaggaatcttgcactgtctttggaaggaaaggaaaggatgggagaggggctggaagcattggctagtagatgatcgaggctttctataccaccaccaaggtgtgtattttctcatcatcctggttgtgtcaggctgtccctagagatcaccctgacctcagtgtttaagaagaagggccagatgcagtggctcatgcctgtaatcctagcactttggaaggccgaggcaggcagatcacctgaggtcaggagctcgaggccagcctggccaacaaggagaaaccctgtctctactaaaaatacaaaaattagccaggcatggtggtaagcacctataaccccagctacttgggggctgagacaggagaattgcttgaacctgggaggcagaggttgcagtgagccgagaccacgtcgttgcactccagcctgggcaacaagagtgaaactctgtctcaaaaaaaaaaaaaaaaaa

SEQ ID NO: 62 - DNA, 920 bp, Homo sapiens
gggtcgacccacgcgtccggagacatactgtatgtatttattctctaacacacatcaggtactcaataactgtttattccttttcccttttgcgtcctttgtaaaaataatattttcctaacctctacagcaacagtaattatctttcatttatcatatgacttggtagaaaccgtttttcttaccgtataaaacctgagctctttagttattttggaaaatgaaagcacgttcattgtcgttctgttgggtttccaacagaacttggttcttgtggttactcaatatttcattgtgtttaggccctgtggatggagagttaccaccaagagctagaaatcaggccaataacccaccagccaatgctctccgaggaggagccagctactcgggaggctgaggcaggagaatggcgtgaacccaggaggcggagcttgcagtgagctgagatcgctccactgcactctagcctgggcaacagagcaagactccacctcaaaaaaaaaaaacaaaactgttatacggatgaagaaagctaaggcaaagaagggttaaataacctcttaagaggtgggaagtatgtactgaagctcacacaaatgttaagtgacaagtttaggaattgaattcaggcagtctagctgtagaatcctggctcctatctgccacattgtacttgtcgtggaactataccttcccatacctttctccccatgtgccactctctaattctactctgggttcataactattattagaagtgggaatttacattaacagttaaaatagctactgctaaattactctccgaaaggaagtaccaaaagaaaacaaaaccccaaacaggaagaagtctttaaaaaacaccaatgaagtaatggcaactcatgatttaaaaaaaaaaaaaaaaagggsggggc

SEQ ID NO: 63 - DNA, 1388 bp, Homo sapiens
acaggcgtgacatctgcgcccrgcctctttaataaatatttttaagtgcatcttccccttcaggctttgtttggagtcccagtgctacaaacattgtatttttcacagcagatgtgttcctgaaaagtgtatagaaacctgttctgggaacctgaatgcttttggaatgcacggggagagtctgccagctaaaggactcctggcaacattctgtgaaatatgaaactggaaaactggatttgtcgaaaactaattgtgcccattttctcacatttttgatccattgggttttttttkgttttgtttttttttttttttggagtcaaggtctcactctgtcaccctggctggagtgcaatggaactatcttggttcactgcagccttgacctcctggactcaagcagtcctcctacctcagcctccctgagtagctgggactataggtgcgtgccactgcacttgactaatttttaaatttttcattgagataaggtctcactatgttgcttaggctggtctcaaactcctgggctcaagtcatttctctgcctttttttcttttttttttccattttggagacggagtctctgtcgctcgggctggagtgcaggggtgcaatcttggttgaccgccacctctgcctcctgggctaaagggatcctcccacctcagccttccaagtagctgggattacaggcttgagccaccgcgccccgctctttcgtgttccaaaggcttttttaaataaacttccactcctgtcctggattctgctttatggccctcagtcgaattctttcttctgaggaggcaaggactgaagttgctctgaccagtactggagaaaccgatacagcagggatgacttccaccagctccacttgcagctctgaggtgtattaaaaatggaccyggaagaagtcatgcmacgggccagaccttaacattcctttcggcttaccccaggatttcagacraagcttcactttcctaaccagtcacaaatcagagaatttttgattccacctatgacctgtgagctcctgcttcaagatattccaccttttttaggccaaaccaatgtataacctccaagtgtcgatttacactttcgactgtaacttctgctttcctgagatttacccctgcctttaaaaacccttgcttgtaatccctcagggaggccgtgtatttattaatcatgagctgcccaattctccttgcttggtgccctgcaaataaacaccctcttttctcccactgcaaaacctcagtgtggatgtttggctttacttcacccccaggaaagcagacccaggtttgactcagcaacaacatctgtttctatttttctctgtataaatattaaaaaccataagtacaaa

SEQ ID NO: 64 - DNA, 461 bp, Homo sapiens
  misc_feature (29)..(29): n equals a,t,g, or c
  misc_feature (416)..(416): n equals a,t,g, or c
  misc_feature (434)..(434): n equals a,t,g, or c
  misc_feature (449)..(449): n equals a,t,g, or c
ctactatagggaaagctggtacgcctgcnggtaccggtccggaattcccgggggctggtctccaacctggtctcctgggctcaagcgatccgcccgcctcggcctcccacagtgctgggattccaggcgtgagctaccgcgcccggcctatttacttttcttactaagctggggatcaccgtcgccctcggcttggcaggaaggcgggggtgcaagaagaaaagaggtacagaacacccagaggtgccctcgattccgtcttgcacttgcccttctcccaccgtccagcaataaagcgagagaaacaagtgcaggaaactggccggcagtcatgggagaagccaaaaagacagccttggggagccggcgggwtccagagcggggctcctytccgcactttgtagctgccgttgctncgctccatgccctgcctnagccactcctcctgntaccaggcaaaa

SEQ ID NO: 65 - DNA, 1234 bp, Homo sapiens
gactagttctagatcgcgagcggccccctttttttttttttttttttttttgttttttggctctttcaaaggtaatggcccatcgatgagcatttttaacatactccatagtcttttcctgtggtgttaggtctttatttttatttttttcctgggggctggggtgggggtttgtcatgggggaactgccctttaaattttaagtgacactacagaaaaacacaaaaaggtgatgggttgtgttatgcttgtattgaatgctgtcttgacatctcttgccttgtcctccggtatgttctaaagctgtgtctgagatctggatctgcccatcactttggctagtgacagggctaattaatttgctttatacattttcttttactttccttttttcctttctggaggcatcacatgctggtgctgtgtctttatgaatgttttaaccattttcatggtggaagaattttatatttatgcagttgtacaattttatttttttctgcaagaaaaagtgtaatgtatgaaataaaccaaagtcacttgtttgaaaataaatctttattttgaactttataaaaagcaatgcagtaccccatagactggtgttaaatgttgtctacagtgcaaaatccatgttctaacatatgtaataattgccaggagtacagtgctcttgttgatcttgtattcagtcaggttaaaacaacggacaataaaagaatgaacacattcctcgtgtgtgattcactcttgtctaaatgtcccaacctgtgacttctttactttccacaccactaattatccaagatcttgaagaagtattgaacctctaataggccatcctctggcagatcagtacagtgaacagcattctggatcttagttttaccaaagattgctctgagagttccagggcgtaaatgccgggcaatttcaggatcagcaggtccacaaaattctcgaaatgtctttgtagcattattctgttgaatctccattgctacacaagggccagaatacatttctgtcaccatgtcatgatattcggtcactactcctttataaacttcatagaattcctcaacattaacccgatccatattgaacatctgcatagctgagatttcaaaacctgcatctcggatagccatcaggatctttcccaacagtccttcactgacagcatggggtttaacaatgcaacaggtacaattagtaaatttagcagtgtttc

SEQ ID NO: 66 - DNA, 1240 bp, Homo sapiens
gctcgtgccgcggccccgcccgcgtcagctctgcgcggtgattcactccctccttcgccccggggcccccttcccggccagacggcgggcaagacagctgggtgtacagcgtcctcgaaaccacgagcaagtgagcagatcctccgaggcaccagggactccagcccatgccatggcggattctgagcgcctctcggctcctggctgctgggccgcctgcaccaacttctcgcgcactcgaaagggaatcctcctgtttgctgagattatattatgcctggtgatcctgatctgcttcagtgcctccacaccaggctactcctccctgtcggtgattgagatgatccttgctgctattttctttgttgtctacatgtgtgacctgcacaccaagataccattcatcaactggccctggagtgatttcttccgaaccctcatagcggcaatcctctacctgatcacctccattgttgtccttgttgagagaggaaaccactccaaaatcgtcgcaggggtactgggcctaatcgctacgtgcctctttggctatgatgcctatgtcaccttccccgttcggcagccaagacatacagcagcccccactgaccccgcagatggcccggtgtaggcgaacttccctcatttctctctgcaatctgcaaataactcctccattgaaataactcctccccaccccaacaacaacattcccagcagaccaactcccaccccctctttgaggtaaaagtgcctttattgggagacttttgtcttccagcctgccaatcaaccctcctgggtgtggccaccatatgtgtgtgcctaggtcctccttctgcacgatccaataggagacaccagttctgactgaaccatgcccccacctaagtcacaaaatgagggaagtggggagttagatttcagagtccaggccctaggttgggacccactccaaataatctcctcggtgtgggtggtggttctatagagggataaatgaataataaacattgttaaaatatacgataatgaataaagtaatcctttcatcaaatgtgggtaaatttcaagcatcaggagggggaaatggagtggaaacagctggggcaaggaggcaaagaagccaggcctgttttacaacaaatattaaattacttcaataatacaaacgagaggcccggtgcggtggctcatgcctgtaattcccagtcctttgggaggctgcgggaggattgct

SEQ ID NO: 67 - DNA, 1075 bp, Homo sapiens
ggccggcctccaggctgaagaaggacccgccccggccttgacccgggccccgcccctccagccggggcaccgagccccggccctagctgctcgcccctactcgccggcactcgcccggctcgcccgctttcgcacccagttcacgcgccacagctatgtgtccccgagccgcgcgggcgcccgcgacgctactcctcgccctgggcgcggtgctgtggcctgcggctggcgcctgggagcttacgattttgcacaccaacgacgtgcacagccggctggagcagaccagcgaggactccagcaagtgcgtcaacgccagccgctgcatgggtggcgtggctcggctcttcaccaaggttcagcagatccgccgcgccgaacccaacgtgctgctgctggacgccggcgaccagtaccagggcactatctggttcaccgtgtacaagggcgccgaggtggcgcacttcatgaacgccctgcgctacgatgccatggcactgggaaatcatgaatttgataatggtgtggaaggactgatcgagccactcctcaaagaggccaaatttccaattctgagtgcaaacattaaagcaaaggggccactagcatctcaaatatcaggactttatttgccatataaagttcttcctgytggtgatgaarttgtgggaatcgttggatacacttycaaagaaaccccttttctctcaaatccagggacaaatttagtgtttgaagatgaaatcactgcattacaacctgaagtagataagttaaaaactctaaatgtgaacaaaattattgcactgggacattcgggttttgaaatggataaactcatcgctcagaaagtgaggggtgtggacgtcgtggtgggaggacactccaacacatttctttacacaggtaattgtttcaaaaggattgcatgggccaggatgtccagataagcactgtgtctcttttgcctttgtaactgttattactctttttactgctatttaatatgtaatgtatattatatgatctataatatatatgtaatatacattaaatgggaacatgtgcaaatctt

SEQ ID NO: 68 - DNA, 667 bp, Homo sapiens
agtcggtcccggagctgcctggaggcggccgcactcggggatcatggcccaagttgcaatgtccaccctccccgttgaagatgaggagtcctcggagagcaggatggtggtgacattcctcatgtcagctctcgagtccatgtgtaaagaactggccaagtccaaagccgaagtggcctgcattgcagtgtatgaaacagacgtgtttgtcgtcggaactgaaagaggacgtgcttttgtcaataccagaaaggattttcaaaaagattttgtaaaatattgtgttgaagaagaagaaaaagctgcagagatgcataaaatgaaatctacaacccaggcaaatcggatgagtgtagatgctgtagaaattgaaacactcagaaaaacagttgaggactatttctgcttttgctatgggaaagctttaggcaaatccacagtggtacctgtaccatatgagaagatgctgcgagaccagtcggctgtggtagtgcaggggcttccggaaggtgttgcctttaaacaccccgagaactatgatcttgcaaccctgaaatggattttggagaacaaagcagggatttcattcatcrtkaagagstgaagtgtttctccgttgtaccatcacagtgatcggataattgaaattagctacgttaatgattta

SEQ ID NO: 69 - DNA, 609 bp, Homo sapiens
  misc_feature (32)..(32): n equals a,t,g, or c
  misc_feature (600)..(601): n equals a,t,g, or c
  misc_feature (606)..(606): n equals a,t,g, or c
gtttattttggaattacagatgcaaagtatantggaaaagaaaatgaaamccargagaaatattgccargcattmcargaatamcccatcactaataactttcctttgcaaaaactgcagtgtgctagcctgttctggggaagatatccatgtaattgagaaaatgcatcacgtcaatatgaccccagaattcaaggaactttacattgtaagagaaaacaaarcactgcaaaagaagtgtgccgactatcaaataaatggtgaaatcatctgcaaatgtggccaggcttggggaacaatgatggtgcacaaaggcttagatttgccttgtctcaaaataaggaattttgtagtggttttcaaaaataattcaacaaagaaacaatacaaaaagtgggtagaattacctatcacatttcccaatcttgactattcagaatgctgtttatttagtgatgaggattagcacttgattgaagattcttttaaaatactatcagttaaacatttaatatgattatgattaatgtattcattatgctacagaactgacataagaatcaataaaatgattgttttactctgmaaaaaaaaaaaaanntattngcc

SEQ ID NO: 70 - DNA, 960 bp, Homo sapiens
  misc_feature (4)..(4): n equals a,t,g, or c
  misc_feature (31)..(31): n equals a,t,g, or c
  misc_feature (951)..(951): n equals a,t,g, or c
  misc_feature (956)..(956): n equals a,t,g, or c
aagnatagaaattaaccctcacgtaaagggnacaaaagctggagctccaccgcggtgcggccgctctagaactagtggatcccccgggctgcaggaattcggcacgagctcttccacccctgccaggcccagcagccaccacagcgcctgcttcctcggccctgaaatcatgcccctaggtctcctgtggctgggcctagccctgttgggggctctgcatgcccaggcccaggactccacctcagacctgatcccagccccacctctgagcaaggtccctctgcagcagaacttccaggacaaccaattccaggggaagtggtatgtggtaggcctggcagggaatgcaattctcagagaagacaaagacccgcaaaagatgtatgccaccatctatgagctgaaagaagacaagagctacaatgtcacctccgtcctgtttaggaaaaagaagtgtgactactggatcaggacttttgttccaggttgccagcccggcgagttcacgctgggcaacattaagagttaccctggattaacgagttacctcgtccgagtggtgagcaccaactacaaccagcatgctatggtgttcttcaagaaagtttctcaaaacagggagtacttcaagatcaccctctacgggagaaccaaggagctgacttcggaactaaaggagaacttcatccgcttctccaaatctctgggcctccctgaaaaccacatcgtcttccctgtcccaatcgaccagtgtatcgacggctgagtgcacaggtgccgccagctgccgcaccagcccgaacaccattgagggagctgggagaccctccccacagtgccacccatgcagctgctccccaggccaccccgctgatggagccccaccttgtctgctaaataaacatgtgccctcaggaaaaaaaaaaaaaaaaaaaaaaaaaaggggggggncccgntccc

SEQ ID NO: 71 - DNA, 385 bp, Homo sapiens
  misc_feature (311)..(311): n equals a,t,g, or c
  misc_feature (327)..(327): n equals a,t,g, or c
  misc_feature (350)..(350): n equals a,t,g, or c
ggcaggaggtcaacggggaggtgcggagtcggagagacagcatctgcagcagcgtgtccttggagagctctgcagcagaaacacaggaggagatgctgcaggtgctcaaagagaaaatgcgactcgaaggacagctggaaccttgtcactggaggcgagtcaggcacttaaagagaaggctgagctgcaggcccagctggccgccctcagcacgaagctgcaggcgcaggtggagtgcagccacagcagccagcagcggcaggattcgctgagctcggaggtggacaccctgaagcagtcgtgctgggacntggagcgagccatgantgaccttgcagaacatgctggangcaaaaaatgccagctggcgtcgttccaacaacga

SEQ ID NO: 72 - DNA, 597 bp, Homo sapiens
ggcacgaggacaggatcctggtttgggtaccttagtttaatagaaacccaggtggaaacctagattgcagggcatttgtttgagactatttagccacagcagggcaagcaggaagatgcagcctgtcactgctaactccttagtattaaaactgtcaaacatgggaggtaactgctgatgcatttttcagttgatagtttatatactttctctgaaggatcctaatgatagttaaccatttctcatttttattttgctggattgttttctgttttttgcttcagcattcttgcttttgctgtgcttacttttggagttttgattccctgtgtcactgttttctttcgcatacacctctcaggtttacacagtaaacaatgtgaatgtgatcaccaaaatacgcacagaacatctgaccgaggaggaaaaaaagagatataaaggtaatcaccaccaccctcccacctsctgttttgttgtkattttttaagcctagagggaactctttgttggctctgttaagtttagggttaatgtgattgggttgtgttaagcctaaccctaacttctwctctctctctctcttttttttttttt

SEQ ID NO: 73 - DNA, 440 bp, Homo sapiens
  misc_feature (395)..(395): n equals a,t,g, or c
  misc_feature (418)..(418): n equals a,t,g, or c
  misc_feature (433)..(433): n equals a,t,g, or c
tggaactccgggacatccctctgcgtccccaccctcccgacccccaagctcctcaacgccgaagcgcccccgaactgccggaaggaatcctaaaaggaggcagtcttccccaggaagacccaccaacctggtctgaggaagaagatggggcctccgagcgagggaatgtggtggtggaaacactccacagggcccggcttcggggccagcttccctcctccccaacccatgctgactctgccggggaaagcccctgggagtcctcaggggaggaggaagaagaggggcctctgttcctgaaagctggccacacatccctgcgcccaatgcgggctgaggacatgctcagagagatccgggaggagctggccagccaaaggattgagggggccgangagccccgggacagcaggccacngaagctgaatcgggnccagctg

SEQ ID NO: 74 - DNA, 1481 bp, Homo sapiens
  misc_feature (14)..(14): n equals a,t,g, or c
agaggcttggcttngaaacatccggggagagttgggcaggctgctctttatggatgtggctgctgggctgaaaatactggagctcataacccctactccacagctgtgagtacctcaggatgtggagagcatcttgtgcgcaccatactggctagagaatgttcacatgctttacaagctgaggatgctcaccaagccctgttggagactatgcaaaacaagtttatcagttcacctttccttgccagtgaagatggcgtgcttggcggagtgattgtcctccgttcatgcagatgttctgccgagcctgactcctcccaaaataagcagacacttctagtggaatttctgtggagccacacgacggagagcatgtgtgtcggatatatgtcagcccaggatgggaaagccaagactcacatttcaagacttcctcctggtgcggtggcaggacagtctgtggcaatcgaaggtggggtgtgccgcctggagagcccagtgaactgacccttcaggctgagtgtgaagcgtctcagaggcatttcagaacctgagcttttgggggtttttaactgaagttggttgttttatctttcttgttttataattcctattgcaacctcgtgcactgctcgagacacaagtgctgctgtagttagcgcttagtgacacgcgggcctttggtgggtgagcgggactgtgtgtgagtgtgtgcgcgtatgtgcgcacatatgtgtatgtgtggagtatgtgtgtttgcttctccgtggatgaaatagaaactcctcattgtgtgaccaggaatggttaaatcatctttacaaaatgtgtgctttaactgtttacaagtaaaacctaaagttgcaggaaacattttttatttcgtaaagaggtaccaactgtcgctgatgtgatatgtcagaactgaagagtaaatctacttgtttaaatgacttgacagtggtagtgctccatttaataacagtaataagtaataaagtgtttttatttggttaaccagtttaagtggatcctgtggtaacttaaactgktgktctcatcccytatatggggcatttttctttaacaaagaatggtttcagtgaaacaatctagcagagaattaatgtcagaacctttttaaataatagtctgattgatacagtttgtacttatttcatcaagcttttctaagcttaaatattgcatagcttcgagctgtatggactatattatgaaagaatatgtaaagagaacatacagtaatgcacagtccttaatttgtgtataatggaaagttatttacaatataacactgtaaataagaaagcaaagtttatgggaaaattcaatattatctttgtttttgtttaaatatatttttaagataaaggcmcaaaaataaaagaagcgtattactgggtatagtatgtgactcctcttctcagactaataaattatcttttgaatccttaaaaaaa

SEQ ID NO: 75 - DNA, 1280 bp, Homo sapiens
  misc_feature (29)..(29): n equals a,t,g, or c
  misc_feature (47)..(47): n equals a,t,g, or c
  misc_feature (83)..(83): n equals a,t,g, or c
  misc_feature (121)..(121): n equals a,t,g, or c
  misc_feature (133)..(133): n equals a,t,g, or c
  misc_feature (154)..(154): n equals a,t,g, or c
  misc_feature (1166)..(1166): n equals a,t,g, or c
cacgacaggtttcccgactgaaaagcggncagtgagcgcaaccccanttaatgtgagttagctcactcattaggcaccccagnctttacactttatgcttcccggctcgtatgttgtgtgnaattgtgagcgnataccaatttcacacaggaancagctatgaccatgattacgccaagctctaatacgactcactatagggaaagctggtacgcctgcaggtaccggtccggaattcccgggtcgacccacgcgtccgggaggcagaggttgcagtgagccgagattgcgccactgcactccagcctgggtaacagagcaagactccatctcaaaaaaagaaagaaagaaaaaagaaagtacaagtttataaagtattatagtgaaaaattcgcattctggctgattttaagccatttaaaatttatataaaacaaccttccataaaaatttgacaggtgcccagatgttgctttctccatttattttttgtttttttttaatcacagtaggtctgatagagaattggagctaaattataatatttttgttggtaaagttgagttatatacttgtacatacaatggaaatgcttttagtagtgattatttagcaatttttgtttttgttatattaggcatgtttggaggctttcctattctagcatttaaatttaaattttattaaaattaaataatttaaatctagcatttaaatttaaataatttaagtctagcatttacttttaaataattataatgaagttttgaaatactaagttaatccagacctttagttgtcccatggtgttaataaagttgccaaagaagatgtattatgaacaattcagcaataagacaattgtcaacacagttgagaataacaatggtaatcgttagtaatatttagaattggaatttgcctactgaaatagttatagatgattacttgtgatgtgaaactgaattgagcatgacaaccagacatttccagttggttttgtaagttttgagaatctagatactgggttttattttttgaaagattagctctgtttgtaagggctgattccttgaaaatgtaattttccagaaaaacacctaaagaaaataaaacatggacatgcctagtaaaaaaaaaaaaaaaaaaaaaaaaggggcggccgntctagaggatccaagcttacgtacgcgtgcatgcgacgtcatagctcttctatagtgtcacctaaattcaattcactggccgtgttttacaacgtgtgactgggaaaaccctgg

SEQ ID NO: 76 - DNA, 685 bp, Homo sapiens
gggaaagctggtacgcctgcaggtaccggtccggaattcccgggtcgacccacgcgtccggtaaaaagtgactgaggacacaagcagtgttctgcgttccccgatgcccggagtggtggtggccgtctctgtcaagcctggagacgcggtagcagaaggtcaagaaatttgtgtgattgaagccatgaaaatgcagaatagtatgacagctgggaaaactggcacggtgaaatctgtgcactgtcaagctggagacacagttggagaaggggatctgctcgtggagctggaatgaaggatttataacctttcagtcatcacccaatttaattagccatttgcatgatgctttcacacacaattgattcaagcattatacaggaacacccctgtgcagctacgtttacgtcgtcatttattccacagagtcaagaccaatattctgccaaaaaatcaccaatggaaattttcattgatataaatacttgtacatatgatttgtacttctgctgtgagattccctagtgtcaaaattaaatcaataaaactgagcatttgtctaaatattagtttgccctttctttgaatgaagacaatgtacacataggcgaccaggtctgccagtagactaccagcatttctttgtgatccttttaagagattgatataaatgtcagtcagttct

SEQ ID NO: 77 - DNA, 926 bp, Homo sapiens
agaggacgagagaggggggtgaggagaaaagagagagagcgcgagagggagagggagagaaggaggggtgggaattacacaaagagagaaccaaaaataattttgattcctaagttaatttgctcactgatctgggattttagtcaccatggagggtaaatggacaatctgcccaggactgcagcccgatactatttttcaaagccagaacttactccattttctatgcaaatgtcagaaaaatgaaacaccctctctcccaagtcagagaaggggaagcaacggctctcacgttgggacaatattatctggaagctgaagaagaaactgaatactccttccttcctccccacccattcctttaaatccggagggggaaaaaatcccaaggtctgcaaagctaaaacccaatctcggatatactactaataggcgcggcgctcggactataaaacacaacaaatcataaacccggcggagagccagcggccgcgcgcgcctcccctcccaatgagttcctatttcgtgaactccaccttccccgtcactctggccagcgggcaggagtccttcctgggccagctaccgctctattcgtcgggctatgcggacccgctgagacattaccccgcgccctacgggccagggccgggccaggacaagggctttgccacttcctcctattacccgccggcgggcggtggctacggccgagcggcgccctgcgactacgggccggcgccggccttctaccgcgagaaagagtcggcctgcgcactctccggcgccgacgagcagcccccgttccaccccgagccgcggaagtcggactgcgcgcagacaagagcgtgttcggcgagacagaagarcagaagtgctccactccggtctacccgtggatgcagcggatgaatttcgtgcacagt

SEQ ID NO: 78 - DNA, 447 bp, Homo sapiens
  misc_feature (434)..(434): n equals a,t,g, or c
  misc_feature (445)..(445): n equals a,t,g, or c
gcagaacccctgaatcctggaggctcacgcccccagccaaagtagggggactggatttcagcccagtacaaacctcccagggtgcctctgaccccttgcctgaccccctggggctgatggatctcagcaccactcccttgcaaagtgctcccccccttgaatcaccgcaaaggctcctcagttcagaacccttagacctcatctccgtcccctttggcaactcttctccctcagatatagacgtccccaagccaggctccccggagccacaggtttctggccttgcagccaatcgttctctgacagaaggcctggtcctgggacacaatgawtgacagcytcagcaagatcctgctggacatcagctttyctgggcctgggacgaggacccattgggscctggamaacatcaactgggtccccattttatttcntgaggttacantt

SEQ ID NO: 79 - DNA, 853 bp, Homo sapiens
  misc_feature (816)..(816): n equals a,t,g, or c
  misc_feature (839)..(839): n equals a,t,g, or c
cgccaggccaggcacctaggccaggggagcggagacctcgtgggagcgggcagggggacctttcccctctcccgggcttccacccaggcgcctccccgctgtgaaacgccgccgcccaggaaaaactgcatagaaaatctaatggatgaagatgagaaagacagagccaagagagcttctcgaaacaagtctgagaaagaagcgtcgggaccagttcaatgttctcatcaaagagctcagttccatgctccctggcaacacgcggaaaatggacaaaaccaccgtgttggaaaaggtcatcggatttttgcagaaacacaatgaagtctcagcgcaaacggaaatctgtgacattcagcaagactggragccttcattcctcagtaatgaagaattcacccagctgatgttggagagccatttcagagactgtgaagaatccaggtgccatgtcttagtggccaggatgttccctttctaaaatgaggacagagcccaggagataacccatcatgtccctagggaactgctaatgccctccagatgtgactcccgtcttcttccctcttctctctaagaggcacaaaaccagactccaggaggactcacatagctktgaagtttgaaaaaacaaaattgacctggctgaaaaaacaaaattgacctgggctgcagacmagccaagctggtaaaagtatcarctgggcaaagacttgkggytaccagcattgggagcagttgcmcttcaaaaggagccaaatgcctgkggcctgcggaawaggacttggggattttgaattwatycaaaagcatttntttctttttaggcccagaggttnttcccagggacaca

SEQ ID NO: 80 - DNA, 2310 bp, Homo sapiens
  misc_feature (2)..(2): n equals a,t,g, or c
  misc_feature (6)..(6): n equals a,t,g, or c
  misc_feature (14)..(14): n equals a,t,g, or c
cncccntttagggnaaattgggtccggccscccttttttttttttttttttcaggttaaagcaacatttaatatcctttacaagatggaattcgtgacaagttcaaaaggaraacttcctttgttttaatgcagctgtgctcagaagcctgtgatttcctaggaaaccatctgggtttagcccattagaaaaatgcagtttaaagcagtgtcacactggctgcctgaaggtacccttggagatactggagcgcttctgcattcaggctggtgctcaccattgatggaacccttcctggacaggcggtagacaacttgtgaagtgactgtgccaggtgaattttggggttattcaccatttgacctacaggatcatgctcttttttcccagcaaatgccaactgtgagaaggcagtctgatatcctggtgtatcttctatgtcaataaaatgttcctcatcaggaatggtatcatcttcgggtaactcaaaaagaccaatcaaagactgtaataatggagtccacagtttggtatactcagtgtccatcattgggggacattctgttagtaatttggttatgccaaccgcacagatctttttctctacatttccagataccttctgaatttcaggaataataattttttccaaaaccattccaaacatttttggttgtataccatcaaatatttcttgtagtgctagtgccccatattttatgcaatacaaattaataaagactaaaaaactcttgataaacttggttgttttggaattctgaagtctctggaatagcagaatgaagatttgtttcctatattggtcaactgattcaggaggcatgtgctctattatactgtttagaagataaaaaccttggtggtcatttgctttggatgcaatcagcttctgaaagacacctagtaacccaggaattttgtcagctgcagcacttgctattgtgtttgaaccgcgttctaagaatgcttgaagaagcctcactagagcaggaatatttcctgttctttcccaaagcactggctgaaggagatgaggaaataaggccatataggaagacgggatgtcatttttgtgtgtttccagaagcaaagacatcacttgaaagacgtatggaataaattcttgcacatcattttgtaagatttcagtaaacaccaaaaacaaagcctcctcaaaatttacaacagcagcagggttagctttgcaagttattcttatggataaacatattgcttcaaacatgtagtgattaaagtgaggtttgcttgggttcttactaacagctaatagcttctgtgtaagctgagtgatgagagtagggatgtaggggattatgggaaatttggtttcaagtgtacatgtgtgaaaacaatattgtatactaccatagtgagccatgattttctaaaaaaaaaaataaatgttttgggggtgttctgttttctccaacttggtctttcacagtggttcgtttaccaaataggattaaacacacacaaaatgctcaaggaagggacaagacaaaaccaaaactagttcaaatgatgaagaccaaagaccaagttatcatctcaccacaccacaggttctcactagatgactgtaagtagacacgagcttaatcaacagaagtatcaagccatgtgctttagcataaaagaatatttagaaaaacatcccaagaaaatcacatcactacctagagtcaactctggccaggaactctaaggtacacactttcatttagtaattaaattttagtcagattttgcccaacctaatgctctcagggaaagcctctggcaagtagctttctccttcagaggtctaatttagtagaaaggtcatccaaagaacatctgcactcctgaacacaccctgaagaaatcctgggaattgaccttgtaatcgatttgtctgtcaaggtcctaaagtactggagtgaaataaattcagccaacatgtgactaattggaagaagagcaaagggtggtgacgtgttgatgaggcagatggagatcagaggttactagggtttaggaaacgtgaaaggctgtggcatcagggtaggggagcattctgcctaacagaaattagaattgtgtgttaatgtcttcactctatacttaatctcacattcattaatatatggaattcctctactgcccagcccctcctgatttctttggcccctggactatggtgctgtatataatgctttgcagtatctgttgcttgtcttgattaacttttttggataaaaccttttttgaacagaaaaaaaaaaa

SEQ ID NO: 81 - DNA, 2432 bp, Homo sapiens
ggcacgagcaatgaaagagttaatctctttggctgggcctacagatgacatacagagtacagtcccccaggttcatgctttaaatatccttagagcattgttcagagatacgcgcctgggagaaaatattattccttatgttgctgatggagctaaggctgcaattctgggttttacatcaccggtctgggcagtgcgaaattcatccacacttctctttagtgccttgatcacaagaatttttggagttaaaagggcaaaggatgaacattccaaaacaaatagaatgacagggagagagtttttctctcgtttcccagaactctatccttttcttctcaaacagttggaaactgtagccaatacagtagacagtgatatgggagaaccaaatcgtcatccaagcatgtttctcttacttttggtgttggagagactctacgcttccccgatggatggtacttcttctgctctcagcatgggaccttttgttcccttcattatgaggtgtggtcactcacctgtctaccactcccgtgaaatggcagctcgtgccttggtcccatttgttatgatagatcacattcctaataccattcgaactctgttgtccacactccccagctgcactgaccagtgtttccggcaaaaccacattcatgggacacttctccaggtttttcatttgttgcaagcctactcagactccaaacacggaacgaattcagacttccagcacgagctgactgacatcactgtttgtaccaaagccaaactctggctggccaagaggcaaaatccatgtttggtgaccagagctgtatatattgatattctcttcctattgacttgctgcctcaacagatctgcaaaggacaaccagccagttctggagagtcttgcttctgggaggaagtcagagggattatctcaggatcagagctgataacgggattcccttgggccttcaaggtgccaggcctgccccagtacctccagagcctcaccagactagccattgctgcagtgtgggccgcggcagccaagagtggagagcgggagacgaatgtccccatctctttctctcagctgttagaatctgccttccctgaagtgcgctcactaacactggaagccctcttggaaaagttcttagcagcagcctctggacttggagagaagggcgtgccacccttgctgtgcaacatgggagagaagttcttattgtggccatgaaggaaaatcacccagaatgcttctgcaagatactgaaaattctcactgcatggaccctggtgagtggcttccccagacggagcactgtgtccatctgaccccaaaggagttcttgatctggacgatggatattgcttccaatgaaagatctgaaattcagagtgtagctctgagacttgcttccaaagtcatttcccaccacatgcagacatgtgtggagaacagggaattgatagctgctgagctgaagcagtgggttcagctggtcatcttgtcatgtgaagaccatcttcctacagagtctaggctggccgtcgttgaagtcctcaccagtactacaccacttttcctcaccaacccccatcctattcttgagttgcaggatacacttgctctctggaagtgtgtccttacccttctgcagagtgaggagcaagctgttagagatgcagccacggaaaccgtgacaactgccatgtcacaagaaaatacctgccagtcaacagagtttgccttctgccaggtggatgcctccatcgctctggccctggccctggccgtcctgtgtgatctgctccagcagtgggaccagttggcccctggactgcccatcctgctgggatggctgttgggagagagtgatgacctcgtggcctgtgtggagagcatgcatcaggtggaagaagactacctgtttgaaaaagcagaagtcaacttttgggccgagaccctgatctttgtgaaatacctctgcaagcacctcttctgtctcctctcaaagtccggctggcgtcccccaagccctgagatgctctgtcaccttcaaaggatggtgtcagagcagtgccacctcctgtctcagttcttcagagagcttccaccagctgctgagtttgtgaagacagtggagttcacaagactacgcattcaagaggaaaggactttggcttgcttgaggctgctggcctttttggaaggaaaggaaggggaagacaccctagttctcagtgtttgggactcttatgcagaatcgaggcagttaactcttccaagaacagaagcggcatgttgaagaaaatctgggggattgggatgggggtatgtgtggatttttcctccactaaatctgcaggaaacatgttgaacataaattcaaaaattttatcccaaaaaaaaaaaaaaaaaaaaaaaaaaaa

SEQ ID NO: 82 - DNA, 744 bp, Homo sapiens
gtaagtccacatgcgtctcgtgaagatccccccaaagcttgcctatggaagtgaaggagtttctggtgtgatccccccagattcagttcttcattttgacgtacttctgatggatatttggaattctgaagatcaagttcaggttcacacttatttcacacctcccagttgccctcggaccatccaggtgtstgattttgtaaggtaccactacaatggaacattcttggatgggacactctttgattcaagtcataatcgcatgaaaacatatgacacgtatgtgggcattggctggctgattcctggaatggacaaagggctgttggggatgtgtgtgggggaaaagcgcatcatcaccatacctccttttctggcctatggagaagarggagatgggaaagacattcctggacaggcatctctggtgtttgatgttgcattactggacctccataaccccaaggatggcatttccattgagaacaaggtagtcccaggttaattcatggctttttctttgaccaacaaaacatatgagtacatatgcaaggtagttaaaatagcatgctcgaaaaaaacataatgtctctttcacctgtaactgttttagccaatgaaagctttcaaattttatgtattgtggggcttatatgtagcactttacattttcatgctgcttaattgttttattctactgaaataaatgaatttcatcaaaaaaaaaaaaaaaagggcggccgc

SEQ ID NO: 83 - DNA, 2840 bp, Homo sapiens
  misc_feature (524)..(524): n equals a,t,g, or c
  misc_feature (527)..(527): n equals a,t,g, or c
  misc_feature (2289)..(2289): n equals a,t,g, or c
gcatcgggaggagcacgcgcctcagaaaccctaaaagcagagtgaaaggagctggcgacagggtgcgcggcgcctcacgcggatgaatgggaaacgcgcgaaggaaccagcaggccccgcgaggctggtctccctccttctctttctccccgcttctcccgccgttctctttctccttaccatcgtaaccacggccgaatgttgcaggctactctctgccgaccaggccgccgcccgtccctcgtgactacagcaggtaccgcagtcccgagccgcagtttcaagagaaatggccgccaaacaggactatgacctttcacctcccaccacggsccttcctgcctctgtgattggacgcaaagaggtgcgtgctgattggaggagatggctggcccagtatctcctagcaaccagcagcggcttgggtttgcgccttgcaggcggmgcgcggaccttgggaaaccggctctgagcatcgctgtgaggcagccaaggactggaggcaggccggtgtttttaaatgnggngtccttcctagagggcggtctgggagaggctgtgtaacggatgtgacttctccccaacttggctaatggggatttactttgtctttttacacccgtgagaatgttcggggtcccagagttccttcctcactcttccaacaggttccatgatttgggggcgcctctgccgcaggccctttctacctgagtgttctctcttctgcaacacccgttttaaccccttttaaaggaattgggggctagccagactagactaggggcggcgaaacgcactgaagagagttggatacagaatttcttgcaaacgaggtcgagttgcgtctgggatacggtgtcatgccccacccccgccccacgaccctgccggccccacctttcttttgcttcgcctgcagaaacccgcacggccttcatacgtgcatttgaaattacctaagggcgtaagcaatatttcctctgtcacggattaaaactttcgatgtaacggtgttatctgaatctcactagtttttgtcgtaatcctattgagttcgggtcactctgatctgaaatgctaaatgcagttcttggagaacacgccctttgggaagtaacgcttttttgcggccctgaagagatggatttggagttgaggatgaaatgttgggtgttgaggcattgtggagcagtgggcaagactttggagggggcctgcattcggaacctgcgtctatcaggcgcggccggtgttgggcagtgtcttaaccccgagggccattgtttcctcggcaggaacgcggctttaaaaacggaaccatcctcagggtggttgcgagaatttaacgtaaaacggggcttggccttgtaaaagctcagtgtttcacgtaaatgttgaacactgaccagacaatgattgtcagtgtagtttttaccaaacagttattagatttattcaccctaaacttcagtggatttctccgtttgtctattgttttatgaactttaagtctttgtatagactttgagttcctactatgtgtcaggctttttcaacaatcgtggaaatctkrccttactgtctgattcggggtgacagccccgtttaagagatgaggaagtaggcccagcaggtaactgttaccagttgagggtagctgtccgagttcttggcgttttcaacaaagaattggacaaaacgcacaaacaaagcagggcagcgaaagcagagatttattttaaatgaaagtacactctacagggtgggcaccgcctggtgcaagcggctcaagagcattggttatagaattttctgggctttaaataccctctagaggttgcccattggcccacaaccagtctgattggttgcgggaggggaccaataagaggtactttcatttttcaactgccacgcagaaaaaggaggggttgaaatgggagtagcctctgatacccagtcagcatggatgggccctaggttccctgcttccagccgctattcttctgcctcatagcttgctcaggaccacatacctgggtttcaaaactctgctttttctacttcatgaagctacctttcaaagactcaatatgtgttttagaagcctgactctttagctgttttctcagtgaagtgaaacgaaatactacagtaaacacattctgtaaagatagtgtatttaaggttggtttttcttttcatgttaaattttttttttaatttgagacagggtctcattctgtcacccaggctggattgtaraggtgagatcttggcttactncagccttgacctcttgggctcaagagatcctcccacttcagcctcccgagtagctgggaccacaggcatgtgccaccacacccagctaattttttaattttttttgtagagatagggtctcgctgtgttgtccaggctggtctcaaactcttgggctccagccgtgtacccaccttggcctcccaaagtgctgggattacaggcgtgaaccaccattcctggtccatattaaattttaatcttaaataccttattaaaattaagtgggcataagtcactgatatttgtctaattataaatattatacaaaattttggaaaatgtagaaagttctaaacaataaacctaaaatcactagtaatcccaccaatcaaagagaacacgattaacttttactgtaacatatgcacttttttttttacaagatatctacagttttttgttgctgttgtttgttttttcttttttgytgttgytttggagacagagtgtcactccgtcacccargctggagttaagtggtgcgatctcrggctcactgcaccctccgc

SEQ ID NO: 84 - DNA, 1619 bp, Homo sapiens
  misc_feature (487)..(487): n equals a,t,g, or c
tcgacccacgcgtccgcctggtttccccctggctgacagtgccttggttcctgtcctgttggaatgttaccattgggcctcctgasagcatctgggtgacgccgggagaagcctccctcatcatcaggttctcctctcccttcgacgtccctcccaacctgggctatttccagtactatgtccattactgggaaaaggcgggaatccaaaaggttaaaggtcctttcaagagcaactccatcgtgttggatggcttgasacccttaasagaatactgtttacaagtgaaggcgcatctctttcgyacatcctgcaacacctctaggcccggccgcttaagcaacataacttgctacgaaacaatgatggatgccactacgaagcttcaacaagtcatcctcatcgccgtgggagtctttctgtcgctggcggcgctggcggggggctgttwcttcctggtgctgagatacaaaggctggtgamatantggtttcactctccgccaascatcccatcacaaatcgaagagtatctgaaggacccgagccagcctatcctagaggccctggacaaggacacgtcaccaacagatgatgcctgggacttggtgtctgttgttgcatttccagcaaaggagcaagaagatgttccccaaagcactttgacccaaaactctggtgcggtctgctagcctgtggggtaagggctctgagccgaggaagctgctgatgtccatgtcagcactttatggaatccggtcctccattttcctgtccccaaaaggccgtcagtgcctgtgaagatgtaacgggtctcatgggggcgacaagcttattgatttttttcttcaaactaagagttttctaatcatacgcgtttttagaataattctacagatatgtccccgaaagattaagatttctcttaaacactaaaaagacatgtaattatttgttagcaaatgggcgtctggcacgcctctgacactttctcgtcagcagccaggacacgaagtcccctccttgatsaacccctckggcagaccatgtcacctgtcccagcctgccccaagaagggacattaagtggcccttcttcatatccaaacacctggcttgaaatgtgattagccctgtaaatagtttcacagagattaagcctttttttcccccaagttaggaataaaagactataattaactttttaaaaaaaaaaaaaaaaaaaaaaaaaaaaaaaaagggcggccgctctagaggatccctcgaggggcccaagcttacgcgtgcatgcgacgtcatagctctctccctatagtgagtcgtattataagctaggcactggccgtcgttttacaacgtcgtgactgggagatctgctagcttgggatctttgtgaaggaaccttacttctgtggtgtgacataattggacaaactacctacagagatttaaagctctaaggtaaatataaaatttttaagtgtataatgtgttaaactagctgcatatgcttgctgcttgagagttttgcttactgagtatgatttatgaaaatattatacacaggagctagtgattctaattgtttgtgtattttagattcacagtcccaaggctcatt

SEQ ID NO: 85 - DNA, 2708 bp, Homo sapiens
ggcacgagtgcaaaggaaatggtcacactcttggttgaccttagcttagtgggtaagcccaatgagcaaagagaacaaaaacctgaggagtgttggaaaaggggaaactcatcttccaaagtattttgcttctatgagaaagggaatccattacataacattcttggtttctctctgctccctctttcacttctaccagacagaaggagtgaattttctgactagaaatttaaaggacaggaactagcatctgtgctttggtcccttcctcctttttttctttgggatttgcctgtctgcagagagaacacagcctgttctgctccaccattgtataaacatcagagtggaagggtctgccccatgcagttggatgactggagttgtccaacactgtctgactatgtatataaataagtgcctaatttgggggctcagtattaagaagcttgcttgcccacagcagtaagccatgttctgcaatatcatcttaattagcagtaaaggtgatatttcatctccatctgcttggccatttatcagctggctcttctagaaggtacacagcctcttagcaaatggtggatgtggccaggattaccatgaaaccaccttttggaaagttaccactaaatacactaagtccagtcagtcaggaggcagagtagacttgtttcacatagaactaaggctggacaaaataaagccagagagctgatagcttggatatcattgtgagctagttagacatagactttctgaaaaaccatcagtactagggtcttaacttgttgagtcccacaaacagccttgagaaagaattttagtgcttagtgcaggtcatttttttaagaggtaaacccggaatataccggttcaggaagtaggagagtgaaaaatgcaaaaacaaaaaacaaaaaccatgaaactgtatattaaggaagaagttgctggtatgggaactaggactcaacctcactgaggacctctgggagattgcacagaacactattcttacagttgccccacaacaccccccgccgccccctcactaccaccaccaaggggcaaaaaagctaggccattcacccactcccattggtcatgggttgagggctgttcccaggggcagtattaattccctggcacttccagcttgcctcacacattgatttagcatcctctgaaggtaggggaaggccctcacacaaagactgagaaactgttattgcaaaaaagaactggcagatcatgacagtgactgctacaaatctaggtgttgtgtcaccacagaagaaaacattttatgtaaggctcagtggtcctcacagcttttctatctcacttgacaatgaagatacaatcttacaaggtgtctagccaggaattttatcttcatcaagggtaaagagacgatgggaaacaggatcagagagatgaggacctgccaaaagaaaaaagcacaacaaagtgacatccaacaatataatatatgggaatttaaaatgagacaaagccaagtcctgagcttttttaatgaatggaggaaaagcaattctttgagaggatggagtagaacatgcactcagaacaagaataaatgttttaatgtcagtactttgctgaatgtatatgcagaattgacagactccatccatttccatcaagggcatcaaatttcaactattgtttgcttagtctgcaaaaatagccaccctgcatccttgaagcttaattcaactccttcagtaagttttagatgatgggtagttaaaggattaaactgctgcagttgaactcttatgccttataattgatatattgaaaggctaaagcatgttcgattcctgatgatagcaatctgcagtggcatcataagcacattaaattcagactgaaacattcagcgaagttaatattgacttcacaatgttctaagatgtaagtgaagctatgctctttttgccttataaaattagactgcaaaaaaacaatttttgaggatattcccagtcaattgacttggttacagagtgagcaggaaatcaaactctagttaagttcatagatactggtgttttattcatttggaaacagaagagaaaaagagtatgctgtagtaaattgtttataaattctttttaattctaaaggagggggagaaagtgaaagtaaaaagcaaacattattaatctcttactgtcacaaaaaaaacaacccactcttacacctccatcattgcctaaaagacaaaaactccaaagactggcatttgagactcctcacagtctgccaaaactgcctcctccctcgtcaggtcagtcaccaagtcctttcagttctatctccaaacacatctcagtccctgccaccatggtctgttatctgaactactataacagtttcctaactggcctccctccttcctctctggaccctccagtgtgttccttcgtaacagctagagtggatttttaaaagtcctcccatggagttggagaccagcctggccaacatggtgaaaccccgtctctaccaaaaataataaaattagctgggcatggtggtgcacacttgtaatcccagctacttgagaggcagaggtgggaggatcacttgaaccccggaggtggaggctgcagtgaattgagattgtgccactgcactccagcctgggtgacagagtgagactccatctcaaaaaaaaa

SEQ ID NO: 86 - DNA, 846 bp, Homo sapiens
  misc_feature (800)..(800): n equals a,t,g, or c
  misc_feature (832)..(832): n equals a,t,g, or c
  misc_feature (840)..(840): n equals a,t,g, or c
tcgacccacgcgtccgcccacgcgtcgcgccgccgaggaaaaccgtgtactattagccatggtcaaccccaccgtgttcttcgacattgccgtcgacggcgagcccttgggccgcgtctcctttgagctgtttgcagacaaggtcccaaagacagcagaaaattttcgtgctctgagcactggagagaaaggatttggttataagggttcctgctttcacagaattattccagggtttatgtgtcagggtggtgacttcacacgccataatggcactggtggcaagtccatctatggggagaaatttgaagatgagaacttcatcctaaagcatacgggtcctggcatcttgtccatggcaaatgctggacccaacacaaatggttcccagtttttcatctgcactgccaagactgagtggttggatggcaagcatgtggtgtttggcaaagtgaaagaaggcatgaatattgtggaggccatggagcgctttgggtccaggaatggcaagaccagcaagaagatcaccattgctgactgtggacaactcgaataagtttgacttgtgttttatcttaaccaccagatcattccttctgtagctcaggagagcacccctccaccccatttgctcgcagtatcctagaatctttgtgctctcgctgcagttccctttgggttccatgttttccttgttccctcccatgcctagctggattgcagagttaagtttatgattatgaaataaaaactaaataacaattgcaaaaaaaaaaaaaaaaagggggggccgctyctanaaggatccaastttaccttaccgtgcattgcnaagtatancttttt

SEQ ID NO: 87 - DNA, 1775 bp, Homo sapiens
ccacgcgtccgctcagcgcgctgcccggctggggacccgcgcacctgcagcgcccgctgctcggccctgcatcctgcctgggcatcctgcgcccggccatgacggcgcactcattcgccctcccggtcatcatcttcaccacgttctggggcctcgtcggcatcgccgggccctggttcgtgccgaagggacccaaccgcggagtgatcatcaccatgctggtcgccaccgccgtctgctgttacctcttctggctcatcgccatcctggcgcagctgaaccccctgttcgggccccagctgaagaatgagaccatctggtacgtgcgcttcctgtgggagtgacccgccgcccccgacccaggtgcccagctctcggaatgactgtggctccactgtccctgacaaccccttcgtccggaccctcccccacacaactatgtctggtcaccagctccctcctgctggcacccagagacccggacccgcaggcctgcctggttcctggaagtcttcccagtcttcccagccagcccgggccctggggagccctgggcacagcagcggccgaggggatgtcctgctccaatacccgcactgctctggagtttgccctctttcccaaggagatgctgctggggagctggtatgggtggggtctttccctttacagacggggcagatgccaggactcagcccatcctgaggaggacacgtgtcctcatggagagggtgctccggcccaggcgggggagtcggtgcccagtcagcagctctgccaccatcctgctgggaactgggggggcctctattgggttataggcaaggccttttctctggcatggaattgttaattttctgacacgtctagatgtgaaatttctgaaaatgttgaagcagagaaacattcacacacaaaaagcaacatagtcatgtgggtccagatggcctcagtcctagatgttggcaccctttgctgtgtctcctcagagtatcctgttccgcctcctgccacctggacctccctcagtggatgtcttccctcccccgaccccagcctgtcagtccgagcacagtgcaggtttggctctgacttgggcctttggctgcagtgggggtggatttcagagcctctcatggcagcatctaagtgaccagagctgggatgagagaggggaaggggcaatgtgagtggcgctatgggacgggccagccctgctcctgagccagccccgccctctgccccctggccctgggctctgtgctagggatggtgaagaatgggggcgtgccagcctggcaggagtgggaagcaacacgcaggggtcccggacctctccagccttgccctcacgcttatccgagctcccagtgtggttagcacagagctcacccaccttgcctggctcccagctggggcctgtcctcactggtgctccaggggaagaaacgacagcctcacttctgtatggactgctgatgtggcctgccatcctgttcagcgggcattgtctttggagcagcaggagactaggatgcctctcactcacatgccagttcctggctggccagctgctcagggctcaggctggggcctcccattgacatcctccccctacactccctctctgagcctccgtcgcccctcctgttgggtaagggtgttgagtgtgacttgtgctgaaaacctggttcatatataataaataatggtgatgaaaaaaaaaaaaaaaaaaaaaaaaaaaaaaaaaaaaaaaaaaaaaaaaaaaaaaaaaa

SEQ ID NO: 88 - DNA, 705 bp, Homo sapiens
  misc_feature (9)..(9): n equals a,t,g, or c
  misc_feature (14)..(14): n equals a,t,g, or c
tcggggaantatcncctgtgtgctttttagctgttagtgctatgaaagcaaaaatgctttctgttttgtccttcctgatctactggacaccaacgggcatgtgcttaacgctgtggaagtaggctcaaaggtctccccttatatagcatgttaagtgtttgwacaggtyygctaaaaccctttctatataaataagtttattaggttttctgttacgtakggtctctagttccttcctcctctcaaaatctccctacgaagatggtgttccactgagcgagctcagcgcaagtaggagagagcagacagctttactggtcacatgtatgctttgatttagcacaatgtttcatagaaagtactgaccaggaaacacaggtgtcacatctctagaaagaaagtacgtagtatttcaattcccagtgtgtaccttctgtgttttttgtaagtaaaagtaagactctatactgatctcagtcacccattctggttttcaagtatgagctatatagrctatgcgtgacgcttattaaatacttttgtaccatgagtaaacttggaggtctgttgcaagaaccatgaaaaaaaaaaaaaaaaaaaaaaaaaaaaaaaaaaaaaaaaaaaaaaaaaaaaaaaaaaaaaaaaaaaaaaaaaaaaaaaaaaaaaaaaaaaaaaaaaaaaaaaaaaaaaaaaaaaaaagggggg

SEQ ID NO: 89 - DNA, 1876 bp, Homo sapiens
  misc_feature (1846)..(1846): n equals a,t,g, or c
  misc_feature (1848)..(1849): n equals a,t,g, or c
  misc_feature (1857)..(1857): n equals a,t,g, or c
gcgccgccgtggagtgtagcggaaagggctcgccgtcctcctccgtttctcgctgcttcgggacgcgctctctgcggctctgtgagcgcccctgagcgccggcagcggccgcggtgggttcttcaggttatcttatgatgaggcttttgctatggctaatgatcccttggaaggcttccatgaagtaaaccttgcttcacctacttctccggaccttcttggtgtgtatgaatcaggaactcaagagcagactacctcaccaagtgtcatctaccggccacacccttcagctttatcctctgtacctatccaggcaaatgcattagatgtttctgaacttcctacacaacccgtgtattcatcccccagacgtttaaattgtgcggaaatatctagtatcagctttcatgttacagacccagccccttgctctacctctggagtcacagctggattaactaaattaactacaagaaaggacaactataatgcagagagagagtttttacagggtgctactataacagaggcttgcgatggcagtgatgatatttttgggttgagtactgatagtctgtctcgtttacgaagcccatctgttttggaagttagagaaaagggctatgaacgattaaaagaagaactcgcaaaagctcagagggaactgaagttaaaagatgaagaatgtgagaggctttcaaaagtgcgagatcaacttggacaggaattggaagaactcacagctagtctatttgaggaagctcataaaatggtgagagaagcaaatatcaagcaggcaacagcagaaaaacagctaaaagaagcacaaggaaaaattgatgtacttcaagctgaagtagctgcattgaagacacttgtattgtccagttctccaacatcacctacgcaggagcctttgccaggtggaaagacaccttttaaaaaggggcatacaagaaataaaagcacaagcagtgctatgagtggcagtcatcaggacctcagtgtgatacagccaattgtaaaagactgcaaagaggctgacttatccttgtataatgaattccgattgtggaaggatgagcccacaatggacaggaccgtgtcctttcttagacaaaatctaccaggaagatatctttccatgtttaacattctcaaaaagtgagttggcttcagctgttctggaggctgtggaaaacaatactctaagcattgaaccagtgggattacaacctatccggtttgtgaaagcttctgcagttgaatgcggaggaccaaaaaaatgtgctctcactggccagagtaagtcctgtaaacacagaattaaattaggggactcaagcaactattattatatttctcctttttgcagatacaggatcacttctgtatgtaacttttttacatacattcgatacattcagcagggactcgtgaaacagcaggatgttgatcagatgttttgggaggttatgcagttgagaaaagagatgtcattggcaaagctgggttatttcaaagaggaactctgatgctctgcgtgggaccatgcctgaactccccgaataactgaaaaatggctgaatatttttatggttacttgatatttatttccaaggagtgagcctaagacttttttccccttttgcaaattgctctaagaagtaccatgatttcttttaaactgatctatgctgtgtttgcttattctttagttgaacacactatgaagaattccaggtgtactagtgaatgtaatttatagttgccaaaaaaaaaaaaacctgaaataaataaatgttagattgaaaaaaaaaaaaaaaaaactcgagggggggcccgnanncaattcgncctatagtgagtcgtacac

SEQ ID NO: 90 - DNA, 1569 bp, Homo sapiens
ccacgcgtccgcagaggaggagggagggagggaaggagcgcggagcccggcccggaagctaggagccattccgtagtgccatcccgagcaacgcactgctgcagcttccctgagcctttccagcaagtttgttcaagattggctgtcaagaatcatggactgttattatatgccttgttttctgtcaagacaccatgattcctggtaaccgaatgctgatggtcgttttattatgccaagtcctgctaggaggcgcgagccatgctagtttgatacctgagacggggaagaaaaaagtcgccgagattcagggccacgcgggaggacgccgctcagggcagagccatgagctcctgcgggacttcgaggcgacacttctgcagatgtttgggctgcgccgccgcccgcagcctagcaagagtgccgtcattccggactacatgcgggatctttaccggcttcagtctggggaggaggaggaagagcagatccacagcactggtcttgagtatcctgagcgcccggccagccgggccaacaccgtgaggagcttccaccacgaagaacatctggagaacatcccagggaccagtgaaaactctgcttttcgtttcctctttaacctcagcagcatccctgagaacgaggtgatctcctctgcagagcttcggctcttccgggagcaggtggaccagggccctgattgggaaaggggcttccaccgtataaacatttatgaggttatgaagcccccagcagaagtggtgcctgggcacctcatcacacgactactggacacgagactggtccaccacaatgtgacacggtgggaaacttttgatgtgagccctgcggtccttcgctggacccgggagaagcagccaaactatgggctagccattgaggtgactcacctccatcagactcggacccaccagggccagcatgtcaggattagccgatcgttacctcaagggagtgggaattgggcccagctccggcccctcctggtcacctttggccatgatggccggggccatgccttgacccgacgccggagggccaagcgtagccctaagcatcactcacagcgggccaggaagaagaataagaactgccggcgccactcgctctatgtggacttcagcgatgtgggctggaatgactggattgtggccccaccaggctaccaggccttctactgccatggggactgcccctttccactggctgaccacctcaactcaaccaaccatgccattgtgcagaccctggtcaattctgtcaattccagtatccccaaagcctgttgtgtgcccactgaactgagtgccatctccatgctgtacctggatgagtatgataaggtggtactgaaaaattatcaggagatggtagtagagggatgtgggtgccgctgagatcaggcagtccttgaggatagacagatatacacaccacacacacacaccacatacaccacacacacacgttcccatccactcacccacacactacacagactgcttccttatagctggacttttatttaaaaaaaaaaaaaaaaaa

SEQ ID NO: 91 - DNA, 970 bp, Homo sapiens
cgcgaagctcgaaattaaccctcactaaagggaacaaaagctggagctccaccgcggtggcggccgctctagaactagtggatcccccgggctgcaggaattcggcacgagcagatattaaatctcacagaaaggtgttccttattaatctttacaaaattgtcatttccccggtgaagccaatttacattaaaaataatgttcagaaaatgctgctgcctgctttctctcctcttttacccaccccttgttctcccagcaatcttcgccctgtatgtttatgtggacaatttctattgtaacattctccattccattaactctgcctcttcctctgaggggggaaaataaaaccctaaatggctctaatagttatgtattttattttgtctcagaggtttccaaacttctgcttttagcttccttttcactgggacaaatggatgtaagttattttccagtttcctgaaaaataatcagggactattttcttcatctatctcaggtgcttcatgagtttcctaagatattaattacggtttccatacattcagaatcaagggactcacggatatggtactgtgttcactgctacacagagtttttctagaaaaaaaaattctttatttttatcttctatttgtatccaaacgatggtaaaacaaaattcctctttagctaggtactgggattttttctttaggaaatactaatagagttacaaaggttagcttataggtagacaaaagactggcggccaaacagagcagtgggtgaaatgggtccctgggtgacatgtcagatctttgtacgtaattaaaaatattgtggcaggattaaaaaaaaaaaaaaaaaaaaaaaaaaaaaaaaaaaaaaaaaaaaaaaaaaaaaaaaaaaaaaaaaaaaaaaaaaaaaaaaaaaaaaaaaaaaaaaaaaaaaaaaaaaaaaaaaaaaaaaaaaaaaaaaaaaa

SEQ ID NO: 92 - DNA, 4020 bp, Homo sapiens
ccacgcgtccggcgcagacgaggcctgaggcggcggcgcgaggcagtatggtttgaagtggtgaacatggatttttctcggcttcacatgtacagtcctccccagtgtgtgccggagaacacgggctacacgtatgcgctcagttccagctattcttcagatgctctggattttgagacggagcacaaattggaccctgtatttgattctccacggatgtcccgccgtagtttgcgcctggccacgacagcatgcaccctgggggatggtgaggctgtgggtgccgacagcggcaccagcagcgctgtctccctgaagaaccgagcggccagaacaacaaaacagcgcagaagcacaaacaaatcagcttttagtatcaaccacgtgtcaaggcaggtcacgtcctctggcgtcagctacggcggcactgtcagcctgcaggatgctgtgactcgacggcctcctgtattggacgagtcttggattcgtgaacagaccacagtggaccacttctggggtcttgatgatgatggtgatcttaaaggtggaaataaagctgccattcagggaaacggggatgtgggagccgccgccgccaccgcgcacaacggcttctcctgcagcaactgcagcatgctgtccgagcgcaaggacgtgctcacggcgcaccccgcggcccccgggcccgtgtcgagagtttattctagggacaggaatcaaaaatgttacttcttgctgcagattctgcgcaggatcggagctgtgggccaggctgtgtccaggacggcgtggtcggccctttggctggccgtggttgctccagggaaggcagcctctggagtgttctggtggctggggattggatggtaccagtttgttactttgatttcttggctgaatgtgtttcttcttaccaggtgccttcgaaacatctgcaagtttttagtcttgctcatcccactcttccttttactaggtctctccttacggggccagggcaatttcttttcgttcttgcccgtgttgaactgggcaagcatgcatagaacacagcgggtggatgacccccaggacgtgtttaaacccacgacttctcgcctgaagcagcctctgcagggtgacagtgaggcttttccgtggcattggatgagtggcgtggagcagcaggtggcctctctgtctggacagtgccaccaccatggtgagaatctccgagagctgaccactttgctacagaagctgcaggctcgggtggaccagatggaaggcggcgctgccgggccgtcagcttcggtcagagacgctgtgggacagcccccgagggagactgactttatggcctttcaccaagaacatgaagtgcgtatgtcacacttggaagatattctgggaaaactgagagaaaaatctgaggccatccagaaggaactagaacagaccaagcaaaaaacaatcagtgcggttggtgagcagctcctgcccacagtcgagcacctccagctggagctggatcagctaaagtcagagctgtccagctggcgacacgtgaagaccggctgtgagacagtggatgccgtacaagaaagagtggacgtgcaagtcagagaaatggtgaaactcctgttttccgaagatcagcaaggcggttctctggaacagctgctgcagaggttctcatcacagtttgtgagcaaaggcgacttgcagacgatgctgcgagacctgcagctgcagatcctgcggaacgtcacccaccacgtttccgtgaccaagcagctcccaacctcagaagccgtggtgtctgctgtgagcgaggcgggggcgtctggaataacagaggcgcaagcacgtgccatcgtgaacagcgccttgaagctgtattcccaagataagaccgggatggtggactttgctctggaatctggtggtggcagcatcttgagtactcgctgttctgaaacttacgaaaccaaaacggcgctgatgagtctgtttgggatcccgctgtggtacttctcgcagtccccgcgcgtggtcatccagcctgacatttaccccggtaactgctgggcatttaaaggctcccaggggtacctggtggtgaggctctccatgatgatccacccagccgccttcactctggagcacatccctaagacgctgtcgccaacaggcaacatcagcagcgcccccaaggacttcgccgtctatggattagaaaatgagtatcaggaagaagggcagcttctgggacagttcacgtatgatcaggatggggagtcgctccagatgttccaggccctgaaaagacccgacgacacagctttccaaatagtggaacttcggattttttctaactggggccatcctgagtatacctgtctgtatcggttcagagttcatggcgaacctgtcaagtgaagacactactcattatttttgtacatttttgtatatactgggacagcgtgaaacactggaatccttcatggacgagggcatatacaatgatgggacagtgccacactccttcaataaacgtggctgctggccagaggacgtgagcgtgtgacgggcgccttggcgccacctgttgggtgctcactgcctctgcaggtgcagaggggtcagcagcaggagaagcgtgttgaacacgtggctctcagacactccttgttttaacgggaagctctttgcatttgcatttcctcaacaaaggagcaaagcagaggaagctgagagtctggcgtgttcttgacgctttggtcttcagccttgcactggctcttctaaaggacttttggagggcagataatttcatctgttaaatccaacacacatttctttcagggaaaaacaatgtcaccaaattttcagagttctaaactcctttccttcaagccggaattttccttttttcagcaccagtaggtactaagtctccagatggggaaataactaaaatgtgtttttctgctttgttcgctcttacttctgaggaaggtttccagtcaggactcgctgtaccaatatccatggaggaatatgggagcgtttcgctctccttgtaggctgaagtcagtctgacttgaaggggcctggtttggatctaagcaaacacccagatggggttctctggtctcagcaaggcttttcctgttgggagtcacagtaaacagaaacccaaaaatctcatcttgggtgttttcagggcttgttttgagttttgctgaatagggagcgcaagacgccctgagcctccctctcactggtggtgataagaggagccgtctggtgtgtcagggtcacgaacccgttacatttcaggacgatcctttttccttcagcagcatttcttactggctgtggctggaatctgccttttatcacagctgtcaccattctcacgtgattcttgtgagactctttttggttataattactatttaatatttagactattttactgagcagactttataaatgagatatctacaaggcacttaaagtgttacagatgttttaccttaagaattatttaagttgtgttgggttaagacagttttcagtgtaccgtaaatgttgtgttttcagaaaaagacaaaacgatggtgctgactggttttctgtatattgcacaacagtcctcaaatacactgatgtatgaaactattcatacatcaagcagcattttttttcactctccttagaattggaactatgcagttaaggcagataaaatgtacagatgtttcatatattacaggttacatatataaatcaaaatttcctatataaaactgatttgggatttggggtggaaatattttgaatattaatttatttttaaagatgcaagataggactttgtgcaatgtatttttgtaaatgcttttcaaaatatctgtctttggtagtgcttctgctgctgccaccaaattgataagatgctattaagaggtttaaataaagagttttaatttttaaaagggaaaaaaaaaaaaaaaaaaaaaaaaaagg

SEQ ID NO: 93 - DNA, 2544 bp, Homo sapiens
ggcacgagctgcctctgaggatatttctggctgtcgccaactccatggctttccagaatgacatcttcgagtggtccagggaccaccgagcccaccacaagtactcagagacggatgctgacccccacaatgcccgccggggcttcttcttctcccatattgggtggctgtttgttcgcaagcatcgagatgttattgagaaggggagaaagcttgacgtcactgacctgcttgctgatcctgtggtccggatccagagaaagtactataagatctccgtggtgctcatgtgctttgtggtccccacgctggtgccctggtacatctggggagagagtctgtggaattcctacttcttggcctctattctccgctataccatctcactcaacatcagctggctggtcaacagcgccgcccacatgtatggaaaccggccctatgacaagcacatcagccctcggcagaacccactcgtcgctctgggtgccattggtgaaggcttccataattaccatcacacctttccctttgactactctgcgagtgaatttggcttaaattttaacccaaccacctggttcattgatttcatgtgctggctggggctggccactgaccgcaaacgggcaaccaagccgatgatcgaggcccggaaggccaggactggagacagcagtgcttgaacttggaacagccatcccacatgtctgccgttgcaacctcggttcatggctttggttacaatagctctcttgtacattggatcgtgggagggggcagagggtggggaaggaacgagtcaatgtggtttgggaatgtttttgtttatctcaaaataatgttgaaatacaattatcaatgaaaaaactttcgttttttttttttgtttgttttgtttttgagacagagtctcactctgtcacccaggctggagtgcagtggcgcagtctcggctcactgcagcctccacctacctggttcaagcaattctcctgcctcagcctcctgagtagctgagattacaggagcctgccaccacacccagctaatttttttgtatttttagtagagacagggtttcatcatgttggccagactggcctcgaattcctgacctcaggcaatccacccgcctcggcctcccaaagagctgggattacaggcgtgagccaccgcaccctgccgaaaaaaactttttttttttttgagacggaggctcgctctgtcccccaggctggagtgcagtggcgagatctcagctcactgcaagctccgcctcccgggttcacgccattctcctgcctcagcctcccgagtagctgggagccagcgcgcccagcctaaaaaacttttcaagtcaatattactacgatttaacattagagtgtggacatgtgatttaatcgctatagctaaaatacgtcaaatatacgttgtcatgtgcttgaacatgatgctaaccctgacaggatgaaggaaagtaatattctttcagtgtagttcaggagagcatttgttttcttttctaccaattaacccatcattgcttttaaacaaccatctgaaggagcagagaggcagggtagaagacagaagggggatctatgtggtaactaaagaatgtttctgttttgttaattattgtgtgtgtgtggttttattgtttgcttaagagaatcaaaaactgaaaaaaatgagaatacaggaaatggctcttgtttatttttttgctgtgtttacagcttgttaatgctctactgtctttgtttcaagagagatttgttcactgcccagctcgttttgtgtcctgagccctatgcccagcccaccttataaatcatgcctgtttagatgtttgattttgttctgtttgctattgttatcttaaaggtgtataactctgacatgccagacatcaaattaagctcaaattaagctctcgtttaaatgtttaaacacctaatttatattctaattgatcccagccactgatgcatgtactttagctacttctgctaaataagcatattaattttccacatcaggccatcagatcttgagaaccaacagttatctagaattccgtgtctactaatgtttcacctgcatgcagccttcattaattttgtagcaaaatataaagtgatcattatgtagtttctggattaaaaaaatttgtgtgtgaagttgctttgtaaagtgcatgtggaattaatgggacagtgtgccctttgtgttagatgttagagcaaaagaaagggcttatagtgttagtattggagcactttgaagatagatattttcagaaaagatgtaggatttaaaagttaaattttaaattttagaaaaagatatgatggcaattggaaatagtcacaatgaagttcttcatccagtaggtgtttaacagtgttattttgccactggtaatgtgtaaactgtgagtgatttacaataaatgattatgaattcaaaaaaaaaaaaaaaaaaaactcgagggggggcccggtacccaattcgccctatagtgagtcgtaymca

SEQ ID NO: 94 - DNA, 3619 bp, Homo sapiens
ggcacgagcacccgggagggagatgcggccggggctcaggctccttgcagttgtaatttagattcgagaagtggtttatcctttgactggaaaagaaaagtagctgcagtattcccccagcacttgctgagagcatgccgtatgccaggctgtgaggctcgagagacaagcagtggaagagttgcggcctgtttcatctctggattgtaaatctgagcctccttctggcccctggaaggggacagcatcaccatggaatgattcctaaccagcataatgctggagccgggagccaccaacctgcagttttcagaatggccgtgttggacactgatttggatcacattcttccatcttctgttcttcctccattctgggctaagttagtagtgggatcggttgccattgtgtgttttgcacgcagctatgatggagactttgtctttgatgactcagaagctattgttaacaataaggacctccaagcagaaacgcccctgggggacctgtggcatcatgacttctggggcagtagactgagcagcaacaccagccacaagtcctaccggcctctcaccgtcctgactttcaggattaactactacctctcgggaggcttccaccccgtgggctttcacgtggtcaacatcctcctgcacagtggcatctctgtcctcatggtggacgtcttctcggttctgtttggcggcctgcagtacaccagtaaaggccggaggctgcacctcgcccccagggcgtccctgctggccgcgctgctgtttgctgtccatcctgtgcacaccgagtgtgttgctggtgttgtcggccgtgcagacctcctgtgtgccctgttcttcttgttatctttccttggctactgtaaagcatttagagaaagtaacaaggagggagcgcattcttccaccttctgggtgctgctgagtatctttctgggagcagtggccatgctgtgcaaagagcaagggatcactgtgctgggtttaaatgcggtatttgacatcttggtgataggcaaattcaatgttctggaaattgtccagaaggtactacataaggacaagtcattagagaatctcggcatgctcaggaacgggggcctcctcttcagaatgaccctgctcacctctggaggggctgggatgctctacgtgcgctggaggatcatgggcacgggcccgccggccttcaccgaggtggacaacccggcctcctttgctgacagcatgctggtgagggccgtaaactacaattactactattcattgaatgcctggctgctgctgtgtccctggtggctgtgttttgattggtcaatgggctgcatccccctcattaagtccatcagcgactggagggtaattgcacttgcagcactctggttctgcctaattggcctgatatgccaagccctgtgctctgaagacggccacaagagaaggatccttactctgggcctgggatttctcgttatcccatttctccccgcgagtaacctgttcttccgagtgggcttcgtggtcgcggagcgtgtcctctacctccccagcgttgggtactgtgtgctgctgacttttggattcggagccctgagcaaacataccaagaaaaagaaactcattgccgctgtcgtgctgggaatcttattcatcaacacgctgagatgtgtgctgcgcagcggcgagtggcggagtgaggaacagcttttcagaagtgctctgtctgtgtgtcccctcaatgctaaggttcactacaacattggcaaaaacctggctgataaaggcaaccagacagctgccatcagatactaccgggaagctgtaagattaaatcccaagtatgttcatgccatgaataatcttggaaatatcttaaaagaaaggaatgagctacaggaagctgaggagctgctgtctttggctgttcaaatacagccagactttgccgctgcgtggatgaatctaggcatagtgcagaatagcctgaaacggtttgaagcagcagagcaaagttaccggacagcaattaaacacagaaggaaatacccagactgttactacaacctcgggcgtctgtatgcagatctcaatcgccacgtggatgccttgaatgcgtggagaaatgccaccgtgctgaaaccagagcacagcctggcctggaacaacatgattatactcctcgacaatacaggtaatttagcccaagctgaagcagttggaagagaggcactggaattaatacctaatgatcactctctcatgttctcgttggcaaacgtgctggggaaatcccagaaatacaaggaatctgaagctttattcctcaaggcaattaaagcaaatccaaatgctgcaagttaccatggtaatttggctgtgctttatcatcgttggggacatctagacttggccaagaaacactatgaaatctccttgcagctttgaccccacggcatcaggaactaaggagaattacggtctgctgagaagaaagctagaactaatgcaaaagaaagctgtctgatcctgtttccttcatgttttgagtttgagtgtgtgtgtgcatgaggcatatcattaatagtatgtggttacatttaaccatttaaaagtcttagacatgttattttactgatttttttctatgaaaacaaagacatgcaaaaagattatagcaccagcaatatactcttgaatgcgtgatatgatttttcattgaaattgtattttttcagacaactcaaatgtaattctaaaattccaaaaatgtcttttttaattaaacagaaaaagagaaaaaattatcttgagcaacttttagtagaattgagcttacatttgggatctgagccttgtcgtgtatggactagcactattaaacttcaattatgaccaagaaaggatacactggcccctacaatttgtataaatattgaacatgtctatatattagcatttttatttaatgacaaagcaaattaagtttttttatctcttttttttaaaacaacatactgtgaactttgtaaggaaatatttatttgtatttttatgttttgaatagggcaaataatcgaatgaggaatggaagttttaacatagtatatctatatgcttttccccataggaagaaattgactcttgcagtttttggatgctctgacttgtgcaatttcaatacacaggagattatgtaatgtaatatttttcataagcggttactatcaattgaaagttcaagccatgctttaggcaagagcaggcagcctcacatctttatttttgttacatccaaggtgaagagggcaacacatctgtgtaagctgctttttagtgtgtttatctgaaggccgttttccattttgcttaatgtaactacagacattatccagaaaatgcaaaattttctatcaaatggagccacattcggggaattcgtggtatttttaagaattgagttgttcctgctgttttttatttgatccaaacaatgttttgttttgttcttctctgtatgctgttgacctaatgatttatgcaatctctgtaatttcttatgcagtaaaattactacacaaactagcaaaaaaaaaaaaaaaaaa

SEQ ID NO: 95 - DNA, 1626 bp, Homo sapiens
ccacgcgtccggcgggaccggtttgcgggaagattctgtggacaatcaccatgggaagcaaaggaggcttcatccttctgctcatcctcgctgtgctctgccgttcaggtcatagcctgacatgctacgcctgtattgaccgtgaaacctgcaacaagaccactgtttgttcagttaatcatgacgcgtgtctgttggtcaaagctgatccaaaacttttttaccgccagtgttggaagtttgatgactgcagctacctctctatctccaaagccctggggctgaagaagctccagtacagctgttgccagaaggacctgtgcaacgggagtgccagggtctctgggatgacagcgttgatgctgctccccttgctggcggcagccttgacgctttgtctctaaatcaacaccgggaggccttctcctaaactttccgtgtctccgtatactccttatttccttggctgctgcatgcccacagctttatttcacctgtcccgttgggcaagactaacactagtttgggcaacttggtgacaagagaggctctgagagacgttgaaggtcagtcctgtgggcagcgaagacccgtcggagggacatggtataaaagggtgcagcacgtgcgatctgagctcggccgcacgtttcttcctcggcttttcacaagagcagcctcgcagggacagcttgggtacctcagatcctctgcagggcccggtcatggttatttcccctctgatggcttggaggtgatttttaaatactctgatctggaggggagggcggtggtactgggacagggggttcttttcgacagcctctcccagggaatgctttcatcctctccctttatggcacccgcgctgccaagcaggcccgaccacgctcccacatgcgggctgttggggagcggccgggagattctcagtgctgggtgatcgcagtgacctttgtagtctcaactcgcgggtgcctggcagggaaggaggggagctttccacacggcagggccttgaactcccaggtctgtcttccgaaaagtagcagtggctaaaatcagagttttcctctatcactcggttgtgaatgggctttgcttgtctgcagtagagaaacttagcatctaataatgatgtgtgaaaattattccttcaacttttgcatcagattggtggggtatcttggctttgtcacacgcagttaaagtctgaacgttgggacactctgttaaaaataactcgtagtggggcacctgggtggctcagtgggttaaagcctctaccttgggatcatgacctgaggtgaaggcagaggcctagcccactgagccacccaggcgcccctaaaagtgttacaccttttgaggaagagttttgcctttttcttggggctgttcctgaataatttgcaagatccagcagtcggaaggacacttgttttcttatcatctcggctgtctctaacagcacagcttggctttttgcagatgaaggtgggacttcaggattaacattttttttcactcccttgctcatgtaatctatgtaacaggctggaatgactgatgcctttctgaaaataaaatgtaatcaagtgcaaaaaaaaaaaaaaaaaaaaaaaa

SEQ ID NO: 96 - DNA, 1933 bp, Homo sapiens
ccacgcgtccggaagaggaggatgaggatgaagatgaggaagaggaagtggcagcttggaggctgccccccagatggggtcagctgggagcttcccagcggcctcgtcctccccgccctactcatcgaaaaacctgctcccagcgccgccgccgagccatgagagccttccggatgctgctgtactcgaaaagcacctcgctaacattccactggaagttttggcggcgccaccggggccggcggcggagctcgcacaccccaagaaccatctttcaccccaggaagggggtgcgacaccgcaggtgccatccccctgctgtcgttttgactccccacgggggccacctccaccccggctgggtctgctaggtgctctcatggctgaggatgggatgagagggtctccaccgatgtcctctgggcccccagtggaggaagatggattacggtggactccaaagtctcctctggaccctgactctggcctcctctcctgtactcttcccaatggctttgggggaccccccgggccagaaggggagcggggtctggcaccccctgatgccagcatcctcatcagcaatgtgtgcagcatcggggaccatgtggcccaggagctatttcagggctcagatctgggcaccgcagaagaggcagagcggccggggagaaagccggccagcacagccccctgcgggaggagcatgtgacctgcgtgcagagcatcttggatgaattccttcaaacttatggcagcctcatccccctcagcacggacgaggtagtagagaaattagaggacattttccagcaggagttctctacaccttccaggaagggcctggtgctgcagctgatccagtcgtaccagcggatgccaggcaacgccatggtgaggggcttccgggtggcctacaagcggcacgtgctgaccatggatgacctgggcaccttatatggacagaactggctcaacgaccaggtgatgaacatgtacggagacctggtcatggacacggtcccggagaaggtgcatttcttcaacagtttcttctacgataagctccgtaccaagggttacgatggagtgaaaaggtggaccaaaaacgtggacatcttcaataaggagctcctgctaatccccatccacctggaggtgcactggtccctcatctctgttgacgtgaggcggcgcaccatcacgtatttcgactcgcagcgcaccctaaaccgccgctgccctaagcatattgccaagtatctacaggcagaggcagtgaagaaagaccggctggatttccaccagggctggaaaggttatttcaaaatgaatgtggccaggcagaataatgacagtgactgcggtgcctttgtgttacagtactgcaagcacctggccctgtctcagccattcagcttcacccagcaggacatgcccaaacttcgccggcagatctacaaggagctgtgtcactgcaaactcactgtgtgagcgtcgtatcccaggcctcaagcccattggtcaatgggcatggggacgtgggggacccttccttcccgagaaactccagttcctctcttgcctctccccctcccagttccctatggtttttcatatttaaatgttttaattgatttctgtatttttttttctttgagagaatacttgttgatttttgatgttcagggggtggccatggaacagcctcttctccctctgctagggaggagtttggccttgtggcctgggtggggcggtcatcccccttcccgtgtgcaggggcgggggcaggaacatctgtgctggggtggtgggcgggcaaagggagtgtgcctgccagatattcaaactttgttttatacgtatatataaacgccacggtcctgctctgctcaataaaggatcctttggaaaaaaaaaaaaaaaaaaa

SEQ ID NO: 97 - DNA, 1647 bp, Homo sapiens
cgcgtccgcttttcttgatactccaggacatgctgctttctcagcaatgagagccagaggtgctcaggtcactgacattgtcgtattggttgtagctgcagatgatggagtgatgaaacaaactgtagaatctattcagcatgccaaagatgcacaggttcctattatccttgccgtaaataaatgtgacaaagctgaggctgatcctgagaaagtgaaaaaagagctgctggcttacgatgtggtatgtgaagattatggaggtgatgttcaagcagtgcctgtctccgcacttacgggcgataatctgatggctttggcagaagcaacagttgctcttgcagaaatgttagaattgaaagcagatcccaatggtccagtggaaggaacagtaatagagtctttcacagacaaaggaagaggtcttgttactacagctataattcaaagaggaactttaagaaaaggctctgttctggttgctggaaaatgttgggcaaaagtacgcttaatgtttgatgaaaatggaaaaacaattgatgaggcctatcccagcatgccagtgggaattacaggctggagagaccttccttctgcaggagaagaaattcttgaagtagaatctgagccaagggcacgtgaagttgttgactggaggaaatatgaacaagaacaggagaaaggtcaggaggatctgaaaataatagaagaaaagcgaaaggaacacaaagaagcacatcagaaagcccgtgagaagtatggccatctactgtggaagaagagatcaattctacggtttttagaaagaaaagaacaaatacccttaaagccaaaagagaaaagggaaagagattcaaatgtactttctgtgattattaaaggtgatgttgatggttctgttgaggccattttgaacattatagatacctatgatgcttcacacgagtgtgaactagaattagtacattttggagtgggtgatataagtgcaaatgatgttaaccttgctgaaacatttgatggtgttatatatggctttaatgtgaatgcaggcaatgttatccaacagtcagctgcaaaaaaaggagtaaaaattaaacttcacaaaataatttaccgtcttgttgaagatttgcaagaggaactgagcagcagattaccctgtgctgtggaagagcacccagtaggtgaggcatctatactagctaccttctctgtaacagaagggaagaaaaaagttcctgtggctggctgcagagtccaaaagggacagttagaaaaacaaaaaaaatttaaactaacccgtaatggacatgtaatttggaagggctcattaacctcattgaaacaccataaagatgacatttcaattgtcaaaacgggaatggattgtggtctcagtttagatgaagacaatatggaatttcaagtgggagacagaattgtttgttatgaagaaaagcaaattcaagccaagacttcttgggatccaggattttaaaattacattaaaaatgtaaataactcaaaaaaaaaaaaaaaaaaaaaaaaaaaaaaaaaaaaaaaaaaaaaaaaaaaaaaaaaaaaaaaaaaaaaaaaaaaaaaaaaaaaaaaaaattaaaaaaaaaaaaaaaaaaaaaaaaaaaa

SEQ ID NO: 98 - DNA, 1886 bp, Homo sapiens
  misc_feature (1861)..(1861): n equals a,t,g, or c
  misc_feature (1864)..(1864): n equals a,t,g, or c
  misc_feature (1870)..(1870): n equals a,t,g, or c
  misc_feature (1874)..(1874): n equals a,t,g, or c
  misc_feature (1876)..(1876): n equals a,t,g, or c
cagcttgtgaggaaaaacattttttaatgtaataaaaatatgccattattctttgaaatgccaaatgatataaatattttgcctaatacatatttattgtagatgaaatgcactcttctcgatgaggcctcgatttgaatcaatggggtgggccacaggaaatgtcagaggaaccagaactcagaactcttcctcctggacctttcttcccttcccttggaggtatccctttgaatcaggcctctctcttctcatcagtctgtagcttccccccttgtataacctgctttcctttttacatttattaaaagtggattttgtaaaagcatttcattgacacgcgacctatcacagacaatggaattcgtcagtggtggtaagactgaaatcctgatgcttttcacacttcttgtctcttgctatgtatttctgcctctagccttgccatgttttgccttttttttttctttttggccaattcctttttatatgtgcccacaacagaggtggggagacacggagcaccctgggtccttcccagcgctgctgggcaggccccgtctccaggccccagctgttgaaactttgaagggcaacaaacaaccatccacactgccggaccctaggctgttcagggaggcagctcatttccaccccggccccaggacacccagcctgtgccccacaaggatctctctaaatgggagggattgaggctacttttctgccaagccctattaagtagtaatgtggggaaacccactgtgtcagtgcaggaagccctagacaaatgttttcaaataaatttcactgcccagcctgcacagatttccatttgaagtacttcccatccaccctgacacccaaaggggtttttttgttttgttttgtttttgagacagggtcttgctttgttgcccaggctggagtgcagtgacgtggtcatagctcactgcagcctcaacctcctgggctcaagtgaccctcctgcctcagcctcccaaagttctgagatgataggcatgagccattgtgcctagcctattttgatttttttcttagagtcaaggtcttgctctgttgcccaggctgatcttggacttgcgagccaccatgcctggctgggttttttaaaaatagaatctcactgatagcctgcaagaaacagatgcagtgcctgcttccgtatcagtccaaggagccctcgtgtttgccacctttacctttgaacctccccctgcctccctgcctgtgtccgcttttgcagctcaatgcagccatgacaaggaaagaaaagacaaaggaaggccagagagccgcgcagttctctgcaggtgcagatgcaggcagtggaggtggcctgagcaggcagaaggacaccaagcgccctatgttgcttgtcattcatgacgtggtcttggagcttctgactagttcagactgccacgccaaccccagaaaataccccacatgccagaaaagtgaagtcctaggtgtttccatctatgtttcaatctgtccatctaccaggcctcgcgataaaaacaaaacaaaaaaacgctgccaggttttagaagcagttctggtctcaaaaccatcaggatcctgccaccagggttcttttgaaatagtaccacatgtaaaagggaatttggctttcacttcatctaatcactgaattgtcaggctttgattgataattgtagaaataagtagccttctgttgtgggaataagttataatcagtattcatctctttgttttttgtcactcttttctctctaattgtgtcatttgtactgtttgaaaaatatttcttctataaaattaaactaacctgccttaagaaaaaaaccccccnacnaggctnttancntcctcctctc

SEQ ID NO: 99 - DNA, 1928 bp, Homo sapiens
  misc_feature (1927)..(1927): n equals a,t,g, or c
gcgagagactgcttgctgcggcagagacgccagaggtgcagctccagcagcaatggcagtgacggcgttggcggcgcggacgtggcttggcgtgtggggcgtgaggaccatgcaagcccgaggcttcggctcggatcagtccgagaatgtcgaccggggcgcgggctccatccgggaagccggtggggccttcggaaagagagagcaggctgaagaggaacgatatttccggtgaggctcaccgggtcccaagtccagccctggatctcccaatggccttccaatccttaaactgccaatcgccccacccgttcctacctggtgccttgggcgccccatcccccaacagaactcccgggccccaatccagtataccctaacccttgatgtcccgaccgttgccacgtatagggcactcccagttacctgcacaacagtttcaggcccccaaaccgtttccaccggcgggtctccaaaacaacccacggctcaactcctcctttatcattaccatctcccgcgtggagttctcctcaggtcgtgcgaaacacccccagattcttcgcacagtgtctagatccgaccgcccaacgtttgcctcccagcctgactccctcggcccttacccacctgtcaccccctctacgctctccttcctcgccagcacgccttagctttgcaagcctgcatgcattcaggcttctcaggtgtttctagacccccgactccgcaagagtgaggatgatgggagctggtcatgggagctacttatggttggacaccatcttctaaaggcttttgccctactcagcccaacctagacctgtagatttccctctcctgcttaggagtatggagtgggctgggcctccctttgccagccttgagttatctttaactgacttctgtccactctggagagcagtgaggaattaatcttgcttttgcttgtcctttggcctttcacttctgccttctgttgagaattatcaccatgacacctgccataccgtatagagagccaaggtacagccgttagagactatctaattgagcccctacattttgtagttaaggaaaactgaggcctaaatgtgaccaaaccaacattgtaatccagtcccttcttggaacctaaattgaactgccaagtactgcgcatgcaagagaccctttattggccttacagtgggccattcatttctataggcaaagaaagctctagacagattggaataggaaatggatatttgccttttagctacacccctttgtctgtcttcctcattttgwtcctttttttttccctaaaggggaagtcaagttccctgggttgtcccctcataaggtattagggacttgwgtcacatctctctggagttytctattttaaagaggaatctgaaagcaataagctctttggtcttcttaagatggctacacctcaatttaagatggggtattctttcactagttgaggagtagaagaggatgaccagctagactcccatggaattggractcctattccttgcttagacattacrggttatgctttgagatctctttggggtgaaggattgaaattaaaccctgagccaccgtgtccttgtagagcacagagtagagaacaactggcagctttgaaaaaacaccatgaagaagaaatcgttcatcataagaaggagattgagcgtctgcagaaagaaattgagcgccataagcagaagatcaaaatgctaaaacatgatgattaagtgcacaccgtgtgccatagaatggcacatgtcattgcccacttctgtgtagacatggttctggtttaactaatatttgtctgtgtgctactaacagattataataaattgtcatcagtgaaaaaaaaaaaaaaaaaaaaaaaaaaaaaaaaaaaaaaaaaaaaaaaaanc

SEQ ID NO: 100 - DNA, 430 bp, Homo sapiens
  misc_feature (425)..(425): n equals a,t,g, or c
ggactgctctactgccagcgttccctgctggacaaggtctgacgcccaccgccggcccgcccactcctaccacaaggactttgcctctgaaggccagtggcagcaggtggtggtgggtgggctgctcccatcgtcccgagccccctccccgcagcctccttgcttctctctgtcccctggctggcctccttcaccctgaccgcctccctccctcctgccccggcaacaaggggcatggggaggggtgggggtgggggggcagaggcgtctgaccccaggaacctgcagggcggggctgggtcggtgccctctaaggacaattttgaccttgttcaacctttccacaaagaataaattgtgtttcacaaaaaaaaaaaaaaaaaaaaaaaaaaaaaaaaaaaaaaaaaaaaaaaaaaaaaaaaagnggggg

SEQ ID NO: 101 - DNA, 943 bp, Homo sapiens
gtgtattttgataactcagtttcccaccttttttctccaatcagagtcccgcaagagctttatttctatgctgcaatttcaaatgacctacaaattcttagaagtgtaaagaactaaaaatatgtaaccaactaaaattgggttgtgggaggctgcagaaagcagagagagactaattcaccattgctcaaaataaagtgtcaatactgtctaaagaatgtactctccaaacttcacatcaaacttttttgggatgcagtgcgatgtggtacagagagtaacaggttttggagtcagatggctctgaattggttgacactcttactaacttggacattcgaaagttatgtagtcacttattttcctcatctgtagagaaaggctacactggtgaaatgagatcatgaagctaaaatgcccaaaggtaggcctggggcacagttggttatcattaataatagttattatcagttgtagatacttaggaggactaaaataaatatggaacccaatatcctagtagatgagtaagagagggttcgcagacctcgtgggtgtgaacgtarggagtgttgtatggagtcagaccaaccaaacaaagggagttggcatttgcggtcactcagattttatgcagccaggttactgctggctctggatggttgacacacagtgtgatgtttcactgcatttgtatcaagataatggcgcaaccatccccccaaaatccagcattattcataatcgcatctttcatcatcaatttggggaaagtctttggtacacagtcaattcctggggatgcaaatgatgatttcttccttttttttttgagacggagttttgctcttgttgcccaggctggagtgcagtggcactatatcggctccccacaacctccgcctctggggttcaagcgattctcctgcctcagtctctcgag

SEQ ID NO: 102 - DNA, 2581 bp, Homo sapiens
gcccacgcgtccgcccacgcgtccgcccacgcgtccggacagccctgagcaacctcataacgtggcagaaggtggattatgacttcagctaccatcagatggaattcccctgcaatattaacgttttcattacttcggaggggaggtcactcctcccggcagactgccagattcacttacagccccagctaattccaccaaacatggaggagtacatgaacagccttctctcagcggtgctgccttccgtgctgaacaaattccgcatttatctaactcttttgagattcttggaatatagcatatctgatgaaataaccaaggcagttgaagatgactttgtggaaatgcggaagaacgaccctcagagcatcactgctgatgatcttcaccagctgctcgtggtggctcggtgtctgtctctcagtgctggtcagacaacgctgtcaagagaacgatggctgagagcaaagcagctagagtctttaagaagaacgaggcttcagcagcaaaaatgtgtgaatggaaatgaactttaaagatgtaatacctatgaagagtaatgggcaaactgtagccacataattgtaaaattcagatattcatttataccacattgttttataggtaatttctatcacaaaccagtgacatttcctgaaatcaagcctggtaacacctgatgtttatatgatattcagtaaggacttttaccttactgatttcatggagcttttgaagtttgttttataataattatataaattagtaatgatgtaaaaaaagtatttgatattaaaagtttaatattgawaatgttgctgattgtaccatttccttagcttcagctgagtcataggccagactgttgaaatgctgaaatgaagaaggttgttgcagtttcaaagtcagaggaatcgtgcttcggatttcttatgttttctagttctctgtttttccagttcacagtgggttggggtgcattcagtagtccatctttggggaacggaggcgtacttgccattgattcacatgactacatgaaattctgtactgtcatttcccagatgtttggccacagaaactttttcccacttaacatttgttaacagcctgcaaaactaaacttgtacatggcagtggttcccagacttttgtattttatggaccggtagtaatatttccaaaaatctggggtactataaggttgccaatttaccttgccaagtaatccgaataaatcactgtattatcaccatttttttcataaaaggaaaggacaatctatctctgaataagaggagtcctttaaacggaatgaatgtggcttttgggggcaaaagaaaccaagacactacattgtctttattttctcctatcccagtgcatttgagaaccatgcataagggaatgctgtgctacaaagctgtgcccaaatatgaaaacaaaataggaaacttaaaaagcaataccccctttagaaagtttttattttcttaaatgtcattgagttgctttgattctattggatttttggcattttttatgggatcatcagttggttccaagtatgttagatcagctaacatctgctactccagtaacagcctcgtacaactgcaggtaggttttctccagaccaattagttttaatagagcaaactaacaacagactgtagtagcatggttatggcaaccagaatcttcagaaaggttaggacattactttttaagctgtcagtggtatcaaataacttacctagttggaggcagataaaggatcccttacgttttttcctataaggcctaaattgaaattgttaaccaaggaaacagggtcagccttgaaaaatcaaggaattcattgtacctaataactgaagtaaaaataactagttgttcaacttttcctaaactcaaatctatttttataaacaaatgtaaataatgtttatattagagttgaactggttttcatttttataactggtagactagaccttccttaaacttttagaaataaaatgaaggcttcactggatttgtgaggataaaatacattttctttaattgtcctagagcaaagtacattagtcaccatgtgttttttgtgccaatgtaamttgtaatttaccaaagaaaaatacatacattgcttggtcttgcagaaaagttcccttgaaagaacctttccaataaataaaacgtcccaaattagcagtaccttgggctgtttttcatgagtaagaagattcaccatcccatgtgatctgtgtggaaaaagaccatgtcctcttggtggaagacatgagagagctgaactgaagtggaggaggtggtgcaagagggaccttcctgctcaaggcccgcccaggcagcggaatggagtgcagtgcttggctgcagaaaccctttgtccctcacctatatatacacggacagtcaagtttgttgctctaacgtaaggcacagcgttaatcctgtatggccaggaaactgagtagactcctgtgtaaccctgtttggaactttgccttcttaaaatgatttttcaaagatctctttcgaactaaaaaaaaaa

SEQ ID NO: 103 - DNA, 1061 bp, Homo sapiens
ttctcgggtcgacccacgcgtccggttgcggtyaagatggcgctggtggcttctgtgcgagtcccggcgcgcgttctgctccgcgcgggggcccggctcccgggcgcggccctcgggcggacggagcgggcggccggcggcggagacggcgcgcggcgcttcgggagccagcgggtgctggtggagccggacgcgggcgcaggggtcgctgtgatgaaattcaagaaccccccagtgaacagcctgagcctggagtttctgacggagctggtcatcagcctggagaagctggagaatgacaagagcttccgcggtgtcattctgacctcggaccgcccgggtgtcttctcggccggcctggacctgacggagatgtgtgggaggagccccgcccactacgctgggtactggaaggccgttcaggagctgtggctgcggttgtaccagtccaacctggtgctggtctccgccatcaacggagcctgccccgctggaggctgcctggtggccctgacctgtgactaccgcatcctggcggacaaccccaggtactgcataggactcaatgagacccagctgggcatcatcgcccctttctggttgaaagacaccctggagaacaccatcgggcaccgggcggcggagcgtgccctgcagctggggctgctcttcccgccggcggaggccctgcaggtgggcatagtggaccaggtggtcccggaggagcaggtgcagagcactgcgctgtcagcgatagcccagtggatggccattccagaccatgctcgacagctgaccaaggccatgatgcgaaaggccacggccagccgcctggtcacgcagcgcgatgcggacgtgcagaacttcgtcagcttcatctccaaagactccatccagaagtccctgcagatgtacttagagaggctcaaagaagaaaaaggctaacgattgggctgccacaggcttacggccacacgtgcccctgtgggtcccagggaggtcttaaacaaggtatttttcaacttaaaaaaaaaaaaaaaaaaaaaaaaaaaaaaaaaaaa

SEQ ID NO: 104 - DNA, 2040 bp, Homo sapiens
ccacgcgtccgtgctcgggcaccggcggtggcggcggctcctgcgcgctcgcaggctgcaggcccaggctcttggctgcggggctcggtgaatcgaagatccagcttccaaaatgtggcagctcttggccacccttagctgcctggtggtgctgaccggggcccagagaaggccgcctttccagccgctgtcggatgagctggtccactatgttaacaaacagaacactacgtggaaggctggacacaacttccacagtgtggaccagagctacctgaagaagctatgtggcaccttcctgggtgggccgaagctgccccagagactttggtttgccgagaacatgattctgcctgaaagcttcgattcccgggagcagtggcctaactgcccgaccatcaaagagatccgggaccagggctcctgcgggtcctgctgggcgtttggggcggtggaagccatttcagaccgaatctgcatccgcaccaatgggcacgtcagcgtggaggtgtctgccgaggacatgctcacctgctgtggcgaccagtgtggggacggctgtaatgggggctttcctgctgaagcttggaacttctggacaaaaaaaggcttggtttccggtggcctctatgactcgcatgttggctgcagaccctactccatccctccctgtgagcaccacgtgaatggctcccggcccccatgcacaggggagggggatacccccaagtgcagcaagatctgcgagcccggctacaccccgtcctacaaagaagacaagcactacggatgcagttcctacagcgtgtccagtagcgagaaggagatcatggcggagatctacaagaacggcccggtagaggcggccttctccgtgtattctgacttcctgatgtacaagtctggcgtgtaccagcatgtcactggagaaatgatgggaggccatgctgtccgcatcctgggctggggagtggagaatggcacaccctactggctggtgggcaactcctggaacacggactggggcgacaatggcttctttaaaatcctcagaggacaggatcactgtggaattgaatcagaaattgtggctggtattccatgcactgaccagtactggaaaaagatctaatctgctgtgggattagttctgccagccctggggcactgtttccctaaatatagccagttgggctggtgaggagatggagggtaggaatgtcttttattcttttgagttcagatatgatacaagaggtttcagacagggcctgagggattgggccaaacctcgtgtctactgtcagagccgacttccaaggagacacatctaaggcctggctacctcccagcccgttgggtggactgcaatccccgtgcacacctagaccacgtgagccgtcaccgcaagcgaagtgagtccttctccccctagactagtgctgcgcatagtgcctgctgcccccacgtcctccccggccacactcaccaagaagccagaccgagacccaaaggtctgttaggcgttccagaggaatggaaagtggagtccctaacaagaccagtcccctaccagcaggggtacttctaagcaagtagctcactagctgtgggctgggttgaaaagaaaaccaatgggccagccctgggagagagccattctctcccagggcacctgcatctcatgagctttgcggtgctgctgcaaagaccctctggtcttgtccttggcatgattcctttttaaataaacactttattttgtgtgcacctcagctgatcatgtgaatgaaagaggaacagctgggagagctgtcctcgcttcacagactgtgttcctccagtaccaccggcggggcgtgagcggactggcctcccagcctaacagtgacactcattggggagaaaccagctttaactgtaaaaatcactgcttcactgttaatgtaatcaggaaaggaatgactgtgccaattaaacgttttctcccttgaaaaaaaaaaaaaaaaaaaaaaaaaaaaaaaaaaaaaaaaaaaaaaa

SEQ ID NO: 105 - DNA, 388 bp, Homo sapiens
  misc_feature (266)..(266): n equals a,t,g, or c
  misc_feature (381)..(381): n equals a,t,g, or c
  misc_feature (388)..(388): n equals a,t,g, or c
tcgacccacgcgtccgatgatttgtcacaatcttatcaataatcattactctgttttttatatttcaactaaaagtatcaaaatatagctttccagaaaaccccgaaccaaagtcactgactacatcaaagtctactacaccttggagaaaacaaatgaacgaaaatctattttcctcattcattaccccaacaataataggactccctatcgtaattattatcactatgtttccaagcattatattcccatcacctacccgactnaatcaataatcgactscatctccattccaacaatggattagtgcactgaacatscaaaacaaatrttatccatgccacaaccaaaaaggacaaactggagcccggatattgatancactaan

SEQ ID NO: 106 - DNA, 2722 bp, Homo sapiens
gaccagctgctcctggccttgctgaagtgcacagacacggagctgcagctgcgcagagacgcgatcttctgccaggccctggtggccgccgtgtgcaccttctccgagcagctgctggcggccctgggctaccgctacaacaacaatggcgagtacgaggagagcagccgcgacgccagccgcaagtggctggagcaggtggcggccacgggcgtcctgctgcactgccagtccctgctctcgccagccacagtgaaggaggaacggaccatgctggaggacatctgggtgacgctgtcagagctggacaatgtcaccttctcctttaagcagctggacgagaactatgtggccaacaccaacgtcttctaccacattgagggcagccggcaggcgctgaaggtcatcttctacctcgacagctaccacttctccaagctgccctcccgcctggagggtggggccagcctgaggctgcacacagcgctgttcacgaaagtgctggagaacgtggaggggctgccttctccaggcagccaggccgcggaggatttscagcaggacatcaacgcgcatccctggagaaagttcagcagtattaccgcaaactcagggcattttacctggagcggtctaacctgcccacggatgccagcaccacggcggtaaagatagaccagctgatccgccccatcaatgccctggatgagctctgccgcctcatgaagtcctttktccacccaaagcctggtgctgctgggagtktgggcgccggcctcatccccatctcctcggagctctgctaccgcctgggggcctgccagatggtcatgtgtggcacaggcatgcagaggagcaccctgagcgtgtycctggagcaggcggccatcttggcacggagccacgggttgctgcccaagtgcatcatgcaggccacggacatcatgcggaacagggcccaagggtggagattctggccaaaaacctgcgagtcaaggaccagatgccccagggtrctccgcgcctctaccgcctctgccagccgccggtggatggggacctctgaacacccaaatgccccacgctgggccgcggcctctggagctgggatttgggaggacacagcaggcagcgctggccttctccagggatggcccaaggcttccgcagccgcccgttccgggacctgcccagcgtcctccctgcctccttccgggacaagcctggccaccctcgctgtgatgacgagctggctgattggccctgggccggcccattcttcacacgcctgccagaagctggaggggtgctggagacccatagagctgatgggagcagctggtgcctggccttcggctcctgcgtccccagaacccaagggaacgtcatggaggccacatggggccacccggctccctcgggatggctccgctgcacttttgaaaccccggtttccttcaacgtccacattccaggtgaccacacgtgtctcctcctcctcatcttagcttccaggttcaccctaaccctgtactaacctgcttggtggacttggaaaagacttggctctgtcgggaaaggagagacggggcctccatcacgcctgttaccagaggatccccgagagccacaccagctctggacatcaccgcccctggaactggggccaccagccctgggcacgagatttgctctgactttatttatatggcatgaaatctctggtttattttgggattttttgttgttggtgttgtcaaagtttgttttttctaaagttgtgtgattatatatttgacattttacatttcaaagaaaggtatgttgtctaacaggggaccaacagaaggtagtattgacaactgttcctgcttctactaaaaaaaaaagagcacaaaagaaaaactaaattattgaaaaattaaaaaatgtcattgtttcctgtttgttaatattagggttgtaaggtgtcgttttgaggtatcgactgtgattccttcccccaccctccattctccagcggttggccggtgttagaactcgctctctttgagtgactggctacaagggcctgagaggtggccagccagggttggagctggaggggatggagccccacctgaggtgccgtgtcacacgggttagagggtcactgggaaacaccgggcggtggcttctgtgatttattttcttgatggtaacttctcagagcagggcgattgggacatcaccagccagagcacaggaagccaccctgcctgctggggaggagggacccacacaagccccctcggcagtttgtccccccagcttcggtatgccttcagggaaaggtcacagctggggaggaagcggggggacgcctgtcacccctggcaggtggtgagttcaggtgggggctccctgctgcccccaggcctgggagcttgaagccctcccggcatctggcatccgagcctcccgccctccagggtgcgcttccctctcttgccgcagcatacacgagggcaggcagtggccttgtcactgtatcttgcatcagagacaaaggaggacccgctttagccctgctgcgggaaatgggggagggcccagggccagcgcattgtgcactggtttactttaaaatgtacagattcttctcgttaaattcttgatagattttttattattattaaaagtcagtttataatacaaagaaaaaaaaaaaaaaaaaactcga

SEQ ID NO: 107 - DNA, 1994 bp, Homo sapiens
  misc_feature (231)..(231): n equals a,t,g, or c
ctctgttctctggaatgccatgatccatccactgtgcaatatgactctgaaaggggtagtatggtaccagggggagtccaatataaattataacacggatctgtacaattgcacattccctgcactcatcgaagactggcgtgaaaccttccaccgtggttcccaggggcagacggagcgtttcttcccatttggacttgtccagttatcttcagatttgtctaagaaganctcagacgatggatttccccagatccgttggcatcaaacagcagacttcggctatgtccccaacccaaagatgcccaatactttcatggctgtagctatggatctctgtgatagagactcgccttttggcagcatccaccctcgagataaacagaactgtggcttatcggctgcatttgggggcccgtgctctggcttatggtgagaakaatttgacctttgaaggaccactgcctgagaagatagaactcttggctcacaaggggctgctcaatctcacatattaccagcaaatccaggtgcagaaaaaggacaacaagatatttgagatctcctgttgcagtgaccatcgatgcaagtggcttccagcttctatgaacaccgtctccacccagtccctgaccctggcgatcgattcttgtcatggcactgtggttgctctccgctatgcttggaccacrtggccttgtgaatataagcagtgtcccctataccaccccagtagtgccctgccagcccctcccttcattgctttcattacagaccagggtcctggacatcagagcaatgttgctaaatgactgtttcagtatgatcagaacttagatataaggatgggtccttcagattttagcatttaggagtttcaataataaccattgcttttaaaggaaattaatagaaagcctcattgaatggctttcagctagcacatggctgtttctatattctgatgagcccaggctyataggtaacttgaaatgcttgctttttgttccctagttggtctaagggtctgtattggactaattctgaactacagacaaattggacctcaatgtcatttatttccctcatattaatgggagtgaaatgtctaatacttttgcccctttttatccagagttgtgggatctcaggattggaagagattttaaaggccacataggccagctagtgttcatgtgttctttataaaatttctcccatccaagtactaaccaggcccgaccctgcttagcttccgagatcagatgagatcaggcgcgttcagggtgatatggccgtagacgtctttacaaaattcctgacaggtggttactgaatctctctatgaactttccattcaaaactttccaagtttttccttatgtggaaccgaaatctttctttctcccgtgaaactttactactatcagataattgaagacagatctctttgtattctcttcaagcccaaaccaattctgttccttcaatctaaatagtggtaatatgaatgtttaagaaatgaaataagaaacatgtgcaggcactttggaaggtgctaagtgactgccctaaggaatgaaaagcaagggccaggtgggagtagcccagcgaaggcacttgggctgccaggaacaggaggcgtgggaaactctggcttaggaaaacatgaacacaggggcaacagaggcaaactgttgttcgagttaaatataaatctcaggctctttaaaggtaaaaggtttaaggataatccatttggaagaagaaaagagtgaggctgaaagtaaagccacatgacaagcatataaaaaaaaatgcagatgatacaaatatgaaagaggccttcagtgtttgtttattaagaatcttaatgcagtttactgatggattaaaaacagctaacattgtctgaaaattatgttacctataagaagttggaaataaataaaagcataatcactaaaaaaaaaaaaaaaaaaaaaaaaaaaaaa

SEQ ID NO: 108 - DNA, 230 bp, Homo sapiens
  misc_feature (188)..(188): n equals a,t,g, or c
  misc_feature (208)..(208): n equals a,t,g, or c
ggaaaggtcacctacaaagtcaaccccatcaagctaacggtagacctgtcagcagaaactctacaaccagaagagattgggggtctatattctggaattttaaagaaaagaaattagaaccaagaatttcatatccaaccaaactaagcttcataatccaaagagaaataaaatactttttagacaancaaatgctaagggaatttgntaccaccgaacctgacttataa

SEQ ID NO: 109 - DNA, 748 bp, Homo sapiens
  misc_feature (7)..(7): n equals a,t,g, or c
  misc_feature (650)..(650): n equals a,t,g, or c
  misc_feature (662)..(662): n equals a,t,g, or c
  misc_feature (731)..(731): n equals a,t,g, or c
gcacaancgcgcgcacacacacatatatacaccatggaatactactcagccattaaaaggaatgaaataatagcatttgcagcaaccagggtgcasytggagaccattattctaagtgaagtaactcaggaaaggaaacccawacatcacatgttctcacttaaaggtgggagctaagctatgaggacgcaaaggcatgagaatgatacaatggattttggggacttggggggaarasasggaggrgagtaasggataaaasactacacattgggtatastgtacactacttgggtgatgggtacaccaaaatctcagaaatcacctctgaagaacttatccatgtaaccaaacaccacctgttccccaaaagcctattgaaataaaataaataaaaataaaaataatagttggagatgtctagtcccacccaataactgatagaacaactaagcagaaaatcatcaaggatacagaagacttgaacaacatgatcaaccaactcaagctaactgattatagaaaacattcaacccagtaactgtaaaaatacaaattctttctcagtgctaatcattttcaagaccaattaaataccaagtcacaaaacaaaatctcaatacatttaaaatgaccagaaatcattaccnaagtatggttgntcaacccagaacttgaattaaaattattaaatcaaccaaccggaaaaagaaaaccccggggaaaatccnttaaataattttccaaa

SEQ ID NO: 110 - DNA, 542 bp, Homo sapiens
  misc_feature (263)..(263): n equals a,t,g, or c
  misc_feature (302)..(302): n equals a,t,g, or c
  misc_feature (332)..(332): n equals a,t,g, or c
  misc_feature (445)..(445): n equals a,t,g, or c
  misc_feature (498)..(498): n equals a,t,g, or c
ggcacgagctcaaaatggatcatagacttaaatgtaagaaagaaaacagtaaaacttttagaagaaaacaagaaaaatctttgagacctagaattaggcaaagatttcttatatatgacatcaaagcatggtccatgaaagagaaaattgttacattttatctcatcaacattcaaaacttttgcagtttaaaagaaaccattaagwgrwtgaaaagacaaaccacagactgggataaagtrtttataaaacatataaatgtnataagacattattttatacaaaatggaatacttaatgtnagagaacaataaatgttggtgaggatgtanacaaaatagaaaccctcatacattaatgatggtaatgtaaaatggtgcaatactttggaagacagtcggtgtttcttaaaaaattaaacataaaactaccataagtcctgacnattcaattctaggtacttacctaagataaataaacccctatgtctaccccaanctttgcatattaacgctacacattgtgaattaatttttaacccc

SEQ ID NO: 111 - DNA, 1608 bp, Homo sapiens
  misc_feature (18)..(18): n equals a,t,g, or c
  misc_feature (22)..(22): n equals a,t,g, or c
  misc_feature (32)..(32): n equals a,t,g, or c
  misc_feature (87)..(87): n equals a,t,g, or c
tcgacccacgcgtccggntttnaagaagcaantttctctttcatgtgccttctgaggaagtattcagagggggaatatcaaatgtcnttcccttggactctcccaggatcatgtaccgcaagtcctgtgcatcatcagcggcctgtctcatcgcctctgccgggtaccagtccttctgctccccagggaaactgaactcagtttgcatcagctgctgcaacacccctctttgtaacgggccaaggccaagaaaaggggaagttctgcctcggccctcaggcagggctccgcaccaccatcctgttcctcaaattagccctcttctcggcacactgctgaagctgaaggagatgccaccccctcctgcattgttcttccagccctcgcccccaaccccccacctccctgagtgagtttcttctgggtgtccttttattctgggtagggagcgggagtccgtgttctcttttgttcctgtgcaaataatgaaagagctcggtaaagcattctgaataaattcagcytgactgaattttcagtatgtacttgaaggaaggaggtggagtgaaagttcacccccatgtctgtgtaaccggagtcaaggccaggctggcagagtcagtccttagaagtcactgaggtgggcatctgccttttgtaaagcctccagtgtccattccatccctgatgggggcatagtttgagactgcagagtgagagtgacgttttcttagggctggagggccagttcccactcaaggctccctcgcttgacattcaaacttcatgctcctgaaaaccattctctgcagcagaattggctggtttcgcgcctgagttgggctctagtgactcgagactcaatgactgggacttagactggggctcggcctcgctctgaaaagtgcttaagaaaatcttctcagttctccttgcagaggactggcgccgggacgcgaagagcaacgggcgctgcacaaagcgggcgctgtcggtggtggagtgcgcatgtacgcgcaggcgcttctcgtggttggcgtgctgcagcgacaggcggcagcacagcacctgcacgaacacccgccgaaactgctgcgaggacaccgtgtacaggagcgggttgatgaccgagctgaggtagaaaaacgtctccgagaaggggaggaggatcatgtacgcccggaagtaggacctcgtccagtcgtgcttgggtttggccgcagccatgatcctccgaatctggttgggcatccagcatacggccaatgtcacaacaatcagccctgggcagacacgagcaggagggagagacagagaaaagaaaaacacagcatgagaacacagtaaatraataaaaccataaaatatttagcccctctgttctgtgcttactggccaggaaatggtaccaatttttcagtgttggacttgacagcttcttttgccacaagcaagagagaatttaacactgtttcaaacccgggggagttggctgtgttaaagaaagaccattaaatgctttagacagtgtatttataccagttgatgtctgttaattttaaaaaaatgttttcattggtgaaaaaaaaaaaaaaaaaaaaaaaaaaa

SEQ ID NO: 112 - DNA, 1565 bp, Homo sapiens
  misc_feature (49)..(49): n equals a,t,g, or c
  misc_feature (400)..(400): n equals a,t,g, or c
aaaatcctaaacaaaatattagcaaattgaatccagcaatatataacanttgtaataaatcaggaccaaatcttgtttatttcaggaatgcctggttggtttattattagaaacccaaataatgtaatttagcattttaactaataaatgagaaaaaagcatatataatagatacagaaaaagcatttgcataaaattcagcatccattgattattttaaaaacttatggtaaattaggaatggaaggaaacatttttaaactgataagtggtatttactaaaaacctgcagcaagcatccacttaatgttgaattgctcaaagtggtcccttgagttcaggaataggacaagaatgtctcttctcactagttgtactctaggtcccagtcgatgcagtnaaggtaagaaaaagaaatgtatatggattgggaaagaagaaataaaactaccatcattcacagatgacatgcttgtgtatgcagaaaattctaaggaagctacagattaaaattattaagagattagcaaagtcagtgtacaatatcaacatcaaaagaccagttatatttctatataccatcaacaagcccttagaaaatgaaatttaaaccaatatttaatttatagtagtatacacaattaccttgaactaaatgtaataatagacgtacaaaacctcaagcaaaagttatgaagctttgttgacaatgtcaagtgtttgtgaggatgtggagcaacaggaactctcaaacattgatggtggaagtgggaattggtacaactttgatatacagtttggtggtatctagtgaagttgaaaatatacacaatctatgagccagcaattcctctcctacatatataccttgtgtgtgcacatatgtaccaggagacattaaaaacatgttcttagcaacatttttcataattgtccccaactggaaacagtccaaatgtccaccgacagtaaaaggataatttcttgtaaagtcgtagaatggaaagctgtaacacaatactgagaatgatgaacygatgccgcatgcaaccaggttgaatctcagaagcataattgtaagggcaatgagctggatatagaaggatatatgcattatagttctatttatataaagctccagaaacagtagtgtttgggcatctatatttgagtggtaaagctataaaggaaagtaagaaagcaacagctaaaactgtcatgagagtgttttgttttgttttggagagaggaaagaggttgtgattgggcaaggacttatgggaatttctggagttctgatctgttctgtttcttgatctttatggtgatttgctttataataatttgttaagctgtaaatttatattttatgcactttcctctgctccccccgccccccgcttaaagagtgttttagaatgtggaaattttaagataagatctatctcagggcttgttgtaagaatgaaatgaagtataaagccatgtagagcttgtagaatatgcctggcactttgtaagaccttaataaatgttaactatctaaacacaawaaaaaaaaaaaa

SEQ ID NO: 113 - DNA, 2556 bp, Homo sapiens
gtggccagcgggcaccctcggcccgacatcacgtggatgaaggacgaccaggccttgacgcgcccagaggccgctgagcccaggaagaagaagtggacactgagcctgaagaacctgcggccggaggacagcggcaaatacacctgccgcgtgtcgaaccgcgcgggcgccatcaacgccacctacaaggtggatgtgatccagcggacccgttccaagcccgtgctcacaggcacgcaccccgtgaacacgacggtggacttcggggggaccacgtccttccagtgcaaggtgcgcacgacgtgaagccggtgatccagtggctgaagcgcgtggagtacggcgccgagggccgccacaactccaccatcgatgtgggcggccagaagtttgtggtgctgcccacgggtgacgtgtggtcgcggcccgacggctcctacctcaataagctgctcatcacccgtgcccgccaggacgatgcgggcatgtacatctgccttggcgccaacaccatgggctacagcttccgcagcgccttcctcaccgtgctgccagacccaaaaccgcaagggccacctgtggcctcctcgtcctcggccactagcctgccgtggcccgtggtcatcggcatcccagccggcgctgtcttcatcctgggcaccctgctcctgtggctttgccaggcccagaagargccgtgcrcccccgcgcctgcccctcccctgcctgggcaccgcccgccggggacggccckcgaccgcagcggagacaaggaccttccctcgttggccgccctcagcgctggccctggtgtggggctgtgtgaggagcatgggtctccggcagccccccagcacttactgggcccaggcccagttgctggccctaagttgtaccccaaactctacacagacatccacacacacacacacacacactctcacacacactcacacgtggagggcaaggtccaccagcacatccactatcagtgctagacggcaccgtatctgcagtgggcacgggggggccggccagacaggcagactgggaggatggaggacggagctgcagacgaaggcaggggacccatggcgaggaggaatggccagcaccccaggcagtctgtgtgtgaggcatagcccctggacacacacacacagacacacacactrcctggatgcatgtatgcacacacatgcgcgcacacgtgctccctgaaggcacacgtacgcacacacgcacatgcacagatatgccgctgggcacacagataagctgcccaawtgcacgcacacgcacagagacwtgccagaacwtacaaggacwtgctgcctgaacatacacacgcacacccatgcgcagatgtgctgcctggacacacacacacacacggatatgctgtctggacgcacacacgtgcagatatggtatccggacacacacgtgcacagatatgctgcctggacacacagataatgctgccttgacacacacatgcacggatattgcctggacacacacacacacacgygtgcacagatatgctgtctggacasgcacacacatgcagatatgctgcctggacacacacttccagacacacgtgcacaggcgcagatatgctgcctggacacacgcagatatgctgtctagtcacacacacacgcagacatgctgtccggacacacacacgcatgcacagatatgctgtccggacacacacacgcacgcagatatgctgcctggacacacacacagataatgctgcctcaacactcacacacgtgcagatattgcctggacacacacatgtgcacagatatgctgtctggacatgcacacacgtgcagatatgctgtccggatacacacgcacgcacacatgcagatatgctgcctgggcacacacttccggacacacatgcacacacaggtgcagatatgctgcctggacacacgcagactgacgtgcttttgggagggtgtgccgtgaagcctgcagtacgtgtgccgtgaggctcatagttgatgagggactttccctgctccaccgtcactcccccaactctgcccgcctctgtccccgcctcagtccccgcctccatccccgcctctgtcccctggccttggcggctatttttgccacctgccttgggtgcccaggagtcccctactgctgtgggctggggttgggggcacagcagccccaagcctgagaggctggagcccatggctagtggctcatccccactgcattctccccctgacacagagaaggggccttggtatttatatttaagaaatgaagataatattaataatgatggaaggaagactgggttgcagggactgtggtctctcctggggcccgggacccgcctggtctttcagccatgctgatgaccacaccccgtccaggccagacaccaccccccacccactgtcgtggtggccccagatctctgtaattttatgtagagtttgagctgaagccccgtatatttaatttattttgttaaacatgaaagtgcatcctttccctccaaaaaaaaaa

SEQ ID NO: 114 - DNA, 1878 bp, Homo sapiens
gcttctgtcacccaggctggagtgtaagggcgcgatctcggctcactgcaacctccgcctcccaggttcaagcaattctcctgcctcagccacctgaatagctaggattacaggcgcccgcccccacacccggctaatattttttgtatttttagtagagacagggtttcaccgtgttgatcaggctggtctcgaactcctgacctcacgatccgcccgyctcggcctcccaaagtgctgggattacaggcgtgagtggtggccctatttttaaaccattcgttacgctgtgtagacagagctttattgccctggaaaagattttttttttaactctcatgcagttcagtctttccatcatttcactttgtgagtcactcacataattgtcaatcattcctctgaccttcttaagaatttacaccttaccgtctctgtgattgaagcagacttctcgctttatttcccttaggctcatttttctgtgggctctcccttaaagacacatggccacagacacctccttcrcatatgtaatctgccttcccctgcggccttccgtggtcacagcaacagggactgctcaccccctccagctggggcttttctaacaagcacagtcagaaatgcgcaggcctggggttggggatgaacagaagttgattagtgggcacagaaatacagttagatagaaggaatagttccagcattcgatattacagtagggagactgcatttaacaataattgattgtatatttgaaaacagctagaagaataagaatattcccaacacaaagaaaagataagcgaggtgaaggaaatcccagttaccctcattcagtccattacacattcgatacaggtatcaaaatatcataggcacctcaaagacatgtacaactcttaatttaacatttttgaaagaaaaaaaaaccggccagagcattaaaacaaataaaataagaaacacagaggccagtgttaggtgaagaactccgctgcttcagaaagagaatagcagcgctcgcttaccgtgggaacacggccagttaacaaaatgggttttggttttttgttttgttttgttttaccattggtaataagatagttaacataagtggtcagaacttcgctgaatttgtaataaagcatttgttaagcgtgtaaaagtccaaattaaaagtcttgaagaaaaacagctatggcaatgagcctagacatttttcaaaaaaaaaagctaagccgtcctaccagcaatctctctttctcctaagaatgtcatgccttctcaagacctgatgaaaggaataagatatttgtgcctttttataawagcatctattacgaaagtaaaattcagttgcttacagttttggccgctttgtagcactattataaacagcccaaatttatggccttggacttactgcatgacacatggcctggttacctgtcatggaatgctgcagtggtggtttgccaagcttctgtggatgtttgaagactttatttttgcagtcttaaccttgggctggacctaagtgtatgtaaaccatatgatgyctgtattgtttatagatgctgacaaaagaaaactagaccttttgttttttgttgtaagatttttgttttcatgcctatgctcatagtagatagtttgcaaatgaaagttgatttgccatacttttaaataatattgttttagcttgaatattctataatacacttttatagagtataacatgctaaatcactgttttgttgtaagaarggtgtaaacattttgttaataaaatgctatgtttacraatawaaaaaaaaaaaaaaaaaaaaaaaaaaaaaaaaaaaaaaaaaaaaaaacaaaaaagggcggccg

SEQ ID NO: 115 - DNA, 3058 bp, Homo sapiens
  misc_feature (525)..(525): n equals a,t,g, or c
  misc_feature (2215)..(2215): n equals a,t,g, or c
  misc_feature (2863)..(2863): n equals a,t,g, or c
  misc_feature (3033)..(3033): n equals a,t,g, or c
cccggcggcgggtcctcagcttcgagccgaggtgcagtgagctggtggggggaccgcgaggcgagcgcgggagcctgggcggcgagccgggtgtgagctgcctgaaaatgcactcggatgccgccgctgtcaattttcagctgaactctcatctctcaacactggcaaatattcataagatctaccacacccttaataagctgaacctaacagaagacattggccaagacgatcaccaaacaggaagtctgcggtcttgcagttcttcagactgctttaataaagtgatgccaccaaggaaaaagagaagacctgcctctggagatgatttatctgccaagaaaagtagacatgatagcatgtatagaaaatatgattcgactagaataaagactgaagaagaagccttttcaagtaaaaggtgcttggaatggttctatgaatatgcaggaactgatgatgttgtaggccctgaaggcatggagaaattttgtgaagacattggtgttgaaccagaaaacgtanttatgcttgtcctagcttggaaattggatgcacaaaacatgggttattttactctacaggagtggttaaaaggaatgacttctctccaatgtgatacaacagaaaaactcagaaatactttggattacttaagatcattcttaaatgattctacaaactttaaacttatttacagatatgcgtttgactttgcacgggaaaaggaccagcgcagcctagacataaacactgccaagtgcatgttgggactgttattaggaaaaatctggcccctttttccagtttttcaccaattcttagagcaatcaaaatacaaagttattaataaagaccagtggtgcaatgtcctagagtttagcagaacaattaatcttgacctcagcaactatgatgaagatggagcatggccagttttgttggacgagtttgtggagtggtataaagacaaacagatgtcctaggactttatgcatagcagcgagagagtcactgttaccacagttttgtcacccattagccataaattgctgtttgtatcaaagcgcatgctgcttctcttgcactgtttccctttcgcagggacatgttggtgtttgctattgaattggccagctctgcttgctgtgtggcattgttctcttggaaggcygctttgcagtttgtatttacactacagattggtgaatttgccaacgtcctcactgtgattatgtgtatattgctgtttaaattttgtatatgtgtataaaaggaaaaagsttcacctagagattatttctgaaaaatgtattgtaaaaataattttgtggcatttctagtccctttttttgaatgaaccaattatactttatttggtctcctatgtagcatttcagaaaacaagagaaaactgttaccatgaacaaacattgccagaattaaccttactgtttaagaggccaacttctggaaggaggtaggagtcataactttttagaggcatatgccaaatatcatttggtatacttaacaatattagtgttttaaaatgatgagttataattatttgaacatatagatatgtaacatgccacaaatcatttctaccatgcaaggtgtataagttgtttattttttagtgttaaaactataatagcttgaatataggtaccaatgaacaaattcaaattgcacctcttttcttaaaagaatgggatttaaactcttataaacattctttaacttttttgtttgtttgttctctttttttccttttgcattcttctagccagtgattgatctgctaatgctttctttgccactctaagtaaaatttatttcacctcctcaatgaaaacctcatggttttgctggctgtttataactgcatcgcacttctagttgtggcttgaattttcagttaagctttcatggtatgtaattttccagccttttgagaaaacaagcatactataagtgagagctgttttgttttccttgtttgtttgtttcatgctaggcttttcctggcagcatgtccattgcaggcagtggacaagaaaccaccagcattgagctaacccagtacatgctaggacctgtcctagaggggccacttttcattacctgagttatttgtacagaagggcaatagccattatttttgtggatgaggaaacaagaataaacagaatggtatttttaggtttgnattttatgtctttttttttttttttttttgccattcttgaggaaatatagagatgacatgttttcaccccaactatctggtgctattgaatgactaattcagtccctaaagttctgtgaaaacacaaaagtctaatgatttgagtgagtaaaaggtaatggtgcatttgaacaagtaaatgctgtcgtggtcagcaagatccgkgatttgaacatgtgatgactggaaaaaggtttgggttatttggaactctggctaaaacttctttcgggtgacatgtgatcgtttaaatggcattaagtgaataaagcacacagasagtgctactcttgaccactattttaccatttctttgcaaacagtgttcacattttcatattttttccctaactaaaccaccaaagaaagamattttgtatgtatatacagtgtgtgtgtatacaaaatcatgatatagtagaatgcaactactttctttttctaccaaacgaaaggttttatttgctgtgaaataaaccagaagtttaaaaaaccctgtagtgattaagcatacttaaccactccttatttgtagattcactttcaaccttaaaaattaataccagtttgcataaaccaatatctgaaaagaacaggaaatgttaatgncaagcaacagctattaatactgatgtgaatggatgcatttgttttgcagtggtgactggcctaggcaggtttgggatctgtgaaagaattgattcattttcaaaattattccataaagttaaaaagttacactttaaaggcaacaggtcatacagttctttaaaatctgnatccaactgtagctttatttaaaag

SEQ ID NO: 116 - DNA, 1264 bp, Homo sapiens
  misc_feature (66)..(66): n equals a,t,g, or c
cggcatgcgctggtttgtggacacagctgagcgttatgcctgggctggccggccactggcagcctnctgtgaccacaacgcaaaggtggctcgagagcttggccgcaaccaggtggcgcaaacgtggaccatgctgcggatcatctactgcagccctggcctagtgcccactgcaaacctcaaccacagtgtgggcaagggtggctcctgtggcctcccgctcatgaacagtttcaacctgaaggatatggccccagggttgggcagtgagacgcggctggaccgcagcaaaggagatgcrcggagcgacacagttctgctcgactcctcggccacactcatcaccaatgaggataacgaggaaaccgagggcagcgacgtacctgccgactacctgctgggtgacgtggaaggtgaggaggacgagctgtacctgctggatccggaacacgcgcaccccgaggaccctgagtgcgtgctgccgcaggaggcctttccgctgcgccacgagatcgtggacacgcctcccgggcccgagcacctgcaggacaaggccgactccccgcacgtgagcggcagcgaggcggatgtggcctccctggcccccgtggactcctccttctcgctcctgtctgtctcacacgcgctctacgacagccgcctgccgcccgacttcttcggcgtgctggtgcgcgacatgctgcacttctacgctgagcagggcgacgtgcagatggctgtgtctgtgctcatcgtcctgggtgaacgggtgcgcaaggacatcgacgagcagacccaggagcactggtacacttcctacatcgacctgctgcagcgcttccgcctctggaacgtgtccaacgaggtggtcaagctgagcaccagccgcgccgtcagctgcctcaaccaggcctccaccaccctgcacgtcaactgcagccactgcaagcggcccatgagcagccggggctgggtctgcgacaggtgccaccgctgcgccagcatgtgtgccgtctgccaccacgtagtcaagggtctcttcgtgtggtgccagggctgcagccacggcggccacctgcagcacatcatgaagtggctggaaggcagctcccactgtcccgcaggctgcggccacctctgcgagtactcctgacggggcatctgctgggcttgcccgggcggccgcgtgcagaaccccgcctggtcttgtcccgagacgggcggaggctggaacttgagacctcaataaaggaagtagagccgc

SEQ ID NO: 117 - DNA, 471 bp, Homo sapiens
tcatgttaaaatcctcaacaagcaagcattgaagaaacatacatcaaaataacaagagccatctatgacaaacccacarccaacatcatactgaatggcaaatgctggaagcattgcccttgagaaacagaacaagacaagggtgaccactctcagcactcctattcaacatagtactggacatcctagccagaacagtcaggcaagagaaagaaataaaaggtacccaaacaggaaaagaggaagtcacactatctctatctgcaatctgtttctatacctagaaaaccccatagtttctgctagcagctcctagatccaataaaaaacttcatcaaagtttgaagatacaaaatcagtgtacaaaaattagtagcatttctatacaccaataacgttcaagctaagatccaaatcaagaacacaatcctattcacaatagccaaaaaaaaaaaaaaaaaaaaaaaaaaa

SEQ ID NO: 118 - DNA, 923 bp, Homo sapiens
  misc_feature (17)..(17): n equals a,t,g, or c
aataccactcactatanggaaagctggtacgcctgcaggtaccggtccggaattcccgggcaagatggaggcgactacggctggtgtgggccggctagaggaagaggcgttgcggcgaaaggaacggctgaaggccctacgggagaaaaccgggcgcaaggacaaggaagatggggagccaaagaccaagcatctcagagaagaggaggaagaaggcgagaagcacagggaacttaggctgcggaactatgtcccggaggatgaggacctgaagaagaggagggtgccccaggccaaaccggttgcagtggaggagaaggtgaaggagcagctggaggccgccaagcccgagcccgtcatcgaggaggtggacctggccaacctcgctcctcggaagcctgactgggacctcaagagagatgtggccaagaagctggagaaactaaaaaagcggactcagagggccattgccgagctgatccgtgaaaggctgaaaggccaggaagacagcctagcctctgcagtggatgctgccaccgaacaaaagacctgtgactccgactgaggcatgccctgccccaccactcgcccatcaggcctgtcctgcagrggatggtcttgggcagggatgggggctaggcttgccatcacctccagtttggcttctgagcagagactccctgcccatcaagtctgaaacccccatggatgaggtcagctccttgtctgctgggtggcccctgccattctgaatggaggcagaaccagcaacaactctgggcgtgcctgtgtctgcacatgtggatgtacatatgtctgtatatatgtatatattttgaactttctaaaaaaaaatctggaaatagaaacaagtaaacccctgtgtgtggcaaaaaaaaaaaaaaaaaaaaaaaaaaaaaaaa

SEQ ID NO: 119 - DNA, 470 bp, Homo sapiens
  misc_feature (401)..(401): n equals a,t,g, or c
  misc_feature (404)..(404): n equals a,t,g, or c
  misc_feature (409)..(409): n equals a,t,g, or c
tttcagtccaatacagaccgtgaaagcggggcctcacgatccttctgaccttttgggttttaagcaggaggtgtcagaaaagtatttaacaaaattcaacaccctttcacaataaaaaataaaaaataaaaaaccctcaacaaactaggaatagaaggaaacttcctcaacctgataaagggcatctatgaagaacccatggttagcatcatacttaatggtgaaggactggattatttccccctgagatcagaaacaagacaaggatgtctgctttggccatttctattcaacttgtactggacagtcaagaaagggcaattaggcaagaaaataaaataaaagtcatctaggttggaaaggaagaagtataactaaatagagatgggagacgatatggnggntttgngcatagcaatccaagggaaaactatagaaaatccaaggcatgatttattaataaataaatt

SEQ ID NO: 120 - DNA, 2737 bp, Homo sapiens
  misc_feature (610)..(610): n equals a,t,g, or c
  misc_feature (643)..(643): n equals a,t,g, or c
  misc_feature (2718)..(2718): n equals a,t,g, or c
caacgtctcttcaatgttacgtgttctccacgaagaactggaacacaccaattatatttgatctcaaagaaggaactgttagtttgattctgcaggcagaaagacattttcttcttgtagatggtagtagtatctatttatattcatatgaagggcgctttatttcatctccaaaatttcctggaatgagaacagatattctgaatgcacagactgtgtctttgagtaatgataccatagcaataagagacaaagctgatgaaaaaataatcttcctctttgaggcatcaaccggaaagccgttaggtgatggaaagtttctttctcataagaatgaaatcttggaaattgctctggatcaaaaaggacttaccaatgatagaaaaattgctttcattgataaaaatagagatctctgtatcacttctgtgaaasgatttgggaaggaagaacaaattatcaagcttggaacaatggtgcatactttggcatggaacgatacatgcaatatcctttgtggacttcaagatactcgatttatagtgtggtattaccscaatacagtttatgtggacagagacattttgcctaaaacattatatgaaagggntgcaagtgaatttagkaaaaatccccatattgngagttttgktggaaatcaagtaactattagaagagctgatggctccctggttcacatcagcataacaccatatcctgctattctccatgaatatgtaagcagttcaaaatgggaagatgctgtgagactttgtcgctttgttaaggagcaaaccatgtgggcttgtctagctgctatggcagttgctaatcgagatatgactactgcagaaatagcctatgcagcaattggtgaaattgataaggttcagtacatcaattctataaaaaatcttccatctaaagaatcaaaaatggcccacatactactgtttagtgggaacatacaggaggctgaaatagtacttcttcaggctggccttgtttatcaagcaatccagatcaatattaatctctacaactgggaaagggcactggaattggctgtaaaatacaaaacacatgttgatacagttcttgcttaccgtcaaaagtttttggagacatttggtaaacaggaaactaataaacgatacttgcaytatgcasaaggtctccmaatagattsggasaaaatcaaagccaaaattgagatggaaattacaaaagaaagagagcaatcatcaagcagccaatccagcaagagtataggtttaaagccctaaatgccatgcgtatctttaagaaattttatcttttgaaacacgttctgattaaccaagggtaagcatgttttggttgctaaagaaaaaagcataatctttaaccgagtataagtacttgctgtgtatttagtgtaaaagtacatgcagaaagatgaaacacaaagtaattgatgtatttctatcttttatattttttagtccaataattagcaaaatattactatgtacttaagagatacctgtgtagtgtcgattatatgtcagttttttgcccattacttcatccctaaatcttcagcatgaacaaatattaatgtcgataataaaacattggactctttgaaatgtatgttaccattaatttctatttgacctctaaattgtaaaatgcctccaaaagtttatttatagaacaaaaatacatgaggatggatttgtacaaatgtataaaatgccactatttatacaccaagttcatagcagcattactggaatagcaaaagatggaaacagctcaagtgtctatcatgaatggataaacaaatgtgctataatacatacaatggratattatttagctttaaaaaggratgraatyctgataaatactacctcaggataaaccttgaaaacactatgctaagtgaaataagccagacacraaaggccaaatatgatgccacttttatgaggtaccagcataggcaagttcacagaaacagaaaggagaatagtggttgccagggactgcagggaggaggaaatggggggtggggttattgtttaacgagtacatagtttctgtttgggatgaacaaattctggaaatggatagcgatgatggttgctcaacattttgaatgttaatgccactaaattgtacccataaaaatggttaaaatggtaaattttgttatgtatattttatcataatttaaaaaatatatctagaatgggcaagaaggattctcctcattcctctcttgacttgagaatgatcagtcaataggccctgaagtctgaatttgtgaaaatttccttgggtgacaaacttgtttgattactctatttagtgtatcccaaagttattaccacataatcttttaaacaataaaacaaataccccttagaaagtcttctgcaaacccatttctgaaaatggtacattatagggtgggtatagatgcatagatatgggattatgkatgatatatatatatatacacacacacacaaagggatagagagawtacctctcttaacccccattttaattactatgtctagggtttttaaataaaaatcttttctttttaacatggttcttttcttttccggaatattggaatattctggtcttggatccagatgaaatctgattggacagggaccttaccaggtggactggggatggggttcccatatggtatanttcaataagaagcttaaaa

SEQ ID NO: 121 - DNA, 1106 bp, Homo sapiens
  misc_feature (302)..(302): n equals a,t,g, or c
  misc_feature (424)..(424): n equals a,t,g, or c
  misc_feature (1039)..(1039): n equals a,t,g, or c
  misc_feature (1084)..(1084): n equals a,t,g, or c
  misc_feature (1103)..(1103): n equals a,t,g, or c
ttttaggtgmcmtatagaaggtacgcctgcagtaccggttccggaattcccgggtcgacccacgcgtcaggacacagcatggacatgagggtccccgctcagctcctggggctcctgctactctggctccgaggtgccagatgtgacatccagatgacccagtctccatcctccctgtctgcatctgtaggagacagagtcaccatcacttgccgggcaagtcagagcattagcaactatttaaattggtatcagcagaaaccagggaaagcccctaagctcctgatctatgctgcatccantttgcaaagtggggtcccatcaaggttcagtggcagtggatctgggacagatttcactytcaccatcagcagyctgcarcctgaagattttgcaacttaytactgtcaacagtatgataatntccctctcactttcggcsragggaccaaggtggaratcaaacgaactgtggctgcaccatctgtcttcatcttcccgccatctgatgagcagttgaaatctggaactgcctctgttgtgtgcctgctgaataacttctatcccagagaggccaaagtacagtggaaggtggataacgccctccaatcgggtaactcccaggagagtgtcacagagcaggacagcaaggacagcacctacagcctcagcagcaccctgacgctgagcaaagcagactacgagaaacacaaagtctacgcctgcgaagtcacccatcagggcctgagctcgcccgtcacaaagagcttcaacaggggagagtgttagagggagaagtgcccccacctgctcctcagttccagcctgaccccctcccatcctttggcctctgaccctttttccacaggggacctacccctattgcggtcctccagctcatctttcacctcacccccctcctcctccttggctttaattatgctaatgttggaggagaatgaataaataaagtgaatctttgcaaaaaaaaaaaaaaaaaaaaaaaaaaaaaaaaaaaaaaaaaaaaaaaaaaaaaaanaaaaaaaaaaaaaaaaaaaaaaaamgggggggccgctctaggggntccctcggggggcccaagntta

SEQ ID NO: 122 - DNA, 1897 bp, Homo sapiens
ccacgcgtccggagacgcctcatctggcagttaccaccgcgctagaagcctcccgaccggccgcctgcatcaccagcgtcaccatgggggctgtgctgggcgtcttctccctcgccagctgggttccctgcctttgcagcggtgcatcatgtctgctgtgtagctgctgccccaatagtaagaattccacggtgactcgcctcatctatgctttcattctcttcctgggcgctgctgtatcctgtatcatgctgacagaagggatggaatcacagctgaagaagatacctggattctgtgaagggggatttaaaatcaatgtggctgatagaaaagtggataaagattgtgatgttctggtcggttataaagctgtgtatcggatcaactttgccttggccatctttttctttgtcttctctctgctcatgttaaaagtaaaaacaagtaaagatcccagagcagctgtacacaatgggttttggttcttcaaaattgctgccattgttggtatcatggttggctctttctacatccctgggggccatttcaccacagcttggttctttgtgggcatggccggggcctttttgttcatcctcatccagctagtgcttctggtcgacttcgctcactcttgtaatgagtcatgggtaaatcgaatggaagaaggaaatccaaggtgctggtatgctgctttgctgtctgtcaccagcatctgttacatcctgtccgttgtctttgccggcttactctacacttactacaccagaccggacggctgcgcagagaacaagttcttcatcagtattaatttgatcctttgctttgtggtttctattatatccattcatccaaaaattcaggaacacaggcctcagtctggtctcctgcagtcctctgtcatcaccctctacaccatgtacctcacctggtcagccatgaccaatgaacccgatcgttcctgcaaccctggcctgtggagcatcgtcacgcacatgacggcgccaaccttggctcctgggaattcaactgctgtggtccctacccctgctccacccgcaaagagtgggcattttttagatgcagagacgttcattgggctgacaggttttgttctctgccttttgtattctagcatccgtacttccaacaacagccaagtaagtaagctgactttgtcaggaagtgacagcgtgatcctccgtgatacagctgccagtggcggcagcgatgaagaagagggacagcctcggcgggttgtggacaacgagaaggaaggagtgcagtacagctacttcttattccacttcatgctctgcctggcttccttgtacatcatgatgaccctgaccagctggtacagccctgatgcagagttccagagcatgaccagcaagtggtcagctgtgtgggtcaagatcagctccagctgggtctgccttctcctctatgtctggacccttgtggctccactcgtcctcaccaatcgtgacttcagctgaacctctgagaattcataaagataagtcatctggtgtttcatcaccaggaatgggcctgtctgtccctcaggattgcagattgacagcctggctttgaggttagtgatatggtctaggagttcatcagaggcaacagcagtggctgctacgtttacctggttggagctagctgggagaagacttgtaggcccatgtggcccctgccagatgtttactctctggactgttcttgtaaagtacttggttgggaaataaaagcttctcttatacatcaaggatcctgccaaaaaaaaaaaaaaaaaaaaaaaaaaaaaaaaaaaaaaaaaaaaaaaaaaaaaaaaaaaaaaaaaaaaaaaaaaaaaaaaaaaaaaaaaaaaaaaaaaaaaaaaaaa

SEQ ID NO: 123 - DNA, 1909 bp, Homo sapiens
  misc_feature (1153)..(1153): n equals a,t,g, or c
  misc_feature (1410)..(1410): n equals a,t,g, or c
tctagccttctcaaagccaagtcccactatttgctccatgaacagtaacatctggcaaatatgcattcagttggaaggaattggccagtttgcatatgcactaggaaaagacttctgtttgctcttgatgtcagccctttatccagtactggagaaggctggagaccaaaccctactcattagtcaggtggctaccagcaccatgatggacgtttgccgtgcttgtggctacgactccctgcagcacctgatcaatcaaaattcagactatttagtgaatgggatctctttaaatctgcgtcatctggctctgcatcctcataccccaaaggtcctggaagtcatgctgcggaactcagatgctaacctgcttcctttggtggcagatgtggttcaagatgtcttggccaccctggaccaattttacgataagagagctgcttcctttgtcagcgttctgcatgctctgatggcagcattagcccagtggttcccagacacaggtaatcttgggcacctccaagagcaaagtttaggagaagagggaagtcatttgaaccaaagaccagcagctcttgagaagagcaccaccacagctgaagacatcgaacagtttttgctgaactacctcaaagagaaggatgtgggcagatggaaatgtctcggattttgataatgaagaagaggaacagtcagtccctcccaaagtggatgagaatgacacccgtccagatgtggagccaccactgccattgcagatccaaatagccatggacgtgatggaacgctgcatccacttgttgtcagataaaaatctgcaaatccgcctgaaggtcttggatgtgctggatctgtgtgtggttgttcttcagtcccacaaaaaccagctgcttcccttggctcatcaggcctggccctcgctcgttcaccgactcacacgggacgcccccctggcagtgcttagagccttcaagttttacgtaccctgggaagcaagtgtggtgactttcttcgcagccggttctgcaaagatgtcctgccaaagctggctggctccctagtcacccaggcccccatcagtgccagggctggaccagtttactcgcacacgctggccttcaagttgcagctggctgtcttacagggcctgggncccctctgtgagagactggacctaggtgagggtgacctgaataaagtggctgatgcctgcttgatttacctcagtgtcaaacagcccgtgaaattacaagaggctgccaggagcgtcttcctccacttgatgaaggtggacccagactccacctggttcctcctgaacgagctttactgccccgtgcagttcacacctccccaccccagcctccaccctgtgcagctgcacggggccagcgggcagcagaacccctnacacgaccaacgtgctccagctgctcaaggagctgcagtgaccctgctcccccaccacagaggccaccgatccctcccctactgccagccagaagctgggctgaccccaccccggccataggcggtggcagcggcagcagagaaggtgaattagttagccaatcgatttataaattgatcgatcacacaactgcttagaaatggattgaaggaaagtagctgactattatttatatttcataccttgtgttttcaagtgacattgtctggtggctctaagggtttaaccccttagcctaccatctctatagccccagctccctcacaggccacacacacacacacacaagaggtcagttcccctccatctgcatacacctccctgtcttcaaataatgagatggaactaatttgttttacctaacctgatctttgggaaacaaacggaaataaagacacttcttggatgaaaagtaaaaaaaaaaaaaaaaaactcgag

SEQ ID NO: 124 - DNA, 743 bp, Homo sapiens
cgggtcgacccacgcgtccgcccacgcgtccgggcatgaatcaccgtgccccactagctgttggaattttgataggccttgcatgaacctatcacttttggttagcatgcattgctagtatatagaaacactctgatttttgtgtgttatcctgcaactttgctgaatttattagctttagtagcattcctgtggatttttcaggattttctatatataggatcgtgtcctatatatagaattgtgaatgagtagtgatagttttacttcttttcaatttggatgccgtttgttttttgtctaattactctggctataacttccagttatacacttcacaattgagtgtattagctgtgagtttttcataaatgtccttatcatgttgaggaagttctcttctattcccagtgtgttgaatgttttaatcatgagttagattttatcagtgccttttctgcattgattgaggtgatcctgtggttttcctttctttgatttttctaatgcaatatattacattgattgattttctcatattaaaccacccttgtattcctgggataaatcccatttggttataatccttttagatgttagatttggtttgctcgaacagccaatcctcattattcatggattccatatttgcctatttgctaaaatttatttgtaacccaaaaattaataatscagtggtttcatggtcatttatacatacacctagaatggcaaaaaaaaaa

SEQ ID NO: 125 - DNA, 2120 bp, Homo sapiens
  misc_feature (2)..(2): n equals a,t,g, or c
  misc_feature (11)..(11): n equals a,t,g, or c
  misc_feature (19)..(19): n equals a,t,g, or c
  misc_feature (58)..(58): n equals a,t,g, or c
  misc_feature (89)..(89): n equals a,t,g, or c
  misc_feature (2016)..(2016): n equals a,t,g, or c
  misc_feature (2096)..(2096): n equals a,t,g, or c
  misc_feature (2106)..(2106): n equals a,t,g, or c
gncagtacatntacgtatnagtcatcgctattaccatggtgatgcggttttgccagtncatcaatgggcgtggatagcggtttgactcncggggatttccaagtctccaccccattgacgtcaatgggagtttgttttggcaccaaaatcaacgggactttccaaaatgtcgtaacaactccgccccattgacgcaaatgggcggtaggcgtgtacggtgggaggtctatataagcagagctcgtttagtgaaccgtcagatcgcctggagacgccatccacgctgttttgacctccatagaagacaccgggaccgatccagcctccggactctagcctaggccgcgggacggataacaatttcacacaggaaacagctatgaccactaggcttttgcaaaaagctatttaggtgacactatagaaggtacgcctgcaggtaccggtccggaattcccgggtcgacccacgcgtccggttaagaaatagtcgatcagttgaggagtagaggagtgaagaccttggaaagttgccaaaagcctcgagaatttctctacatgtgtgacatgttctcaggactcaactttttcttttaggtttggaagacccgcagaaaaatagaaatgaaggtacatatgcacacaaaattttgcctcatttgtttgctgacatttatttttcatcattgcaaccattgccatgaagaacatgaccatggccctgaagcgcttcacagacagcatcgtggaatgacagaattggagccaagcaaattttcaaagcaagctgctgaaaatgaaaaaaaatactatattgaaaaactttttgagcgttatggtgaaaatggaagattatccttttttggtttggagaaacttttaacaaacttgggccttggagagagaaaagtagttgagattaatcatgaggatcttggccacgatcatgtttctcatttagatattttggcagttcaagagggaaagcattttcactcacataaccaccagcattcccataatcatttaaattcagaaaatcaaactgtgaccagtgtatccacaaaaagaaaccataaatgtgatccagagaaagagacagttgaagtgtctgtaaaatctgatgataaacatatgcatgaccataatcaccgcctacgtcatcaccatcgtttgcatcatcatcttgatcataacaacactcaccattttcataatgattccattactcccagtgagcgtggggagcctagcaatgaaccttcaacagagaccaataaaacccaggaacaatctgatgttaaactaccgaaaggaaagaggaagaaaaaagggaggaaaagtaatgaaaattctgaggttattacaccaggttttccccctaaccatgatcagggtgaacagtatgagcataatcgggtccacaaacctgatcgtgtacataacccaggtcattctcatgtacatcttccagaacgtaatggtcatgatcctggtcgtggacaccaagatcttgatcctgataatgaaggtgaacttcgacatactagaaagagagaagcaccacatgttaaaaataatgcaataatttctttgagaaaagatctaaatgaagatgaccatcatcatgaatgtttgaacgtcactcagttattaaaatactatggtcatggtgccaactctcccatctcaactgatttatttacatacctttgccctgcattgktatatcaaatcgacagcagactttgtattgagcattttgacaaacttttagttgaagatataaataaggataaaaacctggttcctgaagatgaggcaaatataggggcatcagcctggatttgtggtatcatttctatcactgtcattagcctgctttccttgctaggcgtgatcttggktcctatcattaaccaaggatgcttcaaattccttcttacattccttggtgcattagctgtaggaacaatgagtggaggacgcccttcttcatctactgscccattctcanggtggacatgatcacagtcacccaacatgcacatgggcatgggccattctcatggaccttgaaatctaacaaggtttttnggaagaaatntgaagctggatttg

SEQ ID NO: 126 - DNA, 480 bp, Homo sapiens
  misc_feature (336)..(336): n equals a,t,g, or c
  misc_feature (477)..(477): n equals a,t,g, or c
gaagaaaagcacagatctagatgatttcactgctgaatttttgcaaatatgtaaaaaaggattaacaccaatcatccacaaactcttccaaaaattagaagaaaaaaagaatacttccaaatacattctatgagatgagtatgatcctgatatcaaaaccagtcaaagacatcacagtgaaactagagatcaatatcctttatgaatatagatgcaaaaatcctcaacaaaacaccagcaagtttatatgtagtaacatatagaaagaactatgcaccatgacaaagtaggatttatcccaggaatacaattaacatctgaaaatcagtgtaatgngccatattaatataggaccaaaagcacaaaagataacaggaagatgacatcaccaaggtttgcttccaagatggaatgkcaggttgtgcartgagttgcctctcttcctttccacccagcaagttgcatgtagtatttganatg

SEQ ID NO: 127 - DNA, 977 bp, Homo sapiens
  misc_feature (62)..(62): n equals a,t,g, or c
ggtacttcaaaacccccgaggcctagatctgctatttctctcccaaggagggttatgcgcantctaggagagagttgttgtttctatgccaatcagtctggggtcataaaggatactctccaaaaagttcgagaaaatctagatagacgctaacaggaattggaaaataacacccctggtaccaaaacatgtttaactggaatctatggctaactactctaatcactggattggcgggaccccttctcctcctcttgttaggtttagtcttcgggccttgtatattaaattggtttcttaaatttataaagcagttcatagcttctgtcaaacttacgtatcttaaaacccmatataactcccttgttgtgactgaagaatcaatgatttgattacccaaaacatgagtggggaatgtgatacctaccctgttttaacctgccccaagtttacgtgtacagtgggtcagaagggtgacttctgacccttctgctcagagtgactctctcttagctgagatagctggacactctccattttagcytcttcacttgcagtccccttatccccctcccttaagggaataactagtgcaagctgactccaagcacatccaggaatgcacttactgataagatattgaggcaagctgtaccagcagctcctggggacgtgctcagtggatggtacccaagcccctgcatttatctctttgtgatagtttaagcccctgcacctggaactgtgtatttttctgtaactatctctgtaaccattaattttttttaactttttgcgtgttctgcttctgtaaaaattgcttcagctaggctccccctgccctatttagaccacggtataaaaagaaatctatccccttcttcggggctgagagaattttgagctctagccatctctcggtcactggcaataaaagaactcctgaattagaaaaaaaaaaaaaaaaaaaactcgag

SEQ ID NO: 128 - DNA, 3184 bp, Homo sapiens
tgatgagggacacagagagtctggcaaagagaatctgcaaagacctcgaaaacttatctcaaattcaaaatagggaatttggaacacagaaatatgaacaatggattgttacagttcagaaagcatgcatggtgttccagatgccagacaaagatgaagagagcaggatttgtaaagccctgtttttatacacttcacatttgcggaaatataatgatgccctcattatcagtgagcatgcacgaatgaaagatgctctggattacttgaaagacttcttcagcaatgtccgagcagcaggattcgatgagattgagcaagatcttactcagagatttgaagaaaagctgcaggaactagaaagtgtttccagggatcccagcaatgagaatcctaaacttgaagacctctgcttcatcttacaagaagagtaccacttaaacccagagacaataacaattctctttgtgaaaaccagagcacttgtggacgctttaaaaaattggattgaaggaaatcctaaactcagttttctaaaacctggcatattgactggacgtggcaaaacaaatcagaacacaggaatgaccctcccggcacagaagtgtatattggatgcattcaaagccagtggagatcacaatattctgattgccacctcagttgctgatgaaggcattgacattgcacagtgcaatcttgtcatcctttatgagtatgtgggcaatgtcatcaaaatgatccaaaccagaggcagaggaagagcaagaggtagcaagtgcttccttctgactagtaatgctggtgtaattgaaaaagaacaaataaacatgtacaaagaaaaaatgatgaatgactctattttacgccttcagacatgggacgaagcagtatttagggaaaagattctgcatatacagactcatgaaaaattcatcagagatagtcaagaaaaaccaaaacctgtacctgataaggaaaataaaaaactgctctgcagaaagtgcaaagccttggcatgttacacagctgacgtaagagtgatagaggaatgccattacactgtgcttggagatgcttttaaggaatgctttgtgagtagaccacatcccaagccaaagcagttttcaagttttgaaaaaagagcaaagatattctgtgcccgacagaactgcagccatgactggggaatccatgtgaagtacaagacatttgagattccagttataaaaattgaaagttttgtggtggaggatattgcaactggagttcagacactgtactcgaagtggaaggactttcattttgagaagataccatttgatccagcagaaatgtccaaatgatatcaggtcctcaatcttcagctacagggaatgagtaactttgagtggagaagaaacaaacatagtgggtataatcatggatcgcttgtacccctgtgaaaatatattttttaaaaatatctttagcagtttgtactatattatatatgcaaagcacaaatgagtgaatcacagcactgagtattttgtaggccaacagagctcatagtacttgggaaaaattaaaaagcctcatttctagccttctttttagagkcaactgccaacaaacacacagtaatcactctgtacacactgggatagatgaatgaatggaatgttgggaatttttatctccctttgtctccttaacctactgtaaactggcttttgcccttaacaatctactgaaattgttcttttgaaggttaccagtgactctggttgccaaatccactgggcacttcttaaccttctatttgacctctgcgcatttggccctgttgagcactcttcttgaagctctccctgggcttctctctcttctagttctattctagtcttttttattgagtcctcctctttgctgatcccttccaagggttcaatatatatacatgtatatactgtacatatgtatatgtaactaatatgcatacatacaggtatgtatatgtaatggttatrtgtactcatgktcctggtgwagcaacgtgtggtatggctacacagagaacatgagaacataaagccatttttrkgcttactactraaagctgtccactgtagagttgctgtatgtagcaatgtgtatccactctacggtggtcagcttttagtagagagcataaaaatgataaaatacttcttgaaaacttagtttactatacatcttgccctattaatatgttctcttaacgtgtgccattgttctctttgaccattttcctataatgatgttgatgttcaacacctggactgaatgtctgttctcagatcccttggatgttacagatgaggcagtctgactgtcctttctacttgaaagattagaatatgtatccaaatggcattcacgtgtcacttagcaaggtttgctgatgcttcaaagagcttagtttgcggtttcctggacgtggaaacaagtatctgagttccctggagatcaacgggatgaggtgttacagctgcctccctcttcatgcaatctggtgagcagtggtgcaggcggggagccagagaaacttgccagttatataacttctctttggcttttcttcatctgtaaaacaaggataatactgaactgtaagggttagtggagagtttttaattaaaagaatgtgtgaaaagtacatgacacagtagttgcttgataatagttactagtagtagtattcttactaagacccaatacaaatggattatttaaaccaagtttatgagttggttttttttcattttccatttgtattttattaagagtgtcttttcttatgtgattttttttaattgctatttgatatggtttggctatatgtccccacccaaatctcatcttgaattataatccccatgtgtcaagggagggacctgaygggaggtgattggatcacgggggcagttgtccccatgctgttcttgggatagtgagttagttctcatgagatctgatggttttataagtgtttgacaattcctcctttacacacactctctctctcatctgctgccatgtaagacttgcctgcttccccttctgccatgattgtaagtttcctgaggcctcctcagccatgtggaactgtgaatctattaaacctcttttctttataaatgaaaaaaaaaaaaaaaaaaaa

SEQ ID NO: 129 - DNA, 1055 bp, Homo sapiens
  misc_feature (3)..(3): n equals a,t,g, or c
  misc_feature (6)..(6): n equals a,t,g, or c
  misc_feature (9)..(9): n equals a,t,g, or c
  misc_feature (35)..(35): n equals a,t,g, or c
ggnttnctnccggggggggaaaaggaactggcacnccccactawwgggaacaaaagctggagctccaccgcggtggcggccgctctagaactagtggatcccccgggctgcaggaattcggcacgagccgagttgaccccacggtctgagatgtccaagctgcccacagacagcagtgtcccgcagacaggcgcggcgaatggtgacagagacgtcccgcaggcggagaatacaagagcttgaagaacgccgcaggcgattcgtggaagcctgcagagcaagggaagcagcgtttgatgccgaatatcagcgaaatcctcacagggtggacctcgatattttaacctttacgatagctctgactgcctctgaagttatcaaccctctgatagaagaacttggttgcgataagtttatcaatagagaatagttatgtggtgacactacttcaagagaacctctgcattccagtcataccaatcctgcaacttgattttcagaagtcaagagtatatcgcgataagacagtgcacaggtggaggggaaaaaaagggggagggggaagcttatcttgaaaaagcatcacagaagtagaaaaaaatgtcgaaagcattataactgtaacgttctttgagtttgtgattgatccacatttttccccctgcattatggaaaatgtctctcagcattgctttattacaaagtaaaggatggttttataaaattgagactgatgaaacatcaatactagagcccatgaggatgaaagaaattatcaaatagtgctgaacagaataagatgttaacgctgagttattaggactggaaggctatgaaaagaacttgaaattgtcggaatatgtgctctcttcatgtcatattcaatagaagtttctagtttaagattgattttgtgttttcttaggcatttcaagtgacaagcaaagtaaatgtatatattatgtgataaatcatgttttcaagaaaaaaaaaaaaaaaaaaaaaaaaaaaaaaaaaaaaaaaaaaaaaaaaaaaaaaaaaaaaaaaaaaaaaaa

SEQ ID NO: 130 - DNA, 758 bp, Homo sapiens
  misc_feature (569)..(569): n equals a,t,g, or c
ggatgcctggacccagagtgtgggggaaatatctctggagaagccctcactccaaaggctgtccaggcgcaatgtggtggctgcttctctggggagtcctccaggcttgcccaacccggggctccgtcctcttggcccaagagctaccccagcagctgacatcccccgggtacccagagccgtatggcaaaggccaagagagcagcacggacatcaaggctccagagggctttgctgtgaggctcgtcttccaggacttcgacctggagccgtcccaggactgtgcaggggactctgtcacaatctcattcgtcggttcggatccaagccagttctgtggtcagcaaggctcccctctgggcaggccccctggtcagagggagtttgtatcctcagggaggagtttgcggctgaccttccgcacacagccttcctcggagaacaagactgcccacctccacaagggcttcctggccctctaccaaaccgtggctgtgaactatagtcagcccatcagcgaggccagcaggggctctgaggccatcaacgcacctggagacaamcctgcnaakgtccagaaccactgccaggagccctattatcaggccgcggcarcaggggcaytwactgtgyaawyycagggacwggaaagayagayaggatggggagwaggttcttcagtgtatgcctgtctgcggacggccagtmaccccakkgcccagaatcagaagaccttcggttttccagagccaagttgg

SEQ ID NO: 131 - DNA, 1215 bp, Homo sapiens
  misc_feature (1202)..(1202): n equals a,t,g, or c
ctcgaggtcgacggtatcgataagcttgatatcgaattcctttttttttttttttttttttacttttaatatttaataggaatttgtgttagttgtaacaatgtgtgtattggatccaaaacatgttatattttaagcaatggcttggagagaactaatcaattcatattctgcatttccagccaaagggacataggcacaactgactggtggcaccttcctgtgggaagcctcttccatccatctacagcattgatacttttataaagtatgaatttatcttgcttgaagagttaagtctcattttccatggttaatgcaggattgctcataccagctttgcattttcctgggtttatgctgctctccgtccaagactgagaatcagtaagaaggtggctctgggactctctcaatggctttgcaggaaactgatggttttcgagatttttagctgtggaattcagccctgcaggagtagatgcttgttcaggatcctggttaacaaggcaagttggaaaggagcagccatcacctagacttgaaaaaatgggtagcaaccagtacttcttctcatcaccaaaaacttgtcgcatgtttttactgaaacccaagctgaatccattcttatctgttccatgtcgaaatactggacttctgaatgcctctaatgtagatttatttttgctgactagccaacaatgatagccaaacagagaagacaagctgacagaaaacatagctgcagcaaagaataaaaacataatatggaacttggcttgagtatcaggtaggccatttgtccaaaatttgataaaatactgtaaatctgttgccgcaataaaaaggcagtagagcagagaataagccaagaaaaggagaaagaacttataatttgaaaatccaacacaattgttcacccatggacaatgatgatccatcttcaaaatacatttatcacagacggagcagtgatggcagcgatctggttttataagttggcatctgtcacagtatcggatggctccagacatggtcctggtatagatgggaagatccttggctgctcgcctaagaacttcctgatgggcttctcctcttggctctctctccaacaaatctttctctgcataagagagatggaattcttttgaaggattcattggtaatgtaaagatagttttccagtrgaccaggsaacntcgctcccttgtc

SEQ ID NO: 132 - DNA, 2166 bp, Homo sapiens
  misc_feature (1993)..(1993): n equals a,t,g, or c
ttatggtcactttgaaagccaggatgacaaattatggattacctagatatcggtggcttactcatgcttggaatttttttcagagagagtttaagtgctgtggagtagtatatttcactgactggttggaaatgacagagatggactggcccccagattcctgctgtgttagagaattcccaggatgttccaaacaggcccaccaggaagatctcagtgacctttatcaagagggttgtgggaagaaaatgtattcctttttgagaggaaccaaacaactgcaggtgctgaggtttctgggaatctccattggggtgacacaaatcctggccatgattctcaccattactctgctctgggctctgtattatgatagaagggagcctgggacagaccaaatgatgtccttgaagaatgacaactctcagcacctgtcatgtccctcagtagaactgttgaaaccaagcctgtcaagaatctttgaacacacatccatggcaaacagctttaatacacactttgagatggaggagttataaaaagaaatgtcacagaagaaaaccacaaacttgttttattggacttgtgaatttttgagtacatactatgtgtttcagaaatatgtagaaataaaaatgttgccataaaataacacctaagcatatactattctatgctttaaaatgaggatggaaaagtttcatgtcataagtcaccacctggacaataattgatgcccttaaaatgctgaagacagatgtcatacccactgtgtagcctgtgtatgacttttactgaacacagttatgttttgaggcagcatggtttgattagcatttccgcatccatgcaaacgagtcacatatggtgggactggagccatagtaaaggttgatttacttctaccaactagtatataaagtactaattaaatgctaacataggaagttagaaaatactaataacttttattactcagcgatctattcttctgatgctaaataaattatatatcagaaaactttcaatattggtgactacctaaatgtgatttttgctggttactaaaatattcttaccacttaaaagagcaagctaacacattgtcttaagctgatcagggattttttgtatataagtctgtgttaaatctgtataattcagtcgatttcagttctgataatgttaagaataaccattatgaaaaggaaaatttgtcctgtatagcatcattatttttagcctttcctgttaataaagctttactattctgtcctgggcttatattacacatataactgttatttaaatacttaaccactaattttgaaaattaccagtgtgatacataggaatcattattcagaatgtagtctggtctttaggaagtattaataagaaaatttgcacataacttagttgattcagaaaggacttgtatgctgtttttctcccaaatgaagactctttttgacactaaacactttttaaaaagcttatctttgccttctccaaacaagaagcaatagtctccaagtcaatataaattctacagaaaatagtgttctttttctccagaaaaatgcttgtgagaatcattaaaacatgtgacaatttagagattctttgttttatttcactgattaatatactgtggcaaattacacagattattaaatttttttacaagagtatagtatatttatttgaaatgggaaaagtgcattttactgtattttgtgtattttgtttatttctcagaatatggaaagaaaattaaaatgtgtcaataaatattttctagagagtaaaaaaaaaaaaaaaaaaaaatgaccctcgagggggggcccggtacccaattcgccctatagtgagtcgtattacaattcactggccgtcgttttacaacgtcgtgactgggaaaaccctggcgttacccaacttaatcgccttgcagcacatccccctttcgccagctggcgtaatagcgaanaggcccgcaccgatcgccttcccaacagttgcgcacctgaatggcgaawgggcaaattgtaagcgttaatattttggtaaaattcgcggtaaattttggtaaatcagctcatttttaaccaataggccgaaatcggcaaaatccttataaatcaaagaatgaccgagataggg

SEQ ID NO: 133 - DNA, 845 bp, Homo sapiens
  misc_feature (47)..(47): n equals a,t,g, or c
  misc_feature (691)..(691): n equals a,t,g, or c
  misc_feature (845)..(845): n equals a,t,g, or c
gctgcaaaggggattaaagttgggtaacgccagggttttcccagtcncgacgttgtaaaacgacggccagtgaattgaatttaggtgacactatagaagagctatgacgtcgcatgcacgcgtacgtaagcttggatcctctagagcggccgccctttttttttttttttttttttttctgggcagacagaaggctttgttactgccaccgggcaggagacacagggtcagggttccagggccaagttatccactcccttgggtctttccttcctggggctttccctgcggggcccgggggagctgcagcagcagcagtgggcgacgaccagcagcagcaggagcagcacggtgcccatgaaggtgaggaaaacaatgaaggcaacagtgtcccatgtggactggaaaaactggtggctcttcagtctccccaggacttcctgaaccgtggcctccagctcctctgtggacacagccatcttggcgtgcaccgtgccacctcctagaagcctccaattcccccaaccaggcaggtcctggggagcacaggctgcttcctgcttccggccggacgcgtgggtcgacccgggaattccggaccggtacctgcaggcgtaccagctttccctatagtgagtcgtattagagcttggcgtaatcatggtcatagctgtttcctgtgtgaaattgntatccgctcacaattccacacaacatacgagccggaagcataaagtgtaaagcctggggtgcctaatgagtgagctaactcacattaattgcgttgcgctcactgcccgctttccagtcgggaaamctgtcgtgccagctgcattaattgaatn

SEQ ID NO: 134 - DNA, 866 bp, Homo sapiens
ggagaattgcttgaacttcggaggaagaggtttaagtaagcaaagattacaccaccgcactccagcctgggcgacagaatgagactccgtctcaaaaagaaacttgtatcatggctagcaaagtggaatttggttttatgctaaaataaaatcctagagccaggtgtggaggcgagtgcctataatcccagctactcagaggctgaggcaggaggatttgttgagaccaggagttcaagaccagcctgggcaacataataagacctcatctcaaaaaaaaaataataaagtaaaataaaataaaaatcctactctagggcacctgggaaccaaccagtggtgcctttggaaatcttggtttatgcttcctctctgacagtaggaaaaagctattgtgggagtttctcctgccatgtagagtgatggaagagcagaattgtggaggagcagggttgctttgttttgtctttgttgtactcagctggaaagctgtttaaggaaagaatctggtcatatgacctcctttctgcaattggaaatgaacgccacagggaaaagaagatataagacacagaatgctccttgcctggctaaaatggaagaggacaaaggaagcagaatactttctgggcttttggcttttgctaccctcctctggcagacccctgtccaagacgctggctgtgttgtgtgccaggctagagcttgtacctactgtaaaatctgtgtgtgatgtctgttgagttttttggaaaacaaaaaacttatattttaaaatacaaggtattagataataccaagggcagataattccacccttggaaataaaaaagattttyttttcttcaaaaaaaaaaaaaaaaaaa

SEQ ID NO: 135 - DNA, 2157 bp, Homo sapiens
  misc_feature (1505)..(1505): n equals a,t,g, or c
  misc_feature (2147)..(2147): n equals a,t,g, or c
gcggccgcgcgcactcgcacccgctgcccccgaggccctcctgcactctccccggcgccgctctccggccctcgccctgtccgccgccaccgccgccgccgccagagtcgccatgcagatcccgcgcgccgctcttctcccgctgctgctgctgctgctggcggcgcccgcctcggcgcagctgtcccgggccggccgctcggcgcctttggctgccggttgcccagaccgctgcgagccggcgcgctgcccgccgcagccggagcactgcgagggcggccgggcccgggacgcgtgcggctgctgcgaggtgtgcggcgcgcccgagggcgccgcgtgcggcctgcaggagggcccgtgcggcgaggggctgcagtgcgtggtgcccttcggggtgccagcctcggccacggtgcggcggcgcgcgcaggccggcctctgtgtgtgcgccacagcgagccggtgtgcggcagcgacgccaacacctacgccaacctgtgccagctgcgcgccgccagccgccgctccgagaggytgcaccggccgccggtcatcgtcctgcagcgcggagcctgcggccaagggcaggaagatcccaacagtttgcgccataaatataactttatcgcggacgtggtggagaagatcgcccctgccgtggttcatatcgaattgtttcgcaagcttccgttttctaaacgagaggtgccggtggctagtgggtctgggtttattgtgtcggaagatggactgatcgtgacaaatgcccacgtggtgaccaacaagcaccgggtcaaagttgagctgaagaacggtgccacttacgaagccaaaatcaaggatgtggatgagaaagcagacatcgcactcatcaaaattgaccaccagggcaagctgcctgtcctgctgcttggccgctcctcagagctgcggccgggagagttcgtggtcgccatcggaagcccgttttcccttcaaaacacagtcaccaccgggatcgtgagcaccacccagcgaggcggcaaagagctggggctccgcaactcagacatggactacatccagaccgacgccatcatcaactatggaaactcgggaggcccgttagtaaacctggacggtgaagtgattggaattaacactttgaaagtgacagctggaatctcctttgcaatcccatctgataagattaaaaagttcctcacggagtcccatgaccgacaggccaaaggaaaagccatcaccaagaagaagtatattggtatccgaatgatgtcactcacgtccagcaaagccaaagagctgaaggaccggcaccgggacttcccagacgtgatctcaggagcgtatataattgaagtaattcctgataccccagcagaagctggtggtctcaaggaaaacgacgtcataatcagcatcaatggacagtccgtggtctccgccaatgatgtcagcgacgtcattaaaagggaaagcaccctgaacatggtggtccgcagggntaatgaagatatcatgatcacagtgattcccgaagaaattgacccataggcagaggcatgagctggacttcatgtttccctcaaagactctcccgtggatgacggatgaggactctgggctgctggaataggacactcaagacttttgactgccattttgtttgttcagtggagactccctggccaacagaatccttcttgatagtttgcaggcaaaacaaatgtaatgttgcagatccgcaggcagaagctctgcccttctgtatcctatgtatgcagtgtgctttttcttgccagcttgggccattcttgcttagacagtcagcatttgtctcctcctttaactgagtcatcatcttagtccaactaatgcagtcgatacaatgcgtagatagaagaagccccacgggagccaggatgggactggtcgtgtttgtgcttttctccaagtcagcacccaaaggtcaatgcacagagaccccgggtgggtgagcgctggcttctcaaacggccgaagttgcctcttttaggaatctctttggaattgggagcacgatgactctgagtttgagctattaaagtacttcttacacattgaaaaaaaaaaaaaaaaaactcgggggggggcccggtacccaattngccctttaag

SEQ ID NO: 136 - DNA, 1977 bp, Homo sapiens
  misc_feature (768)..(768): n equals a,t,g, or c
  misc_feature (1253)..(1253): n equals a,t,g, or c
  misc_feature (1275)..(1275): n equals a,t,g, or c
  misc_feature (1288)..(1288): n equals a,t,g, or c
ggcgtcccggaacagtctgcgccagacgggcggcggcgtgagggctccgggtcgctggcggcgtggacacctgagtcccggggtaggggtctcccgcgaggagtgagctgttgccgcagaatgggctgctggctcctgccctgcttcctgtgatcgagccggccctgaggactctgtggagatgcctgtaacccaccggaaatcagacgcatctgacatgaactcagacacgtcccccagctgcaggctccgagccttcagcagaggcggcagcctggagagtcgaagcagcagctctcgctccagaagcttcactttggatgatgagagcctgaagtacctcacccatgaggaaaaggatgtgctcctgttttttgaagagacgattgactccctagacgaggactttgaggagccagtgctgtgcgatggaggagtgtgctgcctctgctccccgtctctggaggagagcacctccagtccctccgagcctgaagatgtcatcgacttagtgcagccagcacctggcgccggggaagccgagggccttccagaggggacccaggcagcagggcctgcacctgctgggaaggagcacaggaaacaagatgctgagactcctccacctccagaccccccggctcccgagacccttcttgcgccaccacccctgcctagcacccccgatccccccaggagggagctgcgcgccccctccccgccggtggagcaccccagactcctgcgctctgttcccacgcccctcgntatggcgcagaagatttccgagaggatggcggggaacgaagccctctcgcccacctccccgttcagggagggccggcccggggagtggaggacacctgccgcccgggggccccgcagtggakayytggcccggggcccagccacccggcgcagcccaaggcaccccgcttccccagcaacatcatcgtcaccaacggcgcggcccgggagccccgcaggaccctgtccagggcggccgtcagcgtgcaggagcgcagggcgcaggtgttggccaccatccacggacacgccggcgccttccccgccgmgggggacgccggcgagggggccccagggggcggctcctccccggagcgggtggcgcgtggccggggcctgccgggccccgctgagagtctccgggcagggggtcaggctccgcggggcccggcgctggccaacggcttccaagtgcgcacgaggccctgaagagcgcacccagytcnttcgcgcccgctgggaagtccntctgcttccgccntggcccggccctgcccagcackcgggcccgtcagagcttccccgggccccggcagcccaacggcgcccaggactggcgccgcgcagactccctgccccggccccagggcatcaccgtgcagttcgcgggccgcggctcctcggaggaggcgcgcagggaggcctgcggaagctggggctgctcagggagagttcgtgagggccgcgcgggctccagtccaccctgtttctccccaccctgaagagagggtgaaagagtcgctgcacccaggagctgtttggtctaaaatggaagtgacagcgggagcccctgccctctgtggcacatcggagtctagaggtgcctggctggggcctcctggctgagcacgcaccgcaagctccagccaccggcacagagaactcttccctaaaggaatctggccgagggcttgtctcccttttcccaagaactgagagagagagaataacctgttagacccataggtttccgtgatgtgtaaatgccatcttttgggggttgggaggagtaggactggtctgattatcattcttgagtctcatctaccctcttctcgaagtacatgacatgaaagttcagatcccttccactcaggattctcgccgccttttctaagaaaataataaaaaaaaatgcttgtttcaaaaaaaaaaaaaaaaaaactcgag

SEQ ID NO: 137 - DNA, 1268 bp, Homo sapiens
  misc_feature (1260)..(1261): n equals a,t,g, or c
cacatttcattgtgaaaaccttctaattcataccttcaattatttaaaagcctttaaaagacctatgtaacaaacctgtatgttctgcacatgtatcccagaacttaaagtaaaatttaagaaattaaaattaaattttaaaaaacacttcaaggttaaaaaatatatatgagctcctgttactgttaatgtatattgggtttaatattcttttatacagaattatgatgctttctgttttgcgtaacaccaaaacaccagtgaaattctggttgctaaaaaattatctctcaccgacatttaaagaagtaattcctcacatggctaaagagtatggattccgatatgaactagttcaatataggtggccccgttggcttcgtcaacagactgaaagacagaggattatttggggttacaaaattcttttccttgatgttcttttcccactagcagtggacaaaatcatttttgttgatgctgaccagattgtgagacatgatctaaaagaacttcgagatttcgatctggatggagctccttatgggtatactccattttgtgatagccgcagggaaatggatggatatcgtttctggaaaacaggatactgggcatcacatcttttaagacggaaataccatatcagtgctttatatgtagtggatctcaagaagttcaggagaattggagcaggtgacaggctcaggagccagtatcaagctctcagtcaagatccaaacagtctttcaaacctagatcaggatctccccaataatatgatttaccaagtcgccattaagtctcttcctcaagactggctgtggtgtgaaacctggtgtgatgatgaatccaaacaaagagccaaaacaattgatctgtgcaataatcccaaaacaaaagaatccaaactaaaagctgctgccagaattgtcccagaatgggtggagtatgatgctgagataagacaactattagatcatcttgaaaacaagaagcaagatacaattttgacacatgatgaactctagcactggtgtatatgagaaggaaggcgaaagcatgacaggaaacctgccgcctgctggggaagtctggagcccctgctgagacgatttggaagtctcgttaagatcagtgacatattctttaattttaaaaaattgtaattatttaaaacagttatttaatgtattgaatgagtttaagttatataataaatgaccattgagtatttaaaaaaaaaaaaaaaaaaaaatnnctcggtc

SEQ ID NO: 138 - DNA, 2054 bp, Homo sapiens
gggtgaggggaaaggtatgtgtttgcatcttctgttagcgatttctgggattctgaatcttcactgtcacttagttctgtgcagttgtgggagatatacccagaagacacaggcaaatacaacctgggtaactagctaggggtttgttcccaagtccctatcttatatgtcctggcgagctgccctaaactacgtgtgaggaataaagactgtgttctttcagctcagacctgtgattcttgagtgttttaagagtcttttaaaatctatgaaccctctttccagcaagtcgtaaatgtacagaatagttttgtgtaggttttcagggaattcatgaataccactaaagctgttccagtagactgtattgggagtcttataggataattactggcaggcttgggcaacctcttggccccattcccttagctgtgtgtcttgatkytagccctgtgaaagagtccttcactcttaagatttagagcccagatgacctttgccagccgtttaccttttttcctggggtgtcttgttgatcctgctgggtttctatgggtacaagaccctcttaaacatgaagcagctctatatttgtcgttttaaaatttattttattatttttaacaaattggccagagaccgcctttttaaaaattttctttcctttccttttcttcctttcccttctgtttccttcccttccccttttctttttcttcctttttttccttttctttcctttttcctttccttccttcctttcttgcctttcttcctttattgctttcctttcttttctttctttcacccaggctggagtgcagcmcactgtaacctcaagttcctgggcttccaagwagtgggactataggccacaccaccatggccccataatcttttttctttttttacttttttttttttttagagacgggggtctcattatgttgcccaaggatgatctcagactcctgggctcaagcagtcttcccaccttgatctcccaaagtgctgggattatagatgtgagccaccatgcccaatctttgtttttttaattggcaagtaaaaattgtgaagacttatggtgtacaacatgctgtgttgataatgtgtatacattttgtaatggttaaatcaagctctttaacatgtgtatcacctcacatacttatttttttgtggtgagaacacttgaaatctactctcagcaattttaaagtatataatatgttgttactaactgtagtcacatcactatgatgtgcaatcgatctcttgaacttactcctatctacctgacattttgcatgctttacatctccccagtctcccaacccccagcttctgagaaccaccattctacttyckgcttcwatgagtccaattttgtttgctttagaggtggtacctcactctgtcacccaggctagagtgcagtggcacaatcatggctccctgcaatctctaactcctgggctmaagtgatcctcccgcctcagtctcccaagtagctgagaccataggcgtcsgcmaccacgcccccagctaagktttaaattttttgtagagataaggtcttaycakgtgcccaggctggcctcaacctccaaagtgctgggawtgcagttgtgagccactgcactaagcctgagtcgacttttttggattccacacttaagtgagatcatgcagtatttgtctttgtatgcctggcttatttcatttaagataatattttccaggtttatctgtgttgtcttaaatgacaagatttattttgttgttgttaaggctgaatagattctgttgtatatatatgctacattatctttatctcctcatctgttgatggatacttaggttgattccctatcttggctattgtgaatagtcttgcaataatcatgagagttcagatatctcttcaacatattgacttcattttttggggatatatacctagtagttggttttatatccatctcattaataactacatgaaagacaaaaagagaaaagaagaataatccagctatctaaagtcacgaaaa

SEQ ID NO: 139 - DNA, 882 bp, Homo sapiens
  misc_feature (864)..(864): n equals a,t,g, or c
  misc_feature (874)..(874): n equals a,t,g, or c
ggtgctacccaccacccccagtcaccacctcctgtcccagccccccatgtcccaggcccgggaggctgtcatcgcagctgcatttgccaagctggaccgcagtggggacggcgtcgtgacggtggacgacctccgcggggtgtacagtggccgtgcccaccccaaggtgcgcagtggggartggaccgaggacgaggtgctgcgccgcttcctggacaacttcgactcctctgagaaggacgggcaggtcacactggcggaattccaggactactacagcggcgtgagtgcctccatgaacacggatgaggagttcgtggccatgatgaccagtgcctggcagctgtgagcagctccggctcagccctgctgccctggcctgtcactccccacccctgccggagacctcccttccctgggccccttctctcctgggcagccacaccacagagcggggaggggcaggtgggggaatggaggctgcaggactggctagaccaggtccctgccggtccaccaggcggaggtgggacaaaggtcctaacaggagtcactggctcaggaccccagggagaaacgctctccccacccacgccatgctgaccagaggtcttgcagcccctgtggatgcccccgccgaggtcccccgatccccgcacccggactgctgctccctgcccctcccttgcgggtcccccaggaagccaggtgaccccaggtgggaggctgtgtgtggaggccatcctggaaggaagtttagacctgcccaggtgtggagcgaggggcacaggggcatcctaacctcagaaactgaaataaagcctttgaaaaaaaaaaaaaaaaaaaaataaaaaaaaaawaaantaaacaaaangaaagcaa

SEQ ID NO: 140 - DNA, 2323 bp, Homo sapiens
  misc_feature (206)..(206): n equals a,t,g, or c
  misc_feature (2318)..(2318): n equals a,t,g, or c
aagtacgcctggcaggtaccggtccggaattcccgggtcgacccacgcgtccggaatcactattgggggtcatcgcagtgatgtgcggactttgtcattcagctcagacaatattgctgttctttcagctgcagctgattccattaaaatatggaacaggtctacactgcagtgtattcgcacaatgacctgtgaatatgcacttngctcattctttgtacctggtgatagacaggtagtcataggaacaaagacagggaagctgcagctttatgacttggcttcagggaatctgctggagacaatagatgcacatgatggagctttgtggtccatgtccctctctccasatcagcgtggctttgtgacaggtggtgcasataaatctgtcaaattctgggattttgagttagtgaaagatgaaaatagtacccaaaagagactttctgtgaagcaaacccgaactttgcaactagatgaagatgttctgtgtgtcagttactctcccaatcaaaagctattggctgtgtctttgctggactgtactgtgaaaattttctacgttgatactttaaagttttttctgtcactgtatggacacaaactgcctgttatatgcatggacatctctcatgatggagcactcatagcaactggctccgctgataggaatgtgaaaatctggggtttggactttggggactgccacaagtctctctttgcacatgatgacagtgtgatgtacctacagtttgtacccaagtctcacctcttcttcactgccggaaaagatcataagattaaacagtgggatgcagacaaatttgaacacatacagactctggagggtcatcaccaggaaatatggtgtttggctgtaagccccagtggagactatgttgtatcatcgtcccatgacaaatctctgagactttgggagagaacaagggagcctcttattcttgaggaagaaagggagatggaaagagaagcagaatatgaggagagtgtggccaaagaagaccaaccagcagttycaggagagactcaaggtgacagttactttactggaaagaaaactattgaaacagtgaaagcagctgaraggattatggaggctattgagttgtaccgagaagaaactgcaaaaatgaaggaacmcaaagccatttgtaaagctgcagggaaagaggttccacttcccagcaaccccatcctaatggcttatggcagtatctcaccttcagcttatgtattagagatttttaaagggatcaagtcgagtgagctggaagaatctctacttgtgctgcctttctcttatgtcccagacattcttaaactctttaacgaattcattcagctgggctctgatgttgaacttatatgccggtgcctcttcttcctccttaggattcactttggacagatcactagcaatcaaatgcttgtgccagtgatagaaaaattaagggaaacaactatttcaaaagtcagccaagtccgggatgttatcggcttcaatatggctggtcttgattatctcaagagggaatgcgaggcaaaaagtgaagttatgttttttgctgatgctactagccacttggaagagaagaagaggaagaggaaaaagagggagaagttgattctaacgttgacttagaactgaaatgtggtatctttttttttttcaactttttcctttaaaggactcctaaactaagcacagaagagttggcgtcatcttaaaaataccaaataacagaagatcgcattgcagatgatatcaggatgtggtttccagctttgcctgagggaattccaacatgagattatgggctggctccatttcttggacttaaaatgcattattagtttaaaaatctttctgtgctctcaaagcttgagccttgcagctcaagcttgttgttccctttatattctagcagggaataaataattgttttaattaggtatttgtttcattggagttgaaattaacatttcaaaagtttttcgtatttttttatggcagatgatttgtcatttatttatattaggttttactgcctattgagacaaccaggtgcataattgattgccctttggccataaaaatgcagtgtcatggatcttagagctaaaaaggactgtaaaaattacccagaacagcgtcctcagacttaaccttctgcaagttatgtctgtatataagaagattctaattgctaactgtttatacttttctgaataaaatagttgtttctaattaaaaaaaaaaaaaaaaaaaaaaaaaaaaaaaaaaaaaaaaaaaaaanggggg

SEQ ID NO: 141 - DNA, 716 bp, Homo sapiens
  misc_feature (708)..(708): n equals a,t,g, or c
  misc_feature (710)..(710): n equals a,t,g, or c
agcgcagcccaggactcccggctcccacctccggctgtagtccarggccaaggcttgtgttcaatcgtgtgaatggccggcgggccccctccacgtccccatccttcgaggggacccaggagacctacacagtggcccacgaggagaatgtccgctttgtgtccgaagcctggcagcaggtgcaacagcagctggatggtggcccagccggtgagggcgggccaaggcctgtgcagtacgtggagaggacccccaatccccggctgcagaactttgtgcccattgacctagacgagtggtgggcgcaagttcctggcgagaatcaccagctgttcctagtggctgctgggagggggcgctgctacacggccgacctgtcgccaggagagaagcatggcgccctgcccacccactgcgcctggctgggtgccggccacacctgaagtgccagcatttggacttttgcacctttttttcccttggcccggctgtcccaaccaagctgccatggccaagggccgaacccgtctgacctcagccctgctcactgtgcccagggaccagcgaccagcccctggggctggcagggaggagctccaggctaataaagtggagaaactgtcaaaaaaaaaaaaaaaaaaaaaaaaaaaaaaaaaaaaaaaaaaamaaaaaaaaaaaaaaaaaaaaaaaaaaaaaaaaaaaaaaaantngggggg

SEQ ID NO: 142 - DNA, 1696 bp, Homo sapiens
  misc_feature (1679)..(1679): n equals a,t,g, or c
  misc_feature (1687)..(1687): n equals a,t,g, or c
  misc_feature (1692)..(1693): n equals a,t,g, or c
gatccggggtcaccagttattagaggaagtaacacaaggggatatgagtgcagcagacacatttctgtccgatctgccaagggatgatatctatgtgtcagatgttgaggacgacggtgatgacacatctctggatagtgacctggatccagaggagctggcaggagtcaggggacatcagggtctaagggaccaaaagcgtatgcgacttactgaagtgcaagatgataaagaggaggaggaggaggagaatccactgctggtaccactggaggaaaaggcagtactgcaggaagaacaagccaacctgtggttctcaaagggcagctttgctgggatcgaggacgatgccgatgaggccctggagatcagtcaggcccagctgttatttgagaaccggcggaagggacggcagcagcagcagaagcagcagctgccacagacacccccttcctgtttgaagactgagataatgtctcccctgtaccaagatgaagcccctaagggaacagaggcttcttcggggacagaagctgccactggccttgaaggggaagaaaaggatggcatctcagacagtgatagcagtactagcagtgaggaagaagagagctgggaacccctccgtggtaagaagcgaagccgtgggcctaagtcagatgatgacgggtttgagatagtgcctattgaggacccagcgaaacatcggatactggaccccgaaggccttgctctaggtgctgttattgcctcttccaaaaaggccaagagagacctcatagataactccttcaaccggtacacatttaatgaggatgagggggagcttccggagtggtttgtgcaagaggaaaagcagcaccggatacgacagttgcctgttggtaagaaggaggtggagcattaccggaaacgctggcgggaaatcaatgcacgtcccatcaagaaggtggctgaggctaaggctagaaagaaaaggaggatgctgaagaggctggagcagaccaggaagaaggcagaagccgtggtgaacacagtggacatctcagaacgagagaaagtggcacagctgcgaagtctctacaagaaggctgggcttggcaaggagaaacgccatgtcacctacgttgtagccaaaaaaggtgtgggccgcaaagtgcgccggccagctggagtcagaggtcatttcaaggtggtggactcaaggatgaagaaggaccaaagagcacagcaacgtaaggaacaaaagaaaaaacacaaacggaagtaagcagagctgccaggctcccaggagagcatggggactaggaggaagggtgtggcatggctcagtctggcccccttgattaccggcctagcccctgctcacatcacagctgtctgaagaacagtgaggtggagtgcctagaactcccgtggtggtcctgagcagagaggaggatgtcctcctgcctgcctgaaggtctcccatgaaaacactgctgaactgtgttgacactcatgaccctttttttaaaccgttaaagggaagttcggtgttggagcgatactcaatgtagtcagtctacacctggacgtgtgggccacttaagccctccccacccccatcctattcctaaataaaaccaggataatggaaaaaaaaaaaaaaaaaaaaaaaaaaaaaaagggggggcccntaaagggncccannttt

SEQ ID NO: 143 - DNA, 2021 bp, Homo sapiens
ggcagagctcaacctctcctacaaccccatcagcaccattgagggctccatgttgcatgagctgctccggctgcaggagatccagctggtgggcgggcagctggccgtggtggagccctatgccttccgcggcctcaactacctgcgcgtgctcaatgtctctggcaaccagctgaccacactggaggaatcagtcttccactcggtgggcaacctggagacactcatcctggactccaacccgctggcctgcgactgtcggctcctgtgggtgttccggcgccgctggcggctcaacttcaaccggcagcagcccacgtgcgccacgcccgagtttgtccagggcaaggagttcaaggacttccctgatgtgctactgcccaactacttcacctgccgccgcgcccgcatccgggaccgcaaggcccagcaggtgtttgtggacgagggccacacggtgcagtttgtgtgccgggccgatggcgacccgccgcccgccatcctctggctctcaccccgaaagcacctggtctcagccaagagcaatgggcggctcacagtcttccctgatggcacgctggaggtgcgctacgcccaggtacaggacaacggcacgtacctgtgcatcgcggccaacgcgggcggcaacgactccatgcccgcccacctgcatgtgcgcagctactcgcccgactggccccatcagcccaacaagaccttcgctttcatctccaaccagccgggcgagggagaggccaacagcacccgcgccactgtgcctttccccttcgacatcaagaccctcatcatcgccaccaccatgggcttcatctctttcctgggcgtcgtcctcttctgcctggtgctgctgtttctctggagccggggcaagggcaacacaaagcacaacatcgagatcgagtatgtgccccgaaagtcggacgcaggcatcagctccgccgacgcgccccgcaagttcaacatgaagatgatatgaggccggggcggggggcagggacccccgggcggccgggcaggggaaggggcctggccgccacctgctcactctccagtccttcccacctcctccctacccttctacacacgttctctttctccctcccgcctccgtcccctgctgccccccgccagccctcaccacctgccctccttctaccrggacctcagaagcccagacctggggaccccacctacacaggggcattgacagactggagttgaaagccgacgaaccgacacgcggcagagtcaataattcaataaaaaagttacgaactttctctgtaacttgggtttcaataattatggatttttatgaaaacttgaaataataaaaagagaaaaaaactatttcctatagctagtcggaatgcaaacttttgacgtcctgattgctccagggccctcttccaactcagtttcttgtttttctcttcctcctcctcctcttcttcctcctttctcttctcttccccagtggggagggatcactcaggaaaacaggaaaggaggttccagccccacccacctgcccaccccgccccaggcaccatcaggagcaggctagggggcaggcctgggcccagctccgggctggctttttgcagggcgcaggtggaggggacaggtctgccgatgggggtgggagcctgtctgctgggctgccaggcggcaccactgcaaggggtgggagcctggctygggtgtggctgagactctggacagaggctggggtcctcctgggggacagcacagtcagtggagagagccaggggctggaggtggggcccaccccagcctctggtcccagctctgctgctcacttgctgtgtggcctcaagcaggtcactggcctctctgggcctcagtytccacatytgtacaaatgggaacattaccccctgccctgcctacctcacagggctgttgtgaggaattgatgagatgatgtatgtgaaacactttgtaacctgtaaarmgctgtgcaaaaaaaaaaaaaa

SEQ ID NO: 144 - DNA, 1580 bp, Homo sapiens
  misc_feature (265)..(265): n equals a,t,g, or c
  misc_feature (348)..(348): n equals a,t,g, or c
cttgctgactgcgcggccgggaggagccgagccgggcggcggcggcgggaggctacagcgcgcgggggtctcccgcgtcccctccgcctcgccgggagctcgcgccctcgcccagccgagctcccacccccgcttttttccgaaggcgctgggcggcgccaccctccggccggagcccggcactgcacaaccccctccgactttcaatgttccacactccccggccagagcctcctcggcttctttttttccctccccccccttnccccccccacagctgcctccatttccttaaggaagggtttttttctctctccctcccccacaccgtagcggcgcgcgagcggnccgggcgggcggccgagttttccaagagataacttcaccaagatgtccagtgataggcaaaggtccgatgatgagagccccagcaccagcagtggcagttcagatgcggaccagcgagacccagccgctccagagcctgaagaacaagaggaaagaaaaccttctgccacccagcagaagaaaaacaccaaactctctagcaaaaccactgctaagttatccactagtgctaaaagaattcagaaggagctagctgaaataacccttgatcctcctcctaattgcagtgctgggcctaaaggagataacatttatgaatggagatcaactatacttggtccaccgggttctgtatatgaaggtggtgtgttttttctggatatcacattttcatcagattatccatttaagccaccaaaggttactttccgcaccagaatctatcactgcaacatcaacagtcagggagtcatctgtctggacatccttaaagacaactggagtcccgctttgactatttcaaaggttttgctgtctatttgttcccttttgacagactgcaaccctgcggatcctctggttggaagcatagccactcagtatttgaccaacagagcagaacacgacaggatagccagacagtggaccaagagatacgcaacataattcacataatttgtatgcagtgtgaaggagcagaaggcatcttctcactgtgctgcaaatctttatagcctttacaatacggacttctgtgtatatgttatactgattctactctgcttttatcctttggagcctgggagactccccaaaaaggtaaatgctatcaagagtagaactttgtagctgtagattagttatgtttaaaacgcctacttgcaagtcttgcttctttgggatatcaaaatgtattttgtgatgtactaaggatactggtcctgaagtctaccaaatattatagtgcattttagcctaattcattatctgtatgaagttataaaagtagctgtagatggctaggaattatgtcatttgtattaaacccagatctatttctgagtatgtggttcatgctgttgtgaaaaatgttttaccttttacctttgtcagtttgtaatgagaggatttccttttaccctttgtagctcagagagcacctgatgtatcatctcaaacacaataaacatgctcctgaaggcaaaaaaaaaaaaaaaaaaaaaaaaaaaaaa

SEQ ID NO: 145 - DNA, 3951 bp, Homo sapiens
gggcagtcattccatatgctaatcatgaactgaaagaagagaaccggatagactctgtggtggaaaaaactgttgcctgaactttgtcagagaataaaatgtggtggagagaagtatcaactctacctgtcatcattaaaagaaacattgtcaattgttgctgtggaactagaactgaaggatttcatgaatgttctcccagaagatggtactgcaacatttttcttgccatatcttctctattgcagtcgaaagaaaccattgacttaaaggtatcatttgaaaaataccataatggcatttgagactgaatttctaaaaattgaatgccaaagtacaagtagaggagttttttattttatatatcacacacacacacacacacacacacacacacacacacatatatgatacaaatgctttcaggctgcttaccttaccgtgtagtggtaactattcacttcttaatttatgacctcaatcaatttaattgtctagaatgtaaaaagtctttaagacataagaattcctcaaagaagccatacattttttaaggtggggattgacttttattccaaggaacaacatcagttcactgttgttggagacatgacaatcattttcatcccaagaacactttaaggaaacattttacaagtatgcttgaaagaatgtcactaactggtccagaattttatcttcttgatttttccagatttctctatgtttttgagaaagatgttaatgttttgccatggtaaaagatttcaaacctcattttttttgttccttttcttgttacttttaagaaaactcatgctctgtttctctgaatcaaatgaagtagaagtttacaaagctaactttcttcttgtctagctattaacatgatttgtcaaatgcatgtttttttcagccaaagccttgtttccatttttgttgatgtgtactcttgctcttttagctagagtgtatgtgaaaataaagaaatacatcattgtattcacaaccatgtgtcttcatttataactttttgtttaaaaaatttttagttcaagtttagttcattgatattatcctctgaatgcagttaaggctgggcagaaattctactcatgtgacatctgccacaggtctattttgaagcttttcttctaatggcaatgtttgtccttaccaggatttaatctatagaattgtctctcaactctgcttttctccagttccagataacgtccttaagaccatctgttcaggggttcacaaaactcaaatttgtgtcattctattttatttattttattttttatttccttccctcataccttgcccattccctctgaatattaggtgtgatgtcaacagcatgttagaaggatcaatgggaaggcaatgattgaaaacatttcaatgaaccttaatagtgttcctttgaggagcacccaggagaatatctggtcatagatctttttttaaatgcagttttataaaaccctaacagcggtgatatcattagactgtatgaatcagttttattacctagtgtacaagtgtcagtcatgtatcattatatagtctgttgatctttccatttgcaaaaaattaatagttttcccccacaaatgtacaaagttgtatgcttccagtcttcttttaatgtttatagtcattccaaagtaacattctattttacactttcacatacattgttatgaatcattggtttttctcttttttccacttatcaccaatttatttcattcagccagatttggtgtcttcattttgtagaacggtgtaagtggtttccattccagcatgaatgtggtcggtcacatggcagtggagtaaccaaattccaggtgttcttggaaacatttctagggtttggtatgttccagggaaaatgtcaaagacatcagaactataaactcccctgtgcttgtattggaagctatggccgtgaaaatgtacagtgtgtaagtctatttcattgcccattcccatcagataccagttgacttcatctcccacgtgcattgtgaggccttgtaggtttccaaacattcttccattaatagcatgcattttattgctttctatgaattcctcatcatctttgtttactttctcggggtgatcagagtatgttttgatgttgtcatctaagtaccaagattcattctcatcaaaaactagaaacagaagggcaaattccagtttccttctgggattgaatactttcaagtaaggtcttcgacaaacaatcagggggccaattaatccactgtagaggtccttaacttgatccacagttgaataataagcccatggaatacaagcagaatcctctgttccagctccagatctttctgggattttccatacgtaagtgagagtttcacctggtaatgttggagtaactgtagaactctctgtttgtaccccatgggcatgtattgagtagggccttgtggccatgtttttaaagataattttgactttgtctccaacatctgcatgaagttgtggacctagaattcccagatgttcttcttcagcttttctctccactggaacacggaatgtgctatcagtatactgccgatacacaactttcttgtactttgagcctatgtaaaactctcccttatctaaaaatgcatttgaaacattctgctcttgtaaatgatgcagctccttttcccactccctttgtggggaataatcccattccacctccactgctgcgatatagtatgtcctctctcccaggtagaaggtggaatcctcagactgccgcctgcattggttcacagtatatttttgcttcatgccgcctgtgtaatgatcagttgtaaggcattcaacattaaaagtcccctctgtgtcaggccacatgtggagcgtaagacttgtttgagggaagaggtttgctgtgtctctccgttctcctctccacagatatgtgtttcctgaaaagtatattccatgtacatcggcctcatttccggcgctgaataagtaccacacgaccgaatctcctttgcacatagtgagacccggctgattcccatacatgaatccattcatggagtgcattttattagattcctgaaagtcttcatcttccttatccacctgatcaggtgcagttgtaaacattctaatattatcttccaggagtaaactctcattctcatcaaatactgtaggaaacaaatagaattccttgtctacatctttctgtctcccatttgcatgtaaacttcctttcttgcatattttcattggcccaataagcccagtgaatatatctttagtgggatccacagcagaataatacatcttagctagacacacaggatctgcattagtgggtcctacttctttggggacagtccattcataggtgaatgtttctgtgggtgccacatgggaggctgaaggaggcacacttctgctctgggggttgtaatttggggaatagtatgtgccctcgttgttcttattgaatctcaccccaatcggctcaatactgaggggatatgctcctttgttatggaaggttactctgatggtgtctcccacctctgcccaaatgacaggacccaggatgccaagatgctcttcttcagggcctctctcctttcgatttgtgaaggaggcatctgtgtactcacgataaaccagctttttataagagcctccaattcttgtggtaccttgttcaaaaaacaccgctgagtcacttccaggtgctgttaagttttctttagtgaagatgtctataccagagggagcatagttccagatgatttcctcagcggcaatgtagtagtgtctaacatgcttcccacggatattatcctttgatgaagacttgttacactcctggacctggaaaaaggcttgcaaaccggctttcagatggtttagattctgacagct

SEQ ID NO: 146 - DNA, 918 bp, Homo sapiens
aagagattaaccttcgccgctattaagaactttttttttttttttttgggaagaaaaagaggtttaattggccttacagttccacatggctagggaggcctcagaatcatggtaggagaccaaaggcacttcttacatgctggtggcaagagaaaatgaagaaacaaaagtggaaacccctgataaacccatcagatctcgtgagacttcaccatcacgagaatagcacgggaaagaccagcccccatgattcagttacctccccctgggtccctcccacaacatgtgggaattctgggagatagatacagttcaagttgaaatgtgggtgggggcacagctaaaccatatcacacttttaatgtcactgtattcctggtgagacgtgacagtgttaatgaggaagacatcaaggcattggggctacagattgccagagtcccatgcaaatcatgagtcgctcggaccacccagcccgagttctgaaggagcccgtcctcctcagatgctagggacccacagagcattctctttgggacttccttagagaccggaggggtcgagcccctctgacactgaggggcagctgccccagtcagatccatttggtttcaggtctgtggcccctctcgcaccaaccccagcatgatgattgatgacctcctgactccatgctcaccaggggacccaggagccatggagatgacttggatggatgtccctggggacaaactcttagagcctgtggtttgcatggtaagtgacttgacaggggagggaagagggctgcacagagcccagaaaattgagggtttgggtccagaataaaaacggtcttctccaggccrggcatggtagctcacgcctgtaatcccagcactttgggaggccagggtgggcagatcacaaggttaggag

SEQ ID NO: 147 - DNA, 848 bp, Homo sapiens
  misc_feature (22)..(22): n equals a,t,g, or c
ggttagcggtggcaggggctgnctgagagcgtctgcttgataatggattctgaattaatgcatagtatagtaggaagctatcataaacctccagaaagagtatttgttccctcattcacccagaatgaaccatctcagaattgccatcctgcaaacttagaagttacctctcctaagatacttcatagcccaaatagccaagctcttattttagccttaaaaactcttcaggaaaaaattcatcgtttagagctggagagaacacaagctgaagataacctgaacattctttccagagaagcagcacagtataagaaggccttagagaatgaaacaaatgagagaaatctggcacaccaggagctgataaagcagaaaaaagatataagtatacagttaagctcagcccagtctcgttgtactcttctagagaagcaactagaatatacaaagagaatggttctcaacgtagagcgagaaaagaacatgatcctagaacaacaggcccagcttcagagggaaaaagaacaagatcagatgaagctgtatgcaaaacttgaaaagcttgatgtcttagaaaaagagtgtttcagacttacaacaactcagaaaactgctgaggacaagattaaacatttagaagaaaaacttaaggaagaagaacatcagcgtaagctatttcaagacmaagcttctgagcttcaaactggacttgaaatcagkaaaattataatggcttcagtttcaaatctaagcacttccaggraaagaagaaatcttcaagraaacytaatggkttagggaccaccccttggaaaattggtcaaggttggacctgcctttggggt

SEQ ID NO: 148 - DNA, 2901 bp, Homo sapiens
  misc_feature (1240)..(1240): n equals a,t,g, or c
  misc_feature (1306)..(1306): n equals a,t,g, or c
  misc_feature (2895)..(2895): n equals a,t,g, or c
  misc_feature (2899)..(2899): n equals a,t,g, or c
acctggacgggttcgtcccgggctgtttcgcgtccggcctgaggcggctggggccgcgcaggtagtgtccctgcacttcttgcccgggcgcgtgaggccagctccgctgcgcttgtytccagcttccagccctcctcccctaagccgccgccatcatgctgctgcctgtgttcaccctgaaactgcgccacaaaatcagcccccgaatggtggccatagggcgctacgacgggactcacccgtgcctggcggccgcacccaaacgggcaaggkttttattcataatcctcatacacggaaccagcatgtcagtgcatccagggtcttccagagccccctggaatctgatgtttctcttctcaacattaaccaggcagtcagctgtctgactgcaggcgtattgaaccctgagcttggctatgatgcccttttagtggggacacagactaatcttttggcttatgatgtctacaataattcggatttgttctacagagaggtagcagatggggcaaatgcaattgtgctggggacattgggagacatttcttcccctcttgcgattattggtggcaattgtgctctgcaaggtttcaatcatgaaggaagtgatctcttttggacggttactggagacaatgttaattccttggccttgtgtgactttgatggtgatggaaagaaagagcttcttgttggatctgaggattttgatatccgagtttttaaggaagatgagattgtggcagaaatgacagaaacagagatagtcacctctctttgtcccatgtatggcagtcgatttggttatgccctttccaatggcacagttggagtttatgacaaaacatcccgatactggagaattaaatcgaaaaatcatgccatgagcattcatgtttttgaccttaattctgatggagtgaatgaactgataactggttggtccaatgggaaggttgatgctcgaagtgaccgaactggggaggtcatctttaaggacaatttttcttctgcaattgccggtgtggtagagggagattaccggatggatggccacatacagttaatctgctgctcagtggatggggaaagtaaattgggatgagaaaaatccttaaaaagtcacgttttccatttgattgggtcaaaatatcaggaaatttcacctgaagtatttgtaccgagatcctgtagttctaataaattcaccaaagttggggagaacttaggtttttgnttttaagagcaggtaattgatgacctaaaagtatacctggttatacttgcgggtttttccttctgntcagtccggggctacctgcctggcacggctgagatgaggggcaacctcatggacaccagtgcagagcaggacctgatccgagagctgagtcagaagaagcagaatctgttgctggaactccgtaactatgaggaaaatgccaaggctgaattggccagtccactgaacgaggctgatgggcatcggggcataatcccagccaataccaggctccacaccacgctctcagtcagcctggggaatgagacccaaactgctcatacagaattacgcatttccacttctaatgacaccatcatccgagcagtattgatttttgcagaaggaatttttacaggtgaaagccacgtggtacatcccagcattcacaacctctccagttccatctgcatccctattgtgcctcccaaagatgtccctgtggatctgcacttgaaggcattcgtgggttacagaagcagcacccagtttcatgtatttgaatcgacaagacagctccctcgattctccatgtatgcgctgaccagcctggaccctgccagtgagccaatcagttatgttaactttaccattgcagaacgggcacagagcgtaaaactagaaagaaggagaactcttccctcaagaatggctgtaccttcatatctagaggcacattaaaaaaaagaacgtctgtaccttaaaaatggaggtcatttcattgtgttcattttcaaggttgttgtatggctcggtcagaactttctgttaccagaagacactcacattcagaatgctccatttcaagtgtgtttcacatctttacggaatggcggccacctgcatataaaaataaaacttagtggagagatcactataaatactgatgatattgatttggctggtgatatcatccagtcaatggcatcattttttgctattgaagaccttcaagtagaagcggattttcctgtctattttgaggaattacgaaaggtgctagttaaggtggatgaatatcattcagtgcatcagaagctcagtgctgatatggctgatcattctaatttgatccgaagtttgctggtcggagctgaggatgctcgtctgatgagggacatgaaaacaatgaagagtcgttatatggaactctatgaccttaatagagacttgctaaatggatataaaattcgctgtaacaatcacacagagctgttgggaaacctcaaagcagtaaatcaagcaattcaaagagcaggtcgtctgcgggttggaaaaccaaagaaccaggtgatcactgcttgtcgggatgcaattcgaagcaataacatcaacacactgttcaaaatcatgcgagtggggacagcttcttcctaggggccaagaaatgaagcttcaggcctgtgaagttggagagcagcaagaatagtgcctcagagcgaaataacttcatgcactccttcaatatctcaggaagcttactctcctcagctttctcataaaacctgaaaaacagcaatgtcaagttgttcatcaaagccacagatgtaaaatgactcacagaataaaagctgatcgttaaaaaaaaaaaaaaaaaaaaaaaaaaaaanattnct

SEQ ID NO: 149 - DNA, 1020 bp, Homo sapiens
  misc_feature (814)..(814): n equals a,t,g, or c
  misc_feature (845)..(845): n equals a,t,g, or c
  misc_feature (850)..(850): n equals a,t,g, or c
  misc_feature (995)..(995): n equals a,t,g, or c
  misc_feature (1006)..(1006): n equals a,t,g, or c
tcgacccacgcgtccggccggactaaccagctcctccaggcgctgggggcgggtgtggcaggaggaagcccgatcagccccaggctgtggatgtgggagaagggcgagctcagggggccatcatggggttcccccagaggcaacctggcctatcagggctgctcctcctcgtgtgggcactggcctggcccctgccttgtatgagcttggagctgatcccctacacaccacagataacagcttgggacctagaagggaaggtcacagccaccacgttctccctggagcagcctcgctgtgtcctggacgggcttgccggcgttgccagcaccatctggctggtggtggccttyagcaacgcctccagagacttccagaacccacagacgcgagctgagatcccagccttcccacggctgctgacggaggggcactatatgacactgcccctgtccctggaccagctgccctgtcaggaccccgcaggcggcggcagggacgtccccttgctgcgggtgggcaatgaccccggctgccttgctgacctcctccagccgccctactgcaacagccccctccccagccccggaccttacagggtgaagttcctcctgatggacgccaggggctcaccccaggccgagaccaggtggtccgaccccatcgctcttcaccaagggaagtcgccagcctccatcgacacgtggccagggcgamgcagtggtggtatgatcgtcatcacctctatcctctcctccctggccagcctcctgctcctggccttcctggcagcgtccaccgcacgcttctccancctgtggtggccggaggaagccccggagcanctganaattggctccttcatggggaagcgctacatgacccaccacatcccacccagcgaagccgccaccctgcccgtgggctgtgaacctggcctggacccctccccaacctcagcccctaacctggcccttgtggctggggcgtgtgtngctgtggccantgtgggggcaagga

SEQ ID NO: 150 - DNA, 795 bp, Homo sapiens
  misc_feature (409)..(409): n equals a,t,g, or c
  misc_feature (761)..(761): n equals a,t,g, or c
  misc_feature (768)..(768): n equals a,t,g, or c
  misc_feature (776)..(776): n equals a,t,g, or c
  misc_feature (793)..(793): n equals a,t,g, or c
tcgacccacgcgtccggatggcggctgggtcggttgggtcgctccggccggcgtttgcgctgcggttgctcttggctgctgtgcttcaagcggtgtctgcgtttggggcagagttttcatcagaggcttgcagagagttgggcttctccagcaacttgctctgcagctcttgtgatcttcttggacagtttaacctgcttcagttggatcctgactgtagaggatgctgtcaggaagaagcacaatttgaaactaaaaagctttatgcaggagctattcttgaagtctgtggatgaaaattggggaggttccctcaagtccaagcttttgtcaggagtgataaacccaaactattcagaggactacaaatcaagtatgttcgtggttccgatcctgtattaaagctttnggatgacaacgggaacattgctgaagaattaagcatcctcaaatggaacacagacagtgtagaagaattcctgagtgaaaagttggaacgcatataaatcttgcttcaattttgtcctatccttttgttactttatcagatgaaatattacagtacctagagaatattttagttttgcttccttcctttgatcactttctgtgaggcattaaacatctcattaacagtggaagtggtagcgtagcccgcggtatctgaggagtcggcaaacttaacaaaamccarattctcatacattgccttccttccacatttgttggtaccggctgagaaatttaaccagttaacaaangataacncccccctngtccccccgtgtaaganaa

SEQ ID NO: 151 - DNA, 2002 bp, Homo sapiens
  misc_feature (75)..(75): n equals a,t,g, or c
  misc_feature (1765)..(1765): n equals a,t,g, or c
  misc_feature (1854)..(1854): n equals a,t,g, or c
  misc_feature (1927)..(1927): n equals a,t,g, or c
  misc_feature (1966)..(1966): n equals a,t,g, or c
  misc_feature (1977)..(1977): n equals a,t,g, or c
gcagccgaacgaccgagcgcagcgagtcagtgagcgaggaagcggaagagcgcccaatacgcaaaccgcctctcnccgcgcgttggccgattcattaatgcagctggcacgacaggtttcccgactggaaagcgggcagtgagcgcaacgcaattaatgtgagttagctcactcattaggcaccccaggctttacactttatgcttccggctcgtatgttgtgtggaattgtgagcggataacaatttcacacaggaaacagctatgaccatgattacgccaagctcgaaattaaccctcactaaagggaacaaaagctggagctccaccgcggtggcggccgctctagaactagtggatcccccgggctgcaggaattcggcrcgagggctccggggccctcctgcttatcctgcacccacagtgattgctgtgtgtgttttcttcaggagaatcccttcaaagaaaggatcgtggcggcgttttccgaggatggtgaggggaacctcactttcaacgactttgtggacatgttttccgtgctctgcgagtcggctccccgagagctcaaggcaaactatgccttcaagatctatgacttcaacactgacaacttcatctgcaaggaggacctggagctgacgctggcccggctcactaagtcagagctggatgaggaggaggtggtgcttgtgtgcgacaaggtcattgaggaggctgacttggacggtgacggcaagctgggctttgctgacttcgaggacatgattgccaaggcccctgacttcctcagcactttccacatccggatctgaggacactgccgaggctgtaggggcctagaagtccaccatcctgccctgcagtcacatgggtgtggcctccaagctccccaggaaagcagtggcagcctctggggtttacaccacaaatatatcctgtggccctttcagcaaaaaaaaaaccttaaccaggaagggggcctgtgaaggttaggacccttcccacagccccgctgtggtccagccccgggacccatggcctctctccaggccctccgcaccccgccccatgccccagtcctttcctactccagaaatgctccccacccccccaagagggaaaagcagataacccaacaggaggtggtggggtctgacgtgtccaagtgctggcagacaccctggtcacccaggacagagcggaaaaaaaaaaaagaggtcagggttttaacgagctatgcaatctttttccaaaacccaaggttgggctgcttcccacccctgcctgttccccttctcccggcctccttcacaatgtgaagctgtgggtgcagtgggcccaagggctcttgctcctgtctctgcctctgggtcatgagtaccaccctgcctgcctccccaacaccgtggaatcctcactggtgtgctgtccacagatttgtgaactcctggtagtaaaacacttttgcatccctttgctctccaaaaaaaaaaaaaaaaaaaactcgagggggggcccggtacccaattcgccctatagtgagtcgtattacaattcactggccgtcgttttacaacgtcgtgactgggaaaaccctggcgttacccaacttaatcgccttgcagcacatccccctttcgccagctggcgtaatagcgaagaggcccgcaccgatcgcccttcccaacagttgcgcagcctgaatggcgaatggcaaattgtaagcgttaatattttgttaaaattcgcgttaaatttttgntaaatcagctcattttttaaccaataggccgaaatcggcaaaatcccttataaatcaaaagaatagaccgagatagggttgagtggtgntccagtttggaacaagagtccmctattaaagaacgtggactccaacgtcaaagggcgaaaaaccggctatcanggcgatggcccactacgtgaaccattaccctaatcaagntttttgggggnccaaggggccgtaaagcacttaaat

SEQ ID NO: 152 - DNA, 711 bp, Homo sapiens
  misc_feature (2)..(3): n equals a,t,g, or c
  misc_feature (15)..(15): n equals a,t,g, or c
  misc_feature (24)..(24): n equals a,t,g, or c
  misc_feature (38)..(38): n equals a,t,g, or c
  misc_feature (699)..(699): n equals a,t,g, or c
tnncgcgcaaccctnactggaaangccccactatagantgtacgcctgcaggcaccggtccggaattcccgggtcgacccacgcgtccgccgcgggaagggtgagggctaccggggcacagccaataccaccactgcgggcgtaccttgccagcgttgggacgcgcaaatcccgcatcagcaccgatttacgccagaaaaatacgcgtgcaaagaccttcgggagaacttctgccggaaccccgacggctcagaggcgccctggtgcttcacactgcggcccggcatgcgcgcggccttttgctaccagatccggcgttgtacagacgacgtgcggccccaggactgctaccacggcgcaggggagcagtaccgcggcacggtcagcaagacccgcaagggtgtccagtgccagcgctggtccgctgagacgccgcacaagccgcagttcacgtttacctccgaaccgcatgcacaactggaggagaacttctgccggaacccagatggggatagccatgggccctggtgctacacgatggacccaaggaccccattcgactactgkgccytgcgacgttcgttataacagccgcataatcttggaccccaaacagggcagttgagaagttgcaagaggtggatggttgataacggcgttcaagttcccgggttggggcatcggcaattaccttgaagnaattgggaatgg

SEQ ID NO: 153 - DNA, 1653 bp, Homo sapiens
ctaatccgactactatagggaaagctggtacgcctgcaggtaccggtccggaattcccgggtcgacccacgcgtccgcaccttcgacgcggtccggggaccccctcgtcgctgtcctcccgacgcggacccgcgtgccccaggcctcgcgctgcccggccggctcctcgtgtcccactcccggcgcacgccctcccgcgagtcccgggcccctcccgcgcccctcttctcggcgcgcgcgcagcatggcgcccccgcaggtcctcgcgttcgggcttctgcttgccgcggcgacggcgacttttgccgcagctcaggaagaatgtgtctgtgaaaactacaagctggccgtaaactgctttgtgaataataatcgtcaatgccagtgtacttcagttggtgcacaaaatactgtcatttgctcaaagctggctgccaaatgtttggtgatgaaggcagaaatgaatggctcaaaacttgggagaagagcaaaacctgaaggggccctccagaacaatgatgggctttatgatcctgactgcgatgagagcgggctctttaaggccaagcagtgcaacggcacctccatgtgctggtgtgtgaacactgctggggtcagaagaacagacaaggacactgaaataacctgctctgagcgagtgagaacctactggatcatcattgaactaaaacacaaagcaagagaaaaaccttatgatagtaaaagtttgcggactgcacttcagaaggagatcacaacgcgttatcaactggatccaaaatttatcacgagtattttgtatgagaataatgttatcactattgatctggttcaaaattcttctcaaaaaactcagaatgatgtggacatagctgatgtggcttattattttgaaaaagatgttaaaggtgaatccttgtttcattctaagaaaatggacctgacagtaaatggggaacaactggatctggatcctggtcaaactttaatttattatgttgatgaaaaagcacctgaattctcaatgcagggtctaaaagctggtgttattgctgttattgtggttgtggtgatagcagttgttgctggaattgttgtgctggttatttccagaaagaagagaatggcaaagtatgagaaggctgagataaaggagatgggtgagatgcatagggaactcaatgcataactatataatttgaagattatagaagaagggaaatagcaaatggacacaaattacaaatgtgtgtgcgtgggacgaagacatctttgaaggtcatgagtttgttagtttaacatcatatatttgtaatagtgaaacctgtactcaaaatataagcagcttgaaactggctttaccaatcttgaaatttgaccacaagtgtcttatatatgcagatctaatgtaaaatccagaacttggactccatcgttaaaattatttatgtgtaacattcaaatgtgtgcattaaatatgcttccacagtaaaatctgaaaaactgatttgtgattgaaagctgcctttctatttacttgagtcttgtacatacatacttttttatgagctatgaaataaaacattttaaactgaaaaaaaaaaaaaaaaaaaaaaagtcgacgccaggaatttagtagtagtagtaggcggc

SEQ ID NO: 154 - DNA, 1590 bp, Homo sapiens
  misc_feature (991)..(991): n equals a,t,g, or c
  misc_feature (1552)..(1552): n equals a,t,g, or c
cctatagaattccgccagcaggcccggtccggaattcccgggtcgacccacgcgtccggaaggaggagctgcagggactggagtatctcaggccctctcagtgggtggggcccggagcaggggtacctgggaaacaggcctccctctggaattcggagcagagctgctgtctaagtcacggacctctggaatctataagacagaggactgcaaaggggtgcaacactccaaaaggacagcttaggacacgcaccatgtggtgggccctgctggccctgccgtttctgctgcccacggcgctgcgcctctgcttggcagggcctcccccggagaggggccctcttttctggctgactcggcaggactctcgggaaagcggggccgccaacgccacggtctcgccctgcgaggggctgccctctgcgggagcgkcgaccttgaccctggsgaaccgcagcctggagcgcctgcccaactgcctgccgcccgcgctgcgtagcctagacgccagccacaacctgctgcgcgccctgagcgctccagagctcggcgccctgccgcggctgcaggcgctgacgctgcgccacaaccgcatcgccgagctgcgctggggccccggagggccggcggcgctgcacacgctggacctcagctacaaccagctggccacgctgccgccatgcgccgggcccgcgctgcccggcctccgctcgctggcgctcgccgggaacccgctgcaggcgctgcagyccgkggccttcgcctgcctcccggcgctgcgcctcctcaacctctccggcaccgcgctgggccgcgacctgggagcgggcatcgccgacggggccttcgcgggagcgggcggcgcgctcgaggtcctggacctcagcggcacgttcctggagcgcgttcggtcagggtggatcagagacctgccgaaactcacctctctccacctgaggaagatgcccaggctgcggatcctggaggcggncgttttcaagatgacccccaacctgcagcagctggattgtcaggwctcgtccgccctgacttctgtccacacacagctcttccaagacactcctcgcctacaggtccttctattccagaactgcaacttgagttctttccctccgtggagcctgcattcctcccaagtcctgtccatcagcctctttggcaaccccctcatttgcagctgtgaattgtcctggctcctcagggatgcaaagaggactgtcctaagcagggcagcagacactgtgtgtgtaccggcttcaggatcccgagacaccttctcagcccctctttcgctgtcccagctgcccactgtgtgtcatctggaccaaagcaccaccctccattccagctcgccccaggctgttcccttcacccaccaaccatcaacacagggtctcaccaccccatggagcacagccccttccactcgacctgtggaagctgaacagagtgtcaccaagcccctctccttccccacggattccgccacacaaaccgcatggtcccacagtggcatcaaagtggggaccgnccgctccacagccatccccacagcagattctagcacct

SEQ ID NO: 155 - DNA, 1795 bp, Homo sapiens
gtgaaggtacgcctgattgaggaccgcgtcctgccctcccagtgctaccagcctctcatggagctgctcatggagtctgtgcaggggccagcagaggaggacactgctagccccttggctttgctggaagagctgaccttgggggactgccgccaggaccttgccaccaagctggtgaaactctttcttggccggggactggctgggcgctttctggactatctcacccggcgtgaggtggctcggaccatggaccccaacaccctcttccgttctaactccctggcatccaagtcgatggaacagtttatgaagctcgtgggcatgccctacctgcacgaggtcctgaagcctgtgattagccgtgtctttgaggagaagaagtacatggagctggatccctgcaagatggacctggggccgcacccggaggatctccttcaaaggcgcactctcggaggagcagatgcgggagaccagcctggggctgctgacgggctactggggcccatcgtggacgccatcgtgggctccgtggggcgctgcccgcccgccatgcgcctcgccttcaagcagctgcaccggcgagtggaggagcgcttcccccaggccgagcaccaggatgtgaagtacctggccatcagtggatttctcttcttgcgattcttcgcacctgccatccttaccccaaagctgtttgaccttcgggaccaacacgcggacccccagactagccgctcactgctgttgcttgccaagatgtgccactccatccccgtgtctcacatccgcgccgtggagcgcgtagacgagggcgccttccaactgccccacgtgatgcaggtggtgacgcaggacggcacgggggcgctgcacaccacctacctccagtgcaagaatgtgaatgagctcaacywgtggctctcggccttgcgcaasgccagcgcccccaacccgaacaagctggccgcctgccaccccggtgccttccgcagcgcgcgctggacctgctgcctccaggctgagcgctcagccgccggctgcagccgtacacactcagctgtcaccctgggggactggagtgacccactggatcctgatgctgaggcccagacagtgtatcggcagctgctcctggggcgggaccagctcaggctgaaattactggaggattctaacatggatacaactctggaggcagacacaggggcctgtcctgaggtcctggcccggcaaagagcagcaactgcccgcctgctggaggtgctcgcagacctggatcgtgcccacgaggagttccagcagcargagcgagggaaggcggccctgggcccccttggcccctaaggaaatgccagagctagcccggaaggaggagcaagagccagggggccctcttcagcgcatcctgccccgggagtctcctgtctccttggacctctttgattctgtggtttggaggctcccagagacgtgcctagtcctgtgtgccttgagtccagaactcagggcatggaagccctttggcaggggccagccttgcactgagtgaaacttgccctctggcttgattcagactggagtggataggataaggaacctgacttatttgactgagactggggtctctacttcaccaaactggcctctatccataccaaggaggccagcctggccctgagctgctggatacagctggacctgaattcctgatgcccatgtratgttgttgccccaratgggcactaaatggcaaaaaaaaaaaaaaaaaaaaaaaaaaaaaaaaaaaaaaaaa

SEQ ID NO: 156 - DNA, 1588 bp, Homo sapiens
accacccatccccccaccactgccaccacccgccgcacgaccaccaggcgtccaacaaccacagtccgaaccactacgcggacaaccaccaccaccaccmmcaaacccaccactcccatccccacctgtccccctgggaccttggaacggcacgacgatgatggcaacctgataatgagctccaatgggatcccagagtgctacgctgaagaagatgagttctcaggcttggagactgacactgcagtacctacggaagaggcctacgttatatatgatgaagattatgaatttgagacgtcaaggccaccaaccaccactgagccttcgaccactgctaccacaccgagggtgatcccagaggaaggcgccatcagttcctttcctgaagaagaatttgatctggctggaaggaaacgatttgttgctccttacgtgacgtacctaaataaagacccatcagccccgtgctctctgactgatgcactggatcacttccaagtggacagcctggatgaaatcatccccaatgacctgaagaagagtgatctgcctccccagcatgctccccgcaacatcaccgtggtggccgtggaaggttgccactcatttgtcattgtggactgggacaaagccaccccaggagatgtggtcacaggttacttggtttacagtgcatcctatgaagacttcatcaggaacaagtggtccactcaagcttcatcagtaactcacttgcccattgagaacctaaagcccaacacgaggtattattttaaagtgcaagcacaaaatcctcatggctacggacctatcagcccttcggtctcatttgtcaccgaatcagataatcctctgcttgttgtgaggcccccaggcggtgagcctatctggatcccattcgctttcaaacatgatcccagctacacggactgccatggacggcaatatgtgaagcgcacgtggtatcgaaagttcgtgggagttgttctttgtaattcactgaggtataaaatctacctcagtgacaacctgaaagatacattctacagcattggagacagctggggaagaggtgaagaccattgccaatttgtggattcacaccttgatggaagaacagggcctcagtcctatgtagaagccctccctactattcaaggctactatcgccagtatcgtcaggagcctgtcaggtttgggaacatcggcttcggaaccccctactactatgtgggctggtacgagtgtggggtctccatccctggaaagtggtaatcacaggaccgycatgctgcagcttgccctgcccagccccaccaactaagtcgcactaggggctgtgagcaaagacagccagcatgctcagccccgctgccctaggtgccaggaaggtcacagatggacactggccattctggtcatctcagtctggaactcagtcccacttcttggcctggacaatgaacaggattcagttttgctgttaactttgcttctctacttttttttgtttgtttggaatagcacatcccagagacatcagaaaccagcaactgattcagtgtgatttccagactttttaggc

SEQ ID NO: 157 - DNA, 959 bp, Homo sapiens
  misc_feature (953)..(953): n equals a,t,g, or c
cccaggctgagacagggtctggaacaaatctgacagtgatgaatcagtaccagagcttgaagaacaggattccacccaggcaaccacacaacaagcccagctggcggcagcagctgaaatcgatgaagaaccagtcagtaaagcaaaacagagtcggagtgaaaagaaggcacggaaggctatgtccaaactgggtcttcggcaggttacaggagttactagagtcactatccggaaatctaagaatatcctctttgtcatcacaaaaccagatgtctacaagagccctgcttcagatacttacatagtttttggggaagccaagatcgaagatttatcccagcaagcacaactagcagctgctgagaaattcaaagttcaaggtgaagctgtctcaaacattcaagaaaacacacagactccaactgtacaagaggagagtgaagaggaagaggtcgatgaaacaggtgtagaagttaaggacatagaattggtcatgtcacaagcaaatgtgtcgagagcaaaggcagtccgagccctgaagaacaacagtaatgatattgtaaatgcgattatggaattaagtgttcaagcctttgttccttgactccctctgccctgaccaattatgagtgactttattttgtcttgctaaatatcagccaattaaggaacctcattccagagcctcttctgagttgccgtataggttttagtggcctaaattctcctgatttgcctgtaagagttttagtgacctgaattctcctgatttgcctataagaaccgctaattatcttttctctgttacaggaattaacaatgtaaccatatggaagcaactttttttggtgtctcaaaggagtaactgcagcttggtttgaaatttgtactgtttctatcataaataaagttatggcttcttgttggawaaaaaaaaaaaaaaaaagggncgcccg

SEQ ID NO: 158 - DNA, 552 bp, Homo sapiens
  misc_feature (519)..(519): n equals a,t,g, or c
  misc_feature (529)..(529): n equals a,t,g, or c
  misc_feature (532)..(532): n equals a,t,g, or c
  misc_feature (547)..(547): n equals a,t,g, or c
tccggtaccggtcggaattcccggstcgaccacgcgtccgggaaaatggatatgttaggactcttagaaaatatcaaggcgctcatgataggactcagctgcatctgtctgtctctctggccgtactctggcagtggctgaattagggcagctgggatttgatgcacctcctggttctcagacacttatagacactatgctccagaaactctaagttagataaagctgcacagaaaagggtcaatcagaaaaaggtaaataagactgattgaatgactacagaaatcctaacagaacacagatcttcactgaacttcccttataagcagccaaaggaaaagtgtttccaacttctaagacctcagacaaggctgggcacagtggctcacgcctgtaatcccagcactttgggaggccatggcgggcagattgcctgagctcaaggagttcragaccagcctkggcaacacggkgaaccctgctctactggaatacmaaaaattagccggcmttgggggngggggcctgnaancccactccttgggangctga

SEQ ID NO: 159 - DNA, 1599 bp, Homo sapiens
  misc_feature (1568)..(1568): n equals a,t,g, or c
  misc_feature (1598)..(1598): n equals a,t,g, or c
gcggatctgggacagaaaccgggagaggagcccaaccgcaccgagagcgcgaggccgaccgggcaaggagtgggaccgcagccgggacgacaggaaccgagagcgcgcaggaccggagcgcgaccggaccgtccgagcagagagcggacgagacaaggccagggacagggagcgggccacgcaagaccggagcaagacaaagaacgctgggacccgaacccgaggctcgaggctcgacgctggcaccgctcgcaggcctagacgccccggccggcagagaccctttttaaagccacgttcgtaagatgcgttgaacaaatagcttttgaaatagccacgatcttagattcaggatagaatattctggacttaaacattactgtaattttgtgtaaatggtttcttacaagatttcacatctttacaattctgatgcttttttaaaaaaactaaactttaatatttccatttaaaattaaaagaaatgggaaattgcctacggagcatattgcttttcagatcatagttatcttttccaataactttattgtaaattttaagggagtttcgttggaccctagagccataccttcactgacatctcatccgtttgtgtttccaaaagctgcttttacaggtcttagccgccgccccggaggccggtgtgggcgtgacctgcaggcgtccaccctgcggctacgggagaagtcttagtagcttgtatctggagtcttgagaaacacaaaccttacaaatgcatctttcttttgtcataaaattggaattacaattttcaactgggaaacagaaacacatttcttagcgtgctcagattttatatatcaccttatcaattttttccaaaacatgatttaaagcaacatctgtcctagtataattgttgcattttaaataacaatttattgaaaaatgttaagttttaccagcctaaaaaaagtaacaaaccaattaagtgtactttgggggcagggaggagtccttgatttgaataatcaggagttttgttggtccagtttcgccttctgagcagttcttctgtatcccgggaaaagtacgctcggccccaaactggtatttgtcagacgatacatgtaaaagtttgtccttgaacgtggaacaagacttgtgtaaagtctgagacgggaactagtgatcactagctcaagaactgcaaatgagacaggaagctgttcactgtgaaacagtctcttgcttgtcgtgtatttttcgagtacttctgaagtgtgaagtaaaaaaatctggctaatttatttgtacaaatacactttgataattttttatattttcataaacttttacagatgtaaaattaaagaacttcacttgttctttggagtctgttattccattgtacgtcactacagatttttcactttatagcacagattttttaagttaagaaaacattgagaatgtatcagtttgagatgtttggtgttgaaagccaagtgtccataggttaaattacattaaagtaggtgtcacgttccaacatctagtacgatgagaaggttttgtttgtttancatataaggcaaatttttctaatttaaatnc

SEQ ID NO: 160 - DNA, 441 bp, Homo sapiens
  misc_feature (386)..(386): n equals a,t,g, or c
ggagcacagggcacagctggtctgttcagccagggcgggaaggggctccctgctgctcctgcccgaggggatccgstgccgcccaggagcaccagcggcggtgtctccgcaaggggctctcagtgagcaggagaaatgtttacgttcacaaagaccagagcccacgaggggctgagcctgctgccaaaagtgcttttggtcagctgcccagctgtggccacacgkgcaccgaggtcaggaggcgccagaggaacctttcacatgggctgcgggagcccgagcttcctgacccccagcccgggagcggagagggacgctggagcccaggccgaccgcacaccgccctggagcgacttcgcccaccagagtcggctgcccagcccgtnggttctgcgctccgaaggcaagagatgcagtgttgaaggggggcgtcgggaacga

SEQ ID NO: 161 - DNA, 785 bp, Homo sapiens
gcagctgcctgtgagatgtttggtgaccagctcagtgtattcttgtattcttgatagagaatatttcaggagacaaaagtgcttcttcagaccagacctcaaataacaattttattctttttaataaataagacctcagtaggcggacctgataacagtgacaatgaaaggaaaatagtggcaaaatgtgagtttccagcatgatgtttctcattttattttcttctgtatgaatcaaaagaatgctttacaaaaccatgttcccttaatcacagtgttctctggcttttataggattgtcatagccaggaccacactattgctttttcataacattttctttttgtttctttcttttgaatttcttacagggctgcaaagtatgccaggggagtatgtagcccggggtggtccaatgggtgtgagtatgggacagccaagttatacccaaccccagatgcccccccatcctgctcagctgcgtcatgggccccccatgcatacgtacattcctggacaccctcaccacccaacagtgatgatgcatggaggaccgccccaccctggaatgccaatgtcagcatcaagccccacagttcttaatacaggagacccaacaatgagtggacaagtcatggacattcatgctcagtagcttaagggaatatgcattgtctgcaatggtgactgatttcaatcatgttttttctgcatgactgtggagttccattcttggcatctactctggaccaaggagcatccctaattcttcatagggaccttta

SEQ ID NO: 162 - DNA, 1634 bp, Homo sapiens
  misc_feature (9)..(9): n equals a,t,g, or c
  misc_feature (1630)..(1630): n equals a,t,g, or c
ccccccccngggtttttttttttttttttttttttttttttttttttttttttttttttttttttttttggtttctacaaattattttattagaatgtcagactcaaaagaactaccaggaacatgcctgaaaatgctatatatgatttatgcttgacccatgacacctgctgtcactggatccagagtgagcaagggaaaggaagtggaggtaggcggggacagcaccagccctggctggccagacctgaggcccacagacctggtccccacaaccaggattcctacaatgtacacattcctaattcaggctcaactctcctttacccaaaagtaaatgcctcaggactcaatctgaatcactgtctgtctcagcttctttcacatccacgctgaatttgtactcctggtcacatcccatgtaagcgtcactcatgaagtacagagtgtagttgtgggcaccagtggctggggccacaaagtccaacttcaccttggccttctgctgcaaggtcagcctcttgatggagatgaggctattggacttggcatctccaatcaccacccaccagccctcttcacgtttctgcgggaagagaggcgcaatgacagggcctgtgacttcctcctctcgctccagctgcaccagcaccacaactggcccgccactgcggatgctgtccttatctaccacctcataagatagttcgatattagggtagcggttacaaaagcgagccacatctgcaatctggctgtcagtcagctgaagcaacgcgttccgttcttcatcctccatctccatgatgtcgaaaacactctccactcccttgtctgtgcaacgtttgatatgctcagaggtgaagtgtggcagctgcttcaggtatgagtccttggaccacatggcttgggtgaccatctgggccagttccatagctgccagagcagggctgagccacccattgctggaaaggacatccacgcaggcctggatgagccggattgccttactaaggatttcctccgtatctgactgcaactcagcactcagctgcatgcgagacaagtgagcctgcaggagcaggttggtcttgacgtgcggatcattgaacttagggttattcagcttgtgggggaccttctgagccaactgcctcaggarrttktcttcatggtgcyggatgggratrttctcrtacyctgctgcattggagatgatctcaataagccctcgcaccttggtcttggcgttgaggaagaggaagatcaaaacgttgtgccagaaactacctctgaaggctacactttccaagttcaggatggggctcctgggacctttaacttttagatcatgtagctgagrcataaatttgttgtgtactaygtttggtattttgtcttattgtttctctactaagaactctttcttaaatgtggtttgttaytgtagcactttttacactgaaactatacttgaacagttccaactgtacatactgtatgaagcttgtcctctgactaggtttctaatttctatgtggaatttcctatcttgcagcatcctgtaaataaacattcaagtccacccttttaaaaaaaaaaaaaaaaaaaaaaaaawaaacccaccgtnccgc

SEQ ID NO: 163 - DNA, 2304 bp, Homo sapiens
ggtgaggcggcggccggcggggacgcgggcggccacgcggggctcctgcagcatggctgtcagcaggaaggactggtccgcgctgtccagccttgcccggcagaggactctggaggatgaggaggaacaggagcgcgagcgcaggcggcggcaccgcaacctgagctccaccacggacgatgaggctcccaggctcagccagaatggagaccggcaggcctctgcttctgagagactaccgagcgtggaagaagcagaggtgcccaagccactgcccccagcctccaaagatgaggacgaggacatccagagcatcctcagaacacggcaggagcggaggcagaggcggcaggtggtggaggctgcacaggcccccatccaggagaggctggaggcagaggaggggaggaacagcttgagccctgtgcaggccacacagaaacccctagtctccaagaaggaactggaaatcccacctcgccggagactgagtcgggaacagcggggcccctgggccctggaggaggagagcttggtgggcagggagccagaagagaggaagaaaggggttccagaaaagtccccagtcttggagaartcctccatgccaaagaagacggcacctgaaaagagcctggtctccgataaaacctccatctctgagaaggtgctggcctcagagaagacatctctatcagagaagatagcagtgtcagagaaaagaaacagctcagagaagaagtctgttctagaaaaaaccagtgtctctgagaagtcgctggccccagggatggcactgggctcaggaaggaggctggtgtctgagaaagcttccatctttgagaaggcactggcctcagagaagagcccaactgcagatgctaagccggccccaaagagggccacagcctcagagcagcccctggcgcaggagccgccagcctctgggggaagcccagccaccaccaaggagcagagaggaagggccctccctgggaagaacctgccctctttggcaaagcagggggcttcagaccctccgactgtggcctcccgcctcccacccgtcacactccaggtgaaaatccccagcaaggaggaagaggcagatatgtcctcacccacacagcgaacctacagcagctccctcaaacgctccagccccaggaccatctcctttcggatgaaacccaagaaagaaaactcggaaacaaccctaactcgcagtgccagcatgaagctcccagacaacacagtgaagttgggagagaagctggagagataccacacggccatacggagatcagaatctgtcaagtctcggggtctgccttgcactgagttattcgtggctcctgtgggtgtagccagcaagcgccacctctttgagaaggaactggcgggccagagccgagcagaaccagcctccagccggaaggagaacttgaggctctcaggggttgtgacatcaaggctcaacctgtggatcagcaggacccaggaatctggagatcaggacccccaggaggcacagaaagcatcatctgcaaccgagaggactcagtggggacagaaatctgactcctcgctggacgctgaggtgtgacaagccccgccaagacagacctgcaagtcttcgtctcaagggacctccctcatgccaggcccctgcctctcacagcagcaccctttcctctcattgtccctgttccctttttgcctgtggatctgtttggccagggtccctggggtcaggaatatttgcaagactcagccagctccttcccagcccagcctcttggggctgggactttctcaccctgcggcaggcacaacagatgctgggacccagtctctgcccaggtcacagcacaagtgcacatcagcactatggggcctatgtcctgcccagagacctctgctccttcctgctcacatccacagtcagggcacggcgcccctcaagaactccagagtcacctgtctcatcggctcccagcaagtgcctctttgtctatgatgtcccccttctctgaggcctggacccacccatctttgtccctggggcctgctcccagccactgaggcccgctctggccaggggagaaggagctgccgtgcgtcttccctgtgccccgtctccctgcttggttctcccctcccttccctggccggctgccatggccaggagctaagtgcctttttgtgtgcaaccacttaccctttctctgaaaaacctgttctcaggaaggatctgataaactcatttactctcaaaaaaaaaaaaaaaaaagggsggccgct

SEQ ID NO: 164 - DNA, 481 bp, Homo sapiens
tcgacccacgcgtccgagaactcgtcatgctctttgtagcgtggtgcttctgttgctcacaggatgtttgccacacgagtcactcgagagaatctctgagtcctggcgagggctttctgaggcttcgtgtattagcagctgttgtcttccaactcagcggcaggacaacttgcctttgatgattttcaagagagttgtgctatgatgtggcaaaagtatgcaggaagcaggcggtcaatgcctctgggagcaaggatccttttccacggtgtgttctatgccgggggctttgccattgtgtattacctcattcaaaagtttcattccagggctttatattacaagttggcagtggagcagctgcagagccatcccgaggcacaggaagctctgggccctcctctcaacatccattatctcaagctcatcgacagggaaaacttcgtggacattgttgatgcccaagtgaagatccctgtct

SEQ ID NO: 165 - DNA, 1409 bp, Homo sapiens
ctttcttgcctacccggtgaccccgcgtctgttcgcaggtggtctcttctttgtagataccctaactagtgcaggcgtgtgactcacttcctctgatggctcctggtaatgtgtttccccctctaccctccttaggtcatgttctctttcgaggccggccgccgctgcccctcaggccctggaaccttcaccttccagacggcacagggaaatgacatcttccaggcagttgagactgccatccaccggcagaaggcccagggaaaggccggacaggggcacgatgttctcagagctgactcccatgaaggggaggtggcagaggggaagttgccttccccacctggcccccaagagctcctcgacagtcccccagccctgtatgctgagcccttagactccctgcgcattgctccatgcccttcccaggactccctatactcagaccccttggacagcacgtctgctcaggcaggagagggagtacaacggaagaaacctctctattgggacttgtatgagcatgcgcagcagcagttgctgaaggccaagctgacagaccccaaagaggatcccatctatgatgaacctgagggcctggccccagtccctccccagggcctttatgatctgcctcgggagcccaaggatgcatggtggtgccaagctcgggtgaaggaggagggctatgagctcccctacaaccctgccactgatgactacgctgtgccaccccctcggagcacaaagcccctccttgctcccaagccccagggcccagccttccctgaacctggtactgcaactggcagtggcatcaaaagccacaactcagccctgtacagccaggtccagaagagcggggcctcagggagctgggactgtgggctctctagagtagggactgacaagactggggtcaagtcagagggctctacctgagaaggacggcaaggctgaggtggctaagggggaccatggggaggtggcactagggatcaaagaagatggttagaaccagcagaagccagagggtgggaggggccatgctgtgtgagaccaggggaccagagggatgggagagtcaagggaaggacaatcccaggaagtcctaagaagtggggcagatggcagggctgaggatgggctctgcatcccccaaagccatcccttccctacttccccaaatgaagggacggctgtgggaccaggtctgtggaaagtggtgcatggtcagaatgggtgcagtttgaggggcctgtgtggaggcctcagggagatgttggactgtgcctggatccttactcctgcattgttctttgccagagacctatttaaaaattttaaaattctcattaaagtcagcttgggtttaaaaaaaaaaaaaaaaaaactcggggggggcccgg

SEQ ID NO: 166 - DNA, 1808 bp, Homo sapiens
aggttgaacctcatcaactggggaaatcgagttccaaagcactttacccgttcgcttaatggccaagcaggggcgttatttacttttttgagcaaaacatctgttccaagatcttacattcaaccccgtccttacaccagagcgttccagatctgcaacatgaagctcatgcttcctgatggcatcaccgtggaggtcattgtgtcaaccaggtcaatgccggscacctgttcgtcagcagcacacacaccctaccttccacgcgctgcgcagcctcgaccagcagatgtacctctgttactctcagcctggaatccccaccttgcccaccccagtggaaataacggtcatctgtgccgcccctggtgcggacggggcctggtggcgagcccaagtggttgcctcctacgaggagaccaacgaagtggagattcgatacgtggactacggcggatataagagggtgaaagtagacgtgctccggcaaatcaggtctgactttgtcaccctgccgtttcagggagcagaagtccttctggacagtgtgatgcccctgtcagacgatgaccagttttcaccggaagcagatgccgccatgagcgagatgacggggaatacagcactgcttgctcaggtgacaagttacagtccaactggtcttcctctgattcagctgtggagtgtggttggagatgaagtggtgttgataaaccggtccctggtggagcgaggccttgcccagtgggtagacagctactacacaagcctttgacccccatgctgcttcctgagagtctttttttgcactgttgaaattgggcttggcactcaagtcaaagatgaacatcggaataacaaacattgtcctctccagaaagtcctttctttmtccatactgtagtcctattgagaagacatttcgtctctgagaaaaaaggatggaactatgggttctcttcgcaaagccaaaggatagtgtttaacaagccagctggcttatcctggttctcagctgtttaaaaaaaaaaaaaaaaaggaatagaaacagtttcaaccagattgtcctattccccctgttccattcccctcttcttccttctatctccttccccggcaaaaaccaaacaaactggcagacaggccagggatgtatgttgcttgcttgagagggtttcttttacttcaaaatctttcttcagggagcaagacatgaactgactaattggtatccactacttgtacagcttacataaatgagttgatgatatttaaccagtttttataaacttcatttaggtctctaaacacagactttttaaattgcaactgtaaatatgaaatggtcatcacatctgaccttggtcagtggggaggggaactggtatcctgccaagcctggttgtaatttgtaaccattttctatttgtgcaaactctgtaaatatgtgtttaaacaaatgtaatattttgtacaagatacactggagaacaaagggaactcaagattcttccagccacatgtcacctgtaggtagaagtaaactctgcagtgcagcttctgctcttggcccctctggccagggcccctgtggcttcctgcacactggacaggtgactgtatggtagagactgtgatctgggaactttttgctgtacaaatctgtttaaaaaaaaaaaaaagtaactcattgaattaacttgcagtggtgtgtttgattcttttttagactggcttcagcattgtgcagtttaaaaataagtaagtaacttacataaatcttcaattgtatgaaaaaaaaaaaaaaaaaa

SEQ ID NO: 167 - DNA, 788 bp, Homo sapiens
gtttttgttgagtataggagttctttatatactctggatattaacctcttattagatacatggtttgcaaatattttctcccattctgtaggttaccttttcactcttgtttcctttaatgggcagaagttaagtttgatatggtctcatttgcctgcttttgctttcattgtctgtttttggtgtcatatccaagaaatcattgccaaattcagtgtcgtgatgctttttcccgaagttttcttctaggagtttttcaggtcttatatttaggttttatcaactacattacgttttatgttgaagaaaaaacackggaatagaattaatgtttaaactgataataaattttcttcccccacaaaacaaaccaccctgaatataaatactgtaaggccactctgtgtgcttgggaaagttgactcagaggtgtcagatcctagtgaaacgattagattttaaagataaaagaagtcctctcgggccaggagtggtggctcatgcctgtgatcccagcactttgggaggctgaggcaggcagatcacttgaggccaggagtttgagaccagcctggccaacatggcaaagccccatctctactaaaaatacaaaacttagctgggcttggtggtgcacacttgtaatcccagctacttgggaggctgagtccatgagaattgcttgaacccaagaggccagggttgcagtgagccaagatcgcaccactgcactccagcctgggcaacagagtcaagactgtctcaaaaaaaaaaaaaaaaaactcgta

SEQ ID NO: 168 - DNA, 2054 bp, Homo sapiens
  misc_feature (2049)..(2049): n equals a,t,g, or c
gtgagtctgacctgctggggtaggaggaagcctggtgccttgccttgctagagcactttgaacctggggagattgcagagctaaccctggctcgccgggttttaaaagggtaggttggggcgaatgtgggtacaggggagcctgggctaaaaccccaccaaggccacacgcaccgtgtgattcgtccctgcacgtarccctaactcgtttgttgtctttgtttactggtagcctctgtgacctggcactgtgttctcttgggaaggaggctccccagagcccatctgctctcagaacttggtcctagagaggaggctccctycctggctgtgtctagaggatggaaccgggatctggggtttagtcacagccatctctctccttttggcacagttggtcgtgatctcccagcactccacttgtgtcctttgtctgcagggtcgtgctctcattccccctagaatggggctccctccctcaggaaccttgccgggacactccagggtttctgtggggaggctgtcaggttctcagcctcccctctgccctgaggtctcctgtctgtcaggtgtcagggtgtgccatcccccacatggctgcagagaggatgctcagacaggcctgcagccaccctgcacccatgggggaatttaaactccattcctgagtcatcctggccttgggagcaagacgagtgggctcagccctggcccacaccaaggcagcagcttcccatctctaaaacgggagaaatgctccctgccatccctcgatccctggggcccattaggtaaagatggccagttgcagttaggtttggtttccttaaaaggaatgtgaggttgccaggcattgctctctctgagagaaggttcattctgagctctcagccagctgggagcaggcccctttcctcactgtccttccacgtttaggtcctgtatggtggaagagtcggggaccctcgaatcccagcttgaagctaccaaacgcaagcaccaggaaatccgagccatgagaagtcagctcaaaaagatcgaggacctgggggccgccatggaggaggccctcatcctggacaacaagtacacggagcacagcaccgtgggcctcgcccagcagtgggaccagctggaccagctgggcatgcgcatgcagcacaacctggagcagcagatccaggccaggaacacaacaggtgtgactgaggaggccctcaaagaattcagcatgatgtttaaacactttgacaaggacaagtctggcaggctgaaccatcaggagttcaaatcttgcctgcgctccctgggctatgacctgcccatggtggaggaaggggaacctgaccctgagttcgaggcaatcctggacacggtggatccgaacagagatggccatgtctccttgcaagaatacatggctttcatgatcagccgcgaaactgagaacgtcaagtccagcgaggagattgagagcgccttccgggccctcagctcagagggaaagccttacgtgaccaaggaggagctctaccagaacctgacccgggaacaagccgactactgcgtctcccacatgaagccctacgtggacggcaagggccgcgagctccccaccgcgttcgactacgtggagttcacccgctcgcttttcgtgaactgagccactccctgggtcacccacccctcgctgcttgccctgcgtcgccttgctgcatgtccgctcctctgtgtgctctcactttccactgtaaccttaagcctgcttagcttggaataagacttaggagaaaatggtgcttcactaacccgcttccggtccagtcacaatcatcatgtcactgtggggacccagatctgtgtcttgaagcagctgccctcattccgacttcagaaaatcgaagcagctggctcctccccttgttctctctcccaccctcccccaaatctgttttcatgtaaaagacaaataaatgatgacttcccccaaaaaaaaaaaaaaaaaaaaaaaaaaaaaaaaaaaaaaaaaaaaaaaaaaaaaaaaaaaaanggggg

SEQ ID NO: 169 - DNA, 2442 bp, Homo sapiens
  misc_feature (185)..(185): n equals a,t,g, or c
  misc_feature (1607)..(1607): n equals a,t,g, or c
gccgccgggggacgcggacccaaacgccgctcaccgcttgcgggcgccgggcatggggagtgtggtgtgagcccgcacccggggaggacgcaggagctgcggagacgggcgcgaggaggaggagaggagtcgtggattggaaggacccgagggagggagggtggggaagcgagggaaaagtgaanctgggaggagaaggcggcggaaggtggagattgatgcttctgttttttgttgccgctgctgccctcgcgctgggagccgagccggagggaaggcggtggagagatgattgcagagttggtgagcagcgctctggggctcgccttgtatctcaacaccctgagtgcggatttctgctatgatgacagccgtgctatcaagactaatcaggaccttctcccagaaactccatggacgcacattttctacaatgatttttgggggactcttctaacccacagtggcagccacaagtcctaccggccactctgcactctttcttttcgcctgaaccatgccattggagggttgaatccctggagctaccatcttgtcaatgtcctgttgcatgcagcagtcactggtctcttcacaagcttctccaagatcctccttggtgatggatactggacattcatggctggcttgatgtttgcttctcaccccattcacacggaggcagtggcaggaatcgtgggacgagccgatgtcggggccagtctcttctttctcctctccttgctctgctacattaaacactgttctacaagaggctactcagccagaacctggggctggttcctggggtcaggactgtgcgcaggatgcagcatgttgtggaaggaacaaggagtgactgttctcgcagtttcagcagtttatgatgtctttgtctttcacaggctgaaaataaaacagatattacctaccatttacaaaaggaagaacttgtcgcttttcctaagcattagtttgttaattttctggggttcctcccttttgggtgcccggttatactggatgggaaacaaaccaccaagcttttccaactcggacaaccccgctgctgattcggacagcctcctcacccgcactctcaccttcttctacttgccaaccaagaacctctggctgttgctawgtccagataccctcagttttgawtggtcaatggatgctgtgcctctgctcaaaacagtttgtgactggagaaacctacacactgtggccttctatactggactccttctccttgcctactatggtttgaagagcccgagcgtagacagagaatgcaatgggaaaactgtamcaaatggcaagcagaatgcaaatggacatagctgcctttcagatgtggagtaccagaactcagagactaagtccagctttgcatccaaagtagaaaatggcattaaaaacgatgtatcacagagaacccagcttccttctacggagaacattgttgttctgtctttatctttgttaatcataccctttgttcctgccacgaacctgtttttctatgtcggctttgtaattgcagagcgagtattatatattcctagtatgggcttctgcctactgattacagtgggtgctanagccctttatgtcaaagtccaaaagcggttcctcaagagcttgattttttatgctacagctacactaattgttttttatggactcaagactgcgatcaggaatggagactggcagaatgaggaaatgctttatagatcagggataaaagtaaacccagctaaagcatggggtaaccttggaaatgttctgaagagtcagagcaaaatttctgaagctgaaagcgcctatagaaatgctttgtactaccgcagcaacatggctgacatgctttataatttagggctacttctccaggagaacagcaggtttgcagaagcactacattattataaattggccattgggagcaggcctaccctggcttctgcatatttaaataccggtattattctaatgaaccaaggaaggacggaagaagcccgacggacattcttaaagtgttcggagatcccagatgaaaacctaaaggaccctcatgcacacaagagctctgttaccagttgtttgtacaacctaggaaagctgtatcatgagcagggacactatgaggtctggccaatgcctctctgtccttttccctcccccttgttctgatccagtctcagtggtttgtaacctacagcctcctttgagcctatgtcctttgaacaactaatatgtatacacgttaaactattgtcctttgagaaactaatacatgatgacattggaatggttttttgatcaaatttgtttagaaaaagcttctgctaaataaaaatttaatagatttcaaaaaaaaaaaaaaaaaaactcgyagggggggtcccgtacccawtcgtcctctcrtgagta

SEQ ID NO: 170 - DNA, 1233 bp, Homo sapiens
  misc_feature (111)..(111): n equals a,t,g, or c
  misc_feature (459)..(459): n equals a,t,g, or c
ggcacgagctgccgacttcgcggctcgcaagcaccggcagcagcggcggaaggaccccgaggggaccccctacatcaaccaccccatcggtgggcgcgtcggccgcggagnccggctgcggcacctgggtggtgtggcacggatcctgacccacgaggcgggaatcactgacattgtggtgttacaggcggccctgctccatgacacggtggaggacacagacaccaccctggatgaggtggagctacactttggggcacaagtgcggcgcctggtggaggaggtaacagatgacaagactctgcccaagctggagagaaagaggctgcaggtggagcaagcgccccacagtagccccggggccaaactggtgaagctggcagacaagctgtacaatctgagggacctgaatcgctgcaccccagagggtacgctttcgtatgggcctgtaagggaaangggagggggatgccgccttctgaagacacatgttggtcagttcccctgaaaaaccctgggcattcttaawtcccaaattaatcctactggaccactctttgatcttctttcatacagtaaaaatacaatagctgggccaaggggaagttttcaggacagctcattscatcaggaactcatggccttgaaccaagcttgccaggaagtggggaaaaggcagtgctttccttgacatcacgctagcaagtttctgtcgactcttatgcaggatggtcagaacatcgagtccaggaatacttcgagtgggcagcgcaggtggtgaaggggcttcagggaacaaaccggcaactggaagaggctctaaagcatctgttcaagcagcgggggctgacaatctgatcagtgcttgaagctatccagaggcacaactccagcctcgttcaggccggacaggattcatacgccatcttttctgtgtctcctgagctccctccatccttcccagatattagaggccaaaaaaagacttgcattttttctcagtctgaaggtctcctgctaactaagctgagccccgcgtggtgggaatcagatgtacccatccatttctgatgcactcaccgcctctccccaagtcttgggtctgtttgctattttgcatggtgggatctctggcccctcagggacttgagattatttaagtactagttcctaacacgttctggaaaataaaaataactctgggttaaggtttaaaaaaaaaaaaaaaaaaac

SEQ ID NO: 171 - DNA, 1563 bp, Homo sapiens
ctggagcccggatggcaagtacatcgtgacaggtggggaggacgacttggtgacagtctggtcctttgtagactgccgagtaatagccagasgccacgggcacaagtcctgggtcagtgttgtagcgtttgacccttataccactagtgtagaagaaggtgaccctatggagtttagtggcagcgatgaggacttccaagaccttcttcattttggcagagatcgagcaratagtacacagtscaggctctccaracggaactctacagacagccgccccgtaagtgtcacgtatcggtttggttccgtgggccargacacacagctctgtttatgggaccttacagaagatatccttttccctcaccaacccctctcaagagcaaggacacacacaaatgtcatgaatgccacgagtcctcctgctggaagcaatgggaacagtgttacaacacccgggaactctgtgccgcctcctctgccacggtccaacagccttccacattcagcagtctcaaatgctggcagcaaaagcagtgtcatggacggggccattgcttctggggtcagcaaatttgcaacactttcactacatgaccggaaggagaggcaccacgagaaagatcacaagcgaaatcatagcatgggacacatttctagcaagagcagtgacaaactgaatctagttaccaaaaccaaaacggaccctgctaaaactctgggaacgcccctgtgtcctcgaatggaagatgttcccttgttagagccgctgatatgtaaaaagatagcacatgagagactgactgtactaatatttcttgaagactgtatagtcactgcttgtcaggagggatttatttgcacatggggaaggcctggtaaagtggtaagttttaatccttaatgctgcaccagatctagaacttgaataggtagtgacttttttctttttcgtgggaggggtggggtgtacaatgaatgtgaatgacacttcttattcttaatgtaaatctcaatgcatcagagccataattttggatactgcatgccatgtaattctgaatcatttgataatttaccttagagcatttaaaaaaatataatcaaactaattgccagccaagtcagtcatcctcctgggagtatatagagtcccaaggttagcgctcctgtattagactatttcaattttaggaaaatcatgaccatgtggggaaacaatgactttaaaatgctgaaattaaaatttatgctttaactggaatattttttgcttaactactcaattagaatattgtacacctgatcaatgtgtgttcagcacagatggccatgaattgtcatttatagtccaattttttatcttaatcataaaatgtttaggaatctatgaaatttaactttaggaacaaaacgtttagcagggttgattgatattatttttacattgttctggcaatccacagaaagagaagagccttaatttttaaaacccattttagtcattttatgacaattaaagttgtttaataaacatcttttttcaaagaaaaaaaaaaaaaa

SEQ ID NO: 172 - DNA, 1594 bp, Homo sapiens
  misc_feature (27)..(27): n equals a,t,g, or c
  misc_feature (1437)..(1437): n equals a,t,g, or c
  misc_feature (1443)..(1443): n equals a,t,g, or c
ttccaccagctttttcaccatgaaggngacagaccgggaggccgttgcgacagcagtgcaaagggttgctgggatgctccagcgcccggaccagctggacaaggtggagcagtatcgcaggagagaagcgcggaagaaggcctccgtggagggcagattgaaggccgccatccagtcacagttggacggggtgcgcacaggcctcagccagctccacaacgccctgaatgacgtcaaagacatccagcagtcgctggcagacgtcagcaaggactggaggcagagcatcaacaccattgagagcctcaaggacgtcaaagacgccgtggtgcagcacagccagctcgccgcagccgtggagaacctcaagaacatcttctcagtgcctgagattgtgagggagacccaggacctaattgaacaaggggcactcctgcaagcccaccggaagctgatggacctggagtgctcccgggacggctgatgtacgagcagtaccgcatggacagtgggaacacgcgtgacatgaccctcatccatggctactttggcagcacgcaggggctctctgatgagctggctaagcagctgtggatggtgctgcagaggtcactggtcactgtccgccgtgaccccaccttgctggtctcagttgtcaggatcattgaaagggaagagaaaattgacaggcgcatacttgaccggaaaaagcaaactggctttgttcctcctgggaggcccaagaattggaaggagaaaatgttcaccatcttggagaggactgtgaccaccagaattgagggcacacaggcagataccagagagtctgacaagatgtggcttgtccgccacctggaaattataaggaagtacgtcctggatgacctcattgtcgccaaaaacctgatggttcagtgctttcctccccactatgagatctttaagaacctcctgaacatgtaccaccaagccctgagcacgcggatgcaggacctcgcatcggaagacctggaagccaatgagatcgtgagcctcttgacgtgggtcttaaacacctacacaagtactgagatgatgaggaacgtggagctggccccggaagtggatgtcggcaccctggagccattgctttctccacacgtggtctctgagctgcttgacacgtacatgtccacgctcacttcaaacatcatcgcctggctgcggaaagcgctggagacagacaagaaagactgggtcaaagagacagagccagaagccgaccaggacgggtactaccagaccacactccctgccattgtcttccagatgtttgaacagaatcttcaagttgctgctcagataagtgaagatttgaaaacaaaggtactagttttatgtcttcagcagatgaattctttcctaagcagrtatgtctttctgccagtgtgctaatgnacacanagaatgtttttaaaaattaggaagcaaaaatttttggatcctactatgcctgtttacttaagaagaaattaagccggtaggattccccacgtgtcactcctgtgttctttcaaaagcaaagggagggagcggagtttctgggatccatctt

SEQ ID NO: 173 - DNA, 466 bp, Homo sapiens
  misc_feature (415)..(415): n equals a,t,g, or c
gcggacgcgtgggacggacgcgtgggcggacgcgtgggcgcggatggcggcgcagggcgtagggcctgggccggggtcggcggcgcccccggggctggaggcggcccggcagaagctggcgmtgcggcgsaagaaggtgctgagcaccgaggagatggagctgtacgagctggckcaggcggcgggcggcgstatcgaccccgacgtgttcaagtgagcggggcgggtgggggccgcatgctmgccagacacccccgacctctgctytccgggtacgcccggcccgctggtcgggaggagcccccgctgcccccgcccccgtccttgtccggtcttcaaggaagtggccgcgccgggcggagagggctcaacgggccccgcgtctgttcccgccaagatcctggttgaactgctnaaacttaaacgttggccccctcgccgttttcaaattctcaatccatgtttt

SEQ ID NO: 174 - DNA, 1700 bp, Homo sapiens
  misc_feature (331)..(331): n equals a,t,g, or c
  misc_feature (1700)..(1700): n equals a,t,g, or c
ggcacagggtggaatgtgtttttaatggctgtgcaatatcttattgttcagttgtaccattatttatttaactagttccctattgccaggcatttagacctgctttatggggaaagaatcaggactgtggcttccgtggccagtgtgcggcagttgccaaacaggtcatgtggtcctggttccccaggattcccaaaggctcaattctctaaccagctggtgctttccaggcagccagtgccccttgggccatcaggaccctacagcctgcgaggaatagttttagaaagcagattaatttcctattgtgtgtgagtgattttaaatgagntttttcgtttcccctttcttcccttctgtgctctggttgctcccacagggcagtaaacggctttgaccccgctcctcctcctcctggtctgggctcctcgcgtccatcgtcagcgccgggtatgctgcctctcagtgtgtgagtgcctagcctccaggtgggggctcctgccctcctccaacaacccaggacacccacgcctcacccctcggtgcctgggcccagccccgtgcccctccgtctgcctccgcacggctggcagagggcaggctgcatgcagtggcggctactgggccctgcccagccccggaactctgcgcgatatcaatactggctattttctcttctcgccgtagtgccgttggtttcacatgattgcacttttgtgggtcgcaaggtgatacatacgtgtattacttggtcactggatgcagaagtacccattcatcacacctgccccatagcccccactctgctgtactgataggatttagttgtgttttaggacattgcaaatcttctagaagttctcccccaaatcaggtcaatgtgtgccctcctgagctcccacccaggcatctccagtgctcatgatcatgtgtcccccaactccacccctcacagtttgggcctgtttctggcaaagagtcaggaaggttactgaattagggaacattttctgcaccttctgattttacttaagcagctaccattccatggacttgcctcccagagcagcacaatgcccgtctgagccccacgtggcaggagcctctgggacggggcacacacaggcccagcctctgtgctgtctcctcctctgtgcgcctcagactcggggtgagggaggcgggcagcctctcgccagccttcccgtccttcagttcaacgacatctttggagtgtttttgttttctcttccaagggccgtcccgttgtgttaggaagggtgagtggctggttccagggtgggccggtgccagctccggggtggactgaacagcggcggctgtccctgtgcatcctttgattactctcatgctgcatttactgtttacatttgttttattgtacataggtttgtaaacattattgcctgagatatttgtatataacttgggctttgtagcttttatttattcagaacgcatacggcatgttaatgactctgatggtgtcctcctctgggcagctgtataggatcatcatgtggttacaaaaaatacttccctcaaaaaaattcttttaatgtggaaacaataaatttcacagaaaaaaaaaaaaaaaaaaaaaaaaaaaaaaaaaaaaaaaaaaaaaaaaaaaaaaaaaaaaaaaaaaaaaaaaaaaaaaaaaaaaaaaaaaaaaaaan

SEQ ID NO: 175 - DNA, 821 bp, Homo sapiens
  misc_feature (810)..(810): n equals a,t,g, or c
taaatatgacattatcaactattgcagtagtaaaattgcaatccccaatttctttacattcgaatgttacatgttgtagatttgatgataaaaaagacaccttcgatataacgtcacctttaaaatgacaacttgttaaatccaaatcagacaggtcgatatacccctgcgcatctttatccatcagaaaattgcargcgcattcaatttttttcatttctgtagaattttacacttatagtatcattactgattgagacttcacgaaacatatttattgcatgattttttcgttccgttgttttatatttgaaaaaatattgctgatataaataaagttatctctgtttaaacctggcaccccatttaaattacgtagtaaatcaagatctactatattatttccttgcaccacatcatgtttcatcaaagagttattgccgccagaatttaggatatgacttatcataaaacctctgcataacagaaataaaataacctggaaaagtagcctgaatgtccagacactaccggcgaaaggaaaagaatctctgataaggcattgagataatggatattcttagtgaagaagaagtgagttactataaaaaatcgctcatatcccaggaaggaagcataaaaaaaggtgcgccaggagacgcaccagttgttgcaaaatcagcactgtggggcgtaattaccccttgccttttacactgctgataaaggtggaacgggcagatgtcgatcccaggcgttcagcttcatcaagcagttttaacgccttatcaacatcacctttcgcgacangtttttgatcg

SEQ ID NO: 176 - DNA, 760 bp, Homo sapiens
  misc_feature (741)..(741): n equals a,t,g, or c
  misc_feature (759)..(759): n equals a,t,g, or c
ggcagagccccgctcagtcacccgcagcaggcgtgcagtttcccggctctccgcgcggccggggaaggtcagcgccgtaatggcgttcttggcgtcgggaccctacctgacccatcagcaaaaggtgttgcggctttataagcgggcgctacgccacctcgagtcgtggtgcgtccagagagacaaataccgatactttgcttgtttgatgagagcccggtttgaagaacataagaatgaaaaggatatggcgaaggccacccagctgctgaaggaggccgaggaagaattctggtaccgtcagcatccacagccatacatcttccctgactctcctgggggcacctcctatgagagatacgattgctacaaggtcccagaatggtgcttagatgactggcatccttctgagaaggcaatgtatcctgattactttgccaagagagaacagtggaagaaactgcggagggaaagctgggaacgagaggttaagcagctgcaggaggaaacgccacctggtggtcctttaactgaagctttgccccctgcccgaaaggaaggtgatttgcccccactgtggtggtatattgtgaccagaccccgggagcggcccatgtagaaagagagagacctcatctttcatgcttgcaagtgaaatatgttacagaacatgcacttgccctaataaaaaatcagtgaaatggwaaaaaaaaaaaaaaaaaacccgggggggggcccggnacccattcgccctaaagng

SEQ ID NO: 177 - DNA, 1948 bp, Homo sapiens
  misc_feature (1940)..(1941): n equals a,t,g, or c
tttttttttgctttagggctttttttttaatgtttcctcactgttttgacaatatcatgaaaaaaatcagtttagaatctggaactggcctggacgggattygagggcagctggcgggggctgcatagcccctgaggttcctcccccaccatgggacctaagctattggaaacaggagcaccaacagggcaccgaacctggaactaagttagtgtctagagtcaggcaagagaggagagtcaggcaagagaggaggggccgggccacagtcgccatggggacgcccctggctgtggttggttctgtgtctccccctccccycactggctacatggagacagggaggtgggtcaggctgttcccaggacagaaaaataaccggcagtcaacctcagggctcatacccgagcttctgctcaatcccctcggggacagttacaggactcagagagaaacgtraatttcagaaaaacaaatcatttttcacataagtgttccaaatattgcgtggggcatattaatgctagaaaattatcttttgtttacctgaaatttgcgtttaactcagcactctgttttggttttgctaaatctggccaaccctggcctcaaaagtcggtggggggaggcctgagaaaagaaagggaagtagtcagtactgagggtattgaggggagggagggaataactcagccaaaaagaaaaaaaaggctttccccccataggaatgatatattatttaaaaaaaaaatcgttctccaaaaatattctgcactggccttcctcagttgttaatagctatgggaggtgcgtagggaaaacacacacaccagacacccaccccatgtcattctaaataaagttgggaagcactaaagttgagctggtgtctttgccacggatgtccccagactccagtccgctaatcgccaccagactccagtccgctaatcgccactgtgaatttygaagaggaggcttagtataaaggttttctaaaaggattgattctcattctgaggcagacctattaacaccatcctgatattgctctataaggatttaaacacaataataaagaacaaacaagcccctagggactgagcgagtgccctagccctgttcctagtgtcatcctggaagggtcccttcttgcaattcacgaagcctggggggctttccttccattctccatcctgttctcttcccctggaaagggctgcgtttagtgcacatgctcgcagctggccccccgtccagctcagctccaaggggctccagatttccagggcaggagctggggtggggcagggaggggctgagaggcaagaccgtctccctcctgctgcagctgcttccccagcagccactgctgggcacagcagaaacgccagcagagaaaatgggagccgagagtccttagccctggagctgaggctgcctctgggctgacccgctggctgtacgtggccagaactggggttggcatctggcatccatttgaggccagggtggaggaaagggaggccaacagaggaaaacctattcctgctgtgacaacacagcccttgtcccacgcagcctaagtgcagggagcatgatgaagtcaggcagccagtcggcacccatgccagccccctacgtcctccgaagacccgagggccaggccagtgtccctcatctacaaggtccagggtccatggtctgaatcaagggtcctggctgcccctgcgccgtagggtcaaaggtcatagtggggtgggggcagggagaagatgcagccaagagctcccggtggccacccactgtccgcctcacacacggatttcatcctcctcctcctcatccatgaaggagaactccttgtctggctgtcttgagacagcagcccgggccctgtccggcccccggaaggcagggctgcgctcgtgccgaattcnngcagtac

SEQ ID NO: 178 - DNA, 1145 bp, Homo sapiens
  misc_feature (48)..(48): n equals a,t,g, or c
  misc_feature (1097)..(1098): n equals a,t,g, or c
gccaccaaattagttcaaggtgtcagaaagaacatcaaagggtgttcntgcaagggctggtgtgggacaacaagtgtgggtgcaggaagcaaaagtcagactgtggtgtggactgtagctgtgaccccacaaagtgtcggaaccgccagcaaggcaaggatagcttgggcactgttgaacagacccaggattccgaaggctccttcaaactggaggatcctaccgaggtgaccccaggattgagcttctttaayccygtctgtgccacccccaatagcaagatcctgamwgagatgtgygayrtggagcaggtgctgtcaaagaagactscyccagctccctccccttttgacctcccagagttgaaacatgtagcaacagaataccaagaaaacaaggctccagggaagaaaaagaaacgggctctggccagcaacaccagcttcttctctggctgctcccctatcgaagaagaggcccactgaagttggagtcatcatctctacccccagtctggcttgggagatgctttcaggttgcagccagaaggggttttttaaatgacttctctggatttcaggtttcttgctgttgaaaaaaggaacaaagcgttactgaaaagaaggtaacctttgttggatgtgggccttagcctccaggtccagactactactctatgttctccagaagggtgctaagtcacctactgaagagagaaccaactgactttcctattgactcatcaggaaccagtcctcagtctggtcaagttgtttcttatttgtgagcagttcaggctatctcctgatggggatgaggccaaggctttcttatcttttggttgtctctgcttaatggaggagcctggcctaggatggaggcctggcttagatctttcattccacctcaggaatgaggttgtgatctttcctgtcctgaccctctctgaattatgtttcaatagtactcttgattgtctgccatgttgttgaagcaaatgaattatttttaaatgttaagtaagtaaataaaccttagcccgtctactgtttgggaagatccttctgtgctagagggagaaataaaatttcaacctnngttaaaaaaaaaaaaaaaaaaaaaaaaaaaaaaaaagggcggccgct

SEQ ID NO: 179 - DNA, 350 bp, Homo sapiens
  misc_feature (52)..(52): n equals a,t,g, or c
  misc_feature (67)..(67): n equals a,t,g, or c
ttcttatagcttctatctctgcttacgtcacccatcattcttgcgtgttgtntgctttgcgcattanagccctttgcatgttaatcagttattttaaatttatgatctggtaattctaaaatgtctgccataactgagtctggttctgatgcttgttttcttttcagactgtttttttgtcttttagcatgccttgtaattttttgttgatagctagacatgatgtattgcataaataaacaagtaaactaaaaaaaaaaaaaaaaaaaaaaaaaaaaaaaaaaaaaaaaaaaaaaaaaaaaaaaaaaaaaaaaaaaaaaaaaaaaaaaaaaaaaaaaaaaaaaaaaaaa

SEQ ID NO: 180 - DNA, 1235 bp, Homo sapiens
  misc_feature (14)..(14): n equals a,t,g, or c
gtcgacccacgcgnccgcggatcggggaattctgctggcgctgcagctgcagaatggtcggcggtggcgggaagcgcaggcccggcggrgaggggccgcagtgtgaaaaaacaactgatgtgaagaaaagtaaattctgtgaagctgatgtctccagtgaccttcgaaaagaagtagaaaatcattataagctttctttacctgaagatttctatcacttctggaagttctgtgaagaacttgatcctgaaaagccatctgattcactttctgcaagccttggacttcaattagttggtccttatgatatccttgctggaaaacataaaacgaagaaaaaatcaacaggcctgaattttaaccttcactggaggttttactatgatcctcctgagttccagaccattattattggagataataaaactcagtaccacatggggtatttcagggattctcctgatgaatttcctgtatatgttggtataaatgaagcaaagaaaaattgtataattgttccaaatggagataatgtatttgctgcagtcaaattatttttgacgaaaaaacttaragaaataacggataaaaagaaaatcaatctcttgaaaaacatagatgaaaaactcacagaagcagccagagaattggggtactcgcttgaacagagaaccgtgaagatgaaacagagagataagaaagttgtgacaaagacctttcatggtgcaggcttggttgttccagtagataaaaatgatgttgggtaccgagagctccctgaaacagatgctgacctcaagagaatttgcaagacaatagttgaggctgcaagtgatgaggagagactaaaagcttttgctcccattcaggaaatgatgacttttgtgcagtttgctaatgatgaatgtgattatggcatggggcttgaattgggaatggatctcttttgctatggctcacattattttcataaagttgctggccagcttttacctcttgcatataatctgttgaagaggaatctgtttgcagaaattattgaggagcatctggcaaacagaagtcaagagaacatagaccaacttgctgcatgagtaaggtggctttgattggtgtacagtatttcaaaggactagtattaaacttgtgatttttgttttgtttttaaggaatacaaaaaataaacatttactaaaaacgttaaaaaaaaaaaaaaaaaaaaaaaaaaaaaaaaa

SEQ ID NO: 181 - DNA, 948 bp, Homo sapiens
catgggcggagactgcaggcttctgggcctgagagggctggagctggctttccggagccgggggcggggcgcgggcgggcctcagctgtggttactggtgacaggtcgcctgactgggctcctccccgggcccgccccgacaggtttgtcttgtgaccgcgggcggccgctgcttctttcccgagcttggaacttcgttatccgcgatgcgtttcctggcagctacattcctgctcctggcgctcagcaccgctgcccaggccgaaccggtgcagttcaaggactgcggttctgtggatggagttataaaggaagtgaatgtgagcccatgccccacccaaccctgccagctgagcaaaggacagtcttacagcgtcaatgtcaccttcaccagcaatattcagtctaaaagcagcaaggccgtggtgcatggcatcctgatgggcgtcccagttccctttcccattcctgagcctgatggttgtaagagtggaattaactgccctatccaaaaagacaagacctatagctacctgaataaactaccagtgaaaagcgaatatccctctataaaactggtggtggagtggcaacttcaggatgacaaaaaccaaagtctcttctgctgggaaatcccagtacagatcgtttctcatctctaagtgcctcattgagttcggtgcatctggccaatgagtctgctgagactcttgacagcacctccagctctgctgcttcaacaacagtgacttgctctccaatggtatccagtgattcgttgaagaggaggtgctctgtagcagaaactgagctccgggtggctggttctcagtggttgtctcatgtctctttttctgtcttaggtggtttcattaaatgcagcacttggttagcaaaaaaaaaaaaaaaaaaaaaaaaaaaaaaaaaaaaaaaagggcggccgctcgc

SEQ ID NO: 182 - DNA, 1132 bp, Homo sapiens
  misc_feature (777)..(777): n equals a,t,g, or c
  misc_feature (1033)..(1033): n equals a,t,g, or c
  misc_feature (1079)..(1079): n equals a,t,g, or c
  misc_feature (1105)..(1105): n equals a,t,g, or c
tgcgtttcgcgctgaggctgctggaggcgcgggccgggcggtgcgcactgcgggcgcatccctgccccggcgccgtccgtgcccgcgggacctgacagccgggtcagagggcgaagctgtgctcaggcccgggctggacgcagagccagagctgtccccagaggagcagagggtcctggaaaggaagctgaaaaaggaacggaagaaagaggagaggcagcgtctgcgggaggcaggccttgtggcccagcacccgcctgccaggcgctcgggggccgaactggccctggactacctctgcagatgggcccaaaagcacaagaactggaggtttcagaagacgaggcagacgtggctcctgctgcacatgtatgacagtgacaaggttcccgatgagcacttctccaccctgctggcctacctggaggggctgcagggccgggcccgagagctgacggtgcagaaggcggaagccctgatgcgggagctggatgaggagggctctgatccccccctgccggggagggcccagcgcatccgacaggtgctgcagctgctctcctagtgggttcagcgcggggcggggccgctgcccagtgcagggctgcctcagaccacacagggtgcagctcctccggcggtgggggccgggttcaccagcagggcagcggctgagcaagggctttcagctcctccggtggtgggggccgggatcaccagcaccagagcctcgcaagggccccttccctcctccagaccctccttggccggtgacgnctgtgacagtgatggcaggttcagtgccttcagcgcagagcgtggatgctctggaatcacccggacccctggccttggagggaccctccagccccaggaatctgctttggagggaaatgtctatttttctaccgggaatattttagagattggggcatgctggctcctcccgccagctgcaaacctgcaccttccgcctgattcccgatccccctgcgtgggccgmattcctggtcccctgcctgcgtccatcganggggcctgtggcctgttttcctttgaccccamagattsgtatgganctgtgacttgagcgaagatgaaacgntggtgttaaaacgcagcaaaaaaaaaa

SEQ ID NO: 183 - DNA, 884 bp, Homo sapiens
  misc_feature (876)..(876): n equals a,t,g, or c
  misc_feature (882)..(883): n equals a,t,g, or c
gcggacggtgggcggacggtggggtaccggaggagaaagatggcggctaccttactagctgctcggggagccgggccagcaccggcttgggggccggaggcrttcactccagactgggaaagccgagaagtttccactgggaccactatcatggccgtgcagtttgacgggggcgtggttctgggggcggactccagaacaaccactgggtcctacatcgccaatcgagtgactgacaagctgacacctattcacgaccgcattttctgctgtcgctcaggctcagctgctgatacccaggcagtagctgatgctgtcacctaccagctcggtttccacagcattgaactgaatgagcctccactggtccacacagcagccagcctctttaaggagatgtgttaccgataccgggaagacctgatggcgggaatcatcatcgcaggctgggaccctcaagaaggagggcaggtgtactcagtgcctatggggggtatgatggtaaggcagtcctttgccattggaggctccgggagctcctacatctatggctatgttgatgctacctaccgggaaggcatgaccaaggaagagtgtctgcaattcactgccaatgctctcgctttggccatggagcgggatggctccagtggaggagtgatccgcctggcagccattgcagagtcaggggtagagcggcaagtacttttgggagaccagatacccaaattcgccgttgccactttaccacccgcctgaatcctgggattctagtatgcaataagagatgccctgtactgatgcaaaatttaataaagtttgtcacagagaaaaaaaaaaaaaaaaaaaaaaaaaaaaaaaaaaaaaaaaaaaaangggggnnc

SEQ ID NO: 184 - DNA, 2803 bp, Homo sapiens
  misc_feature (2798)..(2798): n equals a,t,g, or c
  misc_feature (2800)..(2802): n equals a,t,g, or c
agcccccgcgggctttgattggccgatagagttagcctgggggcgggaaaagagcgacctcggggaagcgtgtggtgcggggaggtcgcccccgggcggcgaagcggccattatgcaggccttgcattgaaaggctctagttacagtggacttyttgarcgacrtcatattcacaccaaaaatgtagaacatattatagatagtttacggaatgagggaattgaggttcgtctagtaaagaggagagaatatgatgaagagactgttcgatgggcagatgctgtcatagctgcaggaggtgatggcacaatgctgctggcacgaggtaaagtcttggacagacttaaaccagttataggggtaaacactgatccagaacggtctgagggtcatttatgcctgcccgttcgatatacacattcctttccagaagccttacagaagttctatcgtggtgagttcaggtggttgtggaggcagagaatcaggttataccttgaagggactggcataaaccctgtacctgtggaccttcacgagcagcagctaagcttgaatcagcacaatagagcccttaacattgaaagagctcatgatgaaaggtctgaggcttcaggaccccaacttctgccagtgagagcactaaatgaagtcttcattggggagagtctgtcatccagggcttcctactatgagatttcagttgatgatggtccatgggaaaaacagaagagttcagggctcaatttgtgtactggaacaggatcaaaggcctggtcattcaatattaacagggttgcaactcaggctgtagaagatgttttaaatattgcaaaacgacaaggaaatttgagtcttccattgaacagagaattggtagagaaagtaacaaatgaatataatgaatcactgctctacagtccggaagaaccaaaaatacttttcagtattcgagaaccaatagcaaatagagttttctcaagcagtcgtcagcgttgtttctcctcaaaggtttgtgttcgttctcgttgttgggatgcctgtatggttgtggatggaggaacttcttttgagtttaatgatggtgcaattgcttcgatgatgatcaataaagaagatgagcttcgaactgtgcttcttgaacagtgaaggatttcctcatgacaaattttgattactggcgagaatatttttacttcagaaacagactaccagtcgtaaagtgacattttttggttattgttgagactgcttgcccgtgggctcagaagtgagatttgcattattcttctgttggattctgatagaaaaaaagacattcactgtataagaaaatggatggactgaaccaattagaattgataccagtgaaatttttatattgcttacaattggtaaccaagagtgctgatacctttttaaatttagaggggcaggcttaaataaaggactaaatatttaggatttgaaacttaactgtataagtgtgttttccttccctttcctcctaattgtgggattgtcagaactgaacacatatcatttgattagtgcatattttttatagtacctgaaaaccaagattttgaaaaaattttcaagacagagaattttgataaatcctgacattgacctaattgacataggtaaatatgtttgtatatgtgctaataattttctaatttcggaacacgatgatgttatgactattgatttaaaaatttcaaataataatttttgaaattatagatgaatgctttcatttgagtttcattctgtaattcagcagttctgggtgaaatacagatagcaaaacaaatcatgatgctgttacaaatgtattagttatccaataagtgttttaagtcaatttttttaaaatgatatgagtcttacaggtttcttccatctttaaaatgctcaaacatggattcagggactaaaaggatgaactgattagacattttctattaggagtttggtaaaatattgtaaaaatatcttcacctgtgttaggagtattatcagaaagaatggattctttaataaatatgtaaaacacagtagttttggaattgccttccttagtattgtggttttcacctagcttatattccaagatttacagaatagcttttaggataagatgttaggactttttttttttccccatgagaattcctttatttttggaggaaattattatctaattattgatctacttataagtaatcctagaatttttgccaaaagatcctgtcgttgcataatcaaacagttggtattctcgtgccgttgttcaaagtcatgtgtttctttcatttggtgctgaaaatttctgttcaatcattgacaaatatttattgaacacccactctgtgccatgtwaaactatgtcaggtgctggatatgttgatgaatgaaacagactctatccttatacaatttgagtcttgtgggctcagaagtaaattctgtgaaagctggacggatagtcgaattgagtgctcttagttttgccaatatttaacatgttgttcttatcaattttttaaaataaatgttaatgtacaaagttaatctaggttttgatgtatatccagagaatcaattttwcttaaagtatctgcgtagacattcatagcaaagaatttatgacatatcagatagaaatacattaaaatgtagtgttttcccagagattgatctggcttttttttttgatatacataagataccactttataaagaagctccatactatagaacctcccctaacaggcttaaaatacctcctntnnnt

SEQ ID NO: 185 - DNA, 1568 bp, Homo sapiens
  misc_feature (1520)..(1520): n equals a,t,g, or c
  misc_feature (1533)..(1533): n equals a,t,g, or c
  misc_feature (1547)..(1547): n equals a,t,g, or c
ttgcggccgccagggaggcgggrgcccggacatgctggccgccgacctccggtgcagcctcttcgcctcggccctgcagagctacaagcgcgactcggtgctgcggcccttccccgcgtcctacgcccgcggcgactgtaaggactttgaagccctgcttgcagatgccagcaagttacctaacctgaaagaacttctccagtcctccggagacaaccacaaacgggcctgggacctggtgagctggattttatcctcaaaggtcctgacaatccacagtgcagggaaggcagagtttgaaaagatccaaaagctgactggggctcctcacacgcctgttcctgcaccggacttcctgtttgaaattgagtactttgacccagccaacgccaaattttatgagaccaaaggagaacgagacctaatctatgcatttcatggtagccgcctagaaaacttccattccattatccacaatggcctgcactgccatctgaacaagacatccttgttcggagaggggacctacctcaccagtgacttgagcctggccctcatatacagcccccatggccatgggtggcagcacagactcctcggccccatccttagctgtgtggccgtgtgtgaggtcattgaccatccggacgtcaagtgccaaaccaagaagaaggattccaaggagatagatcgcagacgagcgagaatcaaacatagtgaagggggagacatccctcccaagtacttcgtggtcaccaataaccagctgctgcgagtgaagtacctcctggtatattcacagaagccacccaagagggcttcgagccagctctcctggttttccagccattggtttaccgtcatgatatccctgtatctgctgctgctgctcatagtgagtgtcatcaactcctctgctttccaacacttttggaatcgtgcgaaaagataatctttctgggcctggtgtgggggctacctcaactatgtgccttatggtaacttgttctgtacctcctatgcctcatgtccagccaggttgagcctaggggccagttgggggaccacaggacaattttcatatggcctaaatgtatccattgcctttgatgatgttcccagccatactccagtcaacggggactactagtccctcactcttaggttttaggggagtccttccatctgctccttcttaaactgtcctagggagttggcttttcagccagggccaaaggaaaaagccctgctgcatttaaaaacaaagtgtccaagctgtcagtggtgtgtttacaatctctcctggcagaggttggccctttctctaatgccttctggaaggcgggaaaatgtggggaactataaatcactaggcggttgccttgttttgacttgagacacccaagaggaacagtcatgtttctcataaaaatcagtgggrtcatttttgaattccmtcagcctttgtatgtgaagtgcaaaacattttaacagttttctcaaatcaacaaacagccttntcctataagcttnacttgccccccttnccaaaaaaccatggatgagaa

SEQ ID NO: 186 - DNA, 1024 bp, Homo sapiens
ggttaagttttatggaagcacaagtctatggcagtagttgctactttggcctttttctttcagtgaaagatgtcatgtatatctgcccatttatgggagcagtgagtggaaccctgacagtgacggactttaagctgtacttcaaaaatgtcgagagggacccgcattttatccttgatgttccccttggagtgatcagcagagtggagaagattggagcacagagccatggagacaattcctgtggtatagagatagtgtgcaaggatatgaggaacytgcggcttgcttataaacaggaagaacagagtaaactagggatatttgaaaacctcaacaaacatgcatttcctctttctaacggacaggcactatttgcattcagctatmaagaaaaatttccaattaatggctggaaagtttatgatccagtatctgaatataagagacagggcttgccaaatgagagttggaaaatatcyaaaataaacagtaattatgagttctgtgacacctaccctgccatcattgttgtgccaactagtgtaaaagatgatgacctttcaaaagtggcagcttttcgagcaaaaggcagagtccctgtgttgtcatggattcatccggaaagtcaarcaacgattacccgttgcagccagccacttgtgggtcccaatgataagcgctgcaaagaggatgaaaaayacttgcaaacaataatggatgtaacgcacagtcacacaagcttatcatctttgatgctcgacmaaacagtgtcgctgataccaacaagctttggtatcaggatacagctagcctcatggaatgaactaggaagtatgccctcctcttctagtttttggatgacccatcatctcttacctcacctacagcaggaaccttgaaattggacttctgcctcacaccctgcaatctcatctccacattatgaccagagtgatcttcttttttaaaaaaaacttatcgcccctatttcaattgataaatgaattgaaaataaaaaaaa

SEQ ID NO: 187 - DNA, 1592 bp, Homo sapiens
tcgacccacgcgtccgcccacgcgtccgcactttcatctaatttggggtatcactgagctgaagacaaagagaagggggagaaaacctagcagaccaccatgtgctatgggaagtgtgcacgatgcatcggacattctctggtggggctcgccctcctgtgcatcgcggctaatattttgctttactttcccaatggggaaacaaagtatgcctccgaaaaccacctcagccgcttcgtgtggttcttttctggcatcgtaggaggtggcctgctgatgctcctgccagcatttgtcttcattgggctggaacaggatgactgctgtggctgctgtggccatgaaaactgtggcaaacgatgtgcgatgctttcttctgtattggctgctctcattggaattgcaggatctggctactgtgtcattgtggcagcccttggcttagcagaaggaccactatgtcttgattccctcggccagtggaactacacctttgccagcaccgagggccagtaccttctggatacctccacatggtccgagtgcactgaacccaagcacattgtggaatggaatgtatctctgttttctatcctcttggctcttggtggaattgaattcatcttgtgtcttattcaagtaataaatggagtgcttggaggcatatgtggcttttgctgctctcaccaacagcaatatgactgctaaaagaaccaacccaggacagagccacaatcttcctctatttcattgtaatttatatatttcacttgtattcatttgtaaaactttgtattagtgtaacatactccccacagtctacttttacaaacgcctgtaaagactggcatcttcacaggatgtcagtgtttaaatttagtaaacttcttttttgtttgtttatttgtttttgtttttttttaaggaatgaggaaacaaaccaccctctgggggtagtttacagactgagtgacagtactcagtatatctgagataaactctataatgttttggataaaaataacattccaatcactattgtatatatgtgcatgtattttttaaattaaagatgtctagttgctttttataagaccaagaaggagaaaatccgacaacctggaaagatttttgttttcactgcttgtatgatgtttcccattcatacacctataaatctctaacaagaggccctttgaactgccttgtgttctgtgagaaacaaatatttacttagagtggaaggactgattgagaatgttccaatccaaatgaatgcatcacaacttacaatgctgctcattgttgtgagtactatgagattcaaatttttctaacatatggaaagccttttgtcctccaaagatgagtactagggatcatgtgtttaaaaaaagaaaggctacgatgactgggcaagaagaaagatgggaaactgaataaagcagttgatcagcatcattggaacatggggacgagtgacggcaggaggaccacgaggaaataccctcaaaactaacttgtttacaacaaaataaagtattcactaccaaaaaaaaaaaaaaaaaaaaaaaaaaaagtcgtatcgatgt

SEQ ID NO: 188 - DNA, 3642 bp, Homo sapiens
  misc_feature (298)..(298): n equals a,t,g, or c
  misc_feature (582)..(582): n equals a,t,g, or c
  misc_feature (1855)..(1856): n equals a,t,g, or c
  misc_feature (2057)..(2057): n equals a,t,g, or c
  misc_feature (2833)..(2833): n equals a,t,g, or c
ccccaagccagcccttcaaccagagctccctacccaggaggaccccacccctgagattctgtctgagagtgtaggggaaaagcaagagaatggggcagtggtgcccctgcaggctggtgatggggaagagggcccagcccctgagcctcactcaccaccctcaaaaaaatcccccccagccaatggggcccccccccgagtgctgcagcagytggttgaggaggwtcgawtgagaagggcacacagtgggcatccaggwtytccccgaggtagcctgagccgccaccccagctcccanctggcaggtcctggggtggargggggtgaagcacccagaaacctcgggactacatcatccttgcatcctgtcctgcttctgcccmatgtggcctgtcaacatcgtggccttcgcttatgctgtcatgtcccggaacagcctgcagcagggggacgtggacggggcccagcgtctggcgggktagccaagctcttaagcatcgtggcgctggtggggggagtcctcatcatcatcgcctcctgcgtcatcaacttaggcgtgtataagtgaggggctctgcgcantcccaagacttttcttcctgttgggagctgccttgggccatccctcccctgggggagcccaactgatggccctggccccacccctaaggaccaagggagcctgagcggccttgtttacagcttctgtcctgctcctgcatcttgccaggctcctctgccaactgtaggcctgcctcatccctgcactggttccaacctccctgcactaatgcctgcatcccctccggcctcttggccccctatccctgcacttctggaaacctccctgcactctggaaacctccctgaacacctccccaactctgcgctctcagcctccctgcatctctcctggcctccctgcacttcttccagccccccaaattctctggacctccaccctggccgcctcctcccaactttcattgtcttggcatctctcaaccctcagtcctctcttccttcccttctttatcatctcccctttcctctccacgtcccgcccccttcctcttcctgcctcctcatctcccttaagcatcctcttctccaacctcccgtcaccgtttactctgcaaaactgacagcacttagacgaggcttgggggcagggagcagtgttgggagagggctccccaaccccaggctcggactgttctctgctgggaccacccagggtcggacacccaagggtgcctggcaggtcgcagagttggcaagccgggcctcgtatggggactcgggtgagggtggcgagtactggttccgaacgcacgcaggggagaagggagggacgcggcgctgacccttccaggtcagctggagttgacccgcccacctgggcttttcaaccccagtccgcgagtttctttcttgaaggtgtgggggctagattcattcacgtgcttcgtaatgaaataatccaaaaaataggaccaaagcgcccactggcaggagcgagggcggggcgccgcgctctataattattttctaagatgatgggggaggtttgttgcacgcgacagcccgctgaggaggcggggaccgagctacaacgcggttcggatttggcgggggtttttttccttaaaaaaaaaaaaaaaaaaaaaaaaaaagtctgggggaagaaaaaaactaaaattcttaaaaaaaaaaaaaaaaggctattatcaaactgatttctccctttttgtatgccggatgctgcatgagtctgaaacaccaataaacggagactgcatgagactcgcctccaatctcggttggttcctgcgttcgtcccgccggcccggcnntgctgcctttctggcagaaccttactgggtgrtatacgcatgcgacttcccggtggccatctttactgtgggctgaagcctgtgcgcttactcgcgcatgtgcaagccttccctcgctttcctcttccaagtagccttgcctagagcggacctcccgcgccatttctgtgcgcctgcgtacgtgaccctgcgcasctgggnaggcgggtcttagctccaggtgcgtacggcatctgacttgacgtggcccacaactgaaaggtctggggagaaggcgccgtgtccgggtgtggagaggggcgtcgtggaagcgagaagagtggcccgtccctctcctccccctttccctctttcggaaagtggtttctgcggggcccgggagcctcggagtaccgaacctcgatctccggggcggggtccttggtggggactgagcgccccctcccggggacgggcggtctggccgcggagtcccctgcgggagcgtgattggctggaaacggtcccgaacccccaggggagcccgatccctgggggaccctggcttcggactccagtatctgtcgtcgcarggtccctgccctagtggcctatgtcccttgctcggggccatggagacactgcggccagtacggcggcgcctctgtctgaagaaggggaagtgacctccggcctccaggctctggccgtggaggataccggaggcccctctgcctcggccggtaaggccgaggacgagggggaaggaggccgagaggagaccgagcgtgaggggtccgggggcgaggaggcgcagggagaagtccccagcgctgggggagaagagcctgccgaggaggactccgaggactggtgcgtgccctgcagcgacgaggaggtggagctgcctgcggatgggcagccctggatgcccccgccctccgaaatccagcggctctatgaactgctggctgcccacggtactctggagctgcaanccgagatcctgccccgccggcctcccacgccggaggccmagagcgaagaggagagatccgatgaggagccggaggccaaagaagaggaagaggaaaaaccacacatgcccacggaatttgattttgatgatgagccagtgacaccaaaggactccctgattgaccggagacgcaccccaggaagctcagcccggagccagaaacgggaggcccgcctggacaaggtgctgtcggacatgaagagacacaagaagctggaggagcagatccttcgtaccgggagggacctcttcagcctggactcggaggaccccagccccgccagccccccactccgatcctccgggagtagtctcttccctcggcagcggaaatactgattcccactgctcctgcctctagggtgcagtgtccgtacctgctggagcctgggccctccttccccagcccagacattgagaaacttgggaagaagagagaaacctcaagctcccaaacagcacgttgcgggaaagaggaagagagagtgtgagtgtgtgtgtgtgttttttctattgaacacctgtagagtgtgtgtgtgtgttttctattgaacacctatagagagagtgtgtgtgttttctattgaacatctatatagagagagtgtgtgagtgtgtgttttctattgaacacctattcagagacctggactgaattttctgagtctgaaataaaagatgcagagctatcatctcttaaaaggaggggctgtagctgtagctcaacagttcaggccccacttgaagggagaggcagaaaagaactca

SEQ ID NO: 189 - DNA, 1407 bp, Homo sapiens
ccggattcccggtsgrcccacgcgtccggaactgaggcgactgtggggacatcagtgatcggtgaagtaccatgcaagcatttcttaaaggtacatccatcagtactaaacccccgctgaccaaggatcgaggagtagctgccagtgcgggaagtagcggagagaacaagaaagccaaacccgttccctgggtggaaaaatatcgcccaaaatgtgtggatgaagttgctttccaggaagaagtggttgcagtgctgaaaaaatctttagaaggagcagatcttcctaatctcttgttttacggaccacctggaactggaaaaacatccactattttggcagcagctagagaactctttgggcctgaacttttccgattaagagttcttgagttaaatgcatctgatgaacgtggaatacaagtagttcgagagaaagtgaaaaattttgctcaattaactgtgtcaggaagtcgctcagatgggaagccgtgtccgccttttaagattgtgattctggatgaagcagattctatgacctcagctgctcaggcagctttaagacgtaccatggagaaggagtcgaaaaccacccgattctgtcttatctgtaactatgtcagtcgaataattgaacccctgacctctagatgttcaaaattccgcttcaagcctctgtcagataaaaattcaacagcagcgattactagacattgccaagaaggaaaatgtcaaaattagtgatgagggaatagcttatcttgttaaagtgtcagaaggagacttaagaaaagccattacatttcttcaaagcgctactcgattaacaggtggaaaggagatcacagagaaagtgattacagacattgccggggtaataccagctgagaaaattgatggagtatttgctgcctgtcagagtggctcttttgacaaactagaagctgtggtcaaggtaaagtcagcttactaactttggggaaaggaatattaagtcatcataccaaaagktttttttattataggatttaatagatgagggtcatgcagcaactcarctcgtcaatcaactccatgatgtggttgtagaaaataacttatctgataaacagaagtctattatcacagaaaaacttgccgtaagtaggtactttgcacatgtcaatggaacatttaactacctgaaggatgctaatttcttaaatttttctcgtaggaagttgacaaatgcctagcagatggtgctgatgaacatttgcaactcatcagcctttgtgcaactgtgatgcagcagttatctcagaattgttaacgtgaattatctcagaattgttaacgtgaatatatctggatggggggttttgtaaataatgaagttgtaataaaaataaaatgaccaaaagcaaaa

SEQ ID NO: 190 - DNA, 423 bp, Homo sapiens
  misc_feature (329)..(329): n equals a,t,g, or c
  misc_feature (382)..(382): n equals a,t,g, or c
  misc_feature (406)..(406): n equals a,t,g, or c
gcccggggccagcacccccttaggggacggtggcgacggggtctgaactctgctcccccacccgcagcgcggatcaagaagatcatgcagacggacgaagagattgggaaggtggcggcggcggtgcctgtcatcatctcccgggcgctcgagctcttcctagagtcgctgttgaagaaggcctgccaggtgacccagtcgcggaacgaaagtaccatgaccacatcccacctgaagcagtgcatccgagctggagcagcagttttgattctttgaaggacctggtggcattgttcccgacatgcagggggacggggaagacaaccacntggatggggacaaggcgcccgcagggccgggaagccaggcagcggcggccggnaagaacggttgggtttgggaacgnaaaagcaaggacaagaa

SEQ ID NO: 191 - DNA, 524 bp, Homo sapiens
  misc_feature (498)..(498): n equals a,t,g, or c
  misc_feature (509)..(509): n equals a,t,g, or c
  misc_feature (514)..(514): n equals a,t,g, or c
gcgcggccgggccggggcagccgggaagcgggtggggtggtgtgttacccagtagctcctgggacatcgctcgggtacgctccacgccgtcgcagccactgctgtggtcgccggtcggccgaggggccgcgatactggttgcccgcggtgtaagcagaattcgacgtgtatcgctgccgtcaagatggaggggcctttgtccgtgttcggtgaccgcagcactggggaaacgatccgytcccaaaacgttatggctgcagcttcgattgccaatattgtaaaaagttctcttggtccagttggcttggataaaatgttggtggatgatattggtgatgtaaccattactaacgatggtgcaaccatcctgaagttactggaggtagaacatcctgcagctaaagttctttgtgagctggctgatctgcaagacaaagaagttggagatggactacttcagtggttatattcagcagactctaaaaatcagatgatagnaacagaatcancccanagtatagtgc

SEQ ID NO: 192 - DNA, 1297 bp, Homo sapiens
  misc_feature (8)..(8): n equals a,t,g, or c
acccgggngcatacacctcccaggggtctgtgccgcgcctccagggaacgggtcttgtggctttktctcccgcgaagaggagatggcggagtcgttgaggtctccgcgccgctccctgtacaaactggtgggctcgccgccttggaaagaggctttccggcagagatgcctggagagaatgagaaacagccgggacaggctcctaaacaggtaccgccagctggaagcagtgggccagggaattctcagaacagctttctagttcaagaggtgatggaagaagagtggaatgctttgcagtcagtggagaattgtccagaagacttggctcagytggaggagctgatagacatggctgtgctggaggaaattcaacaggagctgatcaascaaggtacaacctgagaatcacaagcggtgtggtggtgtgtcagtgtggcctgtccatcccatctcattcttctgagttgacagagcagaagcttcgtgcctgtttagagggtagtataaatgagcacagtgcacattgtccccacacacctgaattttcagtcactggaggaacagaagaaaagtccagtcttctcatgagctgtctggcctgtgatacttgggctgtgatcctctagagccagcttggactcacatcattctatggggttgaagacaactcattccctctgaggagccttgtacatacaagccttttatttataacttattttgtattgaaacttttaaacaatactgaagaaaaaaaaacttttccgacatctgttcttggtcttttgtgacgcaggttgaagggggaggaatagaaaaagacaaactgccttggaggagataaaccaattttatgtctatcatgttatacaaaaatctagaaataatagatttgtacagaaaaaaatgataataaatgagaacacaaaacatataatttaaatttggtattttttcccccatgatattaggatgataatcatttcaaagcacatgtctagcttcagagtaggatttgttcactggccaaagcctgccatgaaactatggctttcagcatctgtctgctctactggctcttgacaaaactcttgaggtcttcaagaaaagtaatgtactcctggtgctccagggctgtgctgagctccaccagctcatctgcaaaagtgttgtccacccctcggtcggcaaggaaatccattaggtggtcatataaggcccagtccaaggaacaatatttactagttaaaaaaaaatctgtaatgaacattaaaatgcttttttctccccttga

SEQ ID NO: 193 - DNA, 1047 bp, Homo sapiens
  misc_feature (1024)..(1024): n equals a,t,g, or c
  misc_feature (1044)..(1044): n equals a,t,g, or c
ggcgagctgtggagtgctgccaggaggctgggattccaggccagggacggggacagccctgctggtggagatgccaggcagaggggacgcacacctgcccatgctcctgccttgcaagagggcgtctgcctgggatcagagcctagagcatgtgggaggagagttgtggggtcccggcatgggcagggtggcaggtgggtcccgtgtgcttgggactgggcacgaggaggccttgtaactggtgctggatcasctgggtcaggggccgcacaccaatgacctgggggtgagggtgcccctgggtgggagctggtggtgctgaggtggccgaggacttgtccactcccaagggaaggtgctggtgggagggggtgccacctccgcagccaccaccctcgatgctgacctgggttgcactggcatctcattgggcgtggggactccgagagtccaaaattgggtggagacatttggggacacagctgcctgaattcctcatggccaagggggtgggcaagggctgcagggaggaakagtgtccgctgtcctggccagtgcaccaggaacggttttctaaccctggcaggaaggtgtgaagcattcaggatgtgggggccacacagttcccagtgtgcacctaggggtgaccaggaggaggagaggcgccagggcctcccttacccccgccccaggggcactccgtagkcaggatccctgcagatcctagctaggaaacgccagtrwacggcagcgcagggaacggggcggggccgctggcttcgccaccgccacggttgtgggggctgggggtggccctcgggactggtgtggagcctgagcctgacccactgacttggctgagtggggagactggagggtcgcatccggagctgggcccgggracgcccgctggtgggaagggtgcgcgacrttcggargccgcggctgaccctgctccggcgccgccagtaacgggcattcagcccggacagcatcatcctgtaacgggcagagcatccggcangtgcccacctggaacctggnctt

SEQ ID NO: 194 - DNA, 900 bp, Homo sapiens
gggaccgcgcacccagcccacttgtgcgcgagatttaaaagttggcggctcgccgggcgctcagtcctgtgtccgggccccgaggcacagccagggcaccaggtggagcaccagctacgcgtggcgcagcgcagcktccctagcaccgagcctcccgcagccgccgagatgctgcgaacagagagctgccgccccaggtcgcccgccggacaggtggccgcggcgtccccgctcctgctgctgctgctgctgctcgcctggtgcgcgggcgcctgccgaggtgctccaatattacctcaaggattacagcctgaacaacagctacagttgtggaatgagatagatgatacttgttcgtcttttctgtccattgattctcagcctcaggcatccaaygcactggaggagctttgctttatgattatgggaatgctaccaaagcctcaggaacaagatgaaaaagataatactaaaaggttcttatttcattattcgaagacacagaagttgggcaagtcaaatgttgtgtcgtcagttgtgcatccgttgctgcagctcgttcctcacctgcatgagagaagaatgaagagattcagagtggacgaagaattccaaagtccctttgcaagtcaaagtcgaggatattttttattcaggccacggaatggaagaaggtcagcagggttcatttaaaatggatgccagctaattttccacagagcaatgctatggaatacaaaatgtactgacattttgttttcttctgaaaaaaatccttgctaaatgtactctgttgaaaatccctgtgttgtcaatgttctcagttgtaacaatgttgtaaatgttcaatttgttgaaaattaaaaaatctaaaaataaaaaaaaaaaaaaaaaaaaaaa

SEQ ID NO: 195 - DNA, 670 bp, Homo sapiens
  misc_feature (662)..(662): n equals a,t,g, or c
tggtacccgggaattcggccattatggccggggtgggcagccagggtcggtgaaggatcccaaratggctgggcgaaaacttgctctaaaaaccattgactgggtagcttttgcagagatcataccccagaaccaaaaggccattgctagttccctgaaatcctggaatgagaccctcacctccaggttggctgctttacctgagaatccaccagctatcgactgggcttactacaaggccaatgtggccaaggctggcttggtggatgactttgagaagaagtttaatgcgctgaaggttcccgtgccagaggataaatatactgcccaggtggatgccgaagaaaaagaagatgtgaaatcttgtgctgagtgggtgtctctctcaaaggccaggattgtagaatatgagaaagagatggagaagatgaagaacttaattccatttgatcagatgaccattgaggacttgaatgaagctttcccagaaaccaaattagacaagaaaaagtatccctattggcctcaccaaccaattgagaatttataaaattgagtccaggaggaagctctggcccttgtattacacattctggacattaaaaataataattatacaaaaaaaaaaaaaaaaaaaaaaaaaaaaaaaaaaaaaaaaaaanaaaaaaaa

SEQ ID NO: 196 - DNA, 1296 bp, Homo sapiens
  misc_feature (44)..(44): n equals a,t,g, or c
  misc_feature (70)..(70): n equals a,t,g, or c
  misc_feature (1082)..(1082): n equals a,t,g, or c
gagaagagatgagcacaggaggaggcctgatcaccccgattttnatgcatctacactctatgtgcctgangatttcctcaattcttgtactcctgggatgaggaagtggtggcagattaagtctcagaactttgatcttgtcatctgttacaaggtggggaaattttatgagctgtaccacatggatgctcttattggagtcagtgaactggggctggtattcatgaaaggcmactgggcccattctggctttcctgaaattgcatttggccgttattcagattccctggtgcagaagggctataaagtagcacgagtggaacagactgagactccagaaatgatggaggcacgatgtagaaagatggcacatatatccaagtatgatagagggtgaggagggagatctgtaggatcattaccaagggtacacagacttacagtgtgctggaaggtgatccctctgagaactacagtaagtatctycttagcctcaaagaaaaagaggaagattcttctggccatactcgtgcatatggtgtgtgctttgttgatacttcactgggaaagtttttcataggtcagttttcagatgatcgccattgttcgagatttaggactctagtggcacactatcccccagtacaagttttatttgaaaaaggaaatctctcaaaggaaactaaaacaattctaaagagttcattgtcctgttctcttcaggaaggtctgatacccggctcccagttttgggatgcatccaaaactttgagaactctccttgaggaagaatattttagggaaaagctaagtgatggcattggggtgatgttaccccaggtgcttaaaggtatgacttcagagtctgattccattgggttgacaccaggagagaaaagtgaattggccctctctgctctaggtggttgtgtcttctacctcaaaaaatgccttattgatcaggagcttttatcaatggctaattttgaagaatatattcccttggattctgacacagtcagcactacaagatctggtgctatcttcaccaaagcctatcaacgaatggtgctagatgcagngacattaaacaacttggagatttttctgaatggaacaaatggttctactgaaggaaccctactagagagggttgatacttgccatactccttttggtaagcggctcctaaagcaatggctttgtgccccactctgtaaccattatgctattaatgatcgtctagatgccatagaagacctcatggttgtgcctgaacatatctccgagttgtag

SEQ ID NO: 197 - DNA, 1145 bp, Homo sapiens
  misc_feature (1)..(2): n equals a,t,g, or c
nntttttttttaactggccgagtcaatattttattaaaaamcacacaaacacatgcacactggtamcaaaggcagagatggagaggagacacaagatctccttggggacaggctgaccacatagtgtttctacaggcacgcctcacttcaggaaagagggtatctctaagaccggactgacaagctagataaattaggacagggctttgtttcttaaggcacttcactcccctgaggagtgaagtagaagagatttaggcgggagtattcacaaaccccttcagctgtgctaagtggggttcatcagtacctgaggtggttctagaagcaggaaggcagaaaacatttccctggaggctgctttcctttcccagaatgggagggatgttctccccggaaggctggaggaagagtttccggctggctcaggagctcagggagctggcttcctgggagagcaggaagagggtgcaggcctttcctggtgcccaccagcctgacaggactttggcacaggaacacaggtccagaggcctcgcctggagtacacgtcctcctctctgcaaagctcctgaggggcctaggggttgtggcctcatcagacggctgcatctgtggactgggttacacacgagatcttataggacagccatatgcttgccatgcagaggaaggtggccatgaaaccaaagatcgctccggctaccagtccgctctggttgtaactcttggaagctgccacaatggaggcgatgaggaggagcagggtaccgattaaatagtgcagaagttccgacaggggccagctgatacaggtgagcacgcggtagaagcggaagaggtggaccaggtaaaaggcgaggatcattatcaagtcgcaaatggtgaccacttcaaagtagctgtaggcgctgtagttggtccacagggagctccgcacacagatgaaggcaatcagcagggtgaccatttgcgccactttcagcagggccgcgtgggtgcgggggtagctgaggtccagcagcccctccaaggggctcgcgctgggctgggccgcgccggccccgggtccgagcgcgctgccgctgctgcacgtggtgcggacgagcccggctccgtgcgacattgcgcggccccagctcgcc

SEQ ID NO: 198 - DNA, 1609 bp, Homo sapiens
ggaaataattgcattagaagatgccagaataaaccttttgaaagagacagagcaacttgaaattaaagaagtccacatagagaagaatgatgctgaaacattgcagaaatgtcttattttatgctatgaactgttgaagcagatgtccatttcaacaggcttaagtgcaaccatsaatggaatcatcgaatctttgattcttcctggaataataagtattcatcctgttgtaagaaacctggctgttttatgcttgggatgctgtggactacagaatcaggattttgcaaggaaacacttcgtattactattgcaggttttgcaaattgatgatgtcacaataaaaataagtgctttaaaggcaatctttgaccaactgatgacgttcgggattgaaccatttaaaactaaaaaaatcaaaacacttcattgtgaaggtmcrgaaataamcagtgatgatgagcaagaatcaaaagaagttgaagagactgctacagctaagaatgktctgaaactcctttctgatttcttagatagtgaggtatctgaacttaggactggagctgcagaaggactagccaagctgatgttctctgggcttttggtcagcagcaggattctttctcgtcttattttgttatggtacaatcctgtgactgaagaggatgttcaacttcgacattgcctaggcgtgttcttccccgtgtttgcttatgcaagcaggactaatcaggaatgctttgaagaagcttttcttccaaccctgcaaacactggccaatgcccctgcatcttctcctttagctgaaattgatatcacaaatgttgctgagttacttgtagatttgacaagaccaagtggattaaatcctcaggccaagacttcccaagattatcaggccttaacagtacatgacaatttggctatgaaaatttgcaatgagatcttaacaagtccgtgctcgccagaaattcgagtctatacaaaagccttgagttctttagaactcagtagccatcttgcaaaagatcttctggttctattgaatgagattctggagcaagtaaaagataggacatgtctgagagctttggagaaaatcaagattcagttagaaaaaggaaataaagaatttggtgaccaagctgaagcagcacaggatgccaccttgactacaactactttccaaaatgaagatgaaaagaataaagaagtatatatgactccactcaggggtgtaaaagcaacccaagcatcaaagtctactcagctaaagactaacagaggacagagaaaagtgacagtttcagctaggacgaacaggaggtgtcagactgctgaagccgactctgaaagtgatcatgaagttccagaaccagaatcagaaatgaagatgagactaccaagacgagccaaaaccgcagcactagaaaaaagtaaacttaaccttgcccaatttctcaatgaagatctaagttaggaaagacgatggaggtggaatcctttaagattatgtccagttatttgctttaataaagaagaagttacccttgtcaaaawmaaaaaaaaaaaaaaaaaaaaaaaaaaaaaaaaaaaaaaaaaaaaaaaa

SEQ ID NO: 199 - DNA, 2965 bp, Homo sapiens
  misc_feature (2928)..(2928): n equals a,t,g, or c
tcatcctacatgagagggggttatttctccagcagccatgaaggtttttcatatgaaaaagatccccgattatactttgacgacacttgtgttgtgcctgagagactggaaggcaaagtcaaacaggagcctaccatgtatcgagaggggcccccttaccagaggcgaggttcccttcagctgtggcagttcctggtcacccttcttgatgacccagccaatgcccacttcattgcctggacaggtcgaggcatggagttcaagctgatagaaccggaagaggttgctcggcgctggggcatccagaagaaccggccagccatgaactatgacaagctgagccgctctctccgctattactatgaaaagggcatcatgcagaaggtggctggagagcgatacgtctacaaatttgtctgtgacccagatgccctcttctccatggctttcccggataaccagcgtccgttcctgaaggcagagtccgagtgccacctcagcgaggaggacaccctgccgctgacccactttgaagacagccccgcttacctcctggacatggaccgctgcagcagcctcccctatgccgaagtttgcttactaagtttctgagtggcggagtggccaaaccctagagctagcagttcccattcaggcaaacaagggcagtggttttgtttgtgtttttggttgttcctaaagcttgccctttgagtattatctggagaacccaagctgtctctggattggcacccttaaagacagatacattggctggggagtgggaacagggaggggcagaaaaccaccaaaaggccagtgcctcaactcttgattctgatgaggtttctgggaagagatcaaaatggagtctccttaccatggacaatacatgcaaagcaatatcttgttcaggttagtacccgcaaaacgggacatagtatgtgacaatctgcatcgatcatggactactaaatgcctttacatagaagggctctgatttgcacaatttgttgaaaaatcacaaacccatagaaaagtaagtaggctaagttggggaggctcaaaccattaagggttaaaaatacatcttaaacattggaaagctcttctagctgaatctgaaatattaccccttgtctagaaaaaggggggcagtcagaacagctgttccccmctccgtggttctcaaaatcataaaccatggctactcttgggaaccacccggccatgtggtcgccaagtagagcaagccccctttctcttcccaatcacgtggctgagtgtggatgacttttattttaggagaagggcgattaacacttttgacagtattttgttttgccctgatttgggggattgttttgttttggtggttgttttggaaaaacagtttataaactgatttttgtagttttggtatttaaagcaaaaaaacgaaaaacaaaaaaacaaaaacaaaccttttggtaactgtgcactgtgtcctttagccagggccgtgccaacttatgaagacactgcagcttgagaggggctttgctgaggcttccccttggccatgtgaaagcccgccttgttgcctgctttgtgctttctgcaccagacaacctgatggaacatttgcacctgagttgtacatttttgaagtgtgcagggcagcctggacacaagcttagattctctatgtatagttccccgtgttcactaacatgccctctctggaaagcatatgtatataacatgtgtcatgtcctttggaaacctggtcacctggtgaaaacccttgggattcttccctgggcatgactgatgacaatttccatttcatcagtttgttttgttttcctttttctttaaatcttggactttaaaccctacctgtgtgattcagtagggtttgagacttacgtgtgatactgacaggtaagcaacagtgctagcattctagattcctgcctttttttaaaaagaaattattctcattgctgtattatattggaaaagttttaaacaaccaagctaaagctatgtgaaagttgagctcaaagtagaggaaaagttactggtggtaccttgctgcctgctctgctggtagaattctgtgctccccgtgacacttagtacattaagaatgactacactgttcctcgtatgtgaaggaggcagtgctgactccgtgagtgtgagacacgtgctttgaactgcttttctattcatggagcactccatagtctcaaactgtcccccttatgaccaacagcacatttgtgaagaggttcgcagggataaggggtgcactttatagctatggaaacatgagattctcctctattggaagctaattagcccacaaaggtggtaaacctgtagattgggccttaattagcattgtactctaatcaaaggactctttctaaaccatatttatagctttcttaacctacacatagtctatacatagatgcatattttacccccagctggctagagatttatttgttgtaaatgctgtatagatttggttttcctttctttacttaccctggtttggatttttttttttttttttttgaatggatttatgctgtcttagcaatatgacaataatcctctgtagcttgagctacccctcccctgctgtaacttacgtgacctgtgctgtcactgggcataggacagcggcatcacggttgcattcccattggactcatgcacctcccggatggtttttgtttttttcgggggttctttggggtttgtttgtttgcttcttttccagagtgtggaaagtctacagtgcagaaaggcttgaacctgccagctgatttgaaatactttcccctgcgcagggccgtatgcatcctgccaagctgcgttatattctgtactgtgtacaataaagaagtttgcttttcgtttaccaancaaaaaaaaaaaaaaaaaaaaaaaaaaaaaaaaaaaa

SEQ ID NO: 200 - DNA, 752 bp, Homo sapiens
ggcacgaggaaatttgggaacaggcagggtgtggtggcttatgcctgtaatcctagaactttgggaggcctagatgggtggatcacttgagctcaggagttccagaccagcccgggcctatggcaaaactccgtctctacaaaaaaatagaaaaaattagccaggtgtggtggtgcatgcctgtagtcacagttacacggcaggctgaggtgggaggatcacttgaaccccagaggtcaagactgcagtgagctgagatcacaccactgtactccagcctgggtgacaaagtgagactctatctcaaaaagaaattaggatcaacttgtcaatttctacaacaacaacaacaaaaacccctgttgggcaccttgattgagattgcattgaatttatataaaactgttgggagaattgacatcttaataatattgagtcttctggcctataaacaaggtctgtcttcctaggtattaatgttttgtcttctatttctcttaataatcttttgtagttttcagtgtacaggtctaccatgtcagcatttcatagttttgatgctaaatggtattttaaaatttcaaattctaaccacttgttgctagtaaatagaaatacaattgatgttgaacttgtatccttcagccttgctaaactgtgagttctcatggtgtttttgtaaattacatcaacagtcatgtgttctatgaataaagagttttactccttcaaaaaaaaaaaaaaaaaaaaaa

SEQ ID NO: 201 - DNA, 2271 bp, Homo sapiens
  misc_feature (1)..(1): n equals a,t,g, or c
  misc_feature (2261)..(2261): n equals a,t,g, or c
ngctgcaggtcccagcctgtcacacacttctgggggaacacagtccaaagtggtgcccattgccagcctcactccttaccagtccaagtggaccatttgtgctcgtgttaccaacaaaagtcagatccgtacctggagcaactcccgaggggaagggaagcttttctccctagaactggttgacgaaagtggtgaaatccgagctacagctttcaatgagcaagtggacaagttctttcctcttattgaagtgaacaaggtgtattatttctcgaaaggcaccctgaagattgctaacaagcagttcacagctgttaaaaatgactacgagatgaccttcaataacgagacttccgtcatgccctgtgaggacgaccatcatttacctacggttcagtttgatttcacggggattgatgacctcgagaacaagtcgaaagactcacttgtagacatcatcgggatctgcaagagctatgaagacgccactaaaatcacagtgaggtctaacaacagagaagttgccaagaggaatatctacttgatggacacatcygggaaggtggtgactgctacactgtggggggaagatgctgataaatttgatggttctagacagcccgtgttggctatcaaaggagcccgagtctctgatttcggtggacggagcctctccgtgctgtcttcaagcactatcattgcgaatcctgacatcccagaggcctataagcttcgtggatggtttgacgcagaaggacaagccttagatggtgtttccatctctgatctaaagagcggcggagtcggagggagtaacaccaactggaaaaccttgtatgaggtcaaatccgagaacctgggccaaggcgacaagccggactactttagttctgtggccacagtggtgtatcttcgcaaagagaactgcatgtaccaagcctgcccgactcaggactgcaataagaaagtgattgatcaacagaatggattgtaccgctgtgagaagtgcgacaccgaatttcccaatttcaagtaccgcatgatcctgtcagtaaatattgcagattttcaagagaatcagtgggtgacttgtttccaggagtcygctgaagctatccttggacaaaatgctgcttatcttggggaattaaaagacaagaatgaacaggcatttgaagaagttttccagaatgccaacttccgatctttcatattcagagtcagggtcaaagtggagacctacaacgacgagtctcgaattaaggccactgtgatggacgtgaagcccgtggactacagagagtatggccgamgctggtcatgagcatcaggagaagtgcattgatgtgagaggagcagtgccaatcgggcagaagtttgcaaataggcagaatggaatcgatttcctcccacctccgtgtgacgatcccatgttagctacacagtgcagaggctcttgatggtggactaagcaatttcctccctcgtgcgcatctcagaacccatcggtaggcaaaggaaaatacgctcaggtggttgtggtgtagactgtgtcaggcctacggagtcagccagtggctagcgcaagaccagtcactccctctgccttcaggcttctgtcaatttcattatcatcaagcaggaattatgtcgtaagtcactgaccctaactgcagaccatgaagtaaattatgtaactaggtttttgcttctccagtggtgaccacccccccccatccccgctcacaacttgggttcttctcagcggggcgagctgagaagcggtcatgagcacctggggattttagtaagtgtgtcttcctagaattcgaaggctctctctttctagaggtgctacatagttggtaatgcttggaatggcaatagggtagaatgattaatcaaaggcatatcttctatatctgaagagtatccttccttcagggtttaatagactgagtcagatgggtctgatattaatcaaaattgtctcttctgaggaccgctgataagcattgacttgcygtcccctaaggaaatccgagcggctacaaagcgtttctttacttytcacttcaattaatgctgcgcttcgcttggtgagtgcgtactttttctacctgtacacattcctgcattcatgtattttgttttttttgactaaagctatgttacatggaaaggattttgaagccttttgtttcccttgctttgttttaataaacagtatattctttggttgtgaaaaaaaaaaaaaaagnggcggccgct

SEQ ID NO: 202 - DNA, 1227 bp, Homo sapiens
tcgacccacgcgtccgggatttggctgggcctggctcccctctatctaacctgggaagtggagtgtgattgtgtgtgtgtttgttagtggaaggacgtgtggtttctctctgcatggatgaatgagtgtatttggagggtcatggtgctgagagactgcaactgggattcggtctgtgggtatgagtgaagattataagtgtgtaacccctcacatgtgtactgtactttacactttaagtggcagcatagtgcttaaccatggcagcagcagttaacacatagactctgcagctagatttcttggggttcaaattctgcctcaattctgtgtgaccttaggcaaattacttaacttctcagtgcctcagyttcctcacttgtaacacaaggaaatattaacagatccctccccttcttttaggattattgtgagaattagaagagttaatatatgttaggggcttgatacctggcatgtaataagagctaattaagtgktcactgktataatttctcataactacagagtagtttgatatttcagggagaaataatatatgtttgtttcccactgctttcacaacaaccctatgttgtaattagcactgttccactggcacctaaagacacggaggctctgggagatttctggccctaggccacgaaggcccacttgggactcaagctgaggtcctgtgattccatttgggagcaggaggagggatttgcaggtgatcttcctgggcctcctgagagcagctcaggtgcccaagatggactcaggcaggcagctctgctgtatgtgaagcccagtgaggggcagtgggggggccatgctgcaggtacaagttaatctccctgtatcgcctctgcccacttacccttactcctttttctacccagataaggagggttcctgcccccaggtgaacattaactttccccagctcggcctctgtcgggaccagtgccaggtggacagccagtgtcctggccagatgaaatgctgccgcaatggctgtgggaaggtgtcctgtgtcactcccaatttytgagctccagccaccaccaggctgagcagtgaggagagaaagtttctgcctggccctgcatctggttccagcccacctgccctcccctttttcgggactctgtattccctcttgggctgaccacagcttctccctttcccaaccaataaagtaaccactttcagcaaaaaaaa

SEQ ID NO: 203 - DNA, 1867 bp, Homo sapiens
  misc_feature (974)..(974): n equals a,t,g, or c
  misc_feature (1099)..(1099): n equals a,t,g, or c
ttcagcactcgcagccgtggaccgccgtgcggtcctttcctcygcagtgagcygatttgctctgccagcagctgtcggtgccgcgctcgacaccgagtcctagctaggcgctcacagaatacgcgctccctccckcccccttctctgtcccccgcctctcgctcacccsggcccactccagcggcgactttgagggattccctctctggcggcctctgcagcagcacagccggsctcattcggggcactgcgagtatggatctccaaggaagargggtccccagcatcgacagacttcgagttctcctgatgttgttccatacaatggctcaaatcatggcagaacaagaagtggaaaatctctcaggcctttccactaaccctgaaaaagatatatttgtggtgcgggaaaatgggacgacgtgtctcatggcagagtttgcagccaaatttattgtaccttatgatgtgtgggccagcaactacgtagatctgatcacagaacaggccgatatcgcattgacccggggagctgaggtgaagggccgytgtggcacagcsagtcggagctgcaagtgttctgggtggatcgcgcatatgcactcaaaatgctctttgtaaaggaaagccacaacatgtccaagggacctgaggcgacttggagsctgagcaaagtgcagtttgtctacgaytcctcggagaaaacccacttcaaagacgcakcagtgctgggaagccacagccaactygcaccacctctctgccttggtcacccccgctgggaagtcctatgagtgtcaagctcaacaaaccatttcactggcctctagtgatccgcagaagacggtcaccatgatcctgtctgcggtccacatccaacctttkgacattatctcagatttkgtcttcagtgaagagcataaatgcccagtggatgagcgggagmaactggwagaaaccttgcccctgatttnggggctcatcttgggcctcgtcatcatggtaacactcgcgatttaccacgtccaccacaaaatgactgccaaccaggtgcagatccctcgggacagatcccagtattagcacatgggctagaggncgttaggcaggcaccccctattcstgytcccccaactggatcaggtagaacaacaaaagcacttttccatcttgtacacgagatacaccaacatagctacaatcaaacaggcctgggtatctgaggcttgcttggcttgtgtccatgcttaaacccacggaagggggagactctttcggatttgtagggtgaaatggcaattattctctccatgctggggaggaggggaggagggtctcagacagctttcgtgctcatggtggcttggctttgactctccaaagagcaataaatgccacttggagctgtatctggccccaaagtttagggattgaaaacatgcttctttgaggaggaaacccctttaggttcagaagaatatggggtgctttgctcccttggacacagctggcttatcctatacagttgtcaatgcacacagaatacaacctcatgctccctgcagcaagacccctgaaagtgattcatgcttctggctggcattctgcatgtttagtgattgtcttgggaatgtttcactgctacccgcatccagcgactgcagcaccagaaaacgactaatgtaactatgcagagttgtttggacttcttcctgtgccaggtccaagtcgggggacctgaagaatcaatctgtgtgagtctgtttttcaaaatgaaataaaacacactattctctggmaaaaaaaaaaaaaaaaaactcgagggggggcccgtacccaaatcgccggatagtgatcgtaaacaatc

SEQ ID NO: 204 - DNA, 1394 bp, Homo sapiens
gcccagccccgcccatggcccactcacccctgcatcgttctgtgtctgacctgcctcttcccctgccccagcctgccctggcctctcctggctcgccagaacccctgcccatcctgtccctcaacggtgggggcccagagctggctggggactggggtggggctggggatgctccgctgtccccggacccactgctgtcttacctcctggctctcccaaggcagctctacactcacccgtctccgaaggggcccccgtaattcccccatcctctgggctcccacttcccacccctgatgcccgggtaggggcctccacctgcggcccgcccgaccacctgctgcctccgctgggcaccccgctgcccccagactgggtgacgctggagggggactttgtgctcatgttggccatctcgcccagccacctaggcgctgacctggtggcagctccgcatgcgcgcttcgacgacggcctggtgcacctgtgctgggtgcgtagcggcatctcgcgggctgcgctgctgcgccttttcttggccatggagcgtggtagccacttcagcctgggctgtccgcagctgggctacgccgcggcccgtgccttccgcctagagccgctcacaccacgcggcgtgctcacagtggacggggagcaggtggagtatgggccgctacaggcacagatgcaccctggcatcggtacactgctcactgggcctcctggctgcmcggggcgggagccctgaaactaaacaagcttggtacccgccgggggcggggcctacattccaatggggcggagctgagctagggggtgtggcctggctgctagagttgtggtggcaggggccctggccccgtctcaggattgcgctcgctttcatgggaccagacgtgatgctggaaggtgggcgtcgtcacggttaaagagaaatgggctcgtcccgagggtagtgcctgatcaatgagggcggggcctggcgtctgatctggggccgcccttacggggcagggctcagtcctgacgcttgccacctgctcctacccggccaggatggctgagggcggagtctattttacgcgtcgcccaatgacaggacctggaatgtactggctggggtaggcctcagtgagtcggccggtcagggcccgcagcctcgccccatccactccggtgcctccatttagctggccaatcagcccaggaggggcaggttccccggggccggcgctaggatttgcactaatgttcctctccccgcgggtgggggcggggaaattcatatcccctgttcgtctcatgcgcgtcctccgtccccaatctaaaaagcaattgaaaaggtctatgcaataaaggcagtcgcttcattcctctcaaaaaaaaaaaaaaaa

SEQ ID NO: 205 - DNA, 3907 bp, Homo sapiens
gcgcggttgtgagtagtaccgggagtggggtgatcccgggctaggggagcgcggcggccgcgatcgggcttagtcggagctccgaagggagtgactaggacacccgggtgggctacttttcttccggtgcttttgctttttttttcctttgggctcgggctgagtgtcgcccactgagcaaagattccctcgtaaaacccagagcgaccctcccgtcaattgttgggctcgggagtgtcgcggtgccccgagcgcgccgggcgcggaggcaaagggagcggagccggccgcggacggggcccggagcttgcctgcctccctcgctcgccccagcgggttcgctcgcgyagrgcgcagggcgcgcgcgatgaaggcggtgagcccggtgcgcccctcgggccgcaaggcgccgtcgggctgcggcggcggggagctggcgctgcgctgcctggccgagcacggccacagcctgggtggctccgcagccgcggcggcggcggcggcggcagcgcgctgtaaggcggccgaggcggcggccgacgagccggcgctgtgcctgcagtgcgatatgaacgactgctatagccgcctgcggaggctggtgcccaccatcccgcccaacaagaaagtcagcaaagtggagatcctgcagcacgttatcgactacatcctggacctgcagctggcgctggagacgcacccggccctgctgaggcagccaccaccgcccgcgccgccacaccacccggccgggacctgtccagccgcgccgccgcggaccccgctcactgcgctcaacaccgacccggccggcgcggtgaacaagcagggcgacagcattmtgtgccgctgagccgcgctgtccaggtgtgcggccgcctgagcccgagccaggagcactagagagggagggggaagagcagaagttagagaaaaaaagccaccggaggaaaggaaaaaacatcggccaacctagaaacgttttcattcgtcattccaagagagagagaggaaagaaaaatacaactttcattctttctttgcacgttcataaacattctacatacgtattctcttttgtctcttcatttataactgctgtgaattgtacatttctgtgttttttggaggtgcagttaaacttttaagcttaagtgtgacaggactgataaatagaagatcaagagtagatccgactttagaagcctactttgtgaccaaggagctcaatttttgttttgaagctttactaatctaccagagcattgtagatattttttttttacatctattgtttaaaatagatgattataacggggcagagaactttcttttctctgcaagaatgttacatattgtatagataaatgagtgacatttcataccatgtatatatagagatgttctataagtgtgagaaagtatatgctttaatagatactgtaattataagatatttttaattaaatatttttttgtaaatattatgtgtgtgtttttttttaatctatgggaatatttcttttggaaaatcatttttcagctcaattacagagctcttgatatcttgaatgtcttttctgtttggcctggctcttaatttgcttttgttttgcccagtatagactcggaagtaacagttatagctagtggtcttgcatgattgcatgagatgtttaatcacaaattaaacttgttctgagtccattcaaatgtgtttttttaaatgtagattgaaatctttgtatttgaagcatacatgttgaaartacaccttatcagtttttaagtacagggttttatagtgtaatatatacagagtaagtgtttgtttttgtttttcaactgaggtcaaaatggattctgcaatgattttgcatatgggatgaggaaatgcttggatccttaaggagtttacgaaatctgctgttttatcaaagtgaaaaaaaattgcttattactcttcattttacactaaagcttaatgtcactaagtttcatgtctgtacagattatttaaatcatggaaatgaaaaaaatgttctctgcttgctaccaaaggacaaactcttggaaatgaacactttctgctttccttcctccaaagaattaataggcaacagtgggagaaaaaaaaggcataatggcaaatccttcaagcagggataaaagtcgatcttcaaacattaacttaagcagaccaaaaattctgatgaccgcatctagattatttttttataaaaatgattttcactatagctatgttacgctaagctactgtccaatctcttgtgatgtgtaacttttacatgtgaatattaaagtagatttctctgtcttgtactgtgatttctggtctcatttctttaaaaccttactcatttttcttttaaggctcttttttctccttaaggaaggtaatattttctaggttagataggactatcagggtttgtgaacattatgcatttaatgttatgggtactttacacacaagttagatggaatttttagagtgaaagaattaagtaggatttaattgggtgctttgtaaatagtcaactgtgtgtataacgtggtctgtttgatttttaaaaggaaaggatttgtttcagattatacaagaataaaagtattatagacccaagggacttcttatgaggtcaaattcagatatttatatgaatatgaaataccatggtccctagtagtcagttgaagtggcaatgtctaaacagaaatgaacaaaactaatgctagcaggttaaaatcaatcaaaatgtttaaaaattgattctgtcctcagcatgttacttcctcagctctgataatttactggtcttgagtattttgagaatttgatgttgaacgttataaagtcaaagaactgcttgtttagatgaggtttatttttatttttgatattattcattcttgtcacacatcaagaagaaaacactagagtgctgctggaattccaaatctgaagaattctaacgactgcattctttgttattaaaaagggcacaatccttcctttttatttggcagtttaatttcagtaggaagcatgtcacatgtgcactgttggttagaattatgcatctgtcatgcctgactgctgaaccctacctaagccttttggcgcagtttaaaacttatactggtggactgtgaacctcaaaacaaatgggtatttttgggttttgaggatagatgttactccttaaagtttgtatttggggcatgaaaaactactgaaagaagaaaagtgctacagatactacatttcaaagagttggcattttccctttggccactcaagcagcatttgatgtatctaaagaaacaaagtcattgtttattttttaaaaaattatatgcagttgtacaagatactacattccattgaaatgttggctatgtcctaaccaggcaaccagataacaaaaacattttgagtcttttatctaggtagttctaattattcagctacttagtttaacaaaggaaaatatcctgacttctctcatttcatttgtagacttttcattgtataggcacaaccaaagagtcagactggtttaaaactccagaaggaaaaaaagtatcccacacagtggatgttgtttctaagaatgctacaaaatcctgacatctcagacatctcaatgttaaaggaagaaaaaaaataccttttcatttcaaagaactaatatactttgatattgtgtaaaccttactcaagtttattgtcaagctttaactgcctttttagaactttttaaaatttcgagcccacaaatctattgtattagttgccttctataacaataaatcttcactgagcaaaaaaaaaaaaaaaaaaaaaaaaaaagctygtatcggccgcgaccacgctaagccg

SEQ ID NO: 206 - DNA, 3714 bp, Homo sapiens
  misc_feature (2324)..(2324): n equals a,t,g, or c
tgacttcacctgaacaagtagccgactcagtgaaacgtttcagagtgcattttrsccaaatggcattttagcagaggctgttccatgcagagataaaagtattcgaatgagaacaagagtagcaggaaaaacgaaatyacttgcaattatgccagatgagctgaagcacattattggggctgagacaacacggaaaggtattcttcgtgtttttgaaatgtttcagcacaaccaattaaataggagaatggtttatgtcttcttggaaggctttttagaaaccttatttccacagtataaattccgtgaacttttcaacaaactgcattcacggtcaaagcagatgcagaaatataaacagaaacttcaaactactcaagcgccttctttgcagaaaaggtgacactccactctatgaagctggtgttcattttgtccaggactaatggtatggacagatcttctggggcttaactcaaatactgttgtgtctgcaccagtcttttagtgtctcaaaatagattattaatacatccataagtctgtggttcttctcattctcatctataatccaccactaccaagagagatttctgtgtcttaaatgatttggtgcatattttgcaacattgagagaaaactgcccccatctcaagcaagaatggcgttggtttcttccatttcaaactaatcagcattctccagcaatgacaaagtgccagagtgtatatatgaaagctaaggaaagcacaaaacaatggttcagagataaattggctaatttgtttaacagttggagactgtgcaatgtacgacttggaggagtttgtttggcataatgattttgtaggtctgtcagcattttgatatattgtggattagccaggtgaatgatccttgaaacatctctttcaggtctggagaaagagacagaatgcccttaaagtgtgaaataaccttatacctgaattacagttttgtgatataaaataaagctgagtataaaataaaaccaatcaaacacagaatttgattggatttgttattcattggtatacaacaatttttattcttatgtgtgctttaagggctgtgttttgctcttagggtactcaattttatgtttccttttggcattctttgtgcaaaaagaagcatgtggtggctctcatttaaatttcaaaattattagttttatctttaacagattactgattatacagaagatataatttattggaagaactgccaaatacattttgtccttctaaaaatatggaaatttaaatagtagtctggaaagttaccatatgataatttttaattgtgtgatctagacatgccttaggtaactgcagaaatagcaaattaaatgattaatgagcttattagtcatagtaaacatacagattcctaattctatgacagtgtacatatatgaaaataaatgatgaaaaaagaactataatatttttaaaaatatgcttttatttatatttcacataatgtaaagttctacaaaataaagctagtaggcaagacccctcagtgtatacctttaaacccataaattaattttatatcaataaaataaaatactttctctagttttggagcttctgtatttcctatagttttctgactgtccattttatccatcttagaagtattcacatcccttctatgcaggatttctgcatagttttaaatactttcattgcctaagggtttgggtgtgtcagctttttttgttttaaaaatatttaacactaaaaccttaaaataatgaagctacttatcagaccactgagccaagatcctggtattaaaagaaagtctgggtgcttaagataaagggacagagtattggtatcccagttatttgggagctttaagattggaacaagatatcactgtcttgttttcacttagatcctacttacaaagtgagggttattaacagaataaagccttcctttaaagctttataataatcatatttattaataatgctgttgtgcatacttatagtatgcatatattcagcatatgttgcatgtcttcagaattacataaaatgaaatccctttcattgcaacttgcaagtgagaaaagatccttagtggctctggtggargaaatagtatttcttcttctcagggtgtctccctgccttggcccctccctgagccccaggctttaaaagtgaaaatgtttgaaacatgaaacatgtctgtaggaagcatcagcatggccataagtgcagtgattttcatatatgcctctgcccatttcaaatatatttttgacatgaataaatctancagtatacagaataattcatgtaagaccctaacgtgtacatgtgaaaaagcatttctatataatgtgaggagcactggccatcaattagggaaataaaggtcatgtaatattgcaaattttcaaaatagagccctgcaagataactgcaatcataccaaaaactatttgagtaaatggatttttaaagtaatttttgtttagaagagtttatatttcagaagcagaaaatgtcaaatgatagtctttgtaaatggtggtgcaccttctctatgcacatctgtcttttacatcagaaagagctgtggtcatgctaaaattagagataactttttgaatgacttggtcaagctgtgtgtaaaatatttaaccataagtcaagtacagtgtactatgtttaataaagttacatttaatgcatttattgcatatatgaatatatacatgaagaggctttatgtcttctggtatttgattttgaatgttttttaagtcagtggtgcctttaggcaagaactttcgaaattaatcattctttgtgttttctgatttttcaggtaacatgtacactatttagaaaccatcatagtttattcaccttaaaaaattgattgtattatttaaatatatcacttagatgggcatttcctataattaggatattccaaatagttgctgaaatcaattgtgccattgaccaatggatgcacttggttagccttaatttttttwaaaaaaaaaaaaacaaaaactttcttgaatatttcagtttgttcattttaagtttgtgctgctggtatttgggaagaaaaatcaatcagttaagtgctaccagaaagtgtaccaatttttataaaaattaagaatgatataaatttcacaatctaaaattttaattttgtgcaatattttcatttaatgcatgtgtatttgagtaattgtaagataaatgaatttttaattttttgagatgtagcttaaactgtcttcttaatccaacaacttacattccgttgttgctgcatccttttatttaaggacttgttttaaaagtctttttgtcactccttggaaaattcttttattagtagtaaattttgcttttaggagcatggctcctgtattacaagggaaaaaatatgaagagcacattttaggattataattgttaaaagataatgtgtgcatatcattgtacagtaagtgtcaactgtgtgcctaactgttctatcaatactttctttctttaacaaagaagaaacaacaatcagaatgtcagttatttttattcaactaaaaggattaaaaaatttatttggtttgtgttctgtccattagaaaatactaataaagtattaacaaacaaaaaaaaaaaaaaaaaaaaaactcgag

SEQ ID NO: 207 - DNA, 1305 bp, Homo sapiens
  misc_feature (47)..(47): n equals a,t,g, or c
  misc_feature (87)..(87): n equals a,t,g, or c
tccgtatttggcttcaggcctcaaaggaaactctttccctcgggctnaaggaaccgttaaaccgttagtctggtcgggttcgaacanttaggtttaagattgttgtattagggccttccacggtgacctcaatttcaggamcctttgaattactcccaggacttcgtggtcttttgggggactgcaaagctttagtgtttattttactagccatcccaggaggcaagtaggaaataactagttcaggttttttaacaacgaacttgattttattactcccgcggacgatcctttcaagtcgtggaattccaaaccaggtagggcttcggaagggaatcccctctggcaagccttccacatacaagaactccgggtttgattcaaacacaggatatggtacttttactgcctcggtgagtccaagagcttgagcaaatttcaaattaaaaatctcttccacttgcttccgtagcttggtaattctgacattccaatcttctttgactggtgtattcgttcttggctgagtaacttcagtggtactgtgagtcagaagttctggtcttttaataacaaatttaattcgattgcccacttgaatgattttttccagccttgggattccataccatgagggacttcggaaaggaatgttttctggcagtccttccacgtacagatcattcgggtgtgcctcaaatttttggtacggtacagccttggcttcagtgctccccaaggcttccgcaaattttttgcagaaaagctgatccaccatctttcttaatttagtgattctggcataccattcttcctttactcctgaagctggcttatcaagctgtaaatcttcacgtgttgaaytcagaagctcatgtttcttaatcacaaaacgaatcctttcctttgcaagtaatatcctctccaggcgaggaattccgtaagtagatggccttctaaaaggaattccttcaggaagtccttctacataaagatcttcaacatgagactrgaaaagagggtacgggatcgtcaccggacctttggcttttatggcttgagcatatttcctttcaaacaattcttcaacttgtttacgtagatcagtgatgcgagcattccatttctcgaagttgaactccctcactttccgcttcccagcattggcgggttccgggactggtggctgcggtagctcattggcctttggtctcttagacggtggagaataatcatcatctggtcttggaggacaggaaggcaagtttgatcagsccgtaggtgaacagcgggatactctccttg

SEQ ID NO: 208 - DNA, 1788 bp, Homo sapiens
  misc_feature (1423)..(1423): n equals a,t,g, or c
  misc_feature (1779)..(1779): n equals a,t,g, or c
gctgccacgcaccttctgccagctgatcctggaccccatcttcaaggtgtttgatgcgatcatgaatttcaagaaagaggagacagcaaaactgatagagaaactggacatcaagcctgtgctgatgatgaacaagatggaccgcgccctgctggagctgcagctggagcccgaggagctctaccagactttccagcgcatcgtggagaacgtgaacgtcatcatctccacctacggcgagggcgagagcggccccatgggcaacatcatgatcgatcctgtcctcggtaccgtgggctttgggtctggcctccacgggtgggccttcaccctgaagcagtttgccgagatgtatgtggccaagttcgccgccaagggggagggccagttggggcctgccgagcgggccaagaaagtagaggacatgatgaagaagctgtggggtgacaggtactttgacccagccaacggcaagttcagcaagtcagccaccagccccgaaggaagtaagctgccacgcaccttctgccagctgatcctgggaccccatcttcaaggtgtttgatgcgatcatgaatttcaagaaagaggagacagcaaaactgatagagaaactggacatcaaactggacagcgaggacaaggacaaagaaggcaaacccctgttcacctctgccgggaagttcctgtgttgtgctgatgatttgtgccaggatacatattcagtacctgtggggaaataactgtcaccacccacaaattagacatttttattttgactatctatggcttttaaaaaatattttgtggcaatgtatctgtgagaatctcatagttaatataaagattttaaaactgcattatgacctagcccccataattgggatttatcattttggaggattctttctakagcaagatatgctcaaattctcctgtttgtattttgtaaaatgaagaagtgaatctaagtaacttaatcacagttgtgcattttttttggttctgttagagaaattaaaacagactgtttcctcaggcccattttaaactgaacttatgctaggaaaccttaagtatggggaaggtagaaagttcatttcatcacttagaaaatatgtcttctcaagaacaaaactgtgctgttacaactcagtgttcaatgtgaaattgctgccaaatgttatgtagtttaatagagaacttgaaaaaataaaacattaaaatggagcttgtgttagcatcaggtatccatttgttcaggacagtcctgttcatgtctgttgtcttggcatagttttttcccctagaatatagtactcccttttactctaaaaaatatcccagtttggacaataaaatacataattactctagttatattatttgctttacttctaaaaatgtaagaaattgaatyttntttaaagaaaaatgttggttcctgccttgatctaagtctcatccaaaggaaataaatagtcactagttttttatcttacaactcaggacatttgtctttggttattaatggaaattagtatgtgattactttcatagttatgccacaaatcacattgaagaaggaatcattccgacctctgcagatattgaaacttatcttctggaaaaatcaagagtcactttccagctgaaggctgaaagaagctaccacatcttctaccagattctttctaacaagaagcctgagctcatagagctgctgcttattacgaccaacccttacgactacccgttcattagccaggggggagatcntggtggcca

SEQ ID NO: 209 - DNA, 813 bp, Homo sapiens
attttttgcagaatctgattcatgagaaggkgagtttattgttttcagtttagacttttgggaagttggactagagaggggagttgttggggtcagtgctggcttaacagaaaacacagcgaatttcccctccagttctccccaagtccactgaacaaggctagttcctgcaccacccaggattcaaaggaaagacgaagggagcagaacttgtggcagcaacaggtaaacttcaagaaggagggcaggagccccaccctacagggctgggaggagcccagaggccccatctgtttctcctccaggagttgtcaaggcagcagaaaggagtcacccagccaaaggaggagatggctcagcggggctgcaccaaggggccaagaggccctacccgtgtctaaaccctcctctcactcccctaagcctggtgaaagagtcagaagccccaggctcctttttctgtttcttaactcaacagctaaaaaatggctccaggtagtgagtcaatgaagttcagacatgttggtgtaaagtttctcctctgctcctgaaaacttcatcttcttggtgtctcatgtcctcattctcccctatatgacatgcaaaaacgatctttctttgaaatccctctgggaagaagcatgtttattgaaactgtccttcagccttaaatacaaaaataaaactgaaactgctccagaaagcagctttctccaaaaatgtctttggtttgtttctcatagggttaggaaaagtgcattgtgggaatatccattgccctctatcccagtcttgcagggtgttttgttttgt

SEQ ID NO: 210 - DNA, 969 bp, Homo sapiens
ggcaggaggtgtcgagcggcgttatttttttttgcggtttgcctttttttttctttttttttttttggaaccgcggttgtttaaaagcctgagggaacctggaggggggctcccactcyctaccttctttcctccgagtttgtgactccgagatggacaaagtgtgtgctgtttttggaggctcccgaggcattggcagagctgtggcccagttaatggcccggaaaggctaccgactggcggtcattgccagaaacctggaaggggccaaagccgccgccggtgacctcggcggagatcatttggcatttagctgtgatgttgctaaagaacatgatgttcaaaatacatttgaagagatggagaaacatttaggtcgagtaaatttcttggtaaatgcagctggtattaacagggatggtcttttagtaagaacaaaaactgaagatatggtatctcagcttcatactaacctcttgggttccatgctgacctgtaaagctgccatgaggactatgattcaacaacagggagggtctattgttaatgtaggaagcattgttggcttaaaaggcaactctggccagtccgtttacagtgccagtaaaggaggattagttggattttcacgtgctcttgctaaagaggtagcaagaaagaaaattagagtgaatgtagttgcaccagaactcatcccaagaacagtatccataaggaagatgsaaaagggggacagaataaatgttaccctaagaagtccagagcaacatggtacctgattagctgtttcctcttctggctcctgaatattaaagacagtggcactgtcagcacctagcagtcgacgagccattctttcttcgtatgttaacctctaaacaacgtaagtcacaaaaaatacaaaattagaaaaaaatcacaaatatgtactgccctatgaaaaagagtaaaaaacaacacactttcaaa

SEQ ID NO: 211 - DNA, 605 bp, Homo sapiens
  misc_feature (476)..(476): n equals a,t,g, or c
  misc_feature (491)..(491): n equals a,t,g, or c
  misc_feature (559)..(559): n equals a,t,g, or c
  misc_feature (582)..(582): n equals a,t,g, or c
ggtttagacttgaatttataatttgagaaattgtcttgggatttcaaacaacagctttagtagttagtttcattctggtcattgtgttttagaagaataaaatttctacaagttaygttaaactgtgtagcactaaaactcattaactttgttggaattttggaattaaccctgcctttaatgtacatcttagtatttttcaaggtaaatgatgtctttttacatttacaatgttgtgagaaactaaacatatcctgttgtatgtaactgatcagcccttctcttctgtcagcggcaacctttggcactgcatccatgagcatgcccacrggattcggcactcctgctccctacagtcttcccaccagctttagtggcagctttcagcagcctgmctttycagcccaagcagctttccctcaacagacagctttttctcaacagccaatggtaagatctaacatttggcgagctgnaaagtcattttatgnatcctttttatatcataatgktgtgtgcttgggcaggaagacttttctaaagaatactatagkattanctactgagggttacacaaaaatnaaagctttggtgatttggacctc

SEQ ID NO: 212 - DNA, 623 bp, Homo sapiens
agccagacgaggctctattccggctgctgcagcccacttttctcctttatttaaataaatactcattctgtgctgtacacgtcccaagcagcaggggcaggcagcccgggtggcctgcgtggcaggggagcagctgggcagcccctcacttgggcgactcccggcctggggagagggctcgctggctctccagcccactcaccagtctctggatgctctgcagttcattggccgcctccttggccgagccactgggcgacagggcaccgcgggatggggcccctactttgcggagagccagctcgggcagggggctaggctcccggctgtttccaccagcggccttggagccctcagaggccagcccggtggtgaggaggctagtgctaggcgggatggtgaccgggatctgataggggctgaaacgcagtcggggccgggcactgcccaggaagggactccatgcctagcttgtggaactggtcccacagctccttggcctccagcgtcaccttggggtcgtcctccacctcgtcctcgggctccaggctcttgagggagcgcagatgcgcggcgggcgggtgcgggcccagtgccgagacgtgcagccccgcctcggccgc

SEQ ID NO: 213 - DNA, 1212 bp, Homo sapiens
  misc_feature (1212)..(1212): n equals a,t,g, or c
ggcacgaggcgagccggcgcaccgtacgctgggacgtgtggtttcagctcgtgcgcctccccgtgggtttgcgacgtttagcgactattgcgcctgcgccacgccggctgcgagactggggccgtggctgctggtcccgggtgatgctaggcggctccctgggctccaggctgttgcggggtgtaggtgggagtcacggacggttcggggcccgaggtgtccgcgaaggtggcgcacatgggcggcaggggagagcatggctcagcggatggtctgggtggacctggagatgacaggattggacattgagaaggaccagattattgagatggcctgtctgataactgactctgatctcaacattttggctgaaggtcctaacctgattataaaacaaccagatgagttgctggacagcatgtcagattggtgtaaggagcatcacgggaagtctggccttaccaaggcagtgaaggagagtacaattacattgcagcaggcagagtatgaatttctgtcctttgtacgacagcagactcctccagggctctgtccacttgcaggaaattcagttcatgaagataagaagtttcttgacaaatacatgccccagttcatgaaacatcttcattatagaataattgatgtgagcactgttaaagaactgtgcagacgctggtatccagaagaatatgaatttgcaccaaagaaggctgcttctcatagggcacttgatgacattagtgaaagcatcaaagagcttcagttttaccgaaataacatcttcaagaaaaaaatagatgaaaagaagaggaaaattatagaaaatggggaaaatgagaagaccgtgagttgatgccagttatcatgctgccactacatcgttatctggaggcaacttctggtggtttttttttctcacgctgatggcttggcagagcaccttcggttaacttgcatctccagattgattactcaagcagacagcacacgaaatactatttttctcctaatatgctgtttccattatgacacagcagctcctttgtaagtaccaggtcatgtccatcccttggtacatatatgcatttgcttttaaaccatttcttttgtttaaataaataaataagtaaataaagctagttctattgaaatgcaaaaaaaaaaaaaaaaaaaaaaaaaaaaaaaaaaaaaaaaaaaaaaaaaaaaaan

SEQ ID NO: 214 - DNA, 1608 bp, Homo sapiens
ggcacagcgcgggcccgtcatggaggcgcccaccgtggagacgccccccgacccctcgcccccttcggccccggcccctgccccggttccgttgcgcgccccggatgtggcgggctgcgaaggagcaggaaaaggaagaaggtagataatgactataatgcccttcgagaaagactcagcaccttgcctgrtaaattgtcttataatataatggtaccatttggcccttttgccttcatgccaggaaaacttgtccatactaatgaagtcactgttttactgggggacaactggtttgcaaagtgctcagcaaagcaggctgtaggtttagttgagcaccggaaagaacatgtaagaaaaacaatagatgacttaaaaaaagtgatgaaaaattttgaatccagagttgaattcacagaagatttgcagaaaatgagcgatgctgcaggtgatattgttgacatacgagaagaaattaaatgtgacttcgaatttaaagcaaaacaccgaattgctcataaaccgcattccaaaccaaaaacttcagatatttttgaagcagatattgcaaatgatgtgaaatccaaggatttgctagctgataaagaactgtgggctcgacttgaagaactagagagacaggaagaattgctgggtgaacttgatagtaagcctgatactgtgattgcaaatggagaagatacgacatcttctgaagaggaaaaggaagatcgtaacacaaatgtgaatgcgatgcatcaagtaacagactctcatactccttgtcataaggatgttgcaagttcagaaccattcagtggtcaagtgaatagtcagttgaactgttcagtgaatggttccagttcttaccacagtgatgatgatgatgatgatgatgacgacgacgacgacaacattgacgacgatgatggtgataacgaccatgaggctttaggggttggagataattctataccaacaatatatttttcacatactgttgagcctaagagggtccgaataaatactggaaagaataccactttaaaattcagtgaaaagaaagaagaagccaaacgtaaacgaaagaacagcactggcagtggccactctgcccaggagctgccgaccatcaggacgcctgcagacatttacagagcctttgttgatgttgtgaatggagaatatgtccctcgcaaatccatcctgaagtctcgaagtagagagaatagtgtgtgtagcgacactagtgaaagcagtgctgctgaatttgatgataggcggggagttttgaggagtatcagctgcgaagaagccacttgcagtgacaccagtgagagcattttggaagaggaaccacaagaaaatcaaaagaaacttttgcccttatcagtaacacctgaggttttgcggctagttggctattcaagaaacctcgcccctctgaatgtcatactgtaatctttaaggaagaaagctacatgaattaattgtactctatgggaaaatttctttggaaagatattttgtaaaacttttttttccaagtaaaaactttatgaaacttggtctcaaaaaaaaaaaaaaaaaaaaaaaaaaaaaaaaaaa

SEQ ID NO: 215 - DNA, 591 bp, Homo sapiens
  misc_feature (516)..(516): n equals a,t,g, or c
aacactggagacctgatttctaactracgctaccgtcgcggccgccggcaagttcctttactgtgttttcttggttcagccttgaagtgagtcgtggacgatcctctctcagcgtccagcctagacggcggtgttgctccggcagcgttcctgggagccgagggccagagactaagtaacagtcctgggttctgagcctgccatccaaggaactcaggaggaggagttgacagtctcttcgttcctaaccagtgtgggacgacttcagcatgtctcaggccaccaagaggaagcatgtggtgaaggaggtgctaggggagcacatagtgccctccgaccagcagcagattgtcagggtactcaggaccccagggaacaatctgcatgaggtggagacagcccaagggcagcgcttcctggtgagcatgccctycaaataccgcaagaacatctggatcaagagaggggacttttcattgktgaccccattgaagagggaraaaaggtgaaggctgnaatctcgttgtgctctgcaaggaccacgtgcgctctctgcaraargaggggttttggcctgaggccttctctgaa

SEQ ID NO: 216 - DNA, 1443 bp, Homo sapiens
  misc_feature (358)..(358): n equals a,t,g, or c
  misc_feature (400)..(400): n equals a,t,g, or c
  misc_feature (1420)..(1420): n equals a,t,g, or c
  misc_feature (1426)..(1426): n equals a,t,g, or c
gctttacgcgtgggtgaaattcgtgcagtcaaaagaaggtctcctcttaaaccaaaccagggtccctcccttttactgagggactatttctctgtattttgatgctcgttaggtagcataccaagactcacccatctgtggtaacctacctttggaaagatactatagaaataactacaaatatgtatgcacgccaagagcaactccacattgttcccctgggaccccagagaaagattgtcggtattgcatatcatggcaccctagccacaacaaaggtcaattatgcttaccaaaatgctggtggactgcaggttcctccttacatgtctacatacacacatacccagcaaccttnatatatgttatcaaaaagggaacccatacccgtctggcccancaagccacaaaaatgaggaacgctatctatcagaacagattagctttagactatctcctagccctagaaggagtagtatgtggaaagttcaatttaacaaattgctgcctggaaatcgatgacaatggaaaggcaattatggarataactgcargaatgagaaaattagcccatgttccagttcaaacttggaaagggtggtctccagattctctctttggaggcttggtttttatttttctgagggttcaagactttaataggagtggttctggccatattaggaagttgcctaatactcccttgtctcttacctctccttgttagaagcattcaatcgagtatagaggcaatagtakctaggcaaactaccactcagctaatggctctgcataaatatcaacctttgtctaaatargaaaactcgtcccttcaggcagaactaagtaatagtgatgccttctattaaacttcttttataaaaggcatcaaaggggggaaactgaggcagaaatttaaaaataaatatgcattcattcactccaagaaaagtaacagaaaaggcaagggttaaaaagaaaagaacaagttttcctctgcctagcagaggaaagtgcagcaagctcacttcaaggacagtaataagataatactgtttgagaaaccaaggccaarggaatggactccagataccccscaacaccagagcaaggttgaaggaaaaaaaagaaagacaaattcttttactgttactcctttcccagtcttcttaagcatgattatgttttacaaatgtctgtatttagccggttgttgtttttctttcaatgcagctacaaggccaccacctatgcaaggccacaagttatgctatgctatagattatatgacctatcatttggttaactgcttttgttttatttattgtaagtccacttataaaaacccgattctgtctttgtttaatgctcagctttggggatgtgagtccgctgagccagtgtgtacctaaaataaacnatcctnctatactctcaaaaaaa

SEQ ID NO: 217 - DNA, 544 bp, Homo sapiens
  misc_feature (466)..(466): n equals a,t,g, or c
  misc_feature (495)..(495): n equals a,t,g, or c
  misc_feature (525)..(525): n equals a,t,g, or c
  misc_feature (534)..(535): n equals a,t,g, or c
ggtcgggaacggkgcggagcgcggctgcgccggcgcgtcgaggggagaggcagcagccgcgatggacgtgttcctcatgatccggcgccacaagaccaccatcttcacggacgccaaggagtccagcacggtgttcgaactgaagcgcatcgtcgagggcatcctcaagcggcctcctgacgagcagcggctgtacaaggatgaccaactcttggatgatggcaagacactgggcgagtgtggcttcaccagtcaaacagcacggccacaggccccagccacagtggggctggccttccgggcagatgacacctttgaggccctgtgcatcgagccgttttccagcccgccagagctgcccgatgtgatgaagccccaggactcgggaagcagtgccaatgaacaagccgtgcagtgagacccccaagaggcccatttcccccaataaaagagatttgggagtctnaaaaaaaaaaaaaaaaaaaggggcgcctnttttaaaggatccaagtttacgaacccggncatgcaaanncatagtttt

SEQ ID NO: 218 - DNA, 1310 bp, Homo sapiens
  misc_feature (1285)..(1285): n equals a,t,g, or c
ggaccagctaagggaggcaagaagaagaaggatcctaatgctcccaaaaggccaccgtctggattcttcctgttctgttcagaattccgccccaagatcaaatccacaaaccccggcatctctattggagacgtggcaaaaaagctgggtgagatgtggaataatttaaatgacagtgaaaagcagccttacatcactaaggcggcaaagctgaaggagaagtatgagaaggatgttgctgactataagtcgaaaggaaagtttgatggtgcaaagggtcctgctaaagttgcccggaaaaaggtggaagaggaagatgaagaagaggaggaggaagaagaggaggaggaggaggaggaggatgaataaagaaactgtttatctgtctccttgtgaatacttagagtaggggagcgccgtaattgacacatctcttatttgagaagtgtctgttgccctcattaggtttaattacaaaatttgatcacgatcatattgtagtctctcaaagtgctctagaaattgtcagtggtttacatgaagtggccatgggtgtctggagcaccctgaaactgtatcaaagttgtacatatttccaaacatttttaaaatgaaaaggcactctcgtgttctcctcactctgtgcactttgctgttggtgtgacaaggcatttaaagatgtttctggcattttctttttatttgtaaggtggtggtaactatggttattggctagaaatcctgagttttcaactgtatatatctatagtttgtaaaaagaacaaaacaaccgagacaaacccttgatgctccttgctcggcgttgaggctgtggggaagatgccttttgggagaggctgtagctcagggcgtgcactgtgaggctggacctgttgactctgcagggggcatccatttagcttcaggttgtcttgtttctgtatatagtgacatagcattctgctgccatcttagctgtggacaaaggggggtcagctggcatgagaatatttttttttttaagtgcggtagtttttaaactgtttgtttttaaacaaactatagaactcttcattgtcagcaaagcaaagagtcactgcatcaatgaaagttcaagaacctcctgtacttaaacacgattcgcaacgttctgttattttttttgtatgtttagaatgctgaaatgtttttgaagttaaataaacagtattacatttttaaaaaaaaaaaaaaaaagggcggccgctctagaggatccctcgagggggcccaagcttacgcgtgncatgcgacgtccatagctctctccc

SEQ ID NO: 219 - DNA, 929 bp, Homo sapiens
  misc_feature (5)..(5): n equals a,t,g, or c
  misc_feature (50)..(50): n equals a,t,g, or c
tggantacaccgggggcacggtcagaggtctttaggggagggcggcggtntgagagtcctgggtgccgacctgttgggacccaaattccttgtgggaacgatgataaggagcaggtttacagatcataagtgcaaaagcgggcgagaagggaaacccaagcgggacaaggacttttggggggaggtcaaagggcacgaagttgtgcctgcagctgttaccatagtaaccgaggaccggatgtggcgatcttacggtgcgacagtcctcttctcaggccctctggcccgagagcctgttgactctgtgacacactctgaggagctggttgtggtgttttccagcgagggaagaaaagagtaattttttcaaagcatttatagaawcgcagcaaagggaaggtgtgaggttgccgccatgcctggcagagacggagggaggcagttggctccggaatgcggccgccgcagatgttctccgcaaccttccggaagtggaatggcgggagcctcagcattgctgcccaccgaccccccggaagcggaaacagaatccccgcgtgccccttcctcactaccctccaaatcccgctgcagccattgccgcagacacgatgccgaaacgaaagaagcagaatcatcaccagccaccgacacagcagcagcccccgctgcccgagcgggaagagactggagatgaggaggatgggagtcccatcggtgaggggtctgggagggatgtgcacatgcctgtcaagcccgtccgggcaaggggctaggggctaataaggtgcgaaggagggggctgtaacggaaggaggaagggcgcacgcgctggggagggatggaagtggggctctcccaaatggagccttgaaccaggagttctcttactgggaccatcaacctcaatacgggcccagacctttctg

SEQ ID NO: 220 - DNA, 965 bp, Homo sapiens
  misc_feature (42)..(42): n equals a,t,g, or c
  misc_feature (888)..(888): n equals a,t,g, or c
  misc_feature (935)..(935): n equals a,t,g, or c
  misc_feature (943)..(943): n equals a,t,g, or c
ggcggggagaagccggccctttaggacccggctgcggcggcnagggaggaggaagaagcggaggaggcggctcccgcgctcgcagggccgtgccacctgcccgsccgcccgctcgctcgctcgcccgccgcgccgcgctgccgaccgccagcatgctgccgagagtgggctgccccgcgctgccgctgccgccgccgccgctgctgccgctgctgccgctgctgctgctgctactgggcgcgagtrgcggcggcggcggggcgcgmgcggaggtgctgttccgctgcccgccctgcacacccgagcgcctggccgcctgcgggcccccgccggttgcgccgcccgccgcggtggccgcagtggccggaggcgcccgcatgccatgcgcggagctcgtccgggagccgggctgcggctgctgctcggtgtgcgcccggctggagggcgaggcgtgcggcgtctacaccccgcgctgcggccaggggctgcgctgctatccccacccgggctccgagctgcccctgcaggcgctggtcatgggcgagggcacttgtgagaagcgccgggacgccgagtatggcgccagccggagcaggttgcagacaatggcgatgaccactcagaaggaggcctggtggagaaccacgtggacagcaccatgaacatgttgggcgggggaggcagtgctggccggaagcccctcaagtcgggtatgaaggarctggccgtgttycgggagaaggtcactgagcagcaccggcagatgggcaaaggtggcaagcatcaccttggcctggargarcccaaraarctgcgaccaacccctgcccaggactccctgccaacaggaattgaaccaagttctggagcggatttccaacatgcgcnttcggatgaaacggggccttttggagcaattttattcctggcaaatncccaattntgaaaagcttggcttttaaaaa

SEQ ID NO: 221 - DNA, 4066 bp, Homo sapiens
  misc_feature (2509)..(2509): n equals a,t,g, or c
  misc_feature (3095)..(3095): n equals a,t,g, or c
  misc_feature (3532)..(3534): n equals a,t,g, or c
atgtcagaacgtggaattaagtgggcttgtgaatattgtacgtatgaaaactggccatctgcaatcaagtgtactatgtgtcgtgcccaaagacctagtggaacaattattacagaagatccatttagaagtggttcaagtgatgttggtagagattgggatccttccagcactgaaggtggaagtagtcctttgatatgtccagactctagtgcaagaccaagggttaagtcttcatacagcatggaaaatgcaaataaatggtcatgccacatgtgtacatatttgaactggccaagagcaatcagatgtacccagtgcttatcccagcgtaggaccaggaatcccacagaatctcctcaaatcctcaggatctggttcaagaccagttggcctttttctgttgatccttgtgaagaatacaatgatagaaataaattgaatacaaggacccagcattggacttgttctgtttgcacatatgaaaactgggctaaggctaaaaaatgtgttgtttgtgaccatcccagacctaataacattgaagcaatagagttggcagagactgaagaggcttcttcaataattaatgagcaagacagagctcgatggaggggaagttgcagtagtggtaatagccaaaggagatcacctcctgctacgaagcgggactctgaagtgaaaatggattttcagaggattgaattggctggtgctgtgggaagcaaggaggaacttgaagtagactttaaaaaactaaagcaaattaaaaacaggatgaaaaagactgattggctcttcctcaatgcttgtgtgggggttgtagaaggtgatttagctgccatagaagcatacaagtcatcaggaggagacattgcacgtcagctcaccgcagatgaagtacgcttgctgaatcgtccttctgcctttgatgttggctatactcttgtacacttggctatacgttttcagaggcaggatatgctagcaatattgcttacagaggtgtctcaacaagcagcaaagtgtattccagcaatggtgtgtcctgaactgacagaacaaatccggagagagatagctgcctctcttcatcagagaaagggggattttgcttgctattttctgactgaccttgtaacatttacattgccagcagatattgaagatttgcccccaacagtccaagaaaaattatttgatgaggtgcttgatagagacgttcaaaaagaattagaagaagaatctccaattattaactggtccttggaattggctacacgtttggacagtcgactgtatgcactttggaaccggactgcaggagactgcctacttgattcagttctacaagctacctggggcatctatgacaaggactcagtgcttcggaaagccctgcatgacagcctgcatgactgttcacattggttttacacacgctggaaagattgggaatcatggtattctcagagctttggtttacatttttccttgagagaagaacagtggcaagaagactgggcatttatactctctcttgctagtcagcctggagcaagyttggagcagacgcacatttttgtactggcacatattcttagacgaccaattatagtttatggagtaaaatattacaagagtttccggggagaaactttaggatatactcggtttcaaggtgtttatctgcctttgttgtgggaacagagtttttgttggaaaagtccgattgctctgggttatacgaggggccacttctctgctttggttgccatggaaaatgatggctatggcaaccgaggtgctggtgctaatctcaataccgatgatgatgtcaccatcacatttttgcctctggttgacagtgaaaggaagctactccatgtgcacttcctttctgctcaggagctaggtaatgaggaacagcaagaaaaactgctcagggagtggctggactgctgtgtgacggaggggggagttctggttgccatgcagaagagttctcggcggcgaaatcaccccctggtcactcagatggtagaaaaatggcttgaccgctaccgacagatccggccgtgtacatccctgtctgatggagaggaagatgaggatgatgaagatgaatgaaaaaaaaaatcaaacagcagaagaccaaggcatcagatctgtaatgaccctaaagttagtgtggtgctccaagcagagtcgacatcatggaatgaaccaaatctggcaggatctgctcggggaagtgttttcctggaccacacacaccttatggagataatgcctctgctgcgtgaggagacagagaactttagttggactacagtttgtaaaaaaaactaattttattaagacagaactttttttccttccaaattgtaaatctgtctataaatgtaacgcatgtggttgtgtaagacattgtttaataggaaaagttgtaccagcatcttcatattattgrgaaaattttttccagcaygggcacttagaaaaagcncatggcaaatggcwctttgttccctwcwgatatkattccagtagaayctggcaatsacgacacacgcacgcacacacacacacacacacacacacacayacacacaytttstrcytwttcttccctgtgatgaaaaagggctgtgaaaaccmttaaagtatttggcytgcctcttgtttccaatcarttstwtwakgaacaawctgcaasaaaacgctaagaatgttttcagagtgaactaaawacagacattgacttacttgttttgaakagtggttttggtctttggyctmkwrwrctcwktwaaaagktgttcysakgatgmmmmswttcawtwtttrswkcatkctawwtsttgcaggaaraatgmtttwwwakkasgrttctgtakwamwgawtctkkgmwrtrrtstraatgctgctgtttgtttcaagtggtgaatgtgttgttaaaaattggctgtttgctttcattttggccaataagtaatcaagtttgtagaaaatgttagcattctgactacttaggcatctgtagtaatttctctatgtataggggataattttttagtggggcagagatccngttctagttgcctgttaagcaaaatctgccctcccaattgaagcaaaatctgccctcccaattgaaaaagccaaagagaattgttagagggaaaagcatgtagccattgcagtctgcattgcagccagcgttgtccagagagtacacgctcagcacttagcttctactgtgtgttgtggtctggtgagtgttgtttcccctgagcgctctatttatttatttattatcaatcaatcagtgaccctgaccacatagtgtgataggtgcagcattcttccctgtgggaaagaattaaagatggttccatttcctaggctacagacaggaatggggctctaaatggttttcatagactggctgttaaaggccaaaaattttggtaaatcaatgctatattatgctcttgaactattaaaacagccataattattgtcccnnnccctggtcgcgtgtcttccgaactctgctgcttcgccccggcaagagcacttccttccgcggctgctaaaactggtgcgcgggttcccaacttcgcagaagcagcttcatcggccccccgctagagacctcagaccgcagccatcgacgcctcgcctcggggatctgtccccaccctcggggccagctcaccatgagtcaggccctgtgctaggtgctgggatgaagcagtgactgacacaggcctggacctgtccttgtgaagagtgcgtctgtgacacagatactgtgccatgtggcaaagtaagcgcgtgggacagcagagccttgtttgccattaaagtaatatcacaagtctgttaaggttggagaatcaagtgaacatgctgaaaagttatggggaatgtagtctcatagctgggggagctgggggccttgtcaattggttcccccagtctggagagcaatctgagagtaagtagtgacactgtgtgtgctgagtgtgtctgtgggggtgtttttggataaaatta

SEQ ID NO: 222 - DNA, 2755 bp, Homo sapiens
  misc_feature (15)..(15): n equals a,t,g, or c
  misc_feature (23)..(23): n equals a,t,g, or c
  misc_feature (2755)..(2755): n equals a,t,g, or c
aattcccgggtgcgnacccacgncgtgccgccgagaccgctgccttgctcggaagggggcgagcggctgctgcccacccagaagcagcccgggggcggccaggtcaactccagccgctacaagacggagctgtgccgcccctttgaggaaaacggtgcctgtaagtacggggacaagtgccagttcgcacacggcatccacgagctccgcagcctgacccgccaccccaagtacaagacggagctgtgccgcaccttccacaccatcggcttttgcccctacgggccccgctgccacttcatccacaacgctgaagagcgccgtgccctggccggggcccgggacctctccgctgaccgtccccgcctccagcatagctttagctttgctgggtttcccagtgccgctgccaccgccgctgccaccgggctgctggacagccccacgtccatcaccccaccccctattctgagcgccgatgacctcctgggctcacctaccctgcccgatggcaccaataacccttttgccttctccagccaggagctggcaagcctctttgcccctagcatggggctgcccgggggtggctccccgaccaccttcctcttccggcccatgtccgagtcccctcacatgtttgactctccccccagccctcaggattctctctcggaccaggagggctacctgagcagctccagcagcagccacagtggctcagactccccgaccttggacaactcaagacgcctgcccatcttcagcagactttccatctcagatgactaagccagggtagggagggacctcctgcctactccagcccctaccctgcacccacatcccataccctcttctccctacccatcccattccccacaggccctacattaacaaggttaagctcaacccctttcccccagcacctcagaatgtgccctccctctccccctcataaccccacctaacataaggacaagtcaatttgtcagtagcttcttctggcttgaaaccccctccctggattttatagcccacttaccatgcataacagacaagtcccatattttgtcagtagatgcctttttttttccggcttaagccttaagtgccaaatcacaagagaaaaagcagtaacagtttacagaagcaacttagtgccttgtaatctaactttgtcactgtgactacattacctcttcagcgccagagggcacccgtgggcctcccggagcctctgcccatggcggggtggagacccggaaccagcagccccctccactggcgacacaactgcaccttccctcatttcagtctcccgcacacttattcctcctcccctcttcccggtggcacctctccacctgtacccgcccccgccccmccaccccggccccttggaagagttgttgccagaccagggttttgggggaaacctgtcttgacattcaaaacctttttcttcccgatctgaacccctgttgactaatcttgcctgggtttgtgtaggtctgcaggaaggaaggctgaaaaagcggacgaagattttgacttaagtgggactttgtgatttaattttttcttttttttaagtggggaggaaggggaagctagatggactaggagagacttgattttggtgctaaagttccccagttcatatgtgacatctttttaaaaaaaataacaacaaaaaaaaaatgagagaaaagctaaaaaaaaaaaagtaaggggtgagcagttaatggtattcattccacatacaatatctgtgtaaaacgatttcctgtagaagtagctttaatggtttttgctctagaataccgtaggtctatccttagagcactcacgccatgctttcttccctgggttttaaacttcatataactttcagaaattggagagcaaaaattttgcttgtcactgcacatcaatataaaaaagcttatttaacttatcaaaacgtatttattgccaaactatgcttttttttgttaattttgttcatatttatcgggatgacaaatccatagaatatattcttttatgttaaattatgatcttcatattaatcttaaaattttgtgacgtgtctttttcctttttttccacagttttaatatattattcttcaacgacattttttgtaactttacacttttttggttattttattttaaaaaaatgaaaaattaatttaaaaaaatgcaaaaaactgttggattatttattttagaaattcccccctttgtgttggactgcaaattgagtttctttctctttaggcctttcacaactaggactgagaatgtatgtaaaagttctgtgacagtacagaaggaaaacaactttttatgtatagcttctaaaaggggaaaaaaaaaaaaaagagaaaccctttgacttccacgtgcccatctcaagacattccactcacagatttgaggttctggattccaggtctggagttttccaatgttaatgtaaacagaactggcacacacacattaagatgaatgtaattattattcctcttgctggtcactaccgtcgctttctatttctctttctttgtgtgaatttatttaaaagaaaaaaaaactttttgtaacgactatttgcagtttaaaaatcaataaaccccgttttttcaagaaaaaaaaaaaaaaaaaaaaaaaaaaaaaaaaaaaaaaaaaaaaaaaaaaaaaaaaaaaaaaaaaaaaaaaaaaaaaaaagggcggcccttttaaan

SEQ ID NO: 223 - DNA, 1148 bp, Homo sapiens
  misc_feature (71)..(71): n equals a,t,g, or c
tctttagaagttacgcctgcaggcaccggtccggaattcccgggtcgacccacgcgtccggtggaatcgtnttccagaacaaaatctcccagtgctttgtggtgtactgaaatcatgtctaagaacagagaacttaacagtcacatgcctttttaaaaactggaataggctgggcgcggtggctcaggccggtaatcctaagactttggaaggccgaggcgggtggattacctgaggtcgggagttcaagaccagcctggccaacatggtgaaaccccatctctactaaaaatacaaaaaattagctgggtgcagtggtgcgtgcctataattccagctactccagatgttgaggcaggagagttgcttggacccgggaggtggagggtgcagtgggccgagatcgcgctactgtactccagcctgggcaacagagtgagactccgtctccaaaaaaaaaggtgtcataaacctctgagactgtagcctgcttcttagcttctcattgagattcctagaggtgcgttcgagttttcagagtaattttccagaccaaccagcgtcagtgggaaatctgacctcttttggcaaactgcgatcattcattttcctgagtcccctggtggggtggggggaattctgcctcaggaccctgaggggtctttggggcaagatggccttggtaatgcagccactaagaacaggacttcattcaaaggcataatgaagtaaccagggtgaccatcaagtaaaattaaagcacaagatcattgtaggaggcttccttgtcaaagacgtgaacgtgggatttccaacgcaccacggtgtgtccactcatcactgcatgttaggaactgctgtctctttgggacacgagttaaaagaacacactaatttctggagtgtgcctgcagcttcacggccttcattttgttactaagttattttctggaagaacagcaaaaatttcaggttgaaaacagaactttccaagtgctactgaaattccgcagagaattacgctgcgatggtgggtttcttaccctagaaacatcctaacctgtatccacagaagatgtccttttatttttttaaaagatcaataaaatcaagagaaacgaaaaaaaaaaaaaaaaaaaaaaaaaaaa

SEQ ID NO: 224 - DNA, 2349 bp, Homo sapiens
  misc_feature (2301)..(2301): n equals a,t,g, or c
  misc_feature (2342)..(2342): n equals a,t,g, or c
  misc_feature (2345)..(2345): n equals a,t,g, or c
gggcgcgccctggcacccggccccggccggccagggaaggcggcccctcctcggtcgccccgcctttcactcccgttacacccgggggaaggtgttcccgagccctctcccacsctcrtcccgcctcctcgcttcctcggctccagcctccgccggcggagccactatgccagacagtttcgacactttgcaaagacaaagagccctagaccggagggaggaggaggaggaagaagagcggagagagaaggaagaggcgatgtgagctgggaagggggcaagtktccgggacacccacacccctgtattctyctccgaaccccttcatgcccaaatcccggaaactccagcgtgtctccagccgtgttggtaccattttcagatttcatcttcctaaactggaaatgtcaatgagaggaaattaacacccccaagagctgcagtgagcaaatgcattgagcttgggtcaggacaattccatttggggaccagagatggacggtcactcagcctatggaggttttgattcccaccatggccatcacccagtttcggttatttaaattttgtacctgcctagcaacagtattctcattcctaaagagattaatatgcagatctggcagaggacggaaattaagtggagaccaaataactttgccaactacagttgattattcatcagttcctaagcagacagatgttgaagagtggacttcctgggatgaagatgcacccaccagtgtaaagatcgaaggagggaatgggaatgtggcaacacaacaaaattctttggaacaactggaacctgactattttaaggacatgacaccaactattaggaaaactcagaaaattgttattaagaagagagaaccattgaattttggcatcccagatgggagcacaggtttctctagtagattagcagctacacaagatctgccttttattcatcagtcttctgaattaggtgacttagatacctggcaggaaaataccaatgcatgggaagaagaagaagatgcagcctggcaagcagaagaagttctgagacagcagaaactagcagacagagaaaagagagcagccgaacaacaaaggaagaaaatggaaaaggaagcacaacggctaatgaagaaggaacaaaacaaaattggtgtgaaactttcataacacatgttcaaattttatcatgccagtaggagaaatctcagctccacaacccaagcaacatttgtatggatttaagagtattttaagaagacatactgcttgattttaatacattgatcaggccatccaggacaccacgattctcccaaagtaccttgaactcttagtgattgagactcaaaaaaacaaaaaagacttgagacaatgttttcttcaacatgctccaaatataagacatttgtttgctgtacagaaagtatcacaaatggaatatatcagtacctctcaagctagtgtttctagctaaataaatgggtgtatataattttatggtggaaaagaactgtactgtctgttatgatttccttcaatgtgcataatgataaaataaataattttaatattcttttgtttccatggttacctgacctaaattagataaattgtagggctttagctttcttatttttgtcaaaagttggtgttgacatacattccctctaatttgaactggtattgtttacgtttgatacaacattaaggaatttgatgattttcatttcatgaaaatgacattaaatgcaataattttacttatcataaacattttgtacatcattattttcttttggattagtgttgtcatacatgtaatttatatcacatgtataaacattgaaaatcaactaaaatgacatttgttctacattataacttgtgagtttcaagaactagtattagtagttttttcctttcattatagattgtaagatgttgtggtatctttgagtgccttagttcttccttcctcccaaaagccattaatttacaaatgcttaaagccatcaggtcaaatatttcaaagcctttagatgatttctgtactagctttagatgtctgacgttatgtaggttacctgtgttcttggctaggaaaacattattgattcattaaatcataaaggtgggaataataatcttttatttatgatgttgattggctccaaaatagtcttaaggaaataaatactgggtctgtaggggaaaagtagacttcatagtttaaaatcccatttaaccttttcaccgcagttggaaatgcatccagcctgattttcccatccntttgggattttttaagggtttttactttcttaagttactgnccngaat

SEQ ID NO: 225 - DNA, 609 bp, Homo sapiens
ggcacagccattttcgagtgatgcctgatctcatcaatctagcgggagagacaggataacctgtccgagagtatagcgccactatgactccgccggaaaaattactttaaaaatcgccaaaaattacttggagcaaagggcagtcggcggagcttcgccaaggctggcgcagtcggttttgacctgtagcagagaaccaattctggagaacagcctcacttctttgattgaatacttacataatgcattggaacatgacatgagattaaggtttaataatgatagaatgaagaccacaataaaagagrcctctacttagctcagcaattctwacctttctwacctatttratgaagatgtcttttgaaaggtgtactgcaaggaacaaaatgtttgtaaattctscttttaccaaggtttcttttttarttgatgccaaagagttccaatattgaacatcttaagtctgttacttggagtatggattgagtttggagcttactcagaggactacaggagagtatccaggaggtggataattactgtaccttcctcatggaaaaagttttatttaaagtgttatttctcattgaatactatcaaaaaaaa

SEQ ID NO: 226 - DNA, 3150 bp, Homo sapiens
tctcttacaagttgaagctgcatggggcttagaaactttgcatcttgaactttcgaacaacctcaagaagtagttcagtccacatgtgtggccactttccctgaggcttttccaattaccccaattcgaattgcctgtggcaaggagtgttggccattgggaaatatcataggtgwtggsccccagtgtagagttatgttcataagtcttkgagttggaaacctttactttccttcataagtccatctattcctatamcattcttaagamatgttacttgggttatggtcaacttatgtcgccacaaagacccaccaccaccaatggaaaccattcaggagattcttccagccctttgtgttttaattcatcacacagatgtaaatatactggtagacacagtctgggccctctcttaccttactgatgctggcaatgaacaaatacagatggtaatagactctggaatagttcctcatttggttcctctgctcagccaccaggaagttaaagttcagactgctgcacttagagctgtgggcaacattgttactggaactgatgagcaaacacaagtagttttgaactgtgatgctctttcacacttcccagcactcctgacacatcccaaagagaaaattaataaagaagcagtgtggttcctctccaacatcactgcaggaaatcagcagcaggtacaggcagtaattgatgccaatcttgtaccaatgataatacaccttttggataagggggattttggcactcaaaaagaagctgcttgggccataagtaacttaacaattagtggaaggaaagatcaagtggcttaccttatccaacaaaatgttatcccacctttttgcaacttgctgactgtaaaagatgcacaagttgtgcaagtagtactcgatggactaagtaatatattaaaaatggctgaagatgaggcagaaaccataggcaatcttatagaagaatgtggagggctggagaaaattgaacaacttcaaaatcatgaaaatgaagacatctacaaattggcctatgagatcattgatcagttcttctcttcagatgatattgatgaagaccctagccttgttccagaggcaattcaaggcggaacatttggtttcaattcatctgccaatgtaccaacagaagggttccagttttagaaagatgttgtggaagttaggtacaatgcagcactgagatatatatatatatatgtgtgtgtgtatatatatatatatatacatatatataaaaaggtttgatccatcaagcttggctcatgggatctgctgctgcattaaatcgggaaagaaaatgtgaagatttcatttggaatcacagaaaatgcccaaatgaggtcaagatggcgagtgggtgcgagtgagaatgagtggcaaaatgtaatgaaaactttacatgaatgcttatttaggttgttcaaagtaaaaagggctacaggtcacagatcgtcagtgcctgagaaagaacattgacttactctatatcaattgaggggaaagtgcagtaccgtcatcttcaagccttgtaagcataaaagagaataggctgcccatataagtcaaaggaaaatgagcccaggccttgctatgaagcagtgtgtgaatggacaatgttgaatgaatgtctggctcagtgatggagagccaggttcatctttgaaatctagggctcttcactcatgaagcagactcctagtcctggagtgactgtgtacgagagcgtggttgtggtgctgtatgtgaacgcatgcaagcttgattcaccttcagggggctgataacctagtaaatcatcaaaatgagatcataagtgttaatgtacactggacatgaaaacaaagactggtttagcagcagacattggtttactctgcagcctgtgttttctgtttccccctttcccacctccttccccccacccaatccttttttttttcttttttgcttttcttttctttttttttagtttttatttactttacctagtatgcctttttttagttgcttctcaagtcagaaaacttttcaggaaggtttccctgtgcatttgcaccagatgaatgtttgatgctatgaaaagctttccatatcatcaaaactaatttgtgtagatttttgcatgaaaaaaatcataaatttccctcaaaatagactgtgttgcagtacacaagttgccataatagtataaaacagtaaaatgtgcttaaaaggccatccttttcattttcagagataacataaagatctttgcatgaggtaaatctacagcatagttcatttttagattttgttgagtcctgtaaagaagaagaagaaaaaagtttcagttgtggtagaataccgtgctgtgtttaaatgttacttgttttcaaactttgttttctatgaaaatgatatggaaacttctaaaatggaatttggtgcatatgtactgctgaataaagaccgatgaagaggtttgagtagatgtacaaatcaagtaatggtttgaacacctttaataatatgcctaatctgttcaattgttttagaatctttttatcttagatgtaggcagccatgaacaatctattttgagccactttagggagaaaactttgtatttttaaaacttgcataaaagttatgcaagtggtttttataaattggaataatacctcagttttgaggttatgcacactaaattaaatgtgacataaattaatttgtacaaaaagaactctttataaggtggctcattgtaggaaatcctgtgccttcccctttgagcacaagtgttgcatgaacaacagtttgctataagaaacataccagattagccaccattagcatctatatctactttgtgtttaaaaatcaactggtaattctgaaacactgtagaatggataaaaattattttgtgatcataactctttgttgaactagagtatttttgcagcattccttgtcatcagaaacatggttaaagtttaaaactagaagcagcagaaaactagcttgtaaaatttatccaagtagagtgcaggctaggctgtcttggggaaataaacattaaaacttaaagcaawrttttaaaaaaaaaaaaaactcgagggggggcccgtac

SEQ ID NO: 227 - DNA, 3355 bp, Homo sapiens
  misc_feature (1815)..(1815): n equals a,t,g, or c
  misc_feature (1818)..(1818): n equals a,t,g, or c
  misc_feature (1935)..(1935): n equals a,t,g, or c
ctcgcgagggttcacgtgagagcgtggggttctgagtcgcgagggttcacgtgagagcgtggggttctgactccctcgtgtcatttcagccgcggcgagtcctttgcacatgttggcaacacacgcatccgcatcggcctccctgcccacaaagcgccacaacggtgaccagccggagcagccggagctgaagcggatcaagacagaagacggcgagggcatcgtcattgccctgagcgtggacacgcaccggcagccgtaagggaaaagggtgtccagaactagcgaccgggagagcttttctttaacgatatcaactctgtggtgccaaaaggagacgcggcctcccgccagcactcgggggtgcagggccctgtggttggacttcacctctcagcactgaaaacccaaaacccagctggccttaacactccttaaagacagaagtcacacttgaacaaaacccacacacaacaaaacctgatttgggagacggtgtctccactgagcacctgctgggctgagcttctacctacgagtgaaactctgtcctcccgcgaggaccaggcatcgctgtgtgaggacggcacggccagcgcctgctgtgagtgggtctcccaagactaggcctcaggacgcggggggagccatccccgccgccctcacaggacccaccaggcagcggagacatgtggaattagagtattttgaggtgtcctttctttacaaaataatggggtcttgggcatttcacatcactccatttctactgagactttcagaatcacacaggccctttccgtggatttcatttggggcaaagaaacaacgtagttttgtttttgttttcagcctatggaatgatttccttttgtctgtcttgttcaagttcagacgaagctactctggcatctgcacatttccgtgttacagcagctgcctgatgaattttatccacctccatttcagcatgtggctcgcgtggacaggtggacggacgctgtggccgcatggaaccttgagaacccagggacgagccagtgccgggaaggaactgccgggactcaccgagctgcacttaactgttctctttctggctattttttgttgtttgtttctttgtgttgactttgtccctggcaaaattttccactctgagtaaaacaagtctcctaagtattgtgtatgtttaaaacgacagaaccatttctacttcatttggaaaaagattcagtcttttatcacaggcccttttgaaactcagatcccaggtctctccgtggtatgtttgtatttggggtgtccctccggctctaggcggcctctgacccgctgtctactccccaccttcggtgagcggccgccatggtggagcagggtccgagccacgtcctgcagggcacrtctggggcatttcctgktttgtggtaggaaatgtccctgacctttcagaaccgaacccaatcctgaggctgactcctctacggaaaatgaggacaggacgggggtgagggaatgagagtgggaggtccctgcacctcctcgcccggctcctcaggaagaaaaccgctggcccttcccgagtgtgccggccgagggccgagggccgtgcacatggggagagggcgtcagcctgatggctgagcttttaaatgtcatcatcataacattatttatttaaatgtagttaytttggtatttatttaggcaattttaaaacatttattatttacataaagaccaaatatgatgaatctgttccgtgaattgtgtcggccctcagcatggggctggggcagcgtcactgcggtgacnccnattgaaaggtatgaaatgactgcacactagctggattatcactcagccgtttaagaaataaaagcaaaaccatcacgtgactgagaccgtgtgtgtgaccgcagcaaagcgcagtgntgggatggatcagagcccctcggtgcagctgtctgcatcttccaagcactttacagataccttggaatgtatatttttgtcttcttactcagaaggtttgcagtttgtaaaataatcaggattctgctctgtcctgtgtgtggggtcagctccctccacagagggctccagctctgttggtcacagctgatggggttctctgattgataggagacgagctctygagctctaaggaacagtgaggtcgccggtggggagcttggctgggacaccaagcaaatgcatcgtatgtccccttggagacgtttttatgcagctgtgtatgttactatccagaaggagtcgggggtagactttcccgtgtaagctcagtccataaactggttacttctgatcctggaacgtggacttcacatgataggtctggatctgtttctgttgggatcacaggtaaggaaaatgtccattcaaatggtaaagaagggaggagggtgtttttttttttttttgctgtaggcaccattctgcatcttgaacccagactgaagtgtgcctctcacagatggaaggtgcacacgctcctgtctcctcctcactctgccacgttcacttggctttttcattggtacctaggaatttaagaatatcgaagcgagagcagtaacaaaccatagatgagcagactcccacaccgggttttcttgcccgtctttaaggcactgtttctaaattttgaacttagctctgaatccccaagaacttgagcacagcaagggttgctgagctgctgtcgccgcagccctggcccctggtgctggagctgcagcacctttgggagaggtcctgcgtcgtcctcagctgcgtcgctgtgaactcccgctctccactgtgttcctcagtgtctgcttttcaggaagtctgctgtgacctttgcccaacttctgagctcctcagggactaggaacaatttcagtagctttgccctgaaccaaacgagaaaacaaaagggaactcccgtatgacccacgtcacgtggtgcactcagagtgtgtgcggcatgatcctcggttgctcctcctctcactttagtagagtacgcggtggacagctgatctccttcagtcgtctacccacttccgtcattgtcctccgctagaataacagagtagttggtagtcatggccagaaggggggtgggggcagtgtgaggacttggggtttctgtgctgtgtgacacaaggagataagtgacaatcttgaagtcctaacttccactattctagaaagtatagtggtgatttgtgtgcaaagatttgaagttttaaaaaagtaccaagttcctgaaattcaataaaatatttttattaattttaaaaaaaaaaaaaaaaaaaaaaaaaaaaaaaaaaaaaaaaaaaaaaaa

SEQ ID NO: 228 - DNA, 1193 bp, Homo sapiens
gcggcgcctactactactaattagccggccggctcgacctttttttttttttttttaagattgggctcaatgatatatttgccggttattttattttttctaaaaacaatagaaaaaaatcaactttaaaaagcaaaatgtacttaaataaaaaaaattagggtttatagtacctataatactaggtactatatactaggattgaaattctgtgtaactgctataaacgttttattaaagttatttacatttaatggcaatatttacagagaaacattgtgtaaatcttaaaattttttaaaaacaattcttaaatacaaatctgttaaagaaaaaaaaaagatggtaagcataaaaaagttcttttatgcccaaagtccaatttgaggcagtttacattatggctaaatctttcagtctcaagactcagccaaggttgtgaggttgcatttgatcatgcatttgaaacaagttcataggtgattgctcaggacatttctgttagaaggaatcgttttccttacttttccttacgcacaagagttccgtagctgttcaagtttgtgtttcaactgttctcgtcgtttccgcaacaagtcctcttcagaaatgagcttttgctcctctgcttggacggacaggatgtatgctgtggcttttttaaggataactaccttgggggccttttcattgttttccaactccgggatctggtcacgcagggcaaaaaagctccgttttagctcgttcctcctctggcgctccaagacgttgtgtgttcgcctcttgacattctcctcggtgtccgaggacctggggctggtgcattttcggttgttgctgatctgtctcaggactctgacactgtccaacttgaccctcttggcagcaggatagtccttccgagtggagggaggcgctgcgtagttgtgctgatgtgtggagacgtggcacctcttgaggaccagtgggctgtgaggaggtttgctgtggcctccagcagaaggtgatccagactctgaccttttgccaggagcctgcctcttttccacagaaacaacatcgatttcttcctcatcttcttgttcctcctctttaagaaaggaaatagaaatcactcctttagcaaggttacattaaaataatcaattaccagattaatgctgtacaaatacaaggcatgaatacgttag

SEQ ID NO: 229 - DNA, 798 bp, Homo sapiens
  misc_feature (135)..(135): n equals a,t,g, or c
  misc_feature (589)..(589): n equals a,t,g, or c
ggcaaggtccccctttscccagtcggcggggaggaggccgtatttctgctggccagagacgtcgcgtccctggctgggcattcagtcacccccaggaaaggaggcaagtccacgctgggagttagaaggcatcgnctctaatccaggtttcgccatctcctctgctaagtgacgtccagcaagtcacttcactttcaggacctcaaatctcctccccagtagtaaaataggggtaataaaaacagctacagcggaagactgttgtgaggcacagagaaagggcttggtcattggaagcgggttccaggttctcaaccttcatttccttcacggttgaaggacgccaaagaaagcggaaagggtgtgcctagattgatcggtataaggctcactctcccgccccccaaagtggttgatcgttggaacgagaaaagggccatgttcggagtgtatgacaacatcgggatcctgggaaactttgaaaagcaccccaaagaactgatcagggggcccatatggcttcgaggttggaaagggaatgaattgcaacgttgtatccgaaagaggaaaatggttggaagtagaatgntcgctgatgacctgcacaaccttaataagacgcatccgctatctytacaaacactttaaccgacatgggargtttcgatagaagagaaagctgagaacttcggaaaaggctcatctgtcaccctggagaagggaaactgtacttttccctgtgaggaaacggctttgtattttctctgtaataaaatggggcttcttcggcaacaaaac

SEQ ID NO: 230 - DNA, 3013 bp, Homo sapiens
  misc_feature (1695)..(1695): n equals a,t,g, or c
ggagaaacggaccagtggactgcgaagaactcctaaacaggtggatccaggtttaccaaagatgcaggtcattaggaactattctggaacaccacccccagctctgcatgaaggaccccctttacagctccaggccgggaataccgttgaacttctgaaaggagatgcacacagtctgttttggcagggcagaaatttagcatctggagaggttggattttttccaagtgatgcagtcaagccttgcccatgtgtgcccaaaccagtagattattcttgccaaccctggtatgctggagcaatggaaagattgcaagcagagaccgaacttattaatagggtaaatagtacttaccttgtgaggcacaggaccaaagagtcaggagaatatgcaattrgcattaagtacaataatgaagcaaagcacatcaagattttaacaagagatggcttttttcacattgcagaaaatagaaaatttaaaagtttaatggaacttgtggagtactacaagcatcattctctcaaggaagggttcagaaccttagatacaactctgcagtttccatacaaggagccagaacattcagctggacagaggggtaatagagcaggcaacagcttgttaagtccaaaagtgctgggcattgcatcgctcggtatgacttctgtgcaagagatatgagagagttgtccttgttgaaaggagatgtggtgaagatttacacaaagatgagtgcaaatggctggtggagaggagaagtaaatggcagggtgggctggtttccatccacatatgtggaagaggatgaataaattcaaatcccgtgttgcaccctgcaccaaaawtttcagagaagggataawtagaagcctgcacagcwtcgtgratttaactgaagtgttttaaaaagctgcwtttctggctgttcaacatcctccctccttagcccctcctaagtcttaatgctgagatttmtaaagatgctggtactgacagattaatggcttgcctagagctgtgcaagaaacagcctgccagtctgtcattgtcagggaccagggcaaaaccaagagctgttsttccccagaagagccctgcaaacacattggktcgtgcttccctttacttcttctggtcagataccatgaatgccagtcatcagtaaatcttaatacacttttgctttattctcacatgccattcaccagattatttgatggtacaaagaagcagaagtgtaattttccttttcccagcatgacgaaaaattggagttctgccatttgagcagcttactggaaagatccagccttacttgtcttaaattgtccaacaaggtgactcattgcccggcaaacacttttaccctcagatgttactcatgatattataaaatatgaggccagtgctcaggtttgcatcataagtgagctatccctgaagggttttaattacttatttggtgtcctgattatatttgcaaacttctttataaaaggtgaaaaaagcacacaaaagagagggtgtcttcatattaaaccttcacaaccttcatgatttcataggattattttggaaatatagcacttgactttatgaaaggatctgggctaggtatattaggggtagttgccaataacctgaagaagctggcatwgtttacagaaacagatcaagggctataatttatngtcatttatagcagcagtatctattaatacatgccttttcctcccatccacctcccccgcacacacacaaagatgacctgggacatgatttttttattcccacattttcttggagcacaaacaactttgttgaggattttggaaggaaagcacaactgggtcctttattcatttctgggacagaaagagggtcagtggacttttgtgggcctccagcttctctcagagtctccccctctgcagcccatcctgggagtgtattaactggagggaagatgggtcttgcagtacatttgttttgcccagccatcactcttttttgtgaggagcctaaatacattcttcctggggtccagagtccccattcaaggcagtcaagttaagacactaacttggccctttcctgatggaaatatttcctccatagcagaagttgtgttctgacaagactgagagagttacatgttgggaaaaaaaagaagcattaacttagtagaactgaaccaggagcattaagttctgaaattttgaatcatctctgaaatgaagcaggtgtagcctgccctctcatcaatccgtctgggtgccagaactcaaggttcagtggacacatccccctgttagagaccctcatgggctaggacttttcatctaggatagattcaagacctttacctcagaattatgtaaactgtgattgtgttttagaaaaattattatttgctaaaaccatttaagtctttgtatatgtgtaaatgatcacaaaaatgtattttataaaatgttctgtacaataaagttacacctcaaagtgtactcttggaatggattctttcctgtaaagtcttatctgcgactctgtctcgggaatgttttgtctgttgccgtcagccgaactttgttatggagggagcagcctcacacaagcagaaacactcctgtggatggtattgtagcatgtattgtttattttagtcaatagaccctctccttataaatggtgtttagtcttcctgttgcatttcatgggcctgggggtttcctagcagaggatattggagcccctttttgtgacattaccaattacatctttgtccacgtttaatactttgttttggaaaatttaaatgctgcagatttgtgtagagttctaataccaaagacagaagtaaatgttttccatatactttgtcttgcctgtatgcagcccttgtgtaatatggtgaattagagtggtatttcactttgtattattttgtaaatatgtcaatataataaatagtgactaaattgaaaaaaaaaaaaaaaaaaaaaaaaa

SEQ ID NO: 231 - DNA, 810 bp, Homo sapiens
gttcatgcttcccagtttggcagatgtgagcaaactatgtataggaattccaaaggaatatcttgtaccggaattatcaagtgaagtacagtctctttggtccaaagctgctgacctctttgagtctgagggggccaaagtaattgaagtatcccttcctcacaccagttattcaattgtctgctaccatgtattgtgcacatcagaagtggcatcgaatatggcaagatttgatgggctacaatatggtcacagatgtgacattgatgtgtccactgaagccatgtatgctgcaaccagacgagaagggtttaatgatgtggtgagaggaagaattctctcaggaaactttttcttattaaaagaaaactatgaaaattattttgtcaaagcacagaaagtgagacgcctcattgctaatgactttgtaaatgcttttaactctggagtagatgtcttgctaactcccaccaccttgagtgaggcagtaccatacttggagttcatcaaagaggacaacagaacccgaagtgcccaggatgatatttttacacaagctgtaaatatggcaggattgccagcagtgagtatccctgttgcactctcaaaccaagggttgccaataggactacagtttattggacgtgcgttttgtgaccagcagcttcttacagtagccaaatggtttgaaaaacaagtacagtttcctgttattcaacttcaagaactcatggatgattgttcagcagtccttgaaaatgaaaagttagcctctgtctctctaaaacagtaaacatatcttacaaatta

SEQ ID NO: 232 - DNA, 1319 bp, Homo sapiens
  misc_feature (781)..(781): n equals a,t,g, or c
agcggccgcccttttttttttttttttttttttttttttttttttttttttttccgactggggcaggcgggctttattccgggtgctggagagctgtgggccccactcctcccccagaatgccaccgggttgaggggctgagcctcagcaggggtgagcgctcagagcaggaaggggatgatgggcatgcgcaggggcgggtagtcccggaactccttcaggtagctgcggtgcttgcccttggcccagatggtcatctgggtgaagcccaccagggagaacagggccactgggagacactgcgtcatgatggcgaaaccgatccaggaccccacctcgtaggtgtagttggggcaggacaccagcaggaagagccacgtgaaggggttcttggtggggtatgggatcttccgcgtcttggacccagcgggccgcaggtcccgcagggccatgtggatggagaagttgccgagctggcagatcacaaagatggcgagcgccagtttcacctgctgagctccgtaggtagggggagtgtagagagggtgattgatgtaataggccatccacgcggcgaagccccagtagtaggtgcagttcttgaagatgttgcgcaaaggcatagtgccatgggagaagcggtgcacgaagagcgtctccagcaggcgcttgatgtagtggaatgagtgacagatgcaggcgaggctggtcggggggagcaggctcagctggggctggtccggcaggtcttctgccttcccctaccctcctcccacctgcnccacttactgcaccmctgtatgccgactggacgtaaagtcatatttgtggccatagatgaagggcactcggaagtagaagagcaggtagatgaaaaggggccccgcgtactctgttaggaagaccgtcacccagctgatctgggcccccaggtcccggaagtacagtgtggccgtggtgcccacgggcagcttctgcagaacatcctcatccttcagggacttgcccttggggtccaggcggagggactggcgggcggggtaccactgcggatgggtcttagtgaagaggttcttgatctccgcaatggtggcgtggggctccacctgggggaagcacaggcgcagggacgtcagctcttgtccaagaaacacagcttctcccttgtctttgcgtccagaatctccacctcgtaatgcttcatggctccctcccacggcggctactgctccgcggctgctgctgcctaactgcgcggcacagcacaggctccctacagcgctcgcaaccgcagcgatagactccccttctgtcgtctt

SEQ ID NO: 233 - DNA, 698 bp, Homo sapiens
  misc_feature (698)..(698): n equals a,t,g, or c
actgacagtaaccgatccgaaattcccgggtcgacccacgcgtccggtgaaactggcgctcgccatctttgtggtaaggaggctgggtgtggggacggggtcgggggagtctgggcggccctaggctgatcctgcttctctgacagatctgccagctcggcaacttctccatccacatggccctgcgggacctgcggcccgctggtgagtgcctgctgggggcagggggacagctgggctgggtgagggggtctgactttctccttctgtcctgcctgccagggtccaagacgcggaagatcccataccccaccaagaaccccttcacgtggctcttcctgctggtgtcctgccccaactacacctacgaggtggggtcctggatcggtttcgccatcatgacgcagtgtctcccagtggccctgttctccctggtgggcttcacccagatgaccatctgggccaagggcaagcaccgcagctacctgaaggagttccgggactacccgcccctgcgcatgcccatcatccccttcctgctctgagcgctcacccctgctgaggctcagcccctcaacccggtggcattctgggggaggagtggggcccacagctctccagcacccggaataaagcccgcctgccccagtcggaaaaaaaaaaaaaaaaaaaaaaaaaaaaaaaaaaaaagggggggn

SEQ ID NO: 234 - DNA, 3568 bp, Homo sapiens
  misc_feature (3549)..(3549): n equals a,t,g, or c
  misc_feature (3558)..(3558): n equals a,t,g, or c
ttgctgcagcatagacaaactttaaaaatgtgataattgaaagagccaggaccaaaaggaggawtcggsaaccggggccytcktggggagacgggagatgacgggagagacggagttggcagtgaaggacgcagaggcaaaaaaggagaaagaggattccctggatacccaggaccaaagggtaacccaggtgaacctgggctaaatggaacaacaggacccaaaggcatcagaggccgaaggggaaattcgggacctccagggatagttggacagaagggagaccctggctacccaggaccagctggtcccaagggcaacaggggcgactccatcgatcaatgtgccctcatccaaagcatcaaagataaatgcccttgctgttacgggcccctggagtgccccgtcttcccaacagaactagcctttgctttagacacctctgagggagtcaaccaagacactttcggccggatgcgagatgtggtcttgagtattgtgaatgacctgaccattgctgagagcaactgcccacggggggcccgggtggctgtggtcacctacaacaacgaggtgaccacggagatccggtttgctgactccaagaggaagtcggtcctcctggacaagattaagaaccttcaggtggctctgacatccaaacagcagagtctggagactgccatgtcgtttgtggccaggaacacatttaagcgtgtgaggaacggattcctaatgaggaaagtggctgttttcttcagcaacacacccacaagagcatccccacagctcagagaggctgtgctcaagctctcagatgcggggatcacccccttgttccttacaaggcaggaagaccggcagctcatcaacgctttgcagatcaataacacagcagtggggcatgcgcttgtcctgcctgcagggagagacctcacagacttcctggagaatgtcctcacgtgtcatgtttgcttggacatctgcaacatcgacccatcctgtggatttggcagttggaggccttccttcagggacaggagagcggcagggagcgatgtggacatcgacatggctttcatcttagacagcgctgagaccaccaccctgttccagttcaatgagatgaagaagtacatagcgtacctggtcagacaactggacatgagcccagatcccaaggcctcccagcacttcgccagagtggcagttgtgcagcacgcgccctctgagtccgtggacaatgccagcatgccacctgtgaaggtggaattctccctgactgactatggctccaaggagaagctggtggacttcctcagcaggggaatgacacagttgcagggaaccagggccttaggcagtgccattgaatacaccatagagaatgtctttgaaagtgccccaaacccacgggacctgaaaattgtggtcctgatgctgacgggcgaggtgccggagcagcagctggaggaggcccagagagtcatcctgcaggccaaatgcaagggctacttcttcgtggtcctgggcattggcaggaaggtgaacatcaaggaggtatacaccttcgccagtgagccaaacgacgtcttcttcaaattagtggacaagtccaccgagctcaacgaggagcctttgatgcgcttcgggaggctgttgccatccttcgtcagcagtgaaaatgctttttacttgtccccagatatcaggaaacagtgtgattggttccaaggggaccaacccacaaagaaccttgtgaagtttggtcacaaacaagtaaatgttccgaataacgttacttcaagtcctacatccaacccagtgacgacaacgaagccggtgactacgacgaagccggtgaccaccacaacaaagcctgtaaccaccacaacaaagcctgtgactattataaatcagccatctgtgaagccagccgctgcaaagccggcccctgcgaaacctgtggctgccaagcctgtggccacaaagacggccactgttagacccccagtggcggtgaagccagcaacggcagcgaagcctgtagcagcaaagccagcagctgtaagaccccccgctgctgctgctgcaaaaccagtggcgaccaagcctgaggtccctaggccacaggcagccaaaccagctgccaccaagccagccaccactaagcccatggttaagatgtcccgtgaagtccaggtgtttgagataacagagaacagcgccaaactccactgggagaggcctgagccccccggtccttatttttatgacctcaccgtcacctcagcccatgatcagtccctggttctgaagcagaacctcacggtcacggaccgcgtcattggaggcctgctcgctgggcagacataccatgtggctgtggtctgctacctgaggtctcaggtcagagccayctaccacggaagtttcagtacaaagaaatctcagcccccacctccacagccagcaaggtcagcttctagttcaaccatcaatctaatggtgagcacagaaccattggctctcactgaaacagatatatgcaagttgccgaaagacgaaggaacttgcagggatttcatattaaaatggtactatgatccaaacaccaaaagctgtgcaagattctggtatggaggttgtggtggaaacgaaaacaaatttggatcacagaaagaatgtgaaaaggtttgcgctcctgtgctcgccaaacccggagtcatcagtgtgatgggaacctaagcgtgggtggccaacatcatatacctcttgaagaagaaggagtcagccatcgccaacttgtctctgtagaagctccgggtgtagattcccttgcactgtatcatttcatgctttgatttacactcgaactcgggagggaacatcctgctgcatgacctatcagtatggtgctaatgtgtctgtggaccctcgctctctgtctccaggcagttctctcgaatactttgaatgttgtgtaacagttagccactgctggtgtttatgtgaacattcctatcaatccaaattccctctggagtttcatgttatgcctgttgcaggcaaatgtaaagtctagaaaataatgcaaatgtcacggctactctatatacttttgcttggttcattttttttcccttttagttaagcatgactttagatgggaagcctgtgtatcgtggagaaacaagagaccaactttttcattccctgcccccaatttcccagactagatttcaagctaattttctttttctgaagcctctaacaaatgatctagttcagaaggaagcaaaatcccttaatctatgtgcaccgttgggaccaatgccttaattaaagaatttaaaaaagttgtaatagagaatatttttggcattcctctaatgttgtgtgttttttttttttgtgtgctggagggaggggatttaattttaattttaaaatgtttaggaaatttatacaaagaaactttttaataaagtatattgaaagttaaaaaaaaaaaaaaaaaaaaaaaaaaaaaaaaaaaaaaaaaaaaanaaaaaaaanaaaaaaaaaa

SEQ ID NO: 235 - DNA, 1889 bp, Homo sapiens
  misc_feature (1)..(1): n equals a,t,g, or c
  misc_feature (3)..(3): n equals a,t,g, or c
  misc_feature (10)..(10): n equals a,t,g, or c
ntntgttttnttttttttttttttttttttttttagattacattgacattttaatcagtaaggcagatgccctccaagatgtgggcgggccttgtctaatcagttgaaggcctccactattccacccacagtaaccaccctcccacacaggcagggcctccctcctcatgtggcagacagaagtcaggacactgggggctggaaaccaacttataaaactgaaagggccaggacagaactgatagcaccctcccagggaggtcaggagcaggaggtggtggccacagaagttcaccagcagcccaaggagccctttccccaaatgtccatgggatctgcgtgcttggcagccaagaggggctgtggcccttcacgctggacttgggatgcctggaccctctggcccttctcacacgggaaggagaggtttctccctgaatggagggcagggaggggccgggagggggcgtgggatcccacctctgctgagccttcacagagggggtccttgacctttgctctcaggaaggagcccgtgccagctgatactggagtaggagtgggtgaagaccctccgggctcccgagctctagaggaaggtggtcctgacatggtttgggagcagagaagaaaggaggttgaggttggggaatccacccctgttctgggctgggaagcacttgcagaccacagagatttccagtgggaagtgatgtggcccctccctggctatgtccctggctggcccctgcgctgatcagagccacagaaagtgggccactttggggaccccctagtccccctagtgacaagagaagagaaggtggtggcaggatggtggtcaggcaggacgtgtcaatccttgcccgctggggccaggctgcgggggagcagcttggtgtggccagaaggcgacagagcggtccctgcaggggagtccagcttcaccttgtccaggatggtcttcttgatggcggctggtgacacctgctcctggtcagccatggactgcagctcccgtgtgcggatgcaggaggcctccacagcgttgatgagcagggagcggaagcccccactctccagcacatgcaaggcatggatggtggccccaccaggagagctgacgttgtccttgagctggcctgggtgctgttctgagtgcagcagcatcttggcagcccccaggagggcctgggccccgaggcggactgccaggcgccttggaagtcccatcttcacacccccatcagccagggcatccagggctgtgaatgcgtaggcggggccgctgccactgagccccgtgacggcatcaatcaggtcctcttccacctccgtgcagaagcccacgctgctcagcagctgctccatgagcctcccgtcctccacctgggcgtgcgtgcctgtggcatacacggtggccccctcccgcaccacgactggagtgttggtcatgcagcggatgaccctgggggctggccgaaacgctgacagcttcttctcaatggagctgatggtgacgccggccgcgcaggacaccacaatgtgtctgtcctcaatgtcggcgcctatttcatccaggatgaaggggatgatgtgtggcttcacagccaggaagagcacatcactgtgctgcaccgtctccttgttgtggggtgtcaacttcacccccatcttcctgagagcagaaactgtggccaggtccatgtctggggagctagccattatcttgtgggcagccaagacgcctgctgctgtgaagcccttggccagggcaaaagccagctggccagcgccgatgaagcccacgctcatgctgtccggagacccctggcccaaagcccccacagatggcaccggctccctcagcgctgcggccgccctctgcc

SEQ ID NO: 236 - DNA, 4088 bp, Homo sapiens
  misc_feature (9)..(9): n equals a,t,g, or c
  misc_feature (36)..(36): n equals a,t,g, or c
  misc_feature (100)..(100): n equals a,t,g, or c
  misc_feature (3950)..(3950): n equals a,t,g, or c
  misc_feature (4032)..(4032): n equals a,t,g, or c
aagtggccnaattggttactggggacttgatttttntggaaaacatcttgcaaattcacactggcattaagaaaacccaagtttcaaaaattttcctttntttctctccagataatgtgttttctgtgcaaaaataaatatctgaaaattgcactaatacttattttaacttctatattatgaataatctgcacatgctgctttacagacgatacatatttgtaaacttactcatgcaaaattagtgtgcgcaacagggatattgttaattttcatacttaaaaatgataccttattatcttttaaaaattgccaaactctctgaaatggttaacaaatcttatatggatattcttgtctgccagctaaaaatcaatttatgttgctgaaaacaaaaagttatacaagaaaaagaaacatggtttttgttttgcatttttgatttttaaatgagaaaatttataaaagaaagaaattcatggtcacaaaattttaacattttaatcctaaacattacagggtaaatagatactggaccctatctccatactccataaaatcctaacttttagtttccatttcaaatgttgctgtaaccactaaaacactagtggttttacaacctctggattatggaaatacacatttctgaaataaatgctacaaaaacaacaatggaagaaagccaaacaaacagtctccatgaaggaaaaaaaagtggaacattttgaagcttttagacacttctctttccatgtcttatgattaacctgtcaattcagtgcattgtatggtcatatgtaatggtccccatggtgaacaaacatctaactagtgtccattgattccaagttagtagatgatgaatctttctggatactttcaaagatagccgccagctcagggttagaactgatctgtgactggaattcactcatcagtggactcttctctgcttctggaatggttagyagtgctgctactgctctcatggcagatcgctttaattcatcttgtttttcaaactcctgctttactgagtttgcctttaccttagttgtacatgttgcacgtaatggctcaacaagtcggtccaacctctgcagtactgcacttggacaaagggtagacagtctcaccaacattaaaaatgtcagcatcttaatatcataatggtccttcaaaccatcttcaacatgatttagaaattcaaagatatcaagtctatcaagacaactgtctagaagtgtgtacatacactcaaatgctgcctttctaatatccagaccatcatcaaccgtatgtttaaatggacccatttctacctctcttataagctcctttctaacttttgtttcattgtaaagatgtggaagaacagtatccaatagatcccttattaatgatggcttgttatgtgctgctgaattaaatgtgaccaaggctactcttctcacattcaaatctgggtcttccaaagtttttaggaaatcacctatgcagttctttaacagtggatcaataggttgtggatggtcagaaattgtaaatttcacagccgtaaccactgagcttcgggcatatgatgagcctgatatcaagtaccccttaagccgtggaaggagagtttctggatcaattagagtgagttttcctagacattcagcaacaacatttctggttccttcctctgcacactcacagtgctttagtaataaggcccagatgttttcaacatatggtttaaggcccaccactgatgcagagctaataatttccttcaaggaatgaagtaaaagatactgccttttgggttgactagttatttcttgcaggacaaacggcagatattcaggaaggttgcccacactaatgctgcctaatgcataggatgcagctgatttgacttcttcactaggagatgagaaagcttctagtattacagattttagttccaactgtccacttaagtcaatatgatgcccaacttctccaagagaaagtagagctaagagacgaatggaatctgtagaccttgagttcttgacatcttgaataaactgacctactacagctggtccctctttagggcatgctcgagtaagggcagctacacatttggcaatggaataataagactgcttatgagtaagagctgtgctctgagagtaaactggaccagtcagcatgcgcaacaaatccatgtatcctaaattatttgttccagtgacaaccagagcttggaaaaagtctagcatggcactaagagctcccccctgcaataagggtgatctcacaagtccaataagttcattgagaatggatccacttatctttgaaagggaggagggatatacttttgccaaagtggtaagaaaactgatggccatttgtgaaacatgcatatcactttcgctgataagaggtgggagctcatctagaactgcatcaatcatggcagctgtcaagctgtcactatagttttttattagaatatcaagggcagaaagagtacccagtttcaaagctctctggttttttctaagaaatgaagcaaggataggaaccccttctcccagaacaggcctcaaatctatcttcaaaggtgacccagcaatcagtgtcaatgcctttactgtagttaacctggtaatttcattctttagtctctccaagaaaatctgaagtgtattaggcaagtcagaacccaaattgtctccaaggttgcrrayaatttgtcccatacaggaaatagccctttccttgacttcctgatcaatgtcagctgcttttaatctcttaatggwacaggtaaatagatctttgatataaggagttgcatcaaacgaggaaggctgatctaaaggacgaattactttgacaagctgttgagtaacaagaagtgcttcagatgtaattttgtaaaatgggtctccaacacaagccaccactggaggaaccaaagcctgaacgtgaggatggaagacttgaggagaatggttacagaggattacgtatagacatgacaaagcatcgatcttcaaattcgatgagcttgatttatcattcagtgagaaaatgattcctggtacaagtacaggaatgtgttgagttagggccccaggtaatacatttaccagctcagttaacatgttaaaacaacactgtcgggtcttcacacttttttctttcatctgtttgtgaagagctttaacaatgttgggaacctgactctgaagcattgttaaaggtgtttctccctgctccattgcatcagggtcacatagccaactttgtacaggacgagtttgcttcaaaagagaaaggtatgcgtgaaaaacatctgcctttacattctcttcacgctctttaaatctggatattagtgcaggagagacggtcttgtagaattctggaagcatttcatgccttgtgctaactacagcatccaagcacttcgcagctgcacgtctcactttccaactcatgtcatcatcatcactgtattcatcatcactcccttgatcatcatcatcaccaccatcagcatccattgcattttcatcttcatcttcatcatcgtaattataatttggatcataggtaagatatttaagacaaatatttataatggtagaaacatgaggatatacttccttaggacatcttcttacaaatgattcaaaggcttgaatacagtactctcttaattcatcatcatctacattgcaaaattttaccaccaaaggaattatcttctcaaggtattcacctattctatgaccagcttgcctactaatagcagcaatacattgtatgtaggttcttgttgttgacatagaatcatttttggacaactctgacaacagatgttcaataagatctacaaaaactatatttcccacagcttcataaccagatggccaagagcgataatggttcttttcctncactgcaagtctagggctggtcaactggggaagtagacaggtcagaattgaaggatggaaattaacaagaagtcctccttcnctgctcaacatatcagccataatatccaaggcttctagctgaacagagtctctacc

SEQ ID NO: 237 - DNA, 506 bp, Homo sapiens
  misc_feature (482)..(482): n equals a,t,g, or c
gcttggtaccatgtgggaagcgctgtgaagagttgttgccttccaagatatacccaaattcccagttccagcccgtgtcattaaaactccgctggcgtgaaagatgacgtccttagcccagcagctgcaacgactcgccctccctcaaagtgatgccagcctcttatccagagatgaagttgcttctttgttatttgaccctaaggaagcggccacaatcgacagggacaccgccttcgccattggatgtactggcctggaagagttgcttggaattgatccttcctttgagcagtttgaagcaccgytgttcagtcagctagcaaaaaccttggagcgaagtgttcagaccaaagcagtaaacaaacagttggatgaaaacatttcattattccttattcacttgtcgccttacttcctgcttaagccagcacagaagtgtctggagtggttgattcacaggttccatatacatctctatnatcaagatagcctcattgcttggg

SEQ ID NO: 238 - DNA, 2164 bp, Homo sapiens
ctctagcccgggcggatcccccgggctgcaggctcggcggccgcacctgcccaacccaacccgcacggtccggaagtcgccgaggggccgggagcgggaggggacgtcgtcstagagggccggagcgggcgggcggccgaggacccggctcccgcgcaggacggagccgtggctcaggtcggcccctccccaacaccaccccgggcctccgccccttcctgggcctctcggtggagcagggacccgaaccggtgcccatccagtccggtgccatctgaagcccccttcccagaaaatgagccacagagcaagctgaccccagcgacacagccccccagccctactgtatttccgttcctatcaaaaaatggatgactcggagacaggtttcaatctgaaagtcgtcctggtcagtttcaagcagtgtctcgatgagaaggaagaggtcttgctggacccctacattgccagctggaagggcctggtcaggtttctgaacagcctgggcaccatcttctcattcatctccaaggacgtggtctccaagctgcggatcatggagcgcctcaggggcgcccgcagagcagcactaccgcagcctgcaggcatggtggccacgagctgagcaaccggctggtggacctggagcgccgstcccaccacccggagtctggctgccggacggtgctgcgsctgcaccgcgccctgcactggctgcagctgttcctggagggcctgcgtaccagccccgaggacgcacgcacctccgcgctctgcgccgactcctacaacgcctcgctggccgcctaccacccctgggtcgtgcgccgygccgtcaccgtggccttctgcacgctgcccacacgcgaggtcttcctggaggccatgaacgtggggcccccggagcaggccgtgcagatgctaggcgaggccctccccttcatccagcgtgtctacaacgtctcccagaagctctacgccgagcactccctgctggacctgccctagaggcgggaagccagggccgcaccggctttcctgctgcagatctgggctgcggtggccagggccgtgagtcccgtggcagagccttctgggcgctgcgggaacaggagatcctctgtcgcccctgtgagctgagctggttaggaaccacagactgtgacagagaaggtggcgaccagcccagaagaggcccaccctctcggtccggaacaagacgcctcagccacggctccccctcggcctattacacgcgtgcgcagccaggcctcgccagggtgcggtgcagagcagagcaggcaggggtgggggccgggcccgcaagagcccgaaaggtcgccaccccctagcctgtggggtgcatctgcgaaccagggtgaagtcacaggtcccggggtgtggaggctccatcctttctcctttctgccagccgatgtgtcctcatctcaggcccgtgcctgggaccccgtgtctgcccaggtgggcagccttgagcccaggggactcagtgccctccatgccctggctggcagaaaccctcaacagcagtctgggcactgtggggctctccccgcctctcctgccttgtttgcccctcagcgtgccaggcagactgggggcaggacagccggaagctgagaccaaggctcctcacagaagggcccaggaagtccccgcccttgggacagcctcctccgtagcccctgcacggcaccagttccccgagggacgcagcaggccgcctcccgcagcggccgtgggtctgcacagcccagcccagcccaaggcccccaggagctgggactytgctacacccagtgaaatgctgtgtcccttctcccccgtgccccttgatgccccctccccacagtgctcaggagacccgtggggcacggaacaggagggtctggaccctgtggcccagccaaaggctaccagacagccacaaccagcccagccaccatccagtgcctggggcctggccactggctcttcacagtggaccccagcacctcggggtggcagagggacggcccccacggcccagcagacatgcgagcttccagagtgcaatctatgtgatgtcttccaacgttaataaatcacacagcctcccaggagggagacgctggggtgcaaaaaaaaaaaaaaaaaaaaaaaa

SEQ ID NO: 239 - DNA, 248 bp, Homo sapiens
  misc_feature (35)..(35): n equals a,t,g, or c
  misc_feature (55)..(55): n equals a,t,g, or c
gtgggcaaaagtcatgcacagactctttaccaaangatgtataaacatatgaaangatgttcgttcaacttcactcatggtaagasamacgtaaatyacaactacactgagataccatttctcacccatcagattgtcaaaaacttaaaagcttaaccgtactctctacggataagactgtggagaaacaggcattttcatacattgttggtgggaatgcaaaatgttttaagtcctatagagggaag

SEQ ID NO: 240 - DNA, 469 bp, Homo sapiens
gaaaaaaaaaaaaaaaaaaaaaaaaaaaaaaaaaaaaaaaaggrmggccgctcgcgatctagaactagatccaaagtctaaacatcagataattttatgtgtgtaagttcctatctcaatttttaatttttttgctagcatcatggtactgaattttgtatactttcacagtcttaagaatgaatgctgagatttagctctagcttactagaatgcctactctctccattatgtcttacagacgccacaggtcatcatctggatcatcccattctggttcccgttcaagttcaaaaaagaaataatgtattaaaatttacatcttaaaaaaatccagtacagtgcatgaagcatatttttaaagaagttggtgtcttacttggtcagaagtgctaaatctgctagtagaggtgcagcctttcattgcttttcaaaacaatacagctgtgtttatttgtgaagttaaagt

SEQ ID NO: 241 - DNA, 1623 bp, Homo sapiens
  misc_feature (59)..(59): n equals a,t,g, or c
  misc_feature (183)..(183): n equals a,t,g, or c
  misc_feature (1598)..(1598): n equals a,t,g, or c
  misc_feature (1601)..(1601): n equals a,t,g, or c
  misc_feature (1623)..(1623): n equals a,t,g, or c
ggaggccctgcgagaggactgtgcggcccaggcacagcgggcacagcgggcccaacagntgctgcagctgcaggtgttccagctgcagcaggagaagcggcaattgcaggacgacttcgcacagctgctgcaggagcgcgaacagctggagcggcgctgcgccaccttggagcgggagcagcngggagctcgggccgaggcttgaggagaccaagtgggaggtgtgccagaaatcaggcgagatctccctgctgaagcagcagctgaaagagtctcaggcagagctggtgcagaagggcagcgagctggtggctctgcgggtggcgctgcgggaggcccgtgctacgctgcgggtcagtgagggccgtgcgcggggtctacaggaggccgcccgagctcgggagctggagctggaagcctgttcccaggagctgcagcgacaccgccaggaagctgagcagctgcgggagaaagctgggcagttggatgctgaggcggccggactccgggagccccctgtgccacctgccaccgctgacccattcctcctggcagagagtgatgaggccaaagtgcagcgggcagcagccggggttgggggcagcttgcgggcccaggtggagcgattgcgggtggagctgcagcgggagcggcggcggkgtgaggagcagcgggacagctttgagggggagcggctggcctggcaggcagagaaggagcaggtgatccgctaccagaagcagctgcagcacaactacatccagatgtaccggcgcaaccggcagctagagcaggagctgcagcagctcagcctggagctggaggcccgggagctcgctgacctgggcctggccgagcaggccccctgcatctgcctggaggagatcactgctactgagatctagggccctcagcaaccagctctgtagggagctctgccagaggggcagcagctgcagatccacttaggccccagggtccacggatggccccaaaggctgagggccccaaagccacttgtctcctaggatccaggcctctgggcttctgccaagaactcagggtggccctatgacttggaggagcaagatcagaccgctcaaaggtccccgtgttcactgttacccagaggctcttgttactacccacttcattccccaccgctgccagtgccactgccaaccctgttcacaggcgcttccagcccactccagccaggggagcagggaagaagaaggggctccctcctcttcacattccccccgaccccaaagccagagaaagccagatggcaccagctgctccggatgtgcctgcccacattgggggacagggccgggcctgggctcggttcccaggtttgagctctgcagcctctctcctggagtgagggggctgaagtcagaccaaaggaagaactcagaaatgtcttgtttatttgtgtttgtgaccaagcagcctctcccttcacccaggtttatggcctcgttttcacttgtatatttttcacactgtaaatttcttgtacaaacccaaagaaaaaattaaaaaaaatttttttgtttaaaaaaaaaaaaaaaaaaaaaaaaaaaaaaacncgngggggggcccggtacccaattn

SEQ ID NO: 242 - DNA, 3187 bp, Homo sapiens
  misc_feature (1990)..(1990): n equals a,t,g, or c
  misc_feature (2054)..(2054): n equals a,t,g, or c
  misc_feature (2066)..(2066): n equals a,t,g, or c
  misc_feature (2896)..(2896): n equals a,t,g, or c
  misc_feature (3014)..(3014): n equals a,t,g, or c
  misc_feature (3165)..(3165): n equals a,t,g, or c
gttttctttttcccttacaaacagaagcccaatcttgttcaggtatgggtgaccacttgcttaatggataactcctattccccagggagtgaatgttggttatttcaaagcattcatagtcaatctgtcctccttgccagggwttggtttaggmatggtcttgtgatgcaacccggaatagtaagacataactgaaagtccactagagtgttactgtaaggtttttctaactcttataagacacacacacacacacacacacacacacacacaaaggcacttcatgaggatcaaccctttctacatttggatgttgcaaatgagatgtggtatttgaagccagagcagtccttgcagtcatgagggaagagccaagagaatcacacagattccttagaaatgttgcacctttgaattaatcaatcttgaattaatctgttctagatttctgttaggagacatatggaattcattatattataatttaagatacttttatgtgctttactgaaacaatctgatcaccttgaccctctccacatgactctttggagaaaggtacaatagagaacaaagttaagtggatgtcccatccttcaaagcaaagcttcaaakgaggtcctctggtaagaagctcctgattatgaacaataaaaagctgattagagctgggattattcttaataaggtttgagaccttaacaacgtctttatgaaagataatattctttatgaacaaggggttaaagaaaactctgtaccttgctaagcttaagaaagctactttaggcgtggcgcattcaggttctcctggaccatagtggtagtcgctggcccgagttagaggccagctgagaagtcttcgtgcttcagatttgtttacctacaaaatgcttcggtatccatatttttgtagaatgtataaagaatgcctttcatgttggttggaatctggcatacctaatttaggtgtctggccaaaaagaatacatactacagcagaaaaatatagagaatatgaagcccgggagcaaacagatcaaactcaagtccaggagttacacagatctcaagatagagattttgaaactatggctaaattacatattccagtaatggtggatgaagttgttcattgtttgtcaccacaaaaaggacagatttttctagatatgacatttggttcgggagggcacacaaaagccattctgcagaaggagtcagatattgttctctatgccttggacagagacccaacagcttatgcattagctgaacatctttcagagttgtatcctaaacaaatccgagctatgctgggccagttcagccaggcagaagccttattaatgaaagctggagtgcagccaggaacttttgatggagttcttatggatcttgggtgttcctccatgcaacttgatactcctgaaagaggttcttcccttcggaaagatggccctttggacataagaatggatggtggcaggaacatttcctccctctgctatttatacacggaaagacttactacagcaatctacctatattgccaccaagactttccaggctcttcgcatatttgtgaacaatgagctcaatgaactctacacgggactgaagacagctcagaagtttctgagacttggtggtcgtcttgttgccctctccttccattcactagaggatcgcatcgtcaaaagatttttgcttggaataagcatgacagaaagatttaacctaagtgttagacaacaagtgatgaaaacatctcaattgggttcagatcatgaaaacacggaagaagtctctatgagaagagctcctttaatgtgggaaytgatacacaagaaggtacttagtccacaagatcaggatgtacaagataaccccagagggcgctcagccaagcttagagcagctatcaaattataagktaccatcatcttattcttcaaattttttctcacaatttctctaatctttactncatgttatgtccctgaatgtcttggtataggtttaagtgtgggacagtctgaaaattgatagcntttagcattkcntttttctcaaaaagaaactgtaggaaatacatgacagagaragttacactcagggagcagcagcacctccagactggaaaaatgtgttaatctttgcatcatattggactcttgaaggcaatccttcctctggccaggaaattttttaaaaaataatactgtgttgtgtttatctaaatacgtaaactcaagctaccaaagagaaagatgttgtaatcacatctgcatgtcctaaattttgaatttagatattccaatttgcatcagtctttctgtggctcaaataatgatgattatggaatgaattttaatgtccctacttgtgaataattagctttctcaaatgtaggctttttacaaattttaaattttaaaatattagtttaaatgtgtgttatactgataaaatttcatctttcaaattatagtctattattttaaagggatttttcagtatgatatgggccattttgttcatctatcgcaaagtaaaaatgtaaartcsttacagagaattgtttcacaaaacttatatttcatgtcaattgtatttattttaataatagctcacaatgcctttagtaagtaataaagtctcttattagaatcttgtattttttaattgagctaatcaaaataattcagccaagtctatttgaaatagaaaactgtctatttaatatagtaaaatcaatgctcccttaatgttgttacaaagatatggtaactgtaatatgggtaaaagtttattcaagamaagagtacttggtagaagattctttaacaaattgaggagattgattcataattcacatgtcaattttttatantaatatgtacttctaatttattatttatacttaaattgtgacctgaaagatgagttggagataattagtcaaagggcacatggaattatggaaagggggcatttttgattaacccatnacatagaaaataaatatcccttaattaccttgaaaccatatttatactattaattttgtccagtgcacttttttccaaatacagaaaaaaatctccattatagttaccaattttagttggtgatcccattgaatgaataccacatactttngggccaataattgaattaatgc

SEQ ID NO: 243 - DNA, 976 bp, Homo sapiens
  misc_feature (604)..(604): n equals a,t,g, or c
ggcacgagctgggcttcgaggagcgggatgttgcgggctgggtggctccggggcgcggcggcgctggcgctgctgctggcggcccgagtggtggcggcgttcgagcccatcaccgtgggcctagccatcggggccgcgtcggccatcaccggctacctgtcctacaatgacatctactgccgcttcgccgagtgctgccgcgaggagcggccgctcaacgcttcggctctcaagctggatttggaggagaagctgtttggacagcatctagccacggaagtgattttcaaggcgctgactggcttcaggaacaacaaaaatcccaagaaaccactgaccctttccttacacggctgggctggcacaggcaagaattttgtcagtcaaattgtggctgaaaatcttcacccaaaaggtctgaagagtaactttgtccacctgtttgtatcgactctgcacttccctcatgagcagaagataaaactgtaccaggcaagagaacccgctattatctcgtctgcaggccagtcggactggtccgggtgacctgctcactaactctggcctctgcttctctttcctttgtgttgctgtagcccccggntccactgagttaaggcacacttagtccaggaccagttacagaagtggatccgcggtaatgtgagtgcatgtgcgaactctgttttcatatttgacgagatggataaattgcaccccgggatcattgacgcaatcaagccgtttctagactactacgagcaggttgacggagtgtcttaccgcaaagccatcttcatctttctcagcaatgcaggcggggaccttataactaagacggctcttgacttttgggcgggccggaagaaagagggaagacattcagctgaaagacctgraacctgtactgtctgtcggagtcttcaataataaacacagtgagtccaccaaggtaaaggagccccttaactgtcca

SEQ ID NO: 244 - DNA, 583 bp, Homo sapiens
  misc_feature (463)..(463): n equals a,t,g, or c
  misc_feature (548)..(548): n equals a,t,g, or c
  misc_feature (583)..(583): n equals a,t,g, or c
ctcgtccccatggtgaggtgagaggcacaggtttgtggctgcccaaggccctcagagatggtgagtagcagaagctgggattggaacccatgttcctgcatctgggctggggcagacagggagggatgaggcaagcaaatggatccatggggtagagatggacaagcaactcacccctgggccttggtcagtttcccccccagactgctgcttccccggatgagcagaaggtgtttgccctctgggagtctggagacatgagtgatcagcatcgacaggttttgcttgaaattttttccaaaaattaccgggtwcgccgaaacatgatccagtctcggttgactcaagagtgtggagaagatctcagtaaacaggaggtggataaagtactaaaggactgctgtgtaagctatggtggcatgtggtaccttaaagggacagtacagtcttgacaatagtagcnaactactaacccagcaaatctaagcccaaggaagaagggcggaaccagaagtagggcctcgacttgcttcagacgacacagagcnagaggaactgaccatctcatgacctgtggcattgn

SEQ ID NO: 245 - DNA, 639 bp, Homo sapiens
  misc_feature (612)..(612): n equals a,t,g, or c
  misc_feature (616)..(616): n equals a,t,g, or c
  misc_feature (624)..(624): n equals a,t,g, or c
tttataatcatgttagaacataatcagttcttgaatatttatttcctttaagagaatatcaaactgatgtcaccaaatctaaacccacttgaagaccaatagctattacagttgtactacagaataggtcaaagtcaccgttagaaatattacactttattgaattctggagcagctaatctaccctcccctattgaccaatgacaagaatggaagaaaatatacaatggttaaagaaagagtctataaccactgtttgtttaaaatgttgaaacaactttcactgtactggtgaaacagttttaataccctaacatacacagtaatgattcattcttgtttaaaacaagargtgatttcgacttgggattgggatttttattttttgagatggagttttgttcttgttgcccaggctggagtgcaatggcacaatcctggctcactgcaacctccgcctcctgggttcaagcaattctcctgcctcagcctcctgagtagatgatgggattacaggcatgcaccaccacgcccaggtaattttgtatttttagtagagatggggtttctccatgttggtaaggctggtctcgaactcccccgggaaaaccncccnttttcccnaaaaggggttggaat

SEQ ID NO: 246 - DNA, 790 bp, Homo sapiens
cccagcccataaagatctgtgaccggcagccccagacctgcctgccttcctgacttctgttccagagcaaaggtcattcagccgcttgaatcagccttttccccccacccggtccccaactttgtttacccgataaggaaggtcagcattcaaagtcaagaagcgccatttatcttcccgtgcgctctacaaatagttccgtgagaaagatggccgggaactcgatcctgctggctgctgtctctattctctcggcctgtcagcaaagttattttgctttgcaagttggaaaggcaagattaaaatacaaagttacgcccccagcagtcactgggtcaccagagtttgagagagtatttcgggcacaacaaaactgtgtggagttttatcctatattcataattacattgtggatggctgggtggtatttcaaccaagtttttgctacttgtctgggtctggtgtacatatatggccgtcacctatacttctggggatattcagaagctgctaaaaaacggatcaccggtttccgactgagtctggggattttggccttgttgaccctcctaggtgccctgggaattgcaaacagctttctggatgaatatctggacctcaatattgccaagaaactgaggcggcaattctaactttttctcttccctttaatgcttgcagaagctgttcccaccatgaaggtaatatggtatcatttgttaaataaaaataaagtctttattctgtttttcttgaaaaaaaaaaaaaaaaaaaaaaaaaaaaaaaaaaa

SEQ ID NO: 247 - DNA, 405 bp, Homo sapiens
  misc_feature (346)..(346): n equals a,t,g, or c
  misc_feature (369)..(369): n equals a,t,g, or c
  misc_feature (402)..(402): n equals a,t,g, or c
  misc_feature (405)..(405): n equals a,t,g, or c
gggtacacagctccggggaccgggktctgactcccttaaacctcctctggtgcaagtgtggtagctattgacaacaaaatcgagcaagctatggatctagtgaaaagccatttgatgtatgcggtcagagragaagtggaggtcctcaaagagcaaatcaaagaactaatagagaaaaattcccagctggagcaggmgaacaatctgctgaagacactggccagtcctgagcagcttgcccagtttcaggcccagctgcagactggctccccccctgccaccacccagccacagggcaccacacagccccccgcccagccagcatcgcaggggttcagggaccaancgcttagtggctttggcccccgnaaaatgggtgctgggtttgaatgaaaagacggnaan

SEQ ID NO: 248 - DNA, 1597 bp, Homo sapiens
  misc_feature (200)..(200): n equals a,t,g, or c
ggcacagtgtggagcggttgtggggcggcactgcggaactgcgcgattgtggttcccgccgtatttcccgttccccatctagtaactcccatctcagcccacgtatctccctgagtggaaatctcgggccccagaccagtcgattgggaggtccgccctccccttcagcgacttggtctgtgttttggcagttgccgcgnacaacagtcacttccgggaaggggctctgcgaatctccttccgtcggtccgctcagaatcagctgtcctctcagactgtgtgggtggtttccccggccgcagctccgtacgggcttggattgctgggcctcggtgcaccccagcctcccccactcgggttctgagcttgagctggcggctctttaactctgcttcactgttgctcttggcaacatccacttccgggagcgagtgccgtttcccccgctcaccgcgggctagggagcgtgggattccggactgtgagcggctgttagtgcgtcgcagctgctggcgatccggcgaccctcggccggcaggacccgcgggccacgcagccggggccttctcaacgcctcagtacctcggcgggaccgccatggttctgctgcacgtgaagcggggcgacgagagccagttcctgctgcaggcgcctgggagtaccgagctggaggagctcacggtgcaggtggcccgggtctataatgggcggctcaaggtgcagcgcctctgctcagaaatggaagaattagccgaacatggcatatttctccctcctaatatgcaaggactgaccgatgatcagattgaagaattgaaattgaaggatgaatggggtgaaaaatgcgtacccagcggaggtgcagtgtttaaaaaggatgatattggacgaaggaatgggcaagctccaaatgagaagatgaagcaagtgttaaagaagactatagaagaagccaaagcaataatatctaagaaacaagtggaagccggtgtctgtgttaccatggagatggtgaaagatgccttggaccagcttcgaggcgcggtgatgattgtttaccccatggggttgccaccgtatgatcccatccgcatggagtttgaaaataaggaagacttgtcgggaacacaggcagggctcaacgtcattaaagaggcagaggcgcarctgtggtgggcagccaaggagctgagaagaacgaakaagctttcagactacgtggggaagaatgaaaaaaccaaaattatcgccaagattcagcaaagattggaagaaaatgatgatgatgcctatttaaactcaccatgggcggataacactgctttgaaaagacattttcatggagtgaaagacataaagtggagaccaagatgaagttcaccagctgatgacacttccaaagagattagctcacctttctcctaggcaattataatttaaaaaaaaaaaaaaggccacttactgccctctgtaaaagatgttaacatttctagttttcttttagtgtgaatttttaaaatagcagttattcaaggttttagaacttaataaatacctagtcagaagaaaatgtgtaaatcgtttttgtttcaggact

SEQ ID NO: 249 - DNA, 1345 bp, Homo sapiens
ggcagagcccactcttgacctcaaggtggggaaggcagcgcgtgggggctgccgtcaggaagttttcataactgggcacgaggaggcaggaggagctgcccgtcaagcttggtgtgggcagtaccgaggcccaggctggatgcagagccgggaaccgcctcctgtgtgcttcatggccatggtcctttctgcctgtgttttttctttttttctcaaccgtctcttttctggctcccttatttctctgtctgcctcccggtccctcttttgccttgggtgtttctctcctgccgtcccgtccacacgcttcccgggttcctgcccgcccagggcattgccacagggaagtaccacgccgcggtgctcaccaacagcgctgagtgggaggccgcctgtgtgaaggcgggcaggaagtgtggggacctggtgcacccgctggtctactgccccgagctgcacttcagcgagttcacctcagctgtggcggacatgaagaactcagtggcggaccgagacaacagccccagctcctgtgctggcctcttcatcgcctcacacatcggcttcgactggcccggagtctgggtccacctggacattgctgcaccggtgcatgctggtgagcgagccacaggcttcggtgtggccctcctgctggcgctcttcggccgtgcctctgaggaccctctgctgaacctggtgtccccactgggctgtgaggtggatgtcgaggagggggacgtggggagggactccaagagacgcaggcttgtgtgagcctcctgcctcggccctgacaaacggggatcttttacctcactttgcactgattaattttaagcaattgaaagattgcccttcatatgggttttggtttgtctttctggtcgtcagcgtggtggtggaaacagctgaagttttaggagacagcttagggtttggtgcgggccacggggaggggaccgggaagcgctggggcttgtttctgtttgttacttacaggactgagacatcttctgtaaactgctacccctggggccttctgcaccccggggtgaggcctcctgcctgcctggtgccctgtcccagccccaggtccygtgcagggcacctgcgtggctgacagccaggctcttactccagccggggctgccagcgcatccagccagcccagccctgtgaaagatggagctgacttgctgcaggggacctgatttatagggcaagagaagtcacactcyggcctctcagaattcacttgaggttcaattaaatacagtcacaccgccccctcaaaaaaaaaaaaaaaaaaaaaaaaaaaaaaaaaaaaaaaaaaaaactcgta

SEQ ID NO: 250 - DNA, 2149 bp, Homo sapiens
  misc_feature (2128)..(2128): n equals a,t,g, or c
  misc_feature (2139)..(2139): n equals a,t,g, or c
gcccacgcgtccggtctggatgtctgtcttccgctacctcagccgcagagaactttgtgaatgtatgcgagtgtgcaagacgtggtataaatggtgctgcgacaagagactttggacaaaaattgacttgagtaggtgtaaggccattgtgccccaggccctcagtggcatcatcaagaggcagccagtcagccttgacctcagttggaccaacatctctaaaaagcaactgacatggctcgtcaataggctgccaggactgaaagacctcctcctagcaggctgctcctggtctgcagtctctgccctcagcacctccagctgcccccttctcaggacccttgatcttcggtgggcagtaggaatcaaggaccctcaaattcgggacttgcttactccaccggctgataaaccaggtcaggacaatcgcagcaagctccggaacatgaccgacttccggctggcaggccttgacatcacagatgccacgcttcgcctcataattcgccacatgcccctcctgtctcgactcgacctcagtcactgcagccaccttacagatcagtcctccaatctactcactgctgtcgggtcttccactcgctactctctcacagagctcaatatggcaggttgcaataaattgacagaccagaccctgatctacctacggcgcattgccaacgtcaccttgatcgaccttcgaggatgcaagcagatcactcgaaaagcctgcgagcacttcatctcagacttgtccatcaacagcctctactgcctgtctgacgagaagctgatacagaagatcagctaagacacacccagcccagattcaacaggaaaccgatcttcccctgactccccaccgaggagagcctctcctcgaccctgcacgggctctgaggccagcgtcacactccctctctgctctcctgtcccttgagcccttcctctacaggtggggcagagagggtggtggacaccaggcttatctgcctgctcctctccctcctaaggaaaagggagtagcagattgatctgaggggaaagcacaggctgtgctgtcgaggcgcctgctcgcttactcgcctgccaggaggccgggctctcagtttggggtgtttgtgcaaccttcatctgcactgggccctgtgcccctcctccccatccatggtccccagcagtgcctggttctgagcaaactcccagggaagaaaacggccctgtctccatggccaggttcttgtggtgtccagtgcgcgtctctcctccatcacactctcccggcttgcgcaggaggggccagcagcccaggagtcccagacccgtgccgatcacactggtgctgttgagatctcccaaacctcacgtccttaactgtgctctccctcctttcctctcccttgagcttggttctgcccagcactcgtgcttgttcacataattaggtttcccaccccagcctacccgacttacttgctagtctctatgaggtccttattgcacttattggggttgaagctcttcagaggagctggaactgtctaccccagggacacacccatttcgttgctacccaagtggattctgagacaggcaccatctccttgttccccctctctcttttgcctcccactgactgcccttttccatgtgtcttcattctgcctgaagaaggctttcccaggatgcacgtcctcagagggagcagcctatctcccccaagctggaggcggcagaggactgggccaagccccaacctgcctcccagccaggctcctccaggcctctggtttagcggagccccctgagcccaggcctgtgtctagccccagtggctcactgaactttcagggcagtcagggggtcctgcttagaagccagtcaccagccctctgcctgcagccatggaagggggtgtgcacgtgcctctgtgtgtgtggctgagtgtattctgcgcgtgtgtgtggagggagggagggaggggagcatggtgtctcccgctccaccgccctttgttgagccccatcagctgcccccttttactttgcattgaacggcctgtccaaagatcctctctctagggcagcagagagctttttgcactttaaaaaaaaaaaaaaagggnggccgttttanaggatccaag

SEQ ID NO: 251 - DNA, 984 bp, Homo sapiens
  misc_feature (33)..(33): n equals a,t,g, or c
  misc_feature (948)..(948): n equals a,t,g, or c
  misc_feature (960)..(960): n equals a,t,g, or c
cggatggggcgtaggtgggcggtgygcccacangctrcctgggtaaggcccaagatggctgtcttcgccttagtactcgtgtgaagttggcggggacggttcctgtcatcttcttgggcttatttggtgtgctgttgaaggggggagactagagaaatggcagggaacctcttatccggggcaggtaggcgcctgtgggactgggtgcctctggcgtgcagaagcttctctcttggtgtgcctagattgatcggtataaggctcactctcccgccccccaaagtggttgatcgttggaacgagaaaagggccatgttcggagtgtatgacaacatcgggatcctgggaaactttgaaaagcaccccaaagaactgatcagggggcccatatggcttcgaggttggaaagggaatgaattgcaacgttgtatccgaaagaggaaaatggttggaagtagaatgttcgctgatgacctgcacaaccttaataaacgcatccgctatctctacaaacactttaaccgacatgggaagtttcgatagaagagaaagctgagaacttcggaaaaggctcatctgtcaccctggagaagggaaactgtacttttccctgtgaggaaacggctttgtattttctctgtaataaaatggggcttctttggaatttgatagccacatacttttgttttcctctagatgctgcctctactcatgtagactatgaagtcttgactcatcctagatcttaggatcttaggtttgggcttcacaccacttgccttttacagtctagctatacctaattcctttaaaaagaaaagttggtgagaatgttattggcgctttttgacataatgctgttatgttaatagtgtttctaaagagccttccacactgaaatgaaatataagagaaaaatggagtcatacttctgtactactctgcatnaaaatatttatnaggcatattctcctgagtagggac

SEQ ID NO: 252 - DNA, 2939 bp, Homo sapiens
  misc_feature (2910)..(2910): n equals a,t,g, or c
  misc_feature (2937)..(2937): n equals a,t,g, or c
gggtcgacccacgcgtccgcacaactgcctgatccagctatactgtgagaaggtgcaaggtctgatgaaggagtatctcctgtccttccctgcagcaaaccccagtcccagctggagaggaagagggtgagctgggagaataccggcaaaagctcctcatgttcttggagatttccagctactatgatccaggccggctcatctgtgattttccctttgatggcctcttagaagaacgagctctcctgttggggcgcatggggaaacatgaacaagctcttttcatttatgtccacatcttgaaggatacaaggatggctgaggagtactgccacaaacactatgaccgaaacaaagatggcaacaaagatgtgtatctgtccctgcttcggatgtacctgtcgccccccagcattcactgcctggggccaatcaagctggaactactggagccaaaagccaacctccaggccgctctgcaggtcctcgagctacaccacagcaaactggacaccaccaaggccctcaaccttctgccagcaaacactcagatcaatgacatacgcatcttcctggaaaaggtcttggaagaaaatgcacaaaagaaacggttcaatcaagtgctcaagaaccttctccatgcagaattcctgagggtccaggaagagcggattttacaccagcaggtraagtgcatcatcacagaggagaaggtgtgcatggtgtgtaagaagaagattgggaacagtgcatttgcaagataccccaatggagtggtcgtccattacttctgttccaaagaggtaaacccagctgacacttgagcccagcatcctggggatccagcggatggacagcttggctctcccagagaggtgaaggagcacctggccttaggaatcctggctgccaccaccacaaggctccccatttggacattactggctatcttgtgccctggaacaactctgaattaattagactcatggtctggcattgccagctttttaatgggaaaagagattagttataccttataccattatgttgtgggcaattccagagaattcagtacctgcttggtcaggaggatgtgcaccatcttgcctttgcacaccagtcacctgaacaaggaaacttgtcacaagtgtttgtaaccatggggttgttcatcaagggcttttctattaagtacatgacttcacaaggaccgctcagcatggctcactggagagttccatgagagaacagcactcaagcttctggccgcatggacccgatggctcgcattctgtgtagtgttttacgtctccatggtaactgtgccctgcacccctcggtagccgccctgttagttttcagtctccttttctttctcaccatttatcacttccctcactgccctacccaggctttctctcccacttccctgactctgggaataactaatatttaagcaaggtaagatgagaagcaaggggtctcagttctaggaatacagtgctagttgattgtcaggtatgttgtaaatagaccctctttggccatacactccatgcctagatgcctcggagagcatcattctctgcctaggcaaggccctgcatcccttgcctcaggccgggctgagtgtgactgcagctcctgaggatgggcctgccctgtctggggtatgcgtgatccctagatacatgttcccacagaggtgcctgctccgtcttcgctcaccagacactcaggcaggctggcttagtctttgtgcgtggcgattttgtgctctgggccctttctctttttccagccagtttccattcacttgccttacagcctgccctggccgtcactccccagctttgttcagcaatggtgtggttggagagttgtgctgggatagcgcaggaaggtgggtcccggcaacacgcaggggatgagtggacctggaactgacaatggcgtgctgccaagtgttcctgagaggtgtttaggcacagcagaggggacgcggggggcaagaacagcaggacgctggtttaaaaataactcaccgccaaacctgtggagcagtgtggggcatcctgccagaggtgcacaggctggagtttcaggcactgcaggctgatgacacacagggagagtggccctgcctcctgtcctccccggggtttttgcagactcgaagtctcactgcaccagtgtctttgatggtggtgagggtgggtgatggtgcccagcaccaacagttttagtggcctgtccttgacctgccgtggtcctttgtaaactatggctccatgctgtgtgacagatcaacgtgctgatggtaagtagactaggcttccccaggcatgccgtccgtgggggcctgaagagacagtgagtgccattggccccattcgcagatgtgggagactctgctcaggcctgtgaggctgggcagcccttcaccagagttcggaggagcagtgtgtggcgccacgtcccgactggccatacccacacagaagcagtgctgcccggggcctcatctgggccagcttggactctgcttcctccaggagcagcagggaagctctgggccacctccctggatagcaggaacttgacctgccatgtgtgccctgccttcctggccagctgtgcttgttatcttccattctcacaaactgtctttgaagcaatagaataaagaatgtgtgttttctttcctggtatacatacatgatcccatgctcccaagctccattcttccttccctcaactctctgccctccacagagctatggagaaggctggagatgaaagctttgtagtgaggactgataaagatctcatcactgctccttataataaacctaataaagcaagaaaaaaaaaaaaaaaaaaactgggggggggcccgtaacccaattngccctatagggggcgatacaattcccngg

SEQ ID NO: 253 - DNA, 700 bp, Homo sapiens
gaagacagcagaactggcagtcacagtagctctgaccatcctggagctaagctcctctccacagaagagaagcaggcagcagagaccatgaggcccccctcagcccctccccgcagaggatgcatcccctggcaggggctcctgctcacaggctcatgggcaaaagggacttgccttgtctcagaagagacttgggactttggactttactggtaatgctggaaagaggtaatggactgttggaaaaccattgttacattttgaaatgtgagaaatgtcgggcctctgagcccaagccaagccatcgcatcccctgtgacttgcatgtatatgcccagatggcctgaagtaactgaagaatcacaaaagaagtgaaaakgccctgccccgccttawctgatgacattccaccattgtgatttgttcytgccccaccttaactgagtgattaaccctgtgaatttccttctcctggctcagaagctcccccactgagcaccttgtgacccccgcccctgcccaccagagaacaaccccctttgactgtaattttccattaccttcccaaatcctataaaacggccccacccctatctcccttcgctgactctcttttcggactcagcycacctgcacccaggtgaaataaacagcyttattgctcacacaaaaaaaaaaaaaaaaaaaaaagtcgacgcgg

SEQ ID NO: 254 - DNA, 662 bp, Homo sapiens
  misc_feature (618)..(618): n equals a,t,g, or c
  misc_feature (623)..(623): n equals a,t,g, or c
gaatatttgcaaaccatgcctctgacaaagatctgctatctagcatctataaggaacttaaacaaagttacaagagaaaaaaaaacccattaaaaagtgggcaaaggacatgaacaggcacttttcaaaagaagacatacatgcagccaaaaagcatatgagaaaaagctcaacattattgtcattagagaaatgcaaatcaaaaccacaatgagataccatctcacaccagtcagaatggctactattaaaaggtcaaaaaatggcaggtgctggagaggttgtgaggaaaaattaacacttatacactgtaggtgggagtatacattagttaaattattgtgaaaaacagtgtggtgattcttcaaagacctaaagacagaaataccatttgacccagcattcctattactgggcatatacccaaaggaatataaatcattttatcataaagacacatacacacatatggtcattgcagcactattcacaatagcaaagacatggaatcaacctaagtgcccatcaatggtagactgaataaaaaaaaatgtggtatagatacaccatggaatactatgcagccatwaaatagaacagatcatggtcctttgcagngaaantgggatgaagctggaggccatttatcctgagcaactaac

SEQ ID NO: 255 - DNA, 687 bp, Homo sapiens
  misc_feature (489)..(489): n equals a,t,g, or c
  misc_feature (526)..(526): n equals a,t,g, or c
  misc_feature (535)..(535): n equals a,t,g, or c
  misc_feature (596)..(596): n equals a,t,g, or c
  misc_feature (619)..(619): n equals a,t,g, or c
  misc_feature (686)..(686): n equals a,t,g, or c
tgttgttgtctgttattgaaatacagcaatgtgtcgcttaatgcctctragaaatgcctctttaggtgatgtcatcattgtgtgaacaacagagtttgcttacacaaacacagacagtatagcctactatatacatctgggctttatgtagcttgtaggctacagcatgttattgcactgaattctgtaggcaggtataacacaatggtaagtgtttgtgtttccgaacatacctaaacatagaaaaagcagggaacggtggctcacatgtgtaatcccagcattttgggagggtgaggcaggagaatctttcgagcccatgagtttgagaccagtttgggcaacmtggggrgaccccatctctgtaaaaaatcttaccaaaaaaaaaaaaaggtgcagtaaaaattcagttttattatattatgggaccaccatcatctgtgtggtccatctgttgactgaaacgtcatcatggcggcatatgactgnattcgtatacctagagattttctttggtcttaagtgnatattttgntatgaatgtgcctttactatgctttaaagtcactcagaataattcctctctggggttttgncaccactgggtacacagtgaggngcttttgttcatccttatttgggagttttgggggggatttttaaaaaaaaggtaatcattttataant

SEQ ID NO: 256 - DNA, 827 bp, Homo sapiens
  misc_feature (679)..(679): n equals a,t,g, or c
  misc_feature (691)..(691): n equals a,t,g, or c
  misc_feature (748)..(748): n equals a,t,g, or c
  misc_feature (761)..(761): n equals a,t,g, or c
atcagatggatgagtctttcagagagttggatatggaatgtgctcttttggatggagaacagaaatctgaaacaactgaacttatgaaggagaaggagattttggatcatctaaaccggaaaatagctgaactggaaaagaacattgttggtgaaaagaccaaggatgctgacctgttggatgttgaaagcaaacactttgaagacctggagttccagcagcttgaacatgagagccgtctagatgaagaaaaggagaacttgactcaacagctcctgcgtgaagttgctgaatatcaacggaacatcgtttctagaaaggaaaaaatttctgcattgaaaaagcaagccaatcacattgttcagcaggctcagagagagcaagatcattttgtgaaagaaaagaataatttaataatgatgttgcaragagaaaaggagaatctttgtaatttggaaaagaaatactccagcctctctggggggaaagggtttcccgttaaccccaatactttaaaagagggctatatcagtgtaaatgagattaatgagccgtgtggcaattccacggaatctatccccttccactcagtttcctgctggatgctggatgctgttgccacttgagcctgccacagctgtgctggccggagcccccaaccaggagttaaagaggcacntttaggaagttntgggaaggaaagggaaaaaaaccaggccttaaaggaagggcctcttttcttgaggtngatatttttgccntcggaaagggaaaaccacctctttcccttcttcccccacattttcaggcagtgctacttttggggg

SEQ ID NO: 257 - DNA, 1657 bp, Homo sapiens
  misc_feature (1089)..(1089): n equals a,t,g, or c
tcttttaataatttatctggttattcacatttctgaaaatcacttacttaagtcaaatatgaataaaacaatgactaaatgtattttgtcagaaaataatagtttatgaaataatagattagctatcactttctgcaaataatgggtttctaatgtttgttgacttaaattcatatattgaattaaatttactagtgaaatatcagatcatttaatagtcatttgtgatatcttagggtaataaaatkkkaaaatatgtatatgtttttgattgaacagacacaacatgacaatctaatgattaagaagatatgggtcctacrttttgggtctttccagtattgtcaacagtgtaggagttttcgatgggaaatagccatagtcatcaaaaatccatttatttagttttaaaatatactaaaatattttcattgtaatgtggagtacatctgcctcttaagtttgtgtatattaataattgtatcctcagtgctttgcacatgaaaggcattcagtaaatgtttgttaaataaatgaataaatacagtaaggctactcagtgaggcctgcwwtccagattctgttctgacgccctcttttcarctcttcagttcatcactatttgctatgagcctcttcaagacaagcatcttgacctagcatcaacctaaacagatttgtctgcccttcctccctcccttccttccttccttcatttttcctttcttaaactagaatgkaagtgtaggtgaataaagktttcccatacmagtcatttcctcagctaaggtaggaaaagtgagagacaattcaggkagttgggtaaaagttcttcaaattgtagatcttaagcttcagatagctttattgggaagtaggctttatgcagaataaatcattaaagaaattgagaagatagaagagcaaatttgaatgaagttgataattcatgatagtattattacaaatataaagctgagtaggtttttgctgtttttattgttgagtttttaaaaacagtactgcttaataaatgtaaaaagtatttatttttaaagatgatgtggtttgggggggccacataattgngtttgcagatcttgcattacgatgtttggttgaaacctatgctgccagttttgaggaaaggaatgaagaacctttaccaaacgcataaagaatgataaaacagaaaaagaaatttacacttttggccaaggaaggaaatgaaaaaaatgtcccagagaagtggaaccctgtggctggcattgttattgcactctgttgtcaccacaggtgtgattggagacattatgtgggcaaagaatatttcagggctctaggccttggagcagtggaattccattatttccagcgaatgagtagttgggcaacttgtgggatgcggaaaacatctttggaaacctcaaatagtaccacaaagaggcaagataatcagaatgatgatagtgaagagcatgatgatggaggatacagaatcacagatgatggcgctgattgtttgcctgggtaagagactacttttgtaatgcatgwtactaaaggrgaatattatattgtactgtactttagatgactattatcamcattctgaaatgtattttataatctaattttagaataagctaaaatatac

SEQ ID NO: 258 - DNA, 656 bp, Homo sapiens
  misc_feature (478)..(478): n equals a,t,g, or c
  misc_feature (607)..(607): n equals a,t,g, or c
  misc_feature (623)..(623): n equals a,t,g, or c
tcgacccacgcgtccgtgatgatcctggcatggtggatgttctttacgccaaagtccatatgaaagatggctccaacaggctacaagaattagttgatcgagtgctggaacgttttcaggcatctggactaatagtgaaagagtggaatagtgtgaactgcatgctacagttatgaatacactattcaggaaagaccccaatgctgaaggcaggtacaatctctacacagcggaaggcaaatatatcttcaaggaaagagaatcatttgatggccgaaatattttaaagwgctttgccttgttgcccaggctggagtacaatgatgcaatctccgctcactgcaacctgtgcctcccgggttcaagtgattctcctgcctcagcctcccaagtagctgggattacaggtgtctctgatgcatattctcagagcctaccaggaaaatcctagaatcgagaagggcttggggacacaganagctatggttgtttgaaaacttctactttggctcctaaactgaattcattcacatctctcagaagttcaccgtaaacgctttggaactacctcctgtggacaattgactctctgaagtgatcttggaancctaaactaactctcncagtctaaaaaattctctttattgcacaggatt

SEQ ID NO: 259 - DNA, 550 bp, Homo sapiens
  misc_feature (495)..(495): n equals a,t,g, or c
  misc_feature (505)..(505): n equals a,t,g, or c
  misc_feature (516)..(516): n equals a,t,g, or c
  misc_feature (525)..(525): n equals a,t,g, or c
  misc_feature (539)..(539): n equals a,t,g, or c
aaggatgaagctatggccattggaggccactggtctccttcgttggatggaccagacccagaaaaagatccctctgtgttgattaagactgctattcgttgttgtaaggctctgacaggcattgatctaagtgtgtgcacacaatggatgaagaagagaaggatgatggtgaagctaaagaaatttctacacctacccattggtctaaacttgatccaaagacaatgaaggtaaatgacctccgaaaagaattagaaagtcgagctcttagttccaaaggattaaaatcccagttaatagcccgattgacaaaacagcttaaagtagaggaacaaaaagaagaacagaaggagttagagaaatctgaaaaagaagaggatgaggatgatgataggaaatctgaagacgattaaagaggaagaagaaaggaaacgtcaagaggaaatagaacgccagcggtcgagaaagaagatatattttgcctgatgaaccggncatcaattgnacattccaaantgggcttgnaaaaaagtggcaangtttggaatgg

SEQ ID NO: 260 - DNA, 1067 bp, Homo sapiens
ttttttttttttttttttttttttktttttttwtttatcagtctattttttattataaacaaataaaagattaaatcacacatcaaagacctagactccttctctgagacaccaaaggcctaacaaccagtaagataattttagacaattctattgaaagttattcaaaaggcatcaagtcaaaataacgaaactgccccagtaaaaaggggctgggcctgggggccaggaaaggcaagcatgagggcccagtagaggtggacctgtccctatggtaactgagctcggctttaaggccaggcattggggatcagctgctaggagcccacctgtgttcttcctgaggggtgggggcacctagtcactgcctagaggcacatggtcccccaccagcctacagcatggaaacacccaatgtctgctctagcctattcttaacccacaactgggatgggagctggggacaggagaaggggtcatggggccaggagcctattcaggctctacaaccagacttccctagagaggccccgtgccagttagtccaatggccacacacatcagaaagggtagtcaacagcgttgcacatgtaggttggaggtagcccaggtgtcagccacaccctggtcacagcagatccagagaggcaatgttccttggagctgcaggctgctggatctactgctcgtccagtcccgggctcagacacagggtaagtcctccaggcccctacccagggcctgccctgacacacagctgctgtcagagccactggagccactggctgatgggcattgggacgagatctctgagtcctcagcagtcaaagagggctggccgcccagctctgcctcagcctccagtgctgcttcctctgggaagctgggatacaggggacagcggagacccagaagagctgggtctctgtacaggtgcaggttgagggaccccagaacagagcaagaggcagggtctccaggaagggagytcgwggcccccaggtagaggctgtcatggtcaaacggggctacggcaatggacgcccgagagcgaacttctcggcacc

SEQ ID NO: 261 - DNA, 1390 bp, Homo sapiens
  misc_feature (20)..(20): n equals a,t,g, or c
  misc_feature (24)..(24): n equals a,t,g, or c
gggtcccgggccccccccsngstnttttttttttttttttttttttttttttttttggcaggccaaaaccctagtttatttcagcatcagcagtatcttagccatcaaaaaaataaactctaccaagggtgacggaagtctctacagcaaggctaagggctcgccagacggcgaacatcaggggtgcatggtgggcactgcccaggcaataagttaggaagcagcagggctggtgtcgggtgtgggccgggcttcatttctgggcaggcatgaggtcgtcgatggcctggccctgctccagccgctgytccatctcgatgagcagcttcactccgtccaccaccatctgcaccagctccacctctgagaagcccaggcggtcagcgttggagacgtcgaagaccccgcccaccgcagccgtgtccacaccgcctgtgcctcgcttctgaagtcgcagccgcttaagcacctccgagaacttctcatgcttgcccaggttgggcagcttgatatgcacacctgcccgcagcccggtgcccaggttggatgggcaggtgaggatgtagcccaggtgagggttccacatgaactcatagtccttagacttgaagagagtttcaatctgggtgaggccggtgcagaagcgggtgaacacctccttcatgttgccccccttctgcatggagatgacccgcaggtggtcctcctcgttgacccacaccaggaaggtcttattgtcattgtgccagataccgcgggcgtcgggccagtcgcgggccatgcccgaggccagcagcaggggcgacacgggcttgtcgaagaggaagtggtcgtcgatgagctgctgctgctccgcctccgtcatgctcttgagcgcgtagtatcggcccgccaggtcgccgtccaggctggacagggcttccaccgcgagcttctcgatggckcggcgctccccgcggctgcagtgcggggggaggcagaagccacggatgctgcggcccgtgcgcacccgcgagctcagcacgtagttggggtccaggtcgtcgccgccctgcaggttgtcggggttgaggtcggtcttgtgctcatcgctgggcttgtagccgccgtgccggtcctcgatgatggggtcgaagagatccttgaacacttcgtaggactcctcgtcgcccgccacgcagcccacggtcatgatgtacgggtggcccgggttgtccacgcctgtctggatgacgtcgtccagcgtgaagccgctcggcgtgctcttggcgcgcagctccgcgtacagctcgggggtcagcaccttggccatgtggttgttgtgggcgctcaggtcggggaactcgtcctcggccgggaagcgcagcttcagtgcgttgtggctgttgga

SEQ ID NO: 262 - DNA, 669 bp, Homo sapiens
cgggtcgacccacgcgtccgttggaggttggcggcgcggggctgaaggctagcaaaccgagcgatcatgtcgcacaaacaaatttactattcggacaaatacgacgacgaggagtttgagtatcggttagtgctggcgcgggacaatagcgagggtcgtgagctttggccgctgagggcacaaggaattagtaacaggaactgaggcgatagaattggcgcatgcgtacgagacatgtcatgctgcccaaggacatagccaagctggtccctaaaacccatctgatgtctgaatctgaatggaggaatcttggcgttcagcagagtcagggatgggtccattatatgatccatgaaccagaacctcacatcttgctgttccggcgcccactacccaagaaaccaaagaaatgaagctggcaagctacttttcagcctcaagctttacacagctgtccttacttcctaacatctttctgataacattattatgttgccttcttgtttctcactttgatatttaaragatgttcaatacactgtttgaatgtgctggtaactgctttgcttcytgagtagagccaccacaccatagccagccagatgagtgctctgtggaccacagcctaactgagtgtgacccagaagcacgatgtgctctgtatcagac

SEQ ID NO: 263 - DNA, 1016 bp, Homo sapiens
  misc_feature (466)..(466): n equals a,t,g, or c
ttttttttttttttttttttttttttttttcatcttccattattttattattttttatacatatatatatatgcgcagatctgttttatgtacaacaattggttctatcaaatattcagaccaaggcattctactggtaatttccccccaaatcaattcaggtaaaattagatacttatgcacttcacgggctatcaaaacttgcaacttcattatcaatttcagttctgaggtcatacacacaattcaaaatatacattaactaggttaaggcgataaaagtgggctgaaagaaaccacaggattcagaacaatgaaactgtgtattttgcttgcatgagagtcataacgtgaacagcaagtattgtgcgtatctcatagctcttcagtggagaggaagcggcttctgaacatctaaggtgactgcacagcaggtgggaaacagctggtgtggcctgctggaggnttcgccgagggagggctcatttcttctctgcctctccttttttgggttcttgtttcaatttgtaatcagccagggcggccttgattgcatcttcagccagcatggagcagtgcagtttcacgggaggaaggcagagctccttggcgatatctgtgtttttgatagtcaaggcttcctccaccgtctttcctttcacccattcagtggctaatgagctggaggcaattgcggaaccacagccaaatgttttaaacctagcatccacaatcttccccttttcatccacttgaatctgtaatttcattacgtcaccacatgctggagcccccaccagtccagttccaacatttttagatgtcttgtcaagggaccccacgtttctaggattttcataatgatcaacaaccttcttgtgatagagtcgggccggggccgacagctcccgggcgggcaggcgggggctccgcagcagcagagccgatgccrcccgcctcagacggccagccccagccgccgccatcttgccgcttgcgctgcgcggacgcgtggg

SEQ ID NO: 264 - DNA, 290 bp, Homo sapiens
ggcacgargcggagtcggcctgagaggtctctcgtcgctgcaggcgcctcagcccagccgcgtgccttggcccatggccgcctactcttaccgccccggccctggggccggccctgggcctgctgcaggcgcggcgctgccggaccagagcttcctgtggaacgttttccagagggtcgataaagacaggagtggagtgatatcagacaccgagcttcagcaagctctctccaacggtgaatgggccagtgggaatggggtctccggaccaagaagccgcgtagcctggc

SEQ ID NO: 265 - DNA, 753 bp, Homo sapiens
  misc_feature (610)..(610): n equals a,t,g, or c
  misc_feature (635)..(635): n equals a,t,g, or c
  misc_feature (681)..(681): n equals a,t,g, or c
  misc_feature (753)..(753): n equals a,t,g, or c
atttaggtgacackatagaaggtcgcctgcaggtaccggtccggaattcccgggtcgacccacgcgtccggtggcgccgacaggatgggcaagtgtcgtggacttcgtactgctaggaagctccgtagtcaccgacgagaccagaagtggcatgataaacagtataagaaagctcatttgggcacagccctaaaggccaacccttttggaggtgcttctcatgcaaaaggaatcgtgctggaaaaagtaggagttgaagccaaacagccaaattctgccattaggaagtgtgtaagggtccagctgatcaagaatggcaagaaaatcacagcctttgtacccaatgacggttgcttgaactttattgaggaaaatgatgaagttctggttgctggatttggtcgcaaaggtcatgctgttggtgatattcctggagtccgctttaaggttgtcaaagtagccaatgtttctcttttggccctatacaaaggcaagaaggaaagaccaagatcataaatattaatggtgaaaacactgtagtaataaattttcatatgccaaaaaaaaaaaaaaaaaaaaaaaaaagggsgggcscyctaaaagatcctcnaagggccaagcttacgctgcatgcnactctactctctcctatatgaatctattataactagcctggcctcnttacactctgatggaattctactggattttaagactatcttgttatatgacactctcaaataaccagtattn

SEQ ID NO: 266 - DNA, 407 bp, Homo sapiens
  misc_feature (359)..(359): n equals a,t,g, or c
  misc_feature (375)..(375): n equals a,t,g, or c
  misc_feature (391)..(391): n equals a,t,g, or c
  misc_feature (396)..(396): n equals a,t,g, or c
gggtcgacccacgcgtccggcgagagagagattgtgatggcggctgcgattttagctgagaaggtgccggtggacagcgcagaagagagggagcagcccctggcgtctgcgcggraactggctgcccagaagcgcgaacagaggctgcgcaaattccgggagttgcacctgaagcggaatgaagctcgtaaattaaatcaccaggaagttgttgaagaagataaaagacttaagttacctgctaactgggaagccagaaaagctcgtctagaatgggagctacaggaagaagaaaagaagaaggaatgtgcggctagaagggaggactatgagaaagtgaactgctggagttcatggcngaagatgcagaaagtngggagaggaagaagangaggnaaaaccccgac

SEQ ID NO: 267 - DNA, 1177 bp, Homo sapiens
tcgacccacgcgtccgcaagcggggacggaagtttcggaactgcggggccggggcgagcatcttttcttccttccattccggcagaggccttgtcgctgcgggccggaccgcaggcgtccccgatggcggskcmgcgggtggaggtsgayggcrgsatcatggaagggggcggccagatcctgagrgtstctacrgccytgagctgtctcctrggyctcccyttgcgggtrcagaagatccgagccggccgsagcacgccwggcctgaggctcaacatttatctggactggaaatgattcgagatttgtgtgatgggcaactggagggggcagaaattggctcaacagaaataacctttacaccagagaagatcaaaggtggaatccacacagcagataccaagacagcagggagtgtgtgcctcttgatgcaggtctcaatgccgtgtgttctctttgctgcttctccatcagaacttcatttgaaaggtggaactaatgctgaaatggcaccacagatcgattatacagtgatggtcttcaagccaattgttgaaaaatttggtttcatatttaattgtgacattaaaacaaggggatattacccaaaagggggtggtgaagtgattgttcgaatgtcaccagttaaacaattgaaccctataaatttaactgagcgtggctgtgtgactaagatatatggaagagctttcgttgctggtgttttgccatttaaagtagcaaaagatatggcagcggcagcagttagatgcatcagaaaggagatccgggatttgtatgttaacatccagcctgttcaagaacctaaagaccaagcatttggcaatggaaatggaataataattattgctgagacctccactggctgtttgtttgctggatcatcgcttggtaaacgaggtgtaaatgcagacaaagttggaattgaagctgccgaaatgctattagcaaatcttagacatggtggtactgtggatgagtatctgcaagaccagctgattgttttcatggcattagccaatggagtttccagaataaaaacaggaccagttacactccatacgcaaaccgcgatacattttgctgaacaaatagcaaaggctaaatttattgtgaagaaatcagaaaaaaaaaaaaaaaaaaggcggccgcaagc

SEQ ID NO: 268 - DNA, 1670 bp, Homo sapiens
  misc_feature (2)..(2): n equals a,t,g, or c
  misc_feature (225)..(225): n equals a,t,g, or c
ancctcagtcacagaaagagccccaagtcttcccaatgtgcatgggacaagggttgacctctcctgcctccttgttagttgagagctcctgggtccaggaatcaaggctcaaactttgtgcttctctttgcagtctgtgtcccctgctggcaccagcaggccaaagatggacagaagaatatctgggccactcagcccatggcagagcacccagcctgagcccancctcagaacatcacamcagcccttcagcactggccaggtgtccaagaaaacccacagggtggtacagaggcccactgagcaggatgtgatgcacagttccacgggacagaggggcatgggtggtggtgtccctaggggagttccgctgttctcaggtggctaccaggcctgggggggccatacagggtcaccgaggcwatgtggttgttctgcatgacctcaaagatyattcgctgaagaccaaagcagaatgtggaaccaaatgggttggtgttgtttggggaggaagacctgtgcaggacaacaggcttctccacagggtggcccaggagctcctggatgttgtcccacttgctgtaggtcgtgcatgtttctgtctgaccatctgcgttttctttctttatggctagtgggatcwtgaactcacagcgatgataaatgttgaaattataatgcccagggtaattggtgtgtagaacaaacttcttcactttgtgtgtattcgcatcaaagaggatgtccactccaagagtgaagtagttaaaaaagtagtcattacacttcgatggaacttgtttatgaggggaaggagaatgaattttcatcttgtcttctgatttatagaagactttgwgtggagagccaagcatgctaakaacatcttggcaggaatcaccaaaatacactgaacgttcaaatacccgcatcttggcatctgctaataggccaggtccacaacctgcagcaagtaggcgaagtcgtaaacctgcaggtccagttccatctcgaagaacatctacactctcagcatagacattgcccaggaaacagctcagaggcatcatgggagccttggtatcctgcaggctgttgccactgtagatgtacattcgttttacagttgctccatggggtatctggagagaagccaggccatgggcaaaattgggctcatactttggagcctcagtccatgagtctaactgaaaagagaaagacagtcctctgaagttgagatggaagagctgctcagcggagttgtacactccaggatgggttgcgccaaaagactggtcaatctgttcaatggtaggagctatggcctgagaattaaaatgcacgccacaatattttaactttactttagtcaaatcacatacttcgatcaccttaagtctctgattgaaagcatcaaacattagtttgatcccgtcctgagtcaggttaagaatgaggtcatggcttagaggagactgttcactgtagagaacctggacgtttttgatgatgcgacagtgcttctgaagaatggctactgcctgagccagaggcattcccagcgtgaattcccattgctcgttccccagagagcgttcgggcactacctccaggtccagcattggttcggctcgcctggcccgggcggcctccctgcagcagccgcc

SEQ ID NO: 269 - DNA, 1893 bp, Homo sapiens
gcggacgcgtggggggcggggtgtcgtttcctttcgctgatgcaagagcctagtgcggtggtgggagaggtatcggcaggggcagcgctgccgccggggcctggggctgacccgtctgacttcccgtccgtgccgagcccactcgagccgcagccatgtctggggacgagatgatttttgatcctactatgagcaagaagaaaaagaagaagaagaagccttttatgttagatgaggaaggggatacccaaacagaggaaacccagccttcagaaacaaaagaagtggagccagagccaactgaggacaaggatttggaagctgatgaagaggacactaggaaaaaagatgcttctgatgatctagatgacttgaacttctttaatcaaaagaaaaagaagaaaaaaactaaaaagatatttgatattgatgaagctgaagaaggtgtaaaggatcttaagattgaaagtgatgttcaagaaccaactgaaccagaggatgaccttgacattatgcttggcaataaaaagaagaaaaagaagaatgttaagttcccagatgaggatgaaatactagagaaagatgaagctctagaagatgaagacaacaaaaaagatgatggtatctcattcagtaatcagacaggccctgcttgggcaggctcagaaagagactacacatacgaggagctgctgaatcgagtgttcaacatcatgagggaaaagaatccagatatggttgctggggagaaaaggaaatttgtcatgaaacctccacaagtcgtccgagtaggaaccaagaaaacttcttttgtcaactttacagatatctgtaaactattacatcgtcagcccaaacatctccttgcatttttgttggctgaattgggtacaagtggttctatagatggtaataaccaacttgtaatcaaaggaagattccaacagaaacagatagaaaatgtcttgagaagatatatcaaggaatatgtcacttgtcacacatgccgatcaccggacacaatcctgcagaaggacacacgactctatttcctacagtgcgaaacttgtcattctagatgttctgttgccagtatcaaaaccggcttccaggctgtcacgggcaagcgagcacagctccgtgccaaagctaactaatttgctaatcactgattttgcaaagcttgttgtggagatgtggctggacaggtttgccatcagagtggatataccgttgtattaaaaacaagataaaaaagctgccaagatttttggcgagtggttggtctgaagtccttgcaagacgctgatgctcaagctgttgacatactcattgcctactttaacacctgtcagagaaacgtgatatggggtaaggaggtgcttttttaaaatcgttcatagacttctgtaaaatgcaagataaattaaagttattataacagtgattctttcaatttggtttgtccttcagttttcttttctataaatgtgcttggtgaaatcagcaagaaaccaaccatataaaacagtgtgtgccgggctctgactgagaaactgaacaatggcaggcgcttcatctgggcagccatttttcttctctgcttctcttgagatacatagttaaagtagacacggcctcccacgcgaktgtggtgggaccttgagacttaggaggattgcctgttttcagtgtccagggaatgactccatagatttgaattcttttccgtatgtggggatggttgctaytacctcaccgccaagtcctcccccagctgttaccacatgagggaatacaaggtgctaggtaccctccttcctcgttggccatraagaggtcttagaaacakgcctgtaaawgtgtcttgtaactggcacataaaaaagatcc

SEQ ID NO: 270 - DNA, 729 bp, Homo sapiens
ggcacgagcctgtctctctgccaacgccgcccggatggcttcccaaaaccgcgacccagccgcccggggtccggtgggcaaaaggctacagcaggagctgatgaccctcatgatgtctggcgataaagggatttctgccttccctgaatcagacaaccttttcaaatgggtagggaccatccatggagcagctggaacagtatatgaagacctgaggtataagctctcgctagagttccccagtggctacccttacaatgcgcccacagtgaagttcctcacgccctgctatcaccccaacgtggacacccagggtaacatatgcctggacatcctgaaggaaaagtggtctgccctgtatgatgtcaggaccattctgctctccatccagagccttctaggagaacccaacattgatagtcccttgaacacacatgctgccgagctctggaaaaaccccacagcttttaagaagtacctgcaagaaacctactcaaagcaggtcaccagccaggagccctgacccaggctgcccagcctgtccttgtgtcgtctttttaatttttccttagatggtctgtcctttttgtgatttctgtataggactctttatcttgagctgtggtatttttgttttgtttttgtcttttaaattaagcctcggttgagcccttgtatattaaataaatgcatttttgtccttttttaramaaaaaaaaaaaaaaaaaa

SEQ ID NO: 271 - DNA, 1030 bp, Homo sapiens
  misc_feature (28)..(28): n equals a,t,g, or c
tatttaggtgacactatagaaggtacgnctgcaggtaccggtccggaattcccgggtcgacccacgcgtccgatggctgctgaggacgagttacagctgccgcggctccccgagctgttcgaaactggtagacagttactggacgaagtagaagtggcgactgaacccgccggttcccggatagtccaggagaaggtgttcaagggcttggacctccttgagaaggctgccgaaatgttatcgcagctcgacttgttcagccgaaatgaagatttggaagagattgcttccaccgacctgaagtaccttttggtgccagcgtttcaaggagccctcaccatgaaacaagtcaaccccagcaagcgtctagatcatttgcagcgggctcgagaacactttataaactacttaactcagtgccattgctatcatgtggcagagtttgagctgcccaaaaccatgaacaactctgctgaaaatcacactgccaattcctccatggcttatcctagtctcgttgctatggcatctcaaagacaggctaaaatacagagatacaagcagaagaaggagttggagcataggttgtctgcaatgaaatctgctgtggaaagtggtcaagcagatgatgagcgtgttcgtgaatattatcttcttcaccttcagaggtggattgatatcagcttagaagagattgagagcattgaccaggaaataaagatcctgagagaaagagactcttcaagagaggcatcaacttctaactcatctcgccaggagaggcctccagtgaaacccttcattctcactcggaacatggctcaagccaaagtatttggagctggttatccaagtctgccaactatgacggtgagtgactggtatgagcaacatcggaaatatggagcattaccggatcagggaatagccaaggcagcaccagaggaattcagaaaagcagctcagcaacaggaagaycagcccatgttctgtcggttcccatagcccctaggatgggtgtcttccagtc

SEQ ID NO: 272 - DNA, 993 bp, Homo sapiens
tttttttttttttttttttttttttttttctgctaccgtgactaagatggaagcgtttttggggtcgcggtccggactttgggcggggggtccggccccaggacagttttaccgcattccrtccactcccgattccttcatggatccggcgtctgcactttacagaggtccaatcacgcggacccagaaccccatggtgaccgggacctcagtcctcggcgttaagttcgagggcggagtggtgattgccgcagacatgctgggatcctacggctccttggctcgtttccgcaacatctctcgcattatgcgagtcaacaacagtaccatgctgggtgcctctggcgactacgctgatttccagtatttgaagcaagttctcggccagatggtgattgatgaggagcttctgggagatggacacagctatagtcctagagctattcattcatggctgaccagggccatgtacagccggcgctcgaagatgaaccctttgtggaacaccatggtcatcggaggctatgctgatggagagagcttcctcggttatgtggacatgcttggtgtagcctatgaagccccttcgctggccactggttatggtgcatacttggctcagcctctgctgcgagaagttctggagaagcagccagtgctaagccagaccgaggcccgcgacttagtagaacgctgcatgcgagtgctgtactaccgagatgcccgttcttacaaccggtttcaaatcgccactgtcaccgaaaaaggtgttgaaatagagggaccattgtctacagagaccaactgggatattgcccacatgatcagtggctttgaatgaaatacagatgcattatccagaactgaagttgccctacttttaactttgaacttggctagttcaaagatagactcttcttttgtaaagtaaataaattcttcaaaatgcaaaaaaaaaaaaaaaaaactcagaaggggggccacggtacaaca

SEQ ID NO: 273 - DNA, 1475 bp, Homo sapiens
  misc_feature (9)..(9): n equals a,t,g, or c
aactggcgngactctggcctcaagggatcctctggcatgccttggctcccaarggctaggatcacaggcaaaagcaccgtgtgtttatttttcccattcccttcctttatctgcaatgcttttttctttaaggcagcctaatttacaagcttggccttgaattaaaagagaacccagaacccgctcttggagtttacgttctcaaaccaacatcagagcaactgtctatccccatataaataaagttatctacccctgctcctaactgggtacaagttatgactacaactcagtgattttttaaattagtgtgcctatttggtgaaatctgtgaacttaatcaaggacaaccacacatgtcaattactaaacatttaaaatatatttctaaacagaatgggccgactcagtcacagtaactgttgatctccatagtagagcaacccacaaagacagaactgatttttttcccataatcaggggtgaaaaatatacaacttgtttctgaaccaaaaccacaatttctgcagtttaaaatgtttcactgctaatatggccctggtagaaattatgtagttttttttcttctttaaaaaaaaaaaattaaaaaaatttcctaagacactaaatcctcaatctggaatgtagattctgagcacaaagcagctcagttaacctaaaaaataaagaaaaaattcccatcacctgtctcagtagggcctgaaaggagagaagtagtgtggggaacccctgctttggtatggagagtcacggccccttgacccagaccgagaccgtgagtagccatagctggtgcttctctcaggataaactcggatgtaggaagtttcaccctcatgagagcggaatttggtgtcatccagtttacgcagggcatattccatgtcttcttttctgagatactcgaccatccccactccatccttctgcacatcagcataacagacatccccagcttctcgcatgtgatccttcaggtcctgccagctgcctgacggaggaagtcctgaaacaagaactcggaaatcagatcttcttgtaggaggcccattcctcccaccacggggccacccaccccgacctccataagtcctggggaactccacacgaagccgacactggccataatcataaccatttcttccataaatagcatcctctgcatctcgggggtcctcgaagcgcacgaaggcgaagggcacgaggccgtgccggttcttgagctcgatctcgcggatgcggccgtacttgtagaacaggtcctccaagtccttctcgcgcacgtcggtcggaaggttccccacgtagatgcgcccgtcgccctcgccgccgcgctcgtccgcccagcccgacatccgcaccgcccgacgccgcgggcccgccgcagcccacgtcgccgccgccgcctcagcacgggtccccccgcagcgtccccgcgggctccgaggcgctcc

SEQ ID NO: 274 - DNA, 539 bp, Homo sapiens
  misc_feature (492)..(492): n equals a,t,g, or c
  misc_feature (500)..(500): n equals a,t,g, or c
tttttttttttttttttttttttttaaaaaaacaattttagttaaaaatcaaatatacagagattcaaagaggggaaaaaaaggaaatattatagaagacaaaggtcaaactggcattccaaatctggagcaattttgtaaagcaggaaaacaactatgacaatctgtagcttcttaratcattatagkgaatgtccccatttactataagtgtttttataatggtgtttcctaaataaaggaacataaatgtacactaaagggtgtttcccaagaatagaggtgaagatattttcattttgtttaacccacaaactatttggtcaaaggaatatgtaaagctaaataaaagcacatctggtagaaattcatggcaatgcatgttgacaagatgtgcttggacctcgcttgcagcatctggatttcttcttctacctttgcaagttctcttcttagctcttcctgctcctcttccgagagggtctctgtggnactgatcntggcagctgaggccttctccttcctcagaaactgggtcc

SEQ ID NO: 275 - DNA, 893 bp, Homo sapiens
cggccgcatggtagggggtccgtggacctcccggcctgtagggggcgtcgggcgcagcggaagggcctgctccggagcctggccagggctgcgcagtcatgatcaccgagaccgcggcggagcctacggtccctgcagtgcctgctgctgaggaggccaccgaagctcggggacgcgaggagccggcgtggccctggaaagacgccccgatccggacgctggtgcagcgcatccaccagctgcaggctgagcgcgcgcagggcttccgccgactggaggagtggttggcgccggtgcagggcctgagagcctgggggcgcggcctcagggtccccacatgccgcagaggccaccgccagtacctgcgcagcggccctgactacgacttcgcgcgctaccggagcacagtgcacggggtgacccaggccttcgccgccgcctcgcgggaggtgctggcggtggaagcagagctgggcgggcctcgcaggcagccgctgctcgccggccacgtgcgcagcctgcaggagctggagcagacgcggctgggcacggtggccctgctgcagttgatggagacgccagagctggcggggcaggaggacgctgtacggatgcagcagctgaaaatgaaggtaattaaaaccatggaggcgatcagcgaggttctccaggaccttaggtttgatgcggaatctgccgagtgatggcggctccccagggatgcgccgagggagatgggaaacggggcggatggcgcccagcccagccctaactgccagctggctggggtygcgccccactgcgctgctgaccttcctgcagttccagacacctcccacaataaagagctcctcctctgtaaaaaaaaaaaaaaaaaaaaaaaaaaaaaaaaa

SEQ ID NO: 276 - DNA, 1527 bp, Homo sapiens
cgcgtccgcccacgcgtccgcccacgcgtccggctactcagaggaaggggcggttggtgcggcctccattgttcgtgttttaaggcgccatgaggggtgacagaggccgtggtcgtggtgggcgctttggttccagaggaggcccaggaggagggttcaggccctttgtaccacatatcccatttgacttctatttgtgtgaaatggcctttccccgggtcaagccagcacctgatgaaacttccttcagtgaggccttgctgaagaggaatcaggacctggctcccaattctgctgaacaggcatctatcctttctctggtgacaaaaataaacaatgtgattgataatctgattgtggctccagggacatttgaagtgcaaattgaagaagttcgacaggtgggatcctataaaaaggggacaatgactacaggacacaatgtggctgacctggtggtgatactcaagattctgccaacgttggaagctgttgctgccctggggaacaaagtcgtggaaagcctaagagcacaggatccttctgaagttttaaccatgctgaccaacgaaactggctttgaaatcagttcttctgatgctacagtgaagattctcattacaacagtgccacccaatcttcgaaaactggatccagaactccatttggatatcaaagtattgcagagtgccttagcagccatccgacatgcccgctggttcgaggaaaatgcttctcagtccacagttaaagttctcatcagactactgaaggacttgaggattcgttttcctggctttgagcccctcacaccctggatccttgacctactaggccattatgctgtgatgaacaaccccaccagacagcctttggccctaaacgttgcatacaggcgctgcttgcagattctggctgcaggactgttcctgccaggttcagtgggtatcactgacccctgtgagagtggcaactttagagtacacacagtcatgaccctagaacagcaggacatggtctgctatacagctcagactctcgtccgaatcctctcacatggtggctttaggaagatccttggccaggagggtgatgccagctatcttgcttctgaaatatctacctgggatggagtgatagtaacaccttcagaaaaggcttatgagaagccaccagagaagaaggaaggagaggaagaagaggagaatacagaagaaccacctcaaggagaggaagaagaaagcatggaaactcaggagtgacattcccttcactccttttcctacccaagggggaagactggagcctaagctgcctgctactgggctttacatggtgacagacatttccgtgggatagggaagatagcaggaagaaaagtaaactccatagaagtgtcattccactgggttttgatattggcttagctgccagtctcccatttgtgacctatgccatccatctataatggaggataccaacatttctaatattctwtatctccaagaaactataatcttcctagta

SEQ ID NO: 277 - DNA, 940 bp, Homo sapiens
  misc_feature (108)..(108): n equals a,t,g, or c
  misc_feature (874)..(874): n equals a,t,g, or c
ggcagagcgcacaggcccaggagccccgggacgcacgggaaagcccccatcgcggcggaaactgcggccagggtgccggggccggtggagggacggccagagcagcgnagtaacgagcggaccgattctcccgcaacagtggacgcgcccggggggggcctgggggaggttcttcgcgtgcggccsggccggccgcaagtctgggacgcgccgccgccatgatcatccctgtacgctgcttcacttgtggcaagatcgtcggcaacaagtgggaggcttacctggggctgctgcaggccgagtacaccgagggggacgcgctggatgccctgggcctgaagcgctactgctgccgccggatgctgctggcccacgtggacctgatcgagaagctgctcaattatgcacccctggagaagtgaccacgctgraacccacccacccgctgtgctgaccatgggccctgagcgtcctaccccgaattcacgaggctgaggcatccgggagctggcgtaatgcctggccgcagtgtgtgtgtatcccataccccactctggaaggaaccatccagtaaaggtctttcagaaccamwaaggtcccagccctcactaggatgtcaggagccaggtctaggcccagctttcacactgtggcagcccagtgaagcagactgggccatgaactctcctagccctggggccagcctgttccacaggcacccctgcaggaggcgctgccaggagagccttccatctcggggctctttgaggttccctccttctgggtgttcttcaggctgagcagagaggctcctgtaccctctctctcggaatctgaagagccagatttaggccgggcaaagggggttcacccntataaatcccaggatttgggaggccaaggcaggaggatcattgagttccagaaattcaagacccgc

SEQ ID NO: 278 - DNA, 630 bp, Homo sapiens
ttttttttttgtgtttaaattttaaaactttattggctgacggaaaactgccatactttcttcccactaccatcctgctattcctgaattcaatttgcaaaagaagcatagaccaagaagggttccttaggtgctcaacagaatttaaagtgcgacagatatgtttacaattagaaaataaaacttctctctcagtttaaagaaatttttttctttgtacatrttttaaagtacagttgtgttttctttttaggaactgtggaaaatgcctatttataatgtctttggaaggataccccattttgtaattgtggtcttccagattcttctgggttaacatgttgagatgtattccacggtactcgcatttctgataaatccatattgtctcgaagagayttcctttcagctttctgacatcttatcaagaattagtagaggggcaagaattcttgccctgttagtttccacaatgcagccatttaacaccatctcatccaaaatgatgtgtactttatccaaattaaacattatatctaattcactcactcggctgaaatactcatctaaaacttccacaaagttatgaatgaattcataaatagccatctcgttctcagtgtcattaac

SEQ ID NO: 279 - DNA, 802 bp, Homo sapiens
  misc_feature (685)..(685): n equals a,t,g, or c
  misc_feature (777)..(777): n equals a,t,g, or c
cgcagctaccggtccggaattcccgggtcgactgagcagcacgccttcactcaccagttttgccagcgcctcgcgcagtgaattacgtgatacgccgagttgcatcgccagttggcgctcagcgggcaacttcatgcccgcttccaggtttttttcatcaatcagcgcccgcacacgatcggcaacctcgtctgacaggcgtctgggtaaaacaatcattaaggaatcatccacgttaagacataagcctgaagcgtggtgatcacgcccactatacaggtgaagatcaggctgtgtttgacagtaaagcggaacaaatcagactctttgcccaccaggcctaccgccgcacaggcgatagcgatagattgcggggagatcatcttaccggtgacgccaccggtggtattggcggcaaccagcaacagatcagagacgccaatttgttgtgctgcggtggcttgcagcgcggcgaacagggcgttagatgaggtatccgacccggtcaggaatacccccagccagccgaggaacggcgagaagaaggtgaatgcatgaccggtgtgcgccagtgccagcgccagtgttgatgacagtccggaatagttcgaaataaaggcgaatgccagcaccataccgatggagtagatgggcagagccaggtctttcagcgkgcttgccgaangtgcttgatagcgtyagacggkttcatctttcagccagacaatcgagagcagtgcarcaaacagaatggcggtgccggtggcagaagaaccnggtcaaactttaaaccacgggggga

SEQ ID NO: 280 - DNA, 852 bp, Homo sapiens
ccccagtgactctccacgactgagagaatggaagtggcggtcagcaaggcacgggctaaagtgaccatgaatgacttcgactatctcaaactccttggcaagggaacctttggcaaagtcatcctggtgcgggagaaggccactggccgctactacgccatgaagatcctgcggaaggaagtcatcattgccaaggatgaagtcgctcacacagtcaccgagagccgggtcctccagaacaccaggcacccgttcctcactgcgctgaagtatgccttccagacccacgaccgcctgtgctttgtgatggagtatgccaacgggggtgagctgttcttccacctgtcccgggagcgtgtcttcacagaggagcgggcccggttttatggtgcagagattgtctcggctcttgagtacttgcactcgcgggacgtggtataccgcgacatcaaggttagtggcagggtgtgcgccaggctgacctgtggcatgcacaccacatgggactcacactggggaagttgggctgagcttctgccctcattcgccaggctccccaccaaggtccagggtggtggctgccctcattcgccaggctccccaccaaggtccagggtggtggctgccctcattcrccaggctccccaccaaggtccagggtggtggctctgtggcaagttgccccaagtagggaccttcccaagcctcccatgagcgctcctaggccactagcggagtgtcaactgccacaatacctactttatttgtatttatttatttatttatttttgaggagtcttactctgttgagattgcaccactgtagcctgggcgacagagcaagactgtcta

SEQ ID NO: 281 - DNA, 1811 bp, Homo sapiens
gagactctgagggaggaggcgcccacagacttacgggtgtttgagctgaactcggatagtgggaagtctacaccctccaacaatggaaagaaaggctcaagcacggacatcagtraggactgggagaaagactttgacttggacatgactgaagaggaggtgcagatggcactttccaaagtggatgcctccggggagctggaagatgtagagtgggaggactgggagtgagggagccagagggagcagctcccccacccatggcatctctcgcctccctcgctcgtctcagcccagccctggaagactgagaatgttcccccaaatctcctctgccaaccagagctctgggcacagattctggtggctccctgctggccctcttgggcctctgctcacacctgggaaggggctctctaaatcccggccagaaactctgacttgtgccaacaataggatgacccaagggagaggaaacctatcctcctcaccagaagagcctgtgtttttctgctgaacacccactgttcctgaggactcctgctgggaagtcccaagggatagttctagcccttctgcctgtgtagacagaagctaaaccaccagtctctctcggaggaagctgagacaacatactctgtccatacataagcaggcagggagggccatgccacctacccttggctaaacagggacagtgaacacattttggttcctatcccagtgggtaagaggcacttatctctgggaaatttgcctctcttgggactctccccctcccaggcattttccattcctggaaaggctcctttggggttcagaatccagagaccaaaccctgacccacctccttcctttcctccagcccacgctggtctgtccccatgccttcccagggcttcttcatgtcagatgcacccaagtccttagcccagctgtgccacctgcaggagttcgctcttgcgtttcttcccctccccaagaagggagggggctacttcaggcccttctgtgtgttgcctggcaggataccttgtccaaccagctacccacctcaactcccctgtagtttaggacacaaaacagctaccagcggtacagagcggtgatcaaagccgagtacttacaactctggtaagcctagcttctccgcctcagcccttctgcttctggaagggctatcctgggggtgaacttgaaactctcatcaggcttctgcaaaagctcttcttcctgaagacagacccagcctttgtgctctcaccctccactctggtaaagctgcacctctgggggaatgaggggctgcaggaatctctggagagcctggtgcttcacgatgctgctctggtgattcttgtacctaatctggtgtgctcaccaatgagtgaaagggatcgtgggtcagggacaccgagagagtgaggtcacttccacttcaaaccttcagtgagggggtgggatggagagaatgctgaatcttttttttgacgggatggggtttttctctttgtaattatttctttagtttaattaaccttttggttgtttgtgcaatattatatattttaaattataatgcatctccccagagtattttgtagctgggaaaagaaaaaaggaaaaaaagaaaaaaagattctaacagctgttagttttataattaaaaaagaaagaaaaaagaactttgtcctgaaccttttacagacttgccgttaacagcattaaagtgattcacccgaagctgaaaaaaaaaaaaaaaaaaaaaaaaaaaaaaaaaaaaaaaaaaaaaaaaaaaaaaaaaaaaaaaa

SEQ ID NO: 282 - DNA, 385 bp, Homo sapiens
gtttatgtccttaaataaaaattcataggctctagattagattagaagatacagcttagatcaaaagggctcttttggatactttaatttactcgtgtgccctgccatgtggatgagaagtgattacatgtggaaattcatagtgttatctttttatagcattcatttaaaaaggttggatttatgtaggccttttccttttgttctttattgcagatattcaagagaagcttatgtggagttagttcaccatattagagaatctattccaggtgtgagcctcagcagcgatttcattgctggcttttgtggtgagacsgargaaratcacgtycagacagtctctttgctycsggraakttcmaktacaacatgggctttcctc

SEQ ID NO: 283 - DNA, 2911 bp, Homo sapiens
  misc_feature (16)..(16): n equals a,t,g, or c
  misc_feature (22)..(22): n equals a,t,g, or c
  misc_feature (34)..(34): n equals a,t,g, or c
  misc_feature (38)..(38): n equals a,t,g, or c
  misc_feature (84)..(84): n equals a,t,g, or c
  misc_feature (2889)..(2889): n equals a,t,g, or c
  misc_feature (2908)..(2908): n equals a,t,g, or c
cggggggggagaacgngaatcntcatttcttctncagnacaaaacgacagttcattcatacctagagaaattccttaccgagcngatgatggaaaggagggaggatgtatggcttccactcatctcctatagaaattcattagtcactgggggtgaagatgatagaatgtctgtgaacagtggaagtagcagcagcaaaacctcatcagtaaggaataagaaaggacgacctccacttyataaaaacgagtagaagatgagagtctggataacacatggctaaacaggactgacaccatgattcagactcctggccccctgccagcaccacaactcacatccactgtactgcgggagaacagtcggcccatgggagaccagattcaagaacctgagtctgaacatggttctgaaccagactttttacacaatcctcagatgcagatctcttggttaggccagccgaagttagaagacttaaatcggaaggacagaacaggaatgaactacatgaaagtgagaactggagtgaggcatgctgttcggggtctaatggaggaagatgctgagcccatctttgaagatgtgatgatgtcatcccgaagccagttagaagatatgaatgaagaatttgaggacaccatggttattgatctgcctccatcaagaaatcggcgagagagagctgagctaaggccagacttctttgactctgcagctatcatagaagatgattcaggatttggaatgcctatgttctgaagtctgaagaaaatttacaaatctggaactctattatttagagctagaggcctatatactgtgatagcttgtatggggaaaaacacttttgatgtgatctgatttgttttttaatcaaatgattaaggtcaatccctttttgcagtgacagaagaggagcatgtaaattacccaagggaatgttggtgaatgtcaactcagaaagactgacctgaaaatcatttgtgtcctactattggacttatcccaatacagatgtgtgtgtttttctggagggaggaagaaattttaaatttttaaaacagctgtcaagataaacactgttatacacctgttttatgaaaactcaacattgagtaaaaaaaaacatatttttaactttattttcctgttgtacaatttaaaaaccgttttaacattttgcctttttatgttttaaaagctaaccatttttattaaacctatgagtaagcagctcatcctaattgcgaagagtgttttggagttcactggatttggttgacctttgtggaacacaaataatgaaggagcagaacattgacaagctaagatgaaattctgacatagtacatctctgccaaaaaccacacaccctctgtggatatggatatgaattcccagattttatatactcttgaataaaaggtttatttttatttataagtgggcataaaataagaaatgtccatgcagccatttttccaacagatgctgtacaccgttcattttatatagactagggagattcaaatacagtgcattttctattggtatttgttctgtgcatttttagcaacttctaccagcaaataaagtattctcagtaaaacgaaaatgattctcaagttatcagtttgctgtttttaccacttatttcatgccctgccaaattcaagttacacagacttccattttcttaagataatcaatcatgaagaaatcctttatcaatcattcaaaagtaattttaagtgtaacataactgtgtttacttcccatgcacttaatacccttatgcgctaattttgtgaattaagtttactgattatagaagtatgtgctgcatagaagtctgtgcttagagggtgaagttcctaagcttaccttgaattacagctacatttcagtgttaaatgtgcatattaagaataattcttttggggaaagaaattatgaatcttcaggacagtctacaatggtttagagttacattctgcctagacttttatgacttgctgctattgttttaaaaaccccacttagtctcttcctttctgatttctaaagtaagcctcagaatttccaaaccaattcatccacagctgtttctgggctggtttttaaagtagctgcaacagaatcatgaggctttccctttttatcaaatacgaaaaacattttttaaaattctgcacacccagtgatcatcttttgtgcgggaaagcaagatgatgatggatgattttattcatccttttagtaaagacacaaaacatttttctcaacatttgtacagttctgaaaaaaacctggtcaccaaaaatatcttctctgctaattcagcaattcttgggctccagttaggggagctggggcctcactttctcccagrattgtgggcttcactggaagtgaaggtgcaggaatgactggactgtccaccccagccctgcctgcctgtggttttggccagggagcaagccatgaggtgccctggcacatgcacaaattgatcctttgcgtgacagtcttgtatggaaaacagatgctgacagaattgtagactaccatgccacacaaaaaggctaaatatctactccaatgggtttccagttcagtttgaagtcaatcaaatttttgtattttcggtgtctccttgattggttttgctagtaattctgtaaattgtacatttgcaatatgaggttttttttccttttgtacaatttgaaactgatgcttcacctttcctttaataaactattcaaaatcagaaaaaaaaaaaaaaaaaaaaaaaaaaaaaaaaaaaaaaaaaaaaaaaaaaaaaaaaaaaaaaaaaaaaaaaaaaaaaaaaaaaaaaaaaaaaaaaaaaaaaaaaaaaaaaanacaaaaaaaaaaacaaaanaaa

SEQ ID NO: 284 - DNA, 1840 bp, Homo sapiens
ccggaattcccgggtcgacccacgcgtccgggaaaacgccgytttgactgtgccttgttctcacagctggcgggaagaagcgccttttcgaaagccagagctcgagttacccctcttaccaccgtcatggcagtcccagttgttgaaattacctccaacattcatgtcagtgattcaccactctccatgaagagctgaactggcacaagtggcaacgtatgttactgatgtaattggcacraaactgttttcttattatctccttcactgaagccctatagccaaggttgcaacaaggacagtgtcagagcaggctgtaaaaaatgtggctaccctggtcacctgacttttgaatgccgcaattttctccgagtagaccctaaaagggacatagttttggatgtcagcagtacaagtagtgaagatagcgatgaagagaatgaagaactgaataaattgcaggcattacaggaaaaaagaataaatgaagaagaggaaaagaagaaagaaaaaagcaaagaaaaaatcaaattgaaaaaaaaaaggaaaaggtcttactcatccagttccactgaagaggacacttcaaaacaaaagaaacaaaaatatcagaagaaagaaaagaaaaaagaaaaaaagagtaaatcaaaaaaagggaaacatcacaaaaaggaaaaaaagaagagaaaaaaggaaaagcattcttctacacctaatagttctgaattctccagaaagtaactgagactttggcttaagccgttaaatttaaaaatttgtttttaaaacgtgtttgcccttccttggaatttgctatatattatgctttgcaataaatcacagccttttccatatagacatttttcgtatttgggaccattatccctctggcaatatatttttaatgtgctgtaactgtaaagtattaaatcagtcttgttacttgatagccatgccccaagtatagctatttgtgtatactaaacacatcatttttggtatttgtgtctctgtgtgtttggctagtgttactacttcataagttcattgtaaaatggctttactgccatcaacatgggtcatctacctagcagttaatgagtattgctgratcaggtgtccaccttccaatgatgaagcaaggtaaggggtaatgttttgctcttgacacagagaaatttaatagctttatgtactaaaatataatatcttttaaagatagtgaaattcttcagttttttaaatctctagggattttttttcaatgttgtagaagatgcagctgcttaatggtcttgactaggactttttaaatgaatggtgtctgcaggtagatgatcatgaaaatatctctaacaaagttttactcttctatgaaatgcagaatttstagkacctgcctcctttgtttttgtaataattaaaatacttcttgtataaagagattagttcagcctgttagtaagtctgcagagatgatgctgagttggttgtgatttttagaatagactcctgggttgttttacaaatgtgccatattggcatgtcttacagtgatacctcaaacacagaaatttttatttaggaagatagctaaatctttattagaactgatttttattgtattcagtataaattttatgaagcttgtttctatgagtactgtggaaaattttataaatgtgagcatatatatktattttgwctgacataatttgtagttttaaagcaagtttcacactgaacttaacgttttcataaatgaccagtttgggatgtttctctcttttactttagtggcaaactcaagagtaaaaagtgtcaaaaaaaaaaaaaaaaa

SEQ ID NO: 285 - DNA, 1176 bp, Homo sapiens
ggctttacggctgcgagaagacgacagaaggggtgaaacaaaagggataaatgtgttttgttttgttttgttttacctgtttggggtatttttttctgagtttgtgtagaaaccgtgtggtacactggtaatcttgtcagggtacaaacttggtctgactttgttatttggtttatttgtgaaccatgtacttgctcttcctcccagaaacatagcttgtaggcaaggttaatccagtgttggcgatccatgtcctagcacagcatctgtaagttaatgcacaatcgttccttccaaggatggatttatcattgtaaatatattttcattgtcttacaggcataatgggcataagtatgttgcttttaaatattttaaattaaactattacagttacatatattttgcttgaagtgagtgattttcaaactttttgtatttggtgggctgtccatcttgtaatggtgggagtaaatgtttccatagatgataaggcagttcttggctgaattcagcttgtgtttcttttggagggtgggcaaatcagagggcagagattatttagttgcattataggtattcttctataccacttgccctttgaaaccctcarcttgaggtaatgtgcagtctggggttttaattagtattaataatcttgtggatttacagaaatctataatgcacagagttgagttttaaccaatgatcgtattcatagaaaatatttcgaaccaccacattcttcatggtcattttagttagtacatagtcattgagtggccagccacacctgacacaatctcccagcatccaagattggagattcctggtctgtgtagagtatatggttttgcacgaaatctttctagtcttgtgattgcttcagtttaatttgtcacataaaaccacaagtatttaatattaatgtatcagtggtttggtgtttttgttcccagtactsggtttgcgccgggaaaaatctgaatactggagctacagagttaactctaaaagtgcttttattggtttctagaaactggaagaagagaaaggcaaaaaggaaaaagaaagacaggaaattgagaaagaacggagagaaagagagagggagcgtgaaagggaacgagaaaggcgagaacgggaacgagaaagggaaagagaacgtgaacgaga

SEQ ID NO: 286 - DNA, 1002 bp, Homo sapiens
  misc_feature (138)..(138): n equals a,t,g, or c
  misc_feature (159)..(159): n equals a,t,g, or c
ggcacgagctcgtgccgaattcggcacgagctcaaccaacctgcatctagaaagtgaattggatgcattggcaagcctggaaaaccatgtgaaaactgaacctgcagatatgaatgaaagctgcaaacagtcagggcncagcagccttgttaatggaangtccccaattcgaagcctcatgcacaggtcggcaaggattggaggagatggcaacaataaagatgatgacccaaatgaagactggtgtgctgtctgccaaaacggaggagatctcttgtgctgcgaaaaatgtccaaagtctttcatctaacttgtcatgttccaacactacttagctttccaagtggggactggatatgcacattttgtagagatattggaaagccagaagttgaatatgattgtgataatttgcaacatagtaagaaggggaaaactgcgcaggggttaagccccgtggaccaaaggaaatgtgaacgtcttctgctttacctctattgccatgaattaagtattgaattccaggagcctgttcctgcttcgataccaaactactataaaattataaagaaaccaatggatttatccaccgtgaaaaagaagcttcagaaaaaacattcccaacactaccaaatcccggatgactttgtggccgatgtccgtttgatcttcaagaactgtgaaaggtttaatgaaatgatgaaagttgttcaagtttatgcagacacacaagagattaatttgaaggctgattcagaagtagctcaggcagggaaagcagttgcattgtactttgaagataaactcacagagatctactcagacaggaccttcgcacctttgccagagtttgagcaggaagaggatgatggtgaggtaactgaggactctgatgaagactttatacagccccgcagaaaacgcctaaagtcagatgagagaccagtacatataaagtaaaatgacatggatttaaatcaattgtttaaaaaaaaaaaaacg

SEQ ID NO: 287 - DNA, 1898 bp, Homo sapiens
  misc_feature (1895)..(1895): n equals a,t,g, or c
gctttccttcattaggccacagcagggctcaagatcccagtataccctcttgttttcagctttgatccttctgaatgaggggcaggggagtgtgcctgtttgcttttctaggagcctctgcttgtactgtcagtctttatacctccatgtgagtatgtacacgcctgcatttgggttcatgcacgtgcttattttttaagatgctttggcatttccctttgtaatgtatacattacaaagggaatacattgcctttgtaatgtatctgtgaagcagacaaagcaaacgatagcatgyccaagtgtctaggcagaaactgcatcctgttgttctaaagaagtagacccaagtttccatagcaagtggttagcagggtcctgaccacttctccttgktctggcacctyctgcaagctcctgggctctctccttgcttgaaatgggcaactgccyttgaaactcctccaagccccaatgggctgcccattgtccctgtgttcccaggatcaagcgcatggcaggcatgaaggaatcgcagatcagcgcagagattgagcttctgcctaccaacgacaagaagaaatgggctcgaccccccatttccatgaactttgaggtatggcagaggaggggcctagastcatgccagggtatgctggaagacctcttagagatcattccgataaacygctgcaccttagaggtgaggaaactgaggcctagaaagaagaactggctttaattcatagatccattcttcccctttcaagcctcttagtagaaattactatttgtgatgaggcaaatcttttacttctctcggcttgtcctaacacagttctttcaaaaaacttagattgtttaaatgccaggtaagacacaaagtttacttacagacaggataatgggctgactttgctttgcgcatgttagacataattttctccaccttatttttaagttcataatattgagcaggataagtatgttctaaagcagttctttggttgctgtctcctgctgattaaaggaactgattcaaggtgtcacaggtagggctttcttctttagtcacctcttagaaggtcccacgccgccccagcttctttcaggaccccagccatacaaacacctgtagtagcgatgaagtagggcagggcaacgggacttcccagaggagagcggctgtaagaggaaggccacatttctaactagctctccttgcccaggtgccattcgcgccctctggcctcaaggtgcgctacttgaaggtgtttgaaccgaagctgaactacagcgaccatgatgtcatcaaatgggtgcgctacattggccgcagtggcatttatgaaactcgctgctagctgccactaggctagcccacctccccagccaccctcctccacaggtccaggtgccgctccctcccccaccacacatcagtgtctcctccctcctgctttgctgccttccctttgcaccagcccgagtctaggtctgggccaagcacattacaagtgggaccggtggagcagcccctgggctccctgggcaggggagttctgaggctcctgctctcccatccacctgtctgtcctggcctaatgccaggctctgagttctgtgaccaaagccaggtgggttccctttccttcccacccctgtggccacagctctggagtgggagggttggttgcccctcacctcagagctcccccaaaggccagtaatggatccccggcctcagtccctactctgctttgggatagtgtgagcttcattttgtacacgtgtgacttcgtccagttacaaacccaataaactctgtagagtggaaaaaaaaaaaaaaaaaaaaaaaaaaaaaaaaaaaaaaaaaaaaaaaaaaaaaaaaaaaanccc

SEQ ID NO: 288 - DNA, 541 bp, Homo sapiens
  misc_feature (513)..(513): n equals a,t,g, or c
  misc_feature (533)..(533): n equals a,t,g, or c
  misc_feature (536)..(536): n equals a,t,g, or c
ggcacgagtgcgaccggggttcagcgctcgggtgaggagctggtggcgtcggcaggttcgaggcgattcgaggtgagggggtcaagcggagaggctcggagtcggagaaagctgtcgcgacccagccacccaggttcgaggcgattcgagctccagctaggatgatcgaggttgtttgcaacgaccgtctggggaagaaggtccgcgttaaatgcaacacggatgataccatcggggaccttaagaagctgattgcagcccaaactggtacccgttggaacaagattgtcctgaagaagtggtacacgatttttaaggaccacgtgtctctgggggactatgaaatccacgatgggatgaacctggagctttattatcaatagatgagaatcctcatcttcctgccccgctttcctctcccatcctcatcccccacactgggatagatgcttgtttgtaaaaactcaccttaataaagacttagatgttgcaaaaaaaaaaaaaaaggggsgnccgtacccaattcgcccaanagnggcgg

SEQ ID NO: 289 - DNA, 1065 bp, Homo sapiens
ccacgcgtccgggcctcctccactgggtccgaatcagtaggtgaccccgcccctggattctggaagacctcaccatgggacgcccccgacctcgtgcggccaagacgtggatgttcctgctcttgctggggggagcctgggcagcgtgtggaagcctggacctcctcactaagttgtatgcggagaacttgccgtgtgtccatttgaacccacagtggccttcccagccctcgcactgccccagagggtggcgatccaaccctctccctcctgctgcaggacactccagggcacaggaggacaaggtgctggggggtcatgagtgccaaccccattcgcagccttggcaggcggccttgttccagggccagcaactactctgtggcggtgtccttgtaggtggcaactgggtccttacagctgcccactgtaaaaaaccaaaatacacagtacgcctgggagaccacagcctacagaataaagatggcccagagcaagaaatacctgtggttcagtccatcccacacccctgctacaacagcagcgatgtggaggaccacaaccatgatctgatgcttcttcaactgcgtgaccaggcatccctggggtccaaagtgaagcccatcagcctggcagatcattgcacccagcctggccagaagtgcaccgtctcaggctggggcactgtcaccagtccccgagagaattttcctgacactctcaactgtgcagaagtaaaaatctttccccagaagaagtgtgaggatgcttacccggggcagatcacagatggcatggtctgtgcaggcagcagcaaaggggctgacacgtgccagggcgattctggaggccccctggtgtgtgatggtgcactccagggcatcacatcctggggctcagacccctgtgggaggtccgacaaacctggcgtctataccaacatctgccgctacctggactggatcaagaagatcataggcagcaagggctgattctaggataagcactagatctcccttaataaactcacaactctctggttcaaaaaaaaaaaaaaaaaaaaaa

SEQ ID NO: 290 - DNA, 2411 bp, Homo sapiens
  misc_feature (5)..(5): n equals a,t,g, or c
  misc_feature (7)..(7): n equals a,t,g, or c
  misc_feature (17)..(17): n equals a,t,g, or c
  misc_feature (21)..(21): n equals a,t,g, or c
  misc_feature (795)..(795): n equals a,t,g, or c
  misc_feature (2260)..(2260): n equals a,t,g, or c
  misc_feature (2293)..(2293): n equals a,t,g, or c
  misc_feature (2309)..(2309): n equals a,t,g, or c
  misc_feature (2357)..(2357): n equals a,t,g, or c
gtcancngacagtcacngtcngattcccgggtcgacccacgcgtcggcgaagacctacgattacctgttcaagctgctgctgatcggggactcgggggtggggaagacctgtgtcctgttccgcttctccgaggacgccttcaactccacttttatctccaccataggaattgactttaaaattaggaccatagagctcgatggcaagagaattaaactgcagatatgggacacagccggtcaggaacggtttcggacgatcacaacggcctactacaggggtgcaatgggcatcatgctggtctacgacatcaccaacgagaagtccttcgacaacatccggaactggattcgcaacattgaggagcacgcctctgcagacgtcgaaaagatgatactcgggaacaagtgtgatgtgaatgacaagagacaagtttccaaggaacggggagaaaagctggccctcgactatggaatcaagttcatggagaccagcgcgaaggccaacatcaatgtggaaaatgcatttttcactctcgccagagatatcaaagcaaaaatggacaaaaaattggaaggcaacagcccccaggggagcaaccagggagtcaaaatcacaccggaccagcagaagaggagcagctttttccgatgtgttcttctgtgaggaacaccgccttactctgagcctcgctcagcccagctgactgtgcctgttctgagtgagcccctcactcagccggggccctcccacctccaacgccccgcccacgccgcggccaccgggcccacggncaccagaatgcaattgagaaatcgtttattttagtaactgtctgatctttttcaactttggagatggaataagttaaaaatttgctatttttcctgtaacatctgctgaacgggcccacccacacgttgtatattcagagagagagagggagtcaaggtgtgaccgtcgaccacagccagtgtcaggcctctgcctctgggcctttgctttgtggcctcactgcaacacaaagctccaccaggaggctggttcacgtcccctaccacggaagcgaggtcccagaaggccagcggtggttccaggagcaacagctcccaaaccctgagcaaggcaaccgatcgccaggaccaggaagcatcacccaggagatttggcgcccacttccacctcttctctcagttttggacaagtgacaaaccattttgccccctcactcttcttttttaactgttaaaccaaaggaaagcacaaatgaaggaaatcctgtgtaaagcattgagaaggaaagaagcctggagcagcctctcctgtccacagccaggggttaggtctgcaggcccgtctgcggtccccatcgagcatcaaggggacgctgtgtgtgctgcaagtgaccccgaaaacaaccacagccgtcacatggtcctcctgaagttggggcaccctcctctcagcaccaaaatggcccccactccttcgtgtcctcccgctatctccaaatcggacgttctttctagctgagatttttatttttccacatctgtagtgccatgaagcgattctgtctttgacttccaatggcaaacctgggtgatcgggaacaagcacgttgtacccttggctggacatggccaagacacaaggcattccacggcggcaagctgaccgcacagcagtctggcttgattttcagccgtcatcattgggttctgttttgacagctctgctgtcccatagggactgcgactgggaccaggtcaaccacgccaggggggtgtcaccagccttttctttttttctttctttttttttttttcctccttaagctgctgtcaatccaaaccattggcatcatcgtttcttttsaattaaaaccaacatatcagcaatagtctgctctccccgggaatctctaacatgctctgtttacatcgataaatgcacttaaggaaaacaaacaaattaaagctcatcttaaagtccaaggatttttatgtccacattttccctgtaggccacacggacatggccaggtgctgggggtgggtctggacaagatggtagagcccatggattaccccatcgagcggccacctcagaggagatgccacccatcatcaaaagactaaattgggaaaagaagcctcctggcttggtgcagtggctcacacctgtaatcccagcactctgggaggccaaggcgggctgatcacttgagctcaggtgttcgagaccagcctggccaanatggtgaagcctgcgtcacctggcttctggcanacagctcggccactgngtccctcctgcttccctggaaggaccttctaagggccctctcctgggngggtttccaagggaatttccttccaatttatccaggggccttcccaaaaccaaa

SEQ ID NO: 291 - DNA, 1349 bp, Homo sapiens
ggccccggagagggggaaggcgcctggaaaacgttcttcttctccctggccgacccgagcggggaacagcactcccaggatgcagtttgtgtcaacacggccgcagcctcagcagctgggcatccagggcctggggctggacagcgggagctggagctgggcccaggctctgcccccggaggaggtctgccaccaggagccggcgctgcgcggggaaatggccgagggaatgccgcccatgcaggctcaagaatgggacatggacgcccggcggccaatgccttttcagttcccaccctttccagatagggcacctgtcttccccgaccgcatgatgcgagagccccagttgcccacagcagagatctcactctggactgtggwggctgccattcaggctgtggagaggaaggtggatgcccaggccagccagctgctgaacctggaggggcgcacgrggccagctcctggggttcctgggagccgggaacagattggctacggaacgccccaggttgtacattcagagggctctttctccatgggagctcctggtgccgcctcggccccagcctgtccccagcccctcaatctggtgcagcagcatcttgtcactgcacaacagtggcctggtcccccacaggcagttagggccccaggtcagacctcaccatgatgatttgttccagttctcccagggcagaggggcgagggagaggcttttgctgtgagagtagccgtcacgtgtctcttcccagcagcgccgggcaagtgggtgctagagtctgagcctcaggctctcctgccctgggcctcccaattggtgctatctgttactgcccgtgctcacggacatggatacagaccctgctgtgctccacaccctgcaggcgcctcgggaagcgcccaaaggattccccttcacgttggtgcacctgctccatagctccgggcgctgcgtcccgaggggccacagtctccatttcagcgtcttgcatggcctggcaccgggtggggtggtatgccccaggacccttgtttgtgtcaaaaatgactttccctgcccttgccgtgggtccggcgttcctcccagccgggatcacagtgggcagccggcacccggcaccactttggcgagcgtcctgcttccgccctcgccctcatctacgctgctccgctttcctcagacccctttttgccgtgcaaagggaattcttgacattaaataaaaggtatccagattgcagactgcatgttcacagagctgggggttctccagcttgcctacagtaaagcctcaatgaactggaawmmaaaaaaaaaaaaaaaaaaaaaaaaaaaaaaaaaaa

SEQ ID NO: 292 - DNA, 598 bp, Homo sapiens
  misc_feature (579)..(579): n equals a,t,g, or c
gattttggctgctgcaggagccattttagttgtcaaatttaaaagttttgaatcactccccaatgtctgatgcctctgtcaattttgactacaaatctccatccccatttgactgcagcactgatcaagaagagaaaattgaagatgttgctagtcactgtctgcctcagaaggacctgtatactgctgaagaggaagctgctaccctttttcctaggaaaatgacatcccataatgggatggaggacagtggaggaggaggtactggagtgaagaagaaacggaagaaaaaggagccaggagaccaagagggtgcagcaaagggaagcaaggacagagagcccaagccaaagaggaaacgagaaccgaaagagccaaaggaacccagaaaggccaaggagccgaagaaggccaaggagcacaaggagccgaagcaaaaagatggggcaaagaaggcacggaagccccgggaggcctcgggcaccaaggaggccaaagagaagaggagctgcactgactctgcagccagkacgaagtccaggaaggccagcaaggagcamggwccaaccccagtggagnaaaaaraaaaaaaaaaaag

SEQ ID NO: 293 - DNA, 2263 bp, Homo sapiens
tcgacccacgcgtccgcccacgcgtccgaaagacgtgaggttccttttgttctttacctgtggcctccctgccctacacggggactctagggtggaatgtagcaaagcccatccaccagccatgtactaccccccaacccggccaggctggagcgaccgtgtctggggagccgagccccgcttctcgctgcggtgagcccggactggggcacgcactgcgcagactccccgctgcagtgggcggagctcccacaggccccgccccctcctcccaccctcgttcagcctgtccagacagaagctggggcccagcggaggtagcagcagacgcctgagagcgaggccgaggcccctcagggtttggagaccctgacacacccaccttctcacctgggctctgcgtatcccccagccttgagggaagatgaagcctaaactgatgtaccaggagctgaaggtgcctgcagaggagcccgccaatgagctgcccatgaatgagattgaggcgtggaaggctgcggaaaagaaagcccgctgggtcctgctggtcctcattctggcggttgtgggcttcggagccctgatgactcagctgtttctatgggaatacggcgacttgcatctctttgggcccaaccagcgcccagccccctgctatgacccttgcgaagcagtgctggtggaaagcattcctgagggcctggacttccccaatgcctccacggggaacccttccaccagccaggcctggctgggcctgctcgccggtgcgcacagcagcctggacatcgcctccttctactggaccctcaccaacaatgacacccacacgcaggagccctctgcccagcagggtgaggaggtcctccggcagctgcagaccctggcaccaaagggcgtgaacgtccgcatcgctgtgagcaagcccagcgggccccagccacaggcggacctgcaggctctgctgcagagcggtgcccaggtccgcatggtggacatgcagaagctgacccatggcgtcctgcataccaagttctgggtggtggaccagacccacttctacctgggcagtgccaacatggactggcgttcactgacccaggtcaaggagctgggcgtggtcatgtacaactgcagctgcctggctcgagacctgaccaagatctttgaggcctactggttcctgggccaggcaggcagctccatcccatcaacttggccccggttctatgacacccgctacaaccaagagacaccaatggagatctgcctcaatggaacccctgctctggcctacctggcgagtgcgcccccacccctgtgtccaagtggccgcactccagacctgaaggctctactcaacgtggtggacaatgcccggagtttcatctacgtcgctgtcatgaactacctgcccactctggagttctcccaccctcacaggttctggcctgccattgacgatgggctgcggcgggccacctacgagcgtggcgtcaaggtgcgcctgctcatcagctgctggggacactcggagccatccatgcgggccttcctgctctctctggctgccctgcgtgacaaccatacccactctgacatccaggtgaaactctttgtggtccccgcggatgaggcccaggctcgaatcccatatgcccgtgtcaaccacaacaagtacatggtgactgaacgcgccacctacatcggaacctccaactggtctggcaactacttcacggagacggcgggcacctcgctgctggtgacgcagaatgggaggggcggcctgcggagccagctggaggccattttcctgagggactgggactccccttacagccatgaccttgacacctcagctgacagcgtgggcaacgcctgccgcctgctctgaggcccgatccagtgggcaggccaaggcctgctgggcccccgcggacccaggtgctctgggtcacggtccctgtccccgcrcccccgcttctgtctgccccattgtggctcctcaggctctctcccctgctctcccacctctacctccacccccaccggcctgacgctgtggccccgggacccagcagagctgggggagggatcagcccccaaagaaatgggggtgcatgctgggcctggccccctggcccacccccactttccagggcaaaaagggcccagggttataataagtaaataacttgtctgtaaaaaaaaaaaaaaaaaaaaaaaaaaaaaaaaaaaaaaaaaaaaaaaaaaaaaaaaa

SEQ ID NO: 294 - DNA, 1844 bp, Homo sapiens
  misc_feature (1523)..(1523): n equals a,t,g, or c
  misc_feature (1738)..(1738): n equals a,t,g, or c
  misc_feature (1771)..(1771): n equals a,t,g, or c
  misc_feature (1801)..(1801): n equals a,t,g, or c
cagagactgtggtggagaagctgctcaccaactggatgtccatctgtctgtataccttcgtgagggactccgtagggagcctctgtacatgctctttcgagggattaagcaccaagtggataaggggccagtggacagtgtgacaggcaaggccaaatacaccttgaacgacaaccgcctgctcagagaggatgtggagtaccgtcccctgaccttgaatgcactattggctgtggggcctggggcaggagaggcccagggcgtgcccgtgaaggtcctagactgtgacaccatctcccaggcaaaggagaagatgctggaccagctttataaaggagtgcctctcacccagcggccagaccctcgcacccttgatgttgagtggcggtctggggtggccgggcacctcattctttctgacgaggatgtcacttctraggtccagggtctgtggargcgcctgaacacactgcagcattacaaggtcccagatggagcaactgtggccctcgtcccctgcctcaccaagcatgtgctccgggaaaaccaggattatgtccctggagagcggaccccaatgctggaggatgtagatgaggggggcatccggccctggcacctggtgaagccaagtgatgagccggagccgcccaggcctcggaggggcagccttcggggcgkggagcgtgacgcgccaaggccatccctgagatctacctgacccgcctgctgtccatgaagggcaccctgcagaagttcgtggatgacctgttccaggtgattctcagcaccagccgccccgtgccgctcgctgtgaagtacttctttgacctgctggatgagcaggcccagcagcatggcatctccgaccaggacaccatccacatctggaagaccaacagcttgcctctgaggttctggatcaatataataaaaaacccgcagtttgtgttcgacgtgcaaacatctgataacatggatgcggtgctccttgtcattgcacagaccttcatggacgcctgcaccctggccgaccacaagctgggccgggactccccgatcaacaaacttctgtatgcacgggacattccccggtacaagcggatggtggaaaggtactatgcagacatcagacagactgtcccagccagcgaccaagagatgaactctgtcctggctgaactgtcctggaactactccggagacctcggggcgcgagtggccctgcatgaactctacaagtacatcaacaagtactatgaccagatcatcactgccctggaggaggatggcacggcccagaagatgcagctgggctatcggctccagcagattgcagctgctgtggaaaacaaggtcacagatctataggaacccaggagccacggcctgctgttgcttcagcctggcctgggcagccctggaagctcggaggagaggccaccttcttaggtgcctgtagtgactgacaagcagagttagtggaaggtgactcccagtctcctggtggctctggcctcggncctgctggatccaccttctaracccggggcctyaaggctcatggggtagtacccagcctgctccccgagtccagsgaccctktgamaccggtctgcaaggagttggggactaagggcttccagagagtggctggaagagactccaggcccctggggagactgtctgtcctgaacactgccttggcacactgggattcggagaggaaggaggaaancccatgcttctgctgctctcacatcctgactanttgactgctctgcttgtgtgtgcaatcagnctaagtacgcttcaagcatacactgccctacagctgtgaaagc

SEQ ID NO: 295 - DNA, 1805 bp, Homo sapiens
  misc_feature (1803)..(1803): n equals a,t,g, or c
ccgccgccgccgccgccgccggagctctgtagtatggcatcgaggagaatggagaccaaacctgtgataacctgtctcaaaaccctcctcatcatctactccttcgtcttctggatcactggggtgatcctgctggctgttggagtctggggcaaacttactctgggcacctatatctcccttattgccgagaactccacaaatgctccctatgtgctcatcggaactggcaccactattgttgtctttggcctgtttggatgctttgctacatgtcgtggtagcccatggatgctgaaactgtatgccatgtttctgtccctggtgttcctggctgagctcgtagctggcatttcagggtttgtgtttcgtcatgagatcaaggacaccttcctgaggacttacacggacgctatgcagacttacaatggcaatgatgagaggagccgggcagtggaccatgtgcagcgcasctgagctgctgtggtgtgcagaactacaccaactggagcaccagcccctacttcctggagcatggcatcccccccagctgctgcatgaacgaaactgattgtaatccccaggatctacacaatctgactgtggccgccaccaaagttaaccagaagggttgttatgatctggtaactagtttcatggagactaacatgggaatcatcgctggagtggcgtttggaatcgcattctcccagttaattggcatgctgctggcctgctgtctgtcccggttcatcacggccaatcagtatgagatggtgtaaggagaagtctttcaagaatgacggaataagagacctgttttaaaaaggaactgcagcaatctttgaaagacttccaaagaatgttagagcacagtacataatacacttgccctgctccctctmccccttaccccacaacgtgcaactgacactcccacccagtctctgctccacctttcagcccacgtcacgtgtagtgtccattttgtgaagccctgttgtgccacagagtgtagccaggtccccctgcagctagtcctagtgaacctcaccccgaggccctgcatgggccagcccctccatctgtacttggtccaactgcaactcatcatcggtgactggttatcacaccatcgctggcccctttgggccctgcatgtagtgtgggaggctcctgttagctcctcactgtggtaaatgccacacacctttaagtagataagcagacgatagttatctgttcttttgacttaatctcatttggtttgattttccctctactaaggctttcctaccttcttcaggctgcctaagacatgtaacgaaacacttcaataattgtccatgaggagaaaaaaagcatgtgtcatgcatgaaggaaactgaacttgaggtggcctccttgcttgttacatacctgggtatgtgtaggcagtttagtgcatctttgcctctcagttgaaacctgtataaccctgttacaaagctgtgttgttgcttcttgtgaaggccatgatattttgtttttccccaattaattgctattgtgttattttactacttctctctgtattttttcttgcattgacattatagacattgaggacctcatccaaacaatttaaaaatgagtgtgaagggggaacaagtcaaaatatttttaaaagatcttcaaaaataatgcctctgtctagcatgccaacaagaatgcattgatattgtgaacatttgtgatatatgtattaataaatagagcaattacaagcaaaaaaaaaaaaactcgaggggcccgacccaatcnct

SEQ ID NO: 296 - DNA, 1703 bp, Homo sapiens
  misc_feature (1579)..(1579): n equals a,t,g, or c
  misc_feature (1600)..(1600): n equals a,t,g, or c
  misc_feature (1644)..(1644): n equals a,t,g, or c
  misc_feature (1658)..(1658): n equals a,t,g, or c
ccggcggagaatttcaaattcgaacggctttggcgggccgaggaaggacctggtgttttgatgaccgctgtcctgtctagcagatacttgcacggtttacagaaattcggtccctgggtcgtgtcaggaaactggaaaaaaggtcataagcatgaagcgcagttcagtttccagcggtggtgctggccgcctctccatgcaggagttaagatcccaggatgtaaataaacaaggcctctatacccctcaaaccaaagagaaaccaacctttggaaagttgagtataaacaaaccgacatctgaaagaaaagtctcgctatttggcaaaagaactagtggacatggatcccggaatagtcaacttggtatattttccagttctgagaaaatcaaggacccgagaccacttaatgacaaagcattcattcagcagtgtattcgacaactctgtgagtttcttacagaaaatggttatgcacataatgtgtccatgaaatctctacaagctccctctgttaaagacttcctgaagatcttcacatttctttatggcttcctgtgcccctcatacgaacttcctgacacaaagtttgaagaagaggttccaagaatctttaaagaccttgggtatccttttgcactatccaaaagctccatgtacacagtgggggctcctcatacatggcctcacattgtggcagccttagtttkgctaatagactgcatcaagatacatactgccatgaaagaaagctcacctttatttgatgatgggcagccttggggagaagaaactgaagatggaattatgcataataagttgtttttggactacaccataaaatgctatgagagttttatgagtggtgccgacagctttgatgagatgaatgcagagctgcagtcaaaactgaaggatttatttaatgtggatgcttttaagctggaatcattagaagcaaaaaacagagcattgaatgaacagattgcaagattggaacaagaaagagaaaaagaaccgaatcgtctakagtcgttgagaaaactgaaggcttccttacaaggagatgttcaaaagtatcaggcatacatgagcaatttggagtctcattcagccattcttgaccagaaattaaatggtctcaatgaggaaattgctagagtagaactagaatgtgaaacaataaaacaggataacactcgactacagaatatcattgacaaccagaagtactcagttgcagacattgagcgaataaatcatgaaagaaatgaattgcagcagactattaataaattaaccaaggacctggaagctgaacaacagaagttgtggaatgaggagttaaaawatgccagaggcaaagaagcgattgaaacacaattagcagagtatcacaaattggctagaaaattaaaacttattcctaaaggtgctgagaattccaaaggttatgactttgaaattaagtttaatcccgaggctggtgccaactgccttgtcaaatacagggctcaagtttatgtwcctcttaaggaactcctgaatgaaactgaagaagaaattaataaagccctnaattaaaaatgggtttgggangatactttaaaaccattgaatgccatgattaccgaaagccaganaattttgagactcngaaagaaaaattccaaactggatgatctttccaccaaaattagga

SEQ ID NO: 297 - DNA, 1294 bp, Homo sapiens
  misc_feature (1289)..(1290): n equals a,t,g, or c
  misc_feature (1293)..(1293): n equals a,t,g, or c
actttttttactagcctccagtgccttgtgctggaaagtgagacaaaggagcaagaaagccaagagacgggagagtcaaacagctctcgtggcaaatcagagaagcttgtttgcttgagactgaatacgaccaaatgggccattgggcctggaaaacgtgctctgactttgtcacccaattcacccagaaccatggtgggagagaacagacttggcgttggagcagactggaagaatgggggtgggagggtggaggggcttctcctttgtraggaatgactcatgtcttctttaacgacaaacttaaccctaagggctacttctgagactgaaaaatcagctttctatttacatgaaacactttgggggtcatgggagtgcacagcattagacagtatttggttcaccctgtaaagtagccaagaaaagatgagaaaaatcaagataggcctggcacactagacatttgcctccaaaagaaataacctacagtcttaagatgtatcataaaaatgttctgccaaggatctaaattaccttgggtttcgcatatgtctatgaaattctgtgataatttttttcaatacattgattcactggcgtctgttttcattttatacttttaataactcatcactggtggtactttatcttgaaaagtaatattttttatattttaacattggacagtgttagccagttgtaatgatgtatcagaagtaaagaaaaacccattaaagttatagctaatagatgctgttgggggttaaattaatagtaaaataatccaatatagcacttttgatgatttttatataaaagtcaactgtacatttcattcagaataataaatacttattgctgctaaaacttcttaaatggttgtttctgctatagttatttctattgcagttccaaattgccatcttcccttgtctcatttgcaagttctcaattgtatttctctcaaatggacaggttccttctttactggaggatttttgtttttatcatattggtttttcattacttctgaatagtcttaattacgtttactaaattctaaaggatttctgtgctattataattaggaaatcaacgtctttggtcaggaactttataatgtgctattaaatgtatattacatttttgtggaatcagttgttaattatttgcttaacacgtatgccagcaccaactatatgccaggcataatgtagattctcaggtttcttactcagttagatctaatacaatgcaaataaagttactgcttgaaaaaaaaaaannaana

SEQ ID NO: 298 - DNA, 1910 bp, Homo sapiens
  misc_feature (796)..(796): n equals a,t,g, or c
  misc_feature (1821)..(1821): n equals a,t,g, or c
  misc_feature (1846)..(1846): n equals a,t,g, or c
  misc_feature (1854)..(1854): n equals a,t,g, or c
  misc_feature (1872)..(1872): n equals a,t,g, or c
  misc_feature (1883)..(1883): n equals a,t,g, or c
gaccggagcctgagaggcgggccgcagcgggaagcagcgggcccgaggccgcgtccatgggcccgccgccgccgccgtcgccgccgcgccgaccatgtcggcagccaaggagaacccgtgcaggaaattccaggccaacatcttcaacaagagcaagtgtcagaactgcttcaagccccgcgagtcgcatctgctcaacgacgaggacctgacgcaggcaaaacccatttatggcggttggctgctcctggctccagatgggaccgactttgacaacccagtgcaccggtctcggaaatggcagcgacggttcttcatcctttacgagcacggcctcttgcgctacgccctggatgagatgcccacgacccttcctcagggcaccatcaacatgaaccagtgcacagatgtggtggatggggagggccgcacgggccagaagttctccctgtgtattctgacgcctgagaaggagcatttcatccgggcggagaccaaggagatcgtcagtgggtggctggagatgctcatggtctatccccggaccaacaagcagaatcagaagaagaaacggaaagtggagccccccacaccacaggagcctgggcctgccaagtggctgttaccagcagcagcagcagcagcagcagcagcagcagcatccccagtgctgagaaagtccccaccaccaaktccacactytggcaggaagaaatgaggaccaaggaccagccagatggcagcagcctgagtccagctcagagtcccagccagagccagcctcctgctgccagcntccctgcggkaacctgggctagagagcaaagaagaggagagcgccatgagtagcgaccgcatggactgtggccgcaaagtccgggtggagagcggctacttctctctggagaagaccaaacaggacttgaaggctgaagaacagcagctgcccccgccgctctcccctcccagccccagcacccccaaccacaggaggtcccaggtgattgaaaagtttgaggccttggacattgagaaggcagagcacatggagaccaatgcagtggggccctcacmatccagcgacacacgccagggccgcagcgagaagagggcgttccctaggaagcgggacttcaccaatgaagcccccccagctcctctcccagacgcctcggcttcccccctgtctccacaccgaagagccaagtcactggacaggaggtccacggagccctccgtgacgcccgacctgctgaatttcaagaaaggctggctgactaagcagtatgaggacggccagtggaagaaacactggtttgtcctcgccgatcaaagcctgagatactacagggattcagtggctgaggaggcagccgacttggatggagaaattgacttgtccgcatgttacgatgtcacagagtatccagttcagagaaactatggcttccagatacatacaaaggagggcgagtttaccctgtcggccatgacatctgggattcggcggaactggatccagaccatcatgaagcacgtgcacccgaccactgccccggatgtgaccagctcgttgccagaggaaaaaaacaagagcagctgctcttttgagacctgcccgaggcctactgagaagcaagaggcagagctgggggagccggaccctgagcagaagaggagccgcgcacgggagcggaggcgagagggccgctccaagacctttgactgggctgagttccgtcccatccagcaggccctggctcaggagcgggtgggcggcgtggggcctgctgacacccacgagcccctgcgccctgaggnggagcctggggagctggagcgggancgtgcacngaagcgggaggagcgccncaagcgcttcnggatgctcgacgccacagaacgggcca

SEQ ID NO: 299 - DNA, 2581 bp, Homo sapiens
ggtggatttgaaatccaagaagagagcaaacagtttgttgccagatatggtaaagtgtcagctggtgagatagctgtcacgggagcagggaggcttccctgcaaacagatcatccatgctgttgggcctcggtggatggaatgggataaacagggatgtactggaaagctgcagagggccattgtaagtattctgaattatgtcatctataaaaatactcacattaagacagtagcaattccagccttgagctctgggatttttcagttccctctgaatttgtgtacaaagactattgtagagactatccgggttagtttgcaagggaagccaatgatgagtaatttgaaagaaattcacctggtgagcaatgaggaccctactgttgctgcctttaaagctgcttcagaattcatcctagggaagagtgagctgggacaagaaaccaccccttctttcaatgcaatggtcgtgaacaacctgaccctccagattgtccagggccacattgaatggcagacggcagatgtaattgttaattctgtaaacccacatgatattacagttggacctgtggcaaagtcaattctacaacaagcaggagttgaaatgaaatcggaatttcttgccacaaaggctaaacagtttaacggtcccagttggtactggtcacaaaaggatttaacttgktctgtaaatatatataccatgtactgtggcattcagaatttcctaaacctcagatattaaaacatgcaatgaaggagtgtttggaaaaatgcattgagcaaaatataacttccatttcctttcctgcccttgggactggaaacatggaaataaagaaggaaacagcagcagagattttgtttgatgaagttttaacatttgccaaagaccatgtaaaacaccagttaactgtaaaatttgtgatctttccaacagatttggagatatataaggctttcagttctgaaatggcaaagaggtccaagatgctgagtttgaacaattacagtgtcccccagtcaaccagagaggagaaaagagaaaatgggcttgaagctagatctcctgccatcaatctgatgggattcaacgtggaagagatgtgtgaggcccacgcatggatccaaagaatcctgagtctccagaaccaccacatcattgagaataatcatattctgtaccttgggagaaaggaacatgacattttgtctcagcttcagaaaacttcaagtgtctccatcacagaaattatcagcccaggaaggacagagttagagattgaaggagcccgggctgacctcattgaggtggttatgaacattgaagatatgctttgtaaagtacaggaggaaatggcaaggaaaaaggagcgaggcctttggcgctcgttaggacagtggactattcagcaacaaaaaacccaagacgaaatgaaagaaaatatcatatttctgaaatgtcctgtgcctccaactcaagagcttctagatcaaaagaaacagtttgaaaaatgtggtttgcaggttctaaaggtggagaagatagacaatgaggtccttatggctgcctttcaaagaaagaagaaaatgatggaagaaaaactgcacaggcaacctgtgagccataggctgtttcagcaagtcccataccagttctgcaatgtggtatgcagagttggctttcaaagaatgtactcgacaccttgcgatccaaaatacggagctggcatatacttcaccaagaacctcaaaaacctggcagagaaggccaagaaaatctctgctgcagataagctgatctatgtgtttgaggctgaagtactcacaggcttcttctgccagggacatccgttaaatattgttcccccaccactgagtcctggagctatagatggtcatgacagtgtggttgacaatgtctccagccctgaaacctttgttatttttagtggcatgcaggctatacctcagtatttgtggacatgcacccaggaatatgtacagtcacaagattactcatcaggaccaatgagaccctttgcacagcatccttggaggggattcgcaagtggcagccctgttgattaatctctacatcattttaacagctggtatggccttaccttgggtgaactaaccaaataatgaccatcgatggctcaaagagtggcttgaatatatcccatgggttatctgtatggactgactgggttattgaaaggactagccacatactagcatcttagtgcctttatctgtctttatgtcttggggttggggtaggtagataccaaatgaaacactttcaggaccttccttcctcttgcagttgttctttaatctcctttactagaggagataaatattttgcatataatgaagaaatttttctagtatataacgcaggccttttattttctaaaatgatgatagtataaaaatgttaggataacagaatgattttagattttccagagaatattataaagtgctttaggtatgaaaataaatcatctttgtctgattaaaaaaaaaaaaaaaaaaaaaaaaaaaaaaaaaaaaaaaaaaaaaaa

SEQ ID NO: 300 - DNA, 705 bp, Homo sapiens
agctgaaaaggtttatggtgctgctattcagttttatgaaccatactctgaggagratctcacagaaaagcagagacttcttttgggtttaacatcagcagatgggaagtctgatagttccaaaacaattcatactaacaaatgcatctgtcttctttctcactggcctttttttgatgcattcaggaagtttctgacttttctgtatcgttattccatctctgggcctcatgtccttccaattgagaagcatatttctcattttatgcataaagttccttttccatctcctcagagaccacggattttagttcagttatcaccacatgataatctgattctcagtcagcctgtgtcttcacctcttccactaagtggtggcaagttttcaacactactgcagaatttaggccctgaaaatgctgtgacactactggtgtttgcagtaacagaacataaaattcttatccattcctacggccatccgtgcttactagtgtgacagaagcattagtgtctatgattttccctttccactgccatgcccgtatgttcctctctgcccactggctttagcagatgtcttgagtgcaccatgtccattcatagtagggattgattcaagatactttgatctctatgatcctccaccagatgtcagttgtgttgatgtagataccaacactatttctcagattggtaaca

SEQ ID NO: 301 - DNA, 1345 bp, Homo sapiens
aagcggagaggcggttcgggatccgctgcgcgagctgtctcggtcccacgtgtgcgagttgctacgatggaagttaaagggaaaaagcaattcacaggaaagagtacaaagacagcacaagaaaaaaacagatttcataaaaatagtgattctggttcttcaaagacatttccaacaaggaaagttgctaaagaaggtggacctaaagtcacatctaggaactttgagaaaagtatcacaaaacttgggaaaaagggtgtaaagcagttcaagaataagcagcaaggggacaaatcaccaaagaacaaattccagccggcaaataaattcaacaagaagagaaaattccagccagatggtagaagcgatgaatcagcagccaagaagcccaaatgggatgacttcaaaaagaagaagaaagaactgaagcaaagcagacaactcagtgataaaaccaactatgacattgttgttcgggcaaagcagatgtgggagattttaagaagaaaagactgtgacaaagaaaaaagagtaaagttaatgagtgatttgcagaagttgattcaagggaaaattaaaactattgcatttgcacacgattcaactcgtgtgatccagtgttacattcagtatggtaatgaagaacagagaaaacaggcttttgaagaawtgcgagatgatttggttgagttaagtaaagccaaatattcagaaatattgktaagaaawttctcatgtatggaaagtaaaccacaagattgcagagataatcagaagttttaaaggccacgtgaggaagatgctgcggcatgcggaacgatcagccatcgtggagtacgcatacaatgacaaagccattttggagcagaggaacatgctgacggaagagctctatgggaacacatttcagctttacaagtcagcagatcaccsarctctggacaaagtgttagaggtwcagccagaaaaattagaacttattatggatgaaatgaaacagattctaactccaatggcccaaaagtaagaaagttgtttttgttttgttcttaagaaatgacattcaaaggaggaaggttttccataactgttgcccagaagaggtagctatttcctgcttacaagtattaatctattctaaataagagtgcaaaagtgttggtttgaaaccattcttggtgcaaaaggagatttctttttctgatattgtaccctataaaatgataactaacatgcattcgtgatttatgagcttttttaagcaatgaaacattctttccccaaataaaatgttacatggaagccatgtatactaaacagtttcacaaatataatctgttactca

SEQ ID NO: 302 - DNA, 1872 bp, Homo sapiens
  misc_feature (1744)..(1744): n equals a,t,g, or c
  misc_feature (1805)..(1805): n equals a,t,g, or c
  misc_feature (1868)..(1868): n equals a,t,g, or c
gaatttctcttcctctttctggaataatttgctactatatgaattggacttatgtcttctacttttttggtactattggaatattttggtttcttttgtggatctggttagttagtgacacaccacaaaaacacaagagaatttcccattatgaaaaggaatacattctttcatcattaagaaatcagctttcttcacagaagtcagtgccgtgggtacccattttaaaatccctgccactttgggctatcgtagttgcacacttttcttacaactggactttttatactttattgacattattgcctacttatatgaaggagatcctaaggttcaatgttcaagagaatgggtttttatcttcattgccttatttaggctcttggttatgtatgatcctgtctggtcaagctgctgacaatttaagggcaaaatggaatttttcaactttatgtgttcgcagaatttttagccttataggaatgattggacctgcagtattcctggtagctgctggcttcattggctgtgattattctttggccgttgctttcctaactatatcaacaacactgggaggcttttgctcttctggatttagcatcaaccatctggatattgctccttcgtatgctggtatcctcctgggcatcacaaatacatttgccactattccaggaatggttgggcccgtcattgctaaaagtctgacccctgataacactgttggagaatggcaaaccgtgttctatattgctgctgctattaatgtttttggtgccattttctttacactattcgccaaaggtgaagtacaaaactgggctctcaatgatcaccatggacacagacactgaaggaaccaataaataatcctgcctctattaatgtatttttatttatcatgtaacctcaaagtgccttctgtattgtgtaagcattctatgtctttttttaattgtacttgtattagatttttaaggcctataatcatgaaatatcactagttgccagaataataaaatgaactgtgtttaattatgaataatatgtaagctaggacttctactttaggttcacatacctgcctgctagtcgggcaacatgaagtaggacagttctgttgattttttagggccatactaaagggaatgagctgaaacagacctcctgatacctttgcttaattaaactagatgataattctcaggtactgataaacacctgttgttgttcactttsctcataaaaattgtcagctctctctgacacttagacctcaaactttagcatctctgtggagctgccatccactgtataatttcgcctggcaactggactgaggggagtgtgcccaggcagctgccaagcactccctccctggcttcagggtcagagtgcccagcgtttatcagaggcagcatccaagcccagagccagtgtcgactcttcggctggtgcctttcctctgaggggctatcaatgtgtagataaagccctgagtaggcaagagcagtgagatccactgctatggtcttgatacatcctcaaactttcccttcccagcacagaggaatattggctggcatgcaacctgcaaaagaaaaatgcgaagsggccgggcrcggtggctcatgcctgtkrtcccagcactttggggggctgaggtgggcgaatcatgagatcaggagttcgagaccagcctggccagcatggtgaaaccccatctctactaaaaatacanaaaattagctgggcgtggtgacgggcgcctgtaatcccagatactcaggaggctgaggtangagaatcactttgaacctgggaagtggaaatttgcaatgaaacccaagaatcaacgccactgnactt

SEQ ID NO: 303 - DNA, 691 bp, Homo sapiens
  misc_feature (539)..(539): n equals a,t,g, or c
  misc_feature (604)..(604): n equals a,t,g, or c
  misc_feature (639)..(639): n equals a,t,g, or c
gctcgtgccgaattgcacgaggagatgagaaaaagctgtaaataactataatatggactacaagatgataatattaagcaccaacttgagaccactgatgaagatgatgatgatactaaccagtctgtgtcatccatagaggatgactttgtcactgcttttgagcacttagaagaggaagagacttcaaagccatacaatgatggaatgaacattactgtgctaaggagccagtgtgatgctgcttcccagacggttactggtcatcatttagaaacccatgawttaaagattctcattagctctggacagcagaagtcattggctaaaccctcaacttcctcagtgaatgtcctgggacataaagaactaccttctgtgaaaacttcagtcacaacatcaatttcagagccttggacccaaaggagtttctataggtcatctaatgcttcagataaagatagtgatttacagaaaacatttttttcgtcttctcctgcctactcatctgaatcagaatgktcaagtccaagtcctgntattttcttggatgaagagggatatcaaaaaagcttaaaagcaaaacttgrgctgsctwaaattnctgggatgaaagrwgrttttgaggggtttccggantccgggaggtaaggtggatttttttggatagtttttgattccgttttggatg

SEQ ID NO: 304 - DNA, 798 bp, Homo sapiens
  misc_feature (778)..(778): n equals a,t,g, or c
  misc_feature (783)..(783): n equals a,t,g, or c
  misc_feature (797)..(797): n equals a,t,g, or c
ggggccggaaggaagccggggagacaggtggggtactcgggaagctggagcgggccggcggtgcagtcacgggggagcgaggcctgctgggcttggcaacgagggactcggcctcggaggcgacccagaccacacagacactgggtcaaggagtaagcagaggataaacaactggaaggagagcaagcacaaagtcatcatggcttcagcgtctgctcgtggaaaccaagataaagatgcccattttccaccaccaagcaagcagagcctgttgttttgtccaaaatcaaaactgcacatccacagagcagagatctcaaagattatgcgagaatgtcaggaagaaagtttctggaagagagctctgcctttttctcttgtaagcatgcttgtcacccagggactagtctaccaaggttatttggcagctaattctagatttggatcattgcccaaagttgcacttgctggtctcttgggatttggccttggaaaggtatcatacataggagtatgccagagtaaattccatttttttgaagatcagctccgtggggctggttttggtccacagcataacaggcactgcctccttacctgtgaggaatgcaaaataaagcatggattaagtgagaagggagactctcagccttcagcttcctaaattctgtgtctgtgactttcgaagttttttaaacctctgaatttgtacacatttaaaatttcaagtgtactttaaaataaaatacttctaatggaacaaaaaaaaaaaaggggnccccntttaaaaatcctcng

SEQ ID NO: 305 - DNA, 992 bp, Homo sapiens
  misc_feature (827)..(827): n equals a,t,g, or c
  misc_feature (986)..(986): n equals a,t,g, or c
agcggccgcggcggtggggcgcaggccgccgcgcgagtgaatcgaggcggcgggcccatccggaaccggccggccatcgcccgcggcgcggccggcggaggcggcaggaaccgaccggcgccctacagcaggccaaaacaacttcccgacaagtggcagcacgatcttttcgacagtggcttcggcggtggtgccggcgtggagacaggtgggaaactgctggtgtccaatctggattttggagtctcagacgccgatattcaggaactctttgctgaatttggaacgctgaagaaggcggctgtgcactatgatcgctctggtcgcagcttaggaacagcagacgtgcactttgagcggaaggcagatgccctgaaggccatgaagcagtacaacggcgtccctctggatggccgccccatgaacattcagcttgtcacgtcacagattgacgcacagcggaggcctgcacagagcgtaaacagaggtggcatgactagaaaccgtggcgctggaggttttggtggtggtggaggcacccggagaggcacccgcggaggcgcccgtggaagaggcagaggtgccggcaggaattcaaagcagcagctttcggcagaggagctggatgcccagctggacgcctataatgcgagaatggacaccagttaaacagaccagcaaatccgcgtgcggaacaggacccaggcgtctcctcttgctccctggttggggggcggtggctggggctgtgcggccaatgatggatttgtttcttttatgttttaaaataggatttaaaaactcatgtaaaggttttttttttttcnttttttttttttttaattctgaaacagacctgttttgtaccgagttatttttgggataaattttactggttgctgttgtggagaaggtggcgtttccaccttttccataataaaatagaaatgtgtgtagaaaaaaaaaaaaaaaaaaaaaaaaaaaanaaaaac

SEQ ID NO: 306 - DNA, 302 bp, Homo sapiens
cgaccacgcgtccggattctgctggcgctgcactacagaatggccggcggtggcgggaaaccaggcccggcgggaggggcagcagtgtgaaaaaacagttgatgtgaagaaaagtaaatcctgtgaactgatgtctccagtgatcttcggaaagaaatagaaaatcattataagcttctttgcctgaagacttctatcactctggaattctgtgaagamttggatcctgaaaacccactgattcacttccacaagcctggactcgattagtgggtcctatgrtatcctgccgaaaacataaa

SEQ ID NO: 307 - DNA, 1323 bp, Homo sapiens
gctggagctccaccgcggtggcggccgctctagaactagtggatccccgggctgcaggaattcggcacgagcatctttgccagtacaggagctcgtgccgtggcccacagcccacagcccacagccatgggctgggacctgacggtgaagatgctggcgggcaacgaattccaggtgtccctgagcagctccatgtcggtgtcagagctgaaggcgcagatcacccagaagatcggcgtgcacgccttccagcagcgtctggctgtccacccgagcggtgtggcgctgcaggacagggtcccccttgccagccagggcctgggccccggcagcacggtcctgctggtggtggacaaatgcgacgaacctctgarcatcctggtgaggaataacaagggccgcagcagcacctacgaggtgcggctgacgcagaccgtggcccacctgaagcagcaagtgagcgggctggagggtgtgcaggacgacctgttctggctgaccttcgaggggaagcccctggaggaccagctcccgctgggggagtacggcctcaagcccctgagcaccgtgttcatgaatctgcgcctgcggggaggcggcacagagcctggcgggcggagctaagggcctccaccagcatccgagcaggatcaagggccggaaataaaggctgttgtaaagagaaaaaaaaaaaaaaaaaaaaaaaaaaaaaaaaaaactcgagggggggcccggtaccyaattcgccctatagtgagtcgtattacaattcactggccgtcgttttacaacgtcgtgactgggaaaaccctggcgttacccaacttaatcgccttgcagcacatccccctttcgccagctggcgtaatagcgaagaggcccgcaccgatcgcccttcccaacagttgcgcagcctgaatggcgaatggcaaattgtaagcgttaatattttgttaaaattcgcgttaaatttttgttaaatcagctcattttttaaccaataggccgaaatcggcaaaatcccttataaatcaaaagaatagaccgagatagggttgagtgttgttccagtttggaacaagagtccactattaaagaacgtggactccaacgtcaaagggcgaaaaaccgtctatcagggcgatggcccactacgtgaaccatcaccctaatcaagttttttggggtcgaggtgccgtaaagcactaaatcggaaccctaaagggagcccccgatttagagcttgacggggaaagccggcgaacgtggcgagaaaggaagggaagaaagcgaaaggagcgggcgctagggcgctggcaagta

SEQ ID NO: 308 - DNA, 745 bp, Homo sapiens
  misc_feature (623)..(623): n equals a,t,g, or c
  misc_feature (721)..(721): n equals a,t,g, or c
gcaacaacctgtggccttcctatcaaaagtttaaacccagtaacctgtgggtggcccaaatttattcagtctattacagctactgccttaactgaagaaagcaggaagctaacctttgggggaaacttgatggtgagcacaccccttcaggttaggacaatcttaaatcaaaaggtaggaagatggcccaccaactcaagaattttaaagtgtgaagctcccttactaaagagagatgacttaacactaaccactgacagttcactcaacacaccaggtttcctgacagggaacccaaacctaaaagggcctaagtgtaagtgcttaaatttagttaattatcgcacagaggtcaggcctgatttaagggacccctttcaaaacaagacaacagctattcatagatggctcctcccaggtaattgaaggaaaaaaacataatgggtattcagtggtcgatggggaagctgtcgcagaagtcgagtcaraaagactgcycaataatcggtccgctcaaacatgtgaattgtttgcaataaatcaagccttagaacatttacaaaatcaagaaggaactatttatactaattccaagtatgccttcagggtagcccatacctttngraaaatttggactaaacgragtctcatcagtagcaagggccaagrcsktgtccmcagttaattaatcamacagsyactggmtawccttcatttgccncctccccccccccscaaaaaaaaa

SEQ ID NO: 309 - DNA, 1002 bp, Homo sapiens
  misc_feature (874)..(874): n equals a,t,g, or c
agtgagcgaggaagcggaagagcgcccaatacgcaaaccgcctctccccgcgcgttggccgattcwttaatgcagctggcacsacaggtttcccgactggaaagcgggcagtgagcgcaacgcaattaatgtkagttagctcactcattaggcaccccaggctttacactttatgcttccggctcgtatgttgtgtggaattgtgagcggataacaatttcacacaggaaacagctatgaccatgattacsccaagctcgaaattaaccytmactaaagggaacaaaagctggagctccaccgcggtggcggccgctctagaactagtggatcccccgggctgcaggaattcggcagcgcggaggccgcacgatgcctggagttactgtaaaagacgtgaaccagcaggagttcgtcagagctctggcagccttcctcaaaaagtccgggaagctgaaagtccccgaatgggtggataccgtcaagctggccaagcacaaagagcttgctccctacgatgagaactggttctacacgcgagctgcttccacagcgcggcacctgtacctccggggtggcgctggggttggctccatgaccaagatctatgggggacgtcagagaaacggcgtcatgcccagccacttcagccgaggctccaagagtgtggcccgccgggtcctccaagccctggaggggctgaaaatggtggaaaaggaccaagatggcggccgcaaactgacacctcagggacaaagagatctggacagaatcgccggacaggtggcagctgccaacaagaagcattagaacaaaccatgctgggttaataaattgcctcattcgtaaaaaaaaaaaaaaaaaaaaaactcgngggggggcccggtacccaattcgccctatagtgagtcgwattacaattcactggcmrtcgttttacaacgtcgtgactgggaaaaccctggcgttacctgttaaagaggtcgacgagatttcccattg

SEQ ID NO: 310 - DNA, 1021 bp, Homo sapiens
  misc_feature (11)..(11): n equals a,t,g, or c
  misc_feature (1020)..(1020): n equals a,t,g, or c
ctcgtgcgtanaaggcagcgccccggagagctcttgcgcgtcttgttcttgcctggtgtcggtggttagtttctgcgacttgtgttgggactgctgataggaagatgtcttcaggaaatgctaaaattgggcaccctgcccccaacttcaaagccacagctgttatgccagatggtcagtttaaagatatcagcctgtctgactacaaaggaaaatatgttgtgttcttcttttaccctcttgacttcacctttgtgtgccccacggagatcattgctttcagtgatagggcagaagaatttaagaaactcaactgccaagtgattggtgcttctgtggattctcacttctgtcatctagcatgggtcaatacacctaagaaacaaggaggactgggacccatgaacattcctttggtatcagacccgaagcgcaccattgctcaggattatggggtcttaaaggctgatgaaggcatctcgttcaggggcctttttatcattgatgataagggtattcttcggcagatcactgtaaatgacctccctgttggccgctctgtggatgagactttgagactagttcaggccttccagttcactgacaaacatggggaagtgtgcccagctggctggaaacctggcagtgataccatcaagcctgatgtccaaaagagcaaagaatatttctccaagcagaagtgagcgctgggctgttttagtgccaggctgcggtgggcagccatgagaacaaaacctcttctgtattttttttttccattagtaaaacacaagacttcagattcagccgaattgtggtgtcttacaaggcaggcctttcctacagggggtggagagaccagcctttcttcctttggtaggaatggcctgagttggcgttgtgggcaggctactggtttgtatgatgtattagtagagcaacccattaatcttttgtagtttgtattaaacttgaactgagaaaaaaaaaaaaaaaaaaaaaaaacccggggggggcccng

SEQ ID NO: 311 - DNA, 690 bp, Homo sapiens
  misc_feature (16)..(16): n equals a,t,g, or c
  misc_feature (583)..(583): n equals a,t,g, or c
  misc_feature (625)..(625): n equals a,t,g, or c
  misc_feature (658)..(660): n equals a,t,g, or c
ggtgacaagaggtgcntcatttcagtctcttctgcaggctgatttaattcttccactaagagcctaggacgaaagaaaagtaaagaaggcgtataggcagaaggccctctcctgccacccagacaaaaatccagataatcccagagcagctgaactcttccaccagctttctcaggccttggaggtgctgaccgatgctgcagccagggctgcatatgacaaggtcaggaaagccaagaagcaagcagcagagaggacccagaaacttgatgagaaaaggaagaaagtgaagcttgacctggaggcccgggagcggcaggcccaggcccaggagagtgaggaggaagaggagagccggagcaccaggacactagagcaagagatcgaacgcctgakagaagagggttcccggcagctgkaggaacagcagaggctcatccggagcagatacgccaggagcgtgaccagaggttgagaggaaaggcagaaaatactgaaggccaaggaacccccaaactaaagctaaaatggaaagtgcaagaaggaggatgagtcaaaaggtggctactccaaagacgtcctnctacggcttttgcagaagtatgggtgaggttctaaacttggngcttttcaagtaaggaagccaggcacttgtggnnntggagttttcaacccgcaaggcaagtggaa

SEQ ID NO: 312 - DNA, 1162 bp, Homo sapiens
ccacgcgtccgacacaaccacctccaacactatgacatgctgaaggacatgtgggtgtccctagcacccatgcccaccccgagatatgctgccacctccttcctccgaggctccaagatctacgtgctggggggacgacagtccaagtacgcggtcaacgctttcgaggtctttgacatcgagactcgctcctggaccaagtttcccaacattccctataagcgggccttctccagctttgtgaccctggacaaccacttgtacagcctaggaggcctgcggcaaggtcgcctctaccggcagcccaagttcctgcggacgatggacgtgttcgacatggaacaggggggatggctgaagatggaacgatcgttcttcctcaagaagcggcgggcagattttgtggctggctctctgagtggacgggtcatagtggctgggggacttgggaatcaacccactgtcctggagacggcggaagcattccacccagggaagaacaaatgggagatcctccctgccatgcccacaccccgctgtgcctgctccagcatagtcgtcaagaactgcctcctcgccgtgggaggtgtcaaccagggtctgagtgacgcagtggaggccctgtgtgtctctgactcctagctgtctctgggctcagtacctttgccctggaccatatcacttcactcttaacatgaggaatgatcttgtccaagcagtcggggctacttccaagaatgtcagctcctgttagcaaccagtggagtctggccttggggctctaagttgacctctctatagctccaaatcctaccaatctcagaaaactgtaagaggcacagatgactccaccagctgcagagctgactctgaagagagtcttcacttactgcacaggcaaagaaaggcacaggaatatttcctacctctccctcctgtgagtcccacctccccaccagaggcctagcccttttgtcaccgaaggcccccagagtgtttctgtgtgaaaccctctcatttacactgtggcatcaaaatccacaaaagatggattaattgcactctggttaatagcagcagcacaatgattaaaatctatattcctaaaaaaaaaaaaaaaaaaaaaaaaaaaaaaaaaaaaaaaaaaaaaaaaaaaaaaaaa

SEQ ID NO: 313 - DNA, 1236 bp, Homo sapiens
  misc_feature (1)..(1): n equals a,t,g, or c
  misc_feature (64)..(65): n equals a,t,g, or c
  misc_feature (551)..(551): n equals a,t,g, or c
nctttttctttttttttttttttttttttttttttttttttttttttttttttttttttttkcnngcccagggcagygstgggtgctttatttccatgctgggtgccygggaagtatgtasacggggtacgtgccaagcatcctcgygcgaccscgagagccyggggagcgggggcttgccggccgtsgcactcatttacccggrgacagggagaggctcttctgcgtgtagtggttgtgcagagcctcatgcatcacggagcatgagaagacgttcccctgctgccacctgctcttgtccacggtgagcttgctrtagaggaagaaggagccgtcggagtccagcatgggaggcgtggtsttgtagttgttctccggctgcccattgctctcccactccacggcgatgtcgctggggtagaagcctttgaccaggcaggtcaggctgacctggttcttggtcatctcctcccgggatgggggcagggtgtacacctgtggttctcggggctgccctttggttttggagatggttttctcgatgggggctnggaggcctttgttggagaccttgcacttgtactccttgccgttcagccagtcctggtgcacgacggtgaggacgctgaccacacggaacgtgctgttgaactgctcctcccgtggctttgtcttggcattatgcacctccatgccgtccacgtaccagttgaactggacctcggggtcttcgtggctcacgtccaccaccacgcacgtgacctcaggggtccgggagatcatgagggtgtccttgggttttggggggaagaggaagactgacggtcctgccacaggtggtgctgggcacggtgggcactcgacacaacatttgcgctcaactgtcttgtccaccttggtgttgctgggcttgtgatctacgttgcaggtgtaggtctgggtgccgaagttgctggaggkcacggtcaccacgctgctgagggagtagagtcctgaggactgtaggacagcygggaaggtgtgcacgccgctggtcagagcgcctgagttccacgacaccgtcaccggttcggggaagtagtccttgaccaggcagcccagggccgctgtgctctcggaggtgctcctggagcagggcgccagggggaagaccgatgggcccttggtggaggctgaggagacggtgaccagggttccctggccccartagtcaaagtagtcggacgcgtgggtcga

SEQ ID NO: 314 - DNA, 1291 bp, Homo sapiens
  misc_feature (46)..(46): n equals a,t,g, or c
  misc_feature (1261)..(1261): n equals a,t,g, or c
  misc_feature (1277)..(1277): n equals a,t,g, or c
  misc_feature (1286)..(1286): n equals a,t,g, or c
cgaaactaaccctcactaaagggaacaaaagctggagctccaccgnggtggcggccgctctagaactagtggatcccccgggctgcaggaattcggcacgagcttgaactcctgacctcaggtggtmcacccgccttggcctgccaaagtgctgggattacaggcgtgagccaccactcctggccactactcttcatttagtgtcttccttagcagcgcttgtggctgtcactccagaaggcatccccaggcaggcagtgctgagggccacttggscatgacaggagatcatgacgggagaacagacgggcaggggggcggtggggaaaggccactgatgctttctgtctcccagggcgggggctgtcggttcctgcgctacaactgttccatccgagccccaaggaagggctggaccctcatgcaccctggacgactcacgcattaccatgaggggctccccaccaccaggggcacccgctacatcgcagtctccttcgtcgatccctaattggccaggcctgaccctcttggacctttcttctttgccgacaaccactgcccagcagcctctgggacctcggggtcccagggaacccagtccagcctcctggctgttgacttcccattgctcttggagccaccaatcaaagagattcaaagagattcctgcaggccagaggcggaacacacctttatggctggggctctccgtggtgttctggacccagcccctggagacaccattcacttttactgctttgtagtgactcgtgctctccaacctgtcttcctgaaaaaccaaggcccccttcccccacctcttccatggggtgagacttgagcagaacaggggcttccccaagttgcccagaaagactgtctgggtgagaagccatggccagagcttctcccaggcacaggtgttgcaccagggacttctgcttcaagttttggggtaaagacacctggatcagactccaagggctgccctgagtctgggacttctgcctccatggctggtcatgagagcaaaccgtagtcccctggagacagcgactccagagaacctcttgggagacagaagaggcatctgtgcacagctcgatcttctacttgcctgtggggaggggagtgacaggtccacacaccacactgggtcaccctgtcctggatgcctctgaagagagggacagaccgtcagaaactggagagtttctattaaaggtcatttaaaccamaaaaaaaaaaaaaaaaaacncgagggggggcccggnacccaattngccct

SEQ ID NO: 315 - DNA, 1287 bp, Homo sapiens
acagcaccgggcagtcgtccatggtccgggactgggtcatgctgtccctctccaacttcacgcagagggccccggtcgccatggccacgtggagcctctcctgcttctttgtcagcgcgtccaccagcccgtgggtcgcggcgatcctcccacatgtcatcagcaggatgggcaagctggagcaggtggacgtgaaccttttctgcctggtcgccacagacttctacagacaccagatagaggaggagctcgaccgcagggccttccagtctgtgcttgaggtggttgcagccccaggaagcccatatcaccggctgctgacttgtttacgaaatgtccacaaggtcaccacctgctgagcgccatggtgggagagactgtgaggcggcagctggggccggagcctttggaagtctgcgcccttgtgccctgcctccaccgagccagcttggtccctatgggcttccgcacatgccgcgggcggccaggcaacgtgcgtgtctctgccatgtggcagaagtgctctttgtggcagtggccaggcagggagtgtctgcagtcctggtggggctgagcctgaggccttccagaaagcaggagcagctgtgctgcaccccatgtgggtgaccaggtcctttctcctgatagtcacctgctggttgttgccaggttgcagctgctcttgcatctgggccagaagtcctccctcctgcaggctggctgttggcccctctgctgtcctgcagtagaaggtgccgtgagcaggctttgggaacactggcctgggtctccctggtggggtgtgcatgccacgccccgtgtctggatgcacagatgccatggcctgtgctgggccagtggctgggggtgctagacacccggcaccattctcccttctctcttttcttctcaggatttaaaatttaattatatcagtaaagagattaattttaacgtaactcttttctatgcccgtgtaaagtatgtgaatcgcaaggcctgtgctgcatgcgacagcgtccggggtggtggacagggsccccggccacgctccctctcctgtagccactggcatagccctcctgagcacccgctgacatttccgttgtacatgttcctgtttatgcattcacaaggtgactgggatgtagagaggcgttagtgggcaggtggccacagcaggactgaggacaggcccccattatcctaggggtgcgctcacctgcagcccctcctcgtcgggcacagacgactgtcgttctccacccaccagtcagggacagcagg

SEQ ID NO: 316 - DNA, 975 bp, Homo sapiens
aattcggcasagcgggaagttgctctcagaggcagcgtgcgggtgtgctctttgtgaaattccaccatggcgtaccgtggccagggtcagaaagtgcagaaggttatggtgcagcccatcaacctcatcttcagatacttacaaaatagatcgcggattcaggtgtggctctatgagcaagtgaatatgcggatagaaggctgtatcattggttttgatgagtatatgaaccttgtattagatgatgcagaagagattcattctaaaacaaagtcaagaaaacaactgggtcggatcatgctaaaaggagataatattactctgctacaaagtgtctccaactagaaatgatcaatgaagtgagaaattgttgagaaggatacagtttgtttttagatgtcctttgtccaatgtgaacatttattcatattgttttgattaccctcgtgttactacaagatggcaataaatactatgggattgtttgtattaaaaaatttacattgcttcttactattcagcagtagaaactttttacacagtaacaccattcgttgttggtatttagttttctgaagggtcgcagttgccttgagcacttggtattcgcagagcttggacctgtagattttgaggcagattaggaattctgcctgatgggtaagcttccagtattgggaggtggagaaggggagggttcagaaaaataaataagagttattgcactaamaaaagtcttcatcacttgtagttctggatgctggaataccaragtttctaacctaaatackttgggtacattatttaatggggtcmgtattgctcmacmcyctcattgartcmctgtgaggtcttkgtgaattttatcgctaagatcagaatgtgagaagtatttggatatagggaaagaatgaagtgcctttcaagtacattaaaaatcaagttaagagtttacaggaaagagactgagattgg

SEQ ID NO: 317 - DNA, 1301 bp, Homo sapiens
  misc_feature (1237)..(1237): n equals a,t,g, or c
  misc_feature (1268)..(1268): n equals a,t,g, or c
gcatcagtactggcacattggtcagtaagagagaagtagagctagaaaaaaacacaaaggaggaagaggaccttcgcaaacggaatcgagaaagaaacatcgaagctgggaaagatgatggtttgactgatgcacagcaacagttttcagtgaaagaaacaaacttttcagagggaaatttaaaattgaaaattggcctccaggctaagagaactaaaaaacctccaaagaacttggagaactatgtatgtcgacctgccataaaaacaactattaagcacccaaggaaagcacttaaaagtggaaagatgacggatgaaaagaatgaacactgtccttcaaaacgagacccttcaaagttgtacaagaaagcagatgatgttgcagccattgaatgccagtctgaagaagtcatccgtcttcattcacagggagaaaacaatcctttgtctaagaagctgtctccagtacactcagaaatggcagattatattaatgcaacgccatctactcttcttggtagccgggatcctgatttaaaggacagagcattacttaatggaggaactagtgtaacagaaaagttggcacagctgattgctacctgtcctccttccaagtcttccaagacaaaaccgaagaagttaggaactggcactacagcaggattggttagcaaggatttgatcaggaaagcaggtgttggctctgtagctggaataatacataaggacttaataaaaaagccaaccatcagcacagcagttggattggtaactaaagatcctgggaaaaagccagtgtttaatgcagcagtaggattggtcaataaggactctgtgaaaaaactgggaactggcactacagcggtattcattaataaaaacttaggcaaaaagccaggaactatcactacagtaggactgctaagcaaagattcaggaaagaagctaggaattggtattgttccaggtttagtgcataaagagtctggcaagaagttaggacttggcactgtggttggactggttaataaagatttgggaaagaaattgggttctactgttggcctagtggccaaggactgtgcaaagaagattgtagcaagttcagcaatgggattggttaataaggacattggaaagaaactaatgagttgtcctttggcaggtctgatcagtaaagatgccatraaaccttaaagccgaagcactgctccccactcaggaaccgcttnaaggcttcttgttagtgacaaacatccaatnattcagggaaagtccagggaacttttctggaat

SEQ ID NO: 318 - DNA, 1027 bp, Homo sapiens
  misc_feature (990)..(990): n equals a,t,g, or c
  misc_feature (1019)..(1020): n equals a,t,g, or c
ttacggccaaggtttttaattacggacttcactattagggaaaagcttggtacggccttgcaaggtaccgggtccggaaattcccggggttcgacccaagggtccgggaagcagcatcggaggtgcctcagccatggcatggatccctctcttcctcggcgtccttgcttactgcacaggatccgtggcctcctatgagctgactcagccaccctcagtgtccgtgtccccaggacagacagccagcatcacctgctctggagataaattgggggataaatatgcttgctggtatcagcagaagccaggccagtcccctgtgctggtcatctatcaagataacaascggccctcagggatccctgagcgattctctggctccaactctgggaacacagccactctgaccatcagcgggacccaggctatggatgaggctgactattactgtcaggcgtgggacagcarcactgkggtattcggcggagggaccaagctgaccgtcctaggtcagcccaaggctgccccctcggtcactctgttcccgccctcctctgaggagcttcaagccaacaaggccacactggtgtgtctcataagtgacttctacccgggagccgtgacagtggcctggaaggcagatagcagccccgtcaaggcgggagtggagaccaccacaccctccaaacaaagcaacaacaagtacgcggccagcagctayctgagcctgacgcctgagcagtggaagtcccacaraagctacagctgccaggtcacgcatgaagggagcaccgtggagaagacagtggcccctacagaatgttcataggttctcaaccctcaccccccaccacgggagactagagctgcaggatcccaggggaggggtctctcctcccaccccaaggcatcaagcccttctccctgcactcaataaaccctcaataaatattctcattgtcaatcagaaaaaaaaaaaaaaaaaaaagnggggggccgtttarrggwtccaaktttannacccggc

SEQ ID NO: 319 - DNA, 435 bp, Homo sapiens
  misc_feature (346)..(346): n equals a,t,g, or c
  misc_feature (401)..(401): n equals a,t,g, or c
  misc_feature (429)..(429): n equals a,t,g, or c
cctcactcaagggaacaaaagctggagctccaccgcggtggcggccgctctagaactagtggatcccccgggctgcaggaattcggcacgaggaaatgttgagtcaaaagaaatattcttttaagctttaaataatttactatgtgcagggtactatgggtatgcaaatgagatgttgagtcatcaccttgagattccacaccttgttattcaccgggtgcctttggtgctaccactagggggcgaagtagaggccatgctagctgagttctaaatcccatcctgggttaaccatggaaactcgttttakccctttttgtataatgggacttggagtacgatttgntatctttagcatcatcttattttgaaacaattacacatttacaggaagttgcagnagtagtacagagaggccttgtgtacctntaccca

SEQ ID NO: 320 - DNA, 1828 bp, Homo sapiens
gtagaattttacttttggattatactttgtgaattatagctaagtcatttgtggggctttaaaaaaaacaactcttaattttagcctttakgaaaactaatttgcactgaaattctcccaaatgatctgcatgcacatttattgtgactatttggaatctagccagtggtcaaaatttgtttacaatactatgatttttaactttccaacaggagccattatttccatttaatttggatgaatttgttactgtggatgaggttatagaagaagtgaatccttctcaggccaagcagaatccactaaagggaaaaaggaaagaaactctcaaaaatgttcctttctctgaacttaacttaaagaagaaaaaggggaaaacttccactcctcgtggtgttgagggagaactatcttttgtgacattggatgagattggggaagaggaagatgcagctgcacatctagcacaagctctagtcactgtggatgaagtaattgatgaagaagaactaaatatggaagaaatggtaaaaaattcaaattcactttttacattagatgaattaattgaccaagatgattgcatttcccacagtgaacctaaagatgttactgttctgtcagtggctgaagaacaagatctcctcaaacaggaacgcttggtaactgtggatgaaattggagaagtggaagagctacctttgaatgagtcagcagacataacttttgccactttaaatactaaaggaaatgaaggagatactgtaagggattccattggcttcatttcttctcagrtgcccgaagacccttctactttagttactgtagatgaaatacaagatgacagcagtgatttgcatttagtgactttggatgaagtaactgaagaggatgaagactctctggcggattttaacaaccttaaagaagagcttaattttgttactgttgatgaagttggagaggaggaagatggagataatgatttaaaagttgagttagcacaaagcaaaaatgaccatcccacagataaaaaagggaatagaaagaagagagctgtggacacaaaaaagacaaaacttgaatccttgtcccaagtgggtccagtaaatgagaatgttatggaagaagatctaaaaaccatgattgaaagacacttaacagctaaaactccaaccaagagagttagaattgggaaaactctgccatcagaaaaagctgttgtgacagaaccagcaaaaggtgaagaggccttccagatgagtgaagttgatgaggaatctggattaaaggattcagaaccagagcgaaaacgcaagaagactgaagactcttcttcaggcaaatcagtggcgtctgatgtccctgaggaattagactttcttgtacctaaggctggattcttctgtccaatttgttccctcttctactcaggtgaaaaagcaatgacaaatcactgcaagagtacacgtcataagcaaaatactgagaaattcatggccaagcaaagaaaggaaaaggagcagaatgaggctgaagaaagaagctctaggtgattgggggaaaggaaagaattcactagaaatttgtttagggtccagttgatttgtgtatttttgttatcatttaatttgtaattttcgtttcagaagcaaatattcgtgttgtacaaatttctgattgccctaaatgtagagagactgatggggaaagtatgatgggtttgatttttatatcaaatcatcaggcatggagaaatatcttttagaagtgttaaaataaatgttcctactgtatatttaaaatacaaaaaaaaaaaaaaaaa

SEQ ID NO: 321 - DNA, 1078 bp, Homo sapiens
gggcaggcccgctttctgtcaaaatggcagcgcccagcgtgcgcgggtatctctgaagttggggtttaagattcttgcccgtgagagcgaacgagcctgccgtrcttctgattttgaaacacctgggtctgggcttcccgggcgagcggtggaacctgtgagaagtttctacaatggtgggctcagctctcaggagaggtgcccatgcatatgtctacctggtgagtaaggccagtcacatctccagaggccatcagcaccaggcctggggatcgaggcctcctgcagcagagtgtgccacccaaagagctccaggcagtgtggtggagctgctgggcaaatcctaccctcaggacgaccacagcaacctcacccggaaggtcctcaccagagttggcaggaacctgcacaaccagcagcatcaccctctgtggctgatcaaggagagggtgaaggagcacttctacaagcagtatgtgggccgctttgggaccccgttgttctcggtctacgacaacctttctccagtggtcacgacctggcagaactttgacagcctgctcatcccagctgatcaccccagcaggaagaagggggacaactattacctgaatcggactcacatgctgagagcgcacacgtctgcacaccagtgggacttgctgcacgcgggactggatgccttcctggtggtgggtgatgtctacaggcgtgaccagatcgactcccagcactaccctattttccaccagctgaggccgtgcggctcttctagmatgagtattgctgtataaagatgagragctcagctcttgacaagtctcgtctgsatacaagagcaaccatgagcgggacttttattttctaacaccgtccagctatcaactttggagagtgggaaatggtgtgactccttaacacgttgaggggagtcttggagcggggttgtttgttgggtgggagaactttgcaaagggtttcgaaagagagcctcccgtcctttgggagggggtttacaaagtgcctacagggaatctgtaaatatctggggtgtattcacacttgcgaagtccgccgc

SEQ ID NO: 322 - DNA, 824 bp, Homo sapiens
gcgtccttgcattgggtcagtgagtggaagaggaatcactccacctcctcattagtaggaaaacccaggtgacactggaccaggttacgttctagtttctccaaaggtaattcaatggacctcgtttggaatactctggtggaggtcagatctgaaatggaagcttctcccatgctttgtgatctgagccatgatctgtccgctcacctgtttctcacttttcccactccaccctgtgtctcatgatgacgtttgcttttcctcccgactcaaaatttaccttttggggtcttaccctggttgtaggagctggcttttcctggggattaaggcctcagtcttcctcccattcgcactgccttgcactgccccccatatgttcccagggtagctctccagctggaaccttgctgatgccatgtcccagaaacacctccagatcaaccagacgtttgaggagctgcgactggtcacgcaggacacagagaatgagytraaraarctgcagcagactcaggagtacttcatcatccagtaccaggagagcctgaggatccaagctcagtttgsccmgctggcccagctgagcccccaggagcgtctragccgggagacggccctccagcagaagcaggtgtctctggaggcctggttgcagcgtgaggcacagacactgcagcagtaccgcgtggagctggccgagaagcaccagaagaccctgcagctgcgcggaagcacakatccattcatccyggatgacgagcygatccagtggaagcggcggcagcagctggccgggaacggcgggccccccgagggcagcc

SEQ ID NO: 323 - DNA, 1134 bp, Homo sapiens
  misc_feature (33)..(33): n equals a,t,g, or c
  misc_feature (1095)..(1095): n equals a,t,g, or c
  misc_feature (1111)..(1111): n equals a,t,g, or c
  misc_feature (1113)..(1113): n equals a,t,g, or c
  misc_feature (1133)..(1133): n equals a,t,g, or c
attcggcacgattgaaggcaagggggagtgtanagcagargaagcctgagccagacggagagccacctcctctcccaggaactgaacccaaaggatcacctggtattccctgagagtacagatttctccggcgtggccctcaagggacagacatggctcagcggatgacaacacagctgctgctccttctagtgtgggtggctgtagtaggggaggctcagacaaggattgcatgggccaggactgagcttctcaatgtctgcatgaacgccaagcaccacaaggaaaagccaggccccgaggacaagttgcatgagcagtgtcgaccctggaggaagaatgcctgctgttctaccaacaccagccaggaagcccataaggatgtttcctacctatatagattcaactggaaccactgtggagagatggcacctgcctgcaaacggcatttcatccaggacacctgcctctacgagtgctcccccaacttggggccctggatccagcaggtggatcagagctggcgcaaagagcgggtactgaacgtgcccctgtgcaaagaggactgtgagcaatggtgggaagattgtcgcacctcctacacctgcaagagcaactggcacaagggctggaactggacttcagggtttaacaagtgcgcagtgggagctgcctgccaacctttccatttctacttccccacacccactgttctgtgcaatgaaatctggactcactcctacaaggtcagcaactacagccgagggagtggccgctgcatccagatgtggttcgacccagcccagggcaaccccaatgaggaggtggcgaggttctatgctgcagccatgagtggggctgggccctgggcagcctggcctttcctgcttagcctggccctaatgctgctgtggctgctcagctgacctccttttaccttctgatacctggaaatccctgccctgttcagccccacagctcccaactatttggttcctgctccatggtcgggcctctgacagccactttgaataaaccagacaccgcacatgtgtcttgagaattattkggaaaaaaaaaaaaaaaaatgccccncgagggggggcccggnanccaattggccccaaaagggng

SEQ ID NO: 324 - DNA, 1550 bp, Homo sapiens
  misc_feature (1527)..(1527): n equals a,t,g, or c
  misc_feature (1545)..(1545): n equals a,t,g, or c
  misc_feature (1548)..(1548): n equals a,t,g, or c
gtgtgctggaattcgcccttttaggtgacactatagaaaggtacgcctgcaggtaccggtccggaattcccgggtcgacccacgcgtccgaatcaccatggcggctgggaccctgtacacgtatcctgaaaactggagggccttcaaggctctcatcgctgctcagtacagcggggctcaggtccgcgtgctctccgcaccaccccacttccattttggccaaaccaaccgcacccctgaatttctccgcaaatttcctgccggcaaggtcccagcatttgagggtgatgatggattctgtgtgtttgagagcaacgccattgcctactatgtgagcaatgaggagctgcggggaagtactccagaggcagcagcccaggtggtgcagtgggtgagctttgctgattccgatatagtgcccccagccagtacctgggtgttccccaccttgggcatcatgcaccacaacaaacaggccactgagaatgcaaaggaggaagtgaggcgaattctggggctgctggatgcttacttgaagacgaggacttttctggtgggcgaacgagtgacattggctgacatcacagttgtctgcaccctgttgtggctctataagcaggttctagagccttctttccgccaggcctttcccaataccaaccgctggttcctcacctgcattaaccagccccagttccgggctgtcttgggcgaagtgaaactgtgtgagaagatggcccagtttgatgctaaaaagtttgcagagacccaacctaaaaaggacacaccacggaaagagaagggttcacgggaagagaagcagaagccccaggctgagcggaaggaggagaaaaaggcggctgcccctgctcctgaggaggagatggatgaatgtgagcaggcgctggctgctgagcccaaggccaaggaccccttcgctcacctgcccaagagtacctttgtgttggatgaatttaagcgcaagtactccaatgaggacacactctctgtggcactgccatatttctgggagcactttgataaggacggctggtccctgtggtactcagagtatcgcttccctgaagaactcactcagaccttcatgagctgcaatctcatcactggaatgttccagcgactggacaagctgaggaagaatgccttcgccagtgtcatcctttttggaaccaacaatagcagctccatttctggagtctgggtcttccgaggccaggagcttgcctttccgctgagtccagattggcaggtggactacgagtcatacacatggcggaaactggatcctggcagcgaggagacccagacgctggttcgagagtacttttcctgggagggggccttccagcatgtgggcaaagccttcaatcagggcaagatcttcaagtgaacatctcttgccatcacctagctgcctgcacctgcccttcagggagatgggggtcattaaaggaaactgaacattgaaaaaaaaaaaaaaaaaaaaaagggsggccgctctaaagnatccaagyttacgtaccncgngc

SEQ ID NO: 325 - DNA, 506 bp, Homo sapiens
  misc_feature (65)..(65): n equals a,t,g, or c
  misc_feature (465)..(465): n equals a,t,g, or c
  misc_feature (482)..(482): n equals a,t,g, or c
  misc_feature (488)..(488): n equals a,t,g, or c
cccttcgagttcccgtccgaaattcgcgggtggactaytactactaaattyccggacgcgtcgancggacctaggtcgcggcgacatggccaaacgtaccaagaaagtcgggatcgtcggtaaatacgggacccgctatggggcctccctccggaaaatggtgaagaaaattgaaatcagccagcacgccaagtacacttgctctttctgtggcaaaaccaagatgaagagacgagctgtggggatctggcactgtggttcctgcatgaagacagtggctggcggtgcctggacgtacaataccacttccgctgtcacggtaaagtccgccatcagaagactgaaggagttgaaagaccagtagacgctcctctactctttgagacatcactggcctataataaatgggttaatttatgtaacaaaaaaaaaaaaaaaaaacycgrgggggggcccggtacccanttcgccctaaagggggnggtttnaattmytgggcgggtttt

SEQ ID NO: 326 - DNA, 835 bp, Homo sapiens
  misc_feature (786)..(786): n equals a,t,g, or c
  misc_feature (812)..(812): n equals a,t,g, or c
  misc_feature (822)..(822): n equals a,t,g, or c
cagacgcgtgggtcgacccacgcgtccgacggctgcgagaagacgacagaagggtacggctgcgagaagacgacagaarggtacggctgcgagaagacgacagaarggtacggctgcgagaagacgacagaarggtacggctscgagaagacgacagaagggtacggctgcgagaagacgacagaaggggcttttccggttgcggcgccgcgcggtgaggttgtctagtccacgctcggagccatgccgtccaagggyccgctgcagtckgtgcaggtcttcggacgcaagaagacagcgacagctgtggcgcactgcaaacgcggcaatggtctcatcaaggtgaacgggcggcccctggagatgattgagccgcgcacgctacagtacaagctgctggagccagttctgcttctcggcaaggagcgatttgctggtgtagacatccgtgtccgtgtaaagggtggtggtcacgtggcccagatttatgctatccgtcagtccatctccaaagccctggtggcctattaccagaaatatgtggatgaggcttccaagaaggagatcaaagacatcctcatccagtatgaccggaccctgctggtagctgaccctcgtcgctgcgagtccaaaaagtttggaggccctggtgcccgcgctcgctaccagaaatcctaccgataagcccatcgtgactcaaaactcacttgtataataaacagtttttgagggattttaaagtttcaaaaaaaaaaaaaaaaaaaaactcgggggggggccccgkwncccattggccctttggkgggttttanaattaatggncctgttatgtggc

SEQ ID NO: 327 - DNA, 994 bp, Homo sapiens
  misc_feature (989)..(989): n equals a,t,g, or c
  misc_feature (992)..(993): n equals a,t,g, or c
aaaagccctataaatgtcaagaatgtggaaacgccttcagtggaaagtcaacccttattcaacatcaggtaactcacactggtcagaaaccatgtcattgcagtgtgtatgggaaagccttcagccagagttcacagctcacaccacctcagcagactcgtgttggagagaaacctgctttaaatgatggctctaaaagatactttattcatatcaagaagattttccaagaaagacatttttaatgtgataaatgcagaagacagtttagcaactgttcacttgacattagaagataagatggcataatgaaagatatataaggtctaaatattactggcaaagtaaaataaatagttcagatgactactaaagtcaaagtcattaaatctggaagtaaacacgagaattcattctgggaaatcaggctgtctgtgtaaaggttactgctgtgctcaggagttgaaccgtgtggtgctgtatccggatactcatgacgaatggatggagggcgtgaaaagtgagcccagctggtgctctgggtctaccctacctgacatccttccagtcttatcctttgtttcctatccaggcccaggcttgtggctgagaacatccactttcagtcccatatacctgcctccaagtgtggtacagagaacttgggcctgctgggggcgcttagccttactctctccaccacctctcccaccaacccccagatgaactgcaggtagacgtttcttccttgcttggagccccagtttttgcatttcattttcattaaaatgaaaggtggtttggttttggttctaaggagctctacagtttaacagagagagggaccttaggggccaagaaagcaggggcctaccaagtatctccacttttgaaaattgtaattactgataaaaaattttttaaaggcaggtttattgaagcataatttataaacaataaaatttactctttttagtgtaaaaaaaaantcnnt

SEQ ID NO: 328 - DNA, 1164 bp, Homo sapiens
ggcaacaccgcctagaccgaccggatacacgggtagggcttccgctttacccgtctccctcctggcgcttgtcctcctctcccagtcggcaccacagcggtggctgccgggcgtggtgtcggtgggtcggttggtttttgtctcaccgttggtgtccgtgccgttcagttgcccgccatggctgagctggatccgttcggcgcccctgccggcgcccctggcggtcccgcgctggggaacggagtggccggcgccggcgaagaagacccggctgcggccttcttggcgcagcaagagagcgagattgcgggcatcgagaacgacgaggccttcgccatcctggacggcggcgcccccgggccccagccgcacggcgagccgccggggggtccggatgctgttgatggagtaatgaatggtgaatactaccaggaaagtaatggtccaacagacagttatgcagctatttcacaagtggatcgattgcagtcagagcctgaaagtatccgtaaatggagagaagaacaaatggaacgcttggaagcccttgatgccaattctcggaagcaagaagcagagtggaaagaaaaggcaataaaggagctagaagaatggtatgcaagacaggacgagcagctacagaaaacaaaagcaaacaacagggcagcagaagaagcctttgtaaatgacattgacgagtcgtccccaggcactgagtgggaacgggtggcccggctgtgtgactttaaccccaagtctagcaagcaggccaaagatgtctcccgcatgcgctcagtcctcatctccctcaagcaggccccgctggtgcactgaagagccaccctgtggaaacactacatctgcaatatcttaatcctactcagtgaagctcttcacagtcattggattaattatgttgagttcttttggaccaaacctttttgtctttagagttgttcattgtttgtgattgcatgtttccttccttcaactgtgttctccctggcattcagagaggagggagaggaggaagaggaaggggagggaagcttcccaagagtagcctcaacctgtgcttctgtgcattattctgagaataaatttctgtttcaaactgtaaaaaaaaaaaaaaaaaaaaaaaaaaaaaaaaaaaaaaaaaaaaaa

SEQ ID NO: 329 - DNA, 1047 bp, Homo sapiens
  misc_feature (961)..(961): n equals a,t,g, or c
  misc_feature (988)..(988): n equals a,t,g, or c
  misc_feature (1000)..(1000): n equals a,t,g, or c
  misc_feature (1002)..(1002): n equals a,t,g, or c
  misc_feature (1021)..(1021): n equals a,t,g, or c
gggtgctggacggtgagcgaatgcaagctgacgcctgccccgcccatccgckttaggccccgccccttgacctgagccgcgggcggagagtytgaggcgtggcccttcgagccagctccgccccgttgttcctggcttgagtagggcagagagcaccgcccagcagccagtgggttcccgcgcgtgccgagactctgaggccttgcacccccacgatcccgtacgatggccgtcaagaagatcgcgatcttcggcgccactggccagaccgggctcaccaccctggcgcaggcggtgcaagcaggttacgaagtgacagtgctggtgcgggactcctccaggctgccatcagaggggccccggccggcccacgtggtagtgggagatgttctgcaggcagccgatgtggacaagaccgtggctgggcaggacgctgtcatcgtgctgctgggcacccgcaatgacctcagtcccacgacagtgatgtccgagggcgcccggaacattgtggcagccatgaaggctcatggtgtggacaaggtcgtggcctgcacctcggctttcctgctctgggaccctaccaaggtgcccccacgactgcaggctgtgactgatgaccacatccggatgcacaaggtgctgcgggaatcaggcctgaagtacgtggctgtgatgccgccacacataggagaccagccactaactggggcgtacacagtgaccctggatggacgagggccctcaagggtcatctccaaacatgacctgggccatttcatgctgcgctgcctcaccaccgatgagtacgacggacacagcacctacccctcccaccagtaccagtagcactctgtccccatctgggagggtggcattctgggacatgaggagcaaaggaagggggcaataaatgttgagccaagagcttcaaattactctagaaaaaaaaaaaaaaagcggncgctctagaggatccaagcttacgtancgcgtgcatgcnangtcatagctcttctatagngcacctaaattcaattcactggcccg

SEQ ID NO: 330 - DNA, 1084 bp, Homo sapiens
caggcgcactcttgataaatggttaattcagaataaaggtgactatggatataattgagccctctggtccaggtctcagtttacctaatattacctcagaaaggatatggagggaagatgatctttttgccaggtctgacttttcttcctgctccgccctccattaacgctcagtaccctttagcagctgacggccccacgttctactccatgcttggcttcctttccaatcttcgctctgaggtgctgtctcaccggtgagacctggaagcgggcgagtctcgtgctgtgtcggacctgcagcccctggccttccgccaccatggagtacctcatcggtatccaaggccccgactatgttcttgtcgcctccgaccgggtggccgccagcaatattgtccagatgaaggacgatcatgacaagatgtttaagatgagtgaaaagatattactcctgtgtgttggagaggctggagacactgtacagtttgcagaatatattcagaaaaacgtgcaactttataagatgcgaaatggatatgaattgtctcccacggcagcagctaacttcacacgccgaaacctggctgactgtcttcggagtcggaccccatatcatgtgaacctcctcctggctggctatgatgagcatgaagggccagcgctgtattacatggactacctggcagccttggccaaggccccttttgcagcccacggctatggtgccttcctgactctcagtatcctcgaccgatactacacaccgactatctcacgtgagagggcagtggaactccttaggaaatgtctggaggagctccagaaacgcttcatcctgaatctgccaaccttcagtgttcgaatcattgacaaaaatggcatccatgacctggataacatttccttccccaaacagggctcctaacatcatgtcctccctcccacttgccagggaacttttttttgatgggctcctttatttttttctactcttttcaggcgcactcttgataaatggttaattcagaataaaggtgactatggatataattgaaaaaaaaaaaaaaaaaggggggcccgg

SEQ ID NO: 331 - DNA, 434 bp, Homo sapiens
  misc_feature (361)..(361): n equals a,t,g, or c
  misc_feature (376)..(376): n equals a,t,g, or c
  misc_feature (393)..(393): n equals a,t,g, or c
  misc_feature (404)..(404): n equals a,t,g, or c
cggcccgctgaggcgcgcccwcggtycccggcccggagacgtcgggacgccacatctgcggccccagggcggcggcggcggcgggaaagatgaagaacgaaattgctgctgttgtcttctttttcacaaggctagttcgaaaacatgacaagttgaaaaaagaggcagttgagaggtttgctgagaaattgactcttatacttcaagaaaaatataaaaatcactggtatccagaaaaaccatcaaaaggacaggcctacagatgcattcgtgtcaataagtttcagagagttgatcctggatgtcctgaaagcctgtgagaacagctgcatcttgtacagtgatcttaggcttaccaaanggacttcactccgtngggttgggttccctgtngaagtgtggcncgtccggtattggaggggaaaaaccatgcc

SEQ ID NO: 332 - DNA, 1094 bp, Homo sapiens
gaattcccgggtcgacccacgcgtccgttagaacaagatgacatgagaattttatacaaataccttaccacctcccttttyccaaggcacatcgaacctgagttagcaggaagggattctccaataagagcagaaatgccaggaaatcttcaacactatggaagatttcttaccggacccttgaacctcaatgatccagatgcaaaatgcagattccccaaaatttttgtaaatacagatgacacttatgaagagctccatttaatcgtttataaggccatgagtgcggctgtgtgctttatgatcgacgcctctgtccacccaacgttggatttttgccgaagactggacagcatcgttgggccccagctcacagtgctggcctctgacatctgtgaacagtttaacatcaacaagaggatgtcygggtctgagaaagaaccccagtttaagtttatctacttcaaccacatgaatctcgccgagaagagcacagttcacatgaggaaaacgcccagcgtgtcgctcacttccgtgcacccggatttaatgaagattctcggtgacatcaacagtgactttaccagagtggatgaagatgaggagatcattgtgaaggccatgagtgattactgggttgttggaaagaagtctgatcggcgggagctctatgttattttgaatcaaaaaaatgcaaacctgattgaagtaaatgaagaggtcaagaaactttgtgcaacgcagttcaacaacatcttcttcttggattgacggatgacggctcacygagagcatatctaaaaaacactctgcaaacatttggtcacatgcaagttagtggtcatatgacggactgcattcaggacaagggtaaagcaatacttgctttgaagaatcacatttcgactcggtctgctgatctgaggtttttagattttaaatatttatgtggaattaattaaaggtagttggctatatcgctatcatttcattcttttgacattatgtgaatattttactggaaaataagactaataaattgttaaaagtttttaaaaaaaaaaaaaaaaaaaaaaaaaaaaagggcggccgct

SEQ ID NO: 333 - DNA, 2228 bp, Homo sapiens
gcagcagcctgtctattgggacagcttggtcagcaaggggtgacctttgacctccagcccatggaatggatggctgcagccacacatgccttgtctgcccctgcagaggttcggttgactccaccaggtagttgtggattctatgatggcctccttatccttctgttgcagctcctcactgagcaggggaaggctagcctaatcagggatatgtccagttcagaaatgtggaccgttttgtggcaccgcttctccatggtcctgaggctccccgaggaggcatctgcacaggaaggggagctttcgctatccagtccaccaagccctgagccagactggacactgatttctccccagggtatctttctatcacatggaagtatcctcatgtccatcctgaagcatctgctttgccccagcttcctgaatcaactgcgccaggcgcctcatgggtctgagtttctccctgtcgtggtgctctctgtctgccagctcctttgcttccctttgcgctggacatggatgctgacctccttatagatgtcttggccgacctcagggactcagaagttgcagcccatctgctgcaggtctgctgctaccatcttccgttgatgcaagtggagctgcccatcagccttctcacacgcctggccctcatggatcccacctctctyaaccagtttgtgaacacagtgtctgcctcccctagaaccatcgtctcgtttctctcagttgccctcctgagtgaccagccactgttgacctccgaccttctctctctgctggcccatactgccagggtcctgtctcccagccacttgtcctttatccaagagcttctggctggctctgatgaatcctatcggcccctgcgcagctcctgggccacccagagarttctgtgcgggcacacacttataggctcctgggacacttgctccaacacagcatggccctgcgtggggcactgcagagccagtctggactgctcagccttctgctgcttgggcttggagacaaggatcctgttgtgcggtgcagtgccagctttgctgtgggcaatgcagcctaccaggctggtcctctgggacctgccctggcagctgcagtgcccagtatgacccagctgcttggagatcctcaggctggtatccggcgcaatgttgcatcagctctgggcaacttgggacctgaaggtttgggagaggagctgttacagtgcgaagtaccccagcggctcctagaaatggcatgtggagacccccagccaaatgtgaaggaggctgccctcattgccctccggagcctgcaacaggagcctggcatccatcaggtactggtgtccctgggtgccagtgagaaactatccttgctctctctggggaatcagtcactgccacacagcagtcctaggcctgcctctgccaaacactgcaggaaactcattcacctcctgaggccagcccatagcatgtgattccagattcctgcggtccagcctccaactttggttgccagctctttcttattctactacacaagccgccaactcaactgagagctaaagagactagaaaagagataagctgccaactcaactgagaacaagaaactagaagagatttatatataaagcttcttccttctcccagatgcaggatgttttcaaccagtaaattttattgctgttggtgccagagaagagtcctttcttctctacatccaggggccttttctccaataatgtgcctttaactctagggacctgcctcacggaccttagggaaaaacctcaacctgaaagatctcttcctttctggagctcctttaatcttcccagcaggtttttgccttagacgtgctggccccaggacagtgatgaagacagagcctgtctcagctctaggctgtggggatcaatgccatcagtccctgttattgagggattatcccttagccaacattcctatctgtgggtgggcgtggagagtgtatctttttttggggtgtgtgtgtatatgtgtgtgtgtatgtgtgtgtgtgtttaatagttctgtttgtaaactcttttaataaaagttgtgcctcaccatacttgaagctcccaggacaagggttgagaggctcaacccctctttcagcttctatgtggtgttggaggtgctggtatcgtgttcacacaaraaaaaaaaaaaaaaaaaaaaaaaaaaaaaaaaaaaactcga

SEQ ID NO: 334 - DNA, 1216 bp, Homo sapiens
  misc_feature (12)..(12): n equals a,t,g, or c
  misc_feature (21)..(21): n equals a,t,g, or c
  misc_feature (33)..(33): n equals a,t,g, or c
  misc_feature (46)..(46): n equals a,t,g, or c
  misc_feature (55)..(55): n equals a,t,g, or c
  misc_feature (1199)..(1199): n equals a,t,g, or c
tcggtgccggcntctctaaanagaagccaactngggccccatatcnaagcaaaanctacagctatgttattcatgccaaaataaaagctgtgcagaggagtggctgcaatgaggtcacaacggtggtggatgtaaaagagatcttcaagtcctcatcacccatccctcgaactcaagtcccgctcattacaaattcttcttgccagtgtccacacatcctgccccatcaagatgttctcatcatgtgttacgagtggcgctcaaggatgatgcttcttgaaaattgcttagttgaaaaatggagagatcagcttagtaaaagatccatacagtgggaagagaggctgcaggaacagcggagaacagttcagggacaagaaagaaaaacagccgggcgcaccagtcgtagtaatccccccaaaccaaagggaaagactcctgctcccaaaccagccagtcccaagaagaacattaaaactaggagtgcccagaagagaacaaacccgaaaagagtgtgagctaactagtttccaaagcggagacttccgacttccttacaggatgaggctgggcattgcctgggacagcctatgtaaggccatgtgccccttgccctaacaactcactgcagtgctcttcatagacacatcttgcagcatttttcttaaggctatgcttcagtttttctttgtaagccatcacaagccatagtggtaggtttgccctttggtacagaaggtgagttaaagctggtggaaaaggcttattgcattgcattcagagtaacctgtgtgcatactctagaagagtagggaaaataatgcttgttacaattcgacctaatatgtgcattgtaaaataaatgccatatttcaaacaaaacacgtaatttttttacagtatgttttattaccttttgatatctgttgttgcaatgttagtgatgttttaaaatgtgatcgaaaatataatgcttctaagaaggaacagtagtggaatgaatgtctaaaagatctttatgtgtttatggtctgcagaaggatttttgtgatgaaaggggattttttgaaaaatctagagaagtagcatatggaaaattataatgtgtcttttttacaatgacttcagctctgtttttagctagaaactctaaaaacaaaaataataataaagaaaaataaataaaaaggagaggcagncaaaaaaaaaaaaaaaa

SEQ ID NO: 335 - DNA, 762 bp, Homo sapiens
  misc_feature (761)..(762): n equals a,t,g, or c
gccaactagacctaacagacatatacaaaaccctccactcagcaacagcagactatacagtatcctcaagggcacatggaacacactcccagatagacgatatgttaggccacaaaacagatcttaataaacgtaaaaaccttccaacaaagaaaagcccagaattagatggcttcactggtcaatttttttttgtaaccaaacatctaaaggagaattaataccaatctttcctaaactcttccaaaaaattgagaggagagaatattttctaactcattctgactcagtttttccctgatatcaaaagcagacaaaggtgcaaaagaaaactacaggccaaaatcccttactaacataggtgttagcccatggaagaattctcaattaatttcaaaggactaaactcatacaaagtactttctctgaccacagtggaatgaagctagaaatcaaatgtggaagaaaaactggaaaatttgcaaatatgtggaaagtaaaccacacactcttaaaccagcaagtcaaagaagaaaccactagggaaatataagatatttttagaccaatgaaaacataccaaaactgatgggatgtagtaaaggcagtactcaraggaaaatttatagctgtaaatgcctaaagatctcaaatcaacaacctagctttacaccttaaggaattagaaaaagaagagcaaacaaaacctaaacccagcagaaggatagaaacaataaagattagataacagataaaaaaann

SEQ ID NO: 336 - DNA, 461 bp, Homo sapiens
  misc_feature (456)..(456): n equals a,t,g, or c
  misc_feature (458)..(458): n equals a,t,g, or c
  misc_feature (460)..(461): n equals a,t,g, or c
gctgagacctcagggatccctgggcaacccctgtgaaaacccccagttcatgtggggagttgggtgtatttgagatatcagctttgaaggaccgccatggtttctcttttagtgcttgtgagtaaagtttccatttgaagagctaatttttgtagaagttttgggttcgggccaggtacagtggctcatgcctgtaatctcagcagtttgggaggcctaggcaggaggattgcttgagcccaggggttcaagatcagcctgggcagcacagtgagaccccggtctctacagaatgtaacaattagctgggtgtggtggtaagcacctgtggtcctggctacttaccggctgaggcaggatgattgcttgagccgasgaggttgaggctgcattgagctgggattgcattactacgctccagcctgggagacagagcaagactctgtctcaaaaaanancnn

SEQ ID NO: 337 - DNA, 2226 bp, Homo sapiens
ggcacgagcctcgctcccgcccccgcctggagtccgacgtggaagttgctggctgactgggcttgcgaggaaaccgcctcggagctgcagccgaagcaaggaatcactgaagatcggcgagggaggacagggggttcatcatgggtggctttttctcaagtatattttccagtctgtttggaactcgggaaatgagaattttaattttgggattagatggagcaggaaaaaccacaattttgtacagattacaagtgggagaagttgttactactatacctaccattggatttaatgtagagacggtgacgtacaaaaaccttaaattccaagtctgggatttaggaggacagacaagtatcaggccatactggagatgttactattcaaacacagatgcagtcatttatgtagtagacagttgtgaccgagaccgaattggcatttccaaatcagagttagttgccatgttggaggaagaagagctgagaaaagccattttagtggtgtttgcaaataaacaggacatggaacaggccatgacttcctcagagatggcaaattcacttgggttacctgccttgaaggaccgaaaatggcagatattcaaaacgtcagcaaccaaaggcaccggccttgatgaggcaatggaatggttagttgaaacattaaaaagcagacagtaattcagtccattcttctcccctgaaatgaagactacatcacctctctccctttggaaacagtcaagtgtacttcacactactagatgttaaaactatatgattattggcatatactgactgactgcaatatttgtagtaaatagggaaaataagtatttagttggagggataatttgatcgaatcacctgaatgttctatgtaatgtaaaatattcttttcttgctttcttgtgttaaggtatatattctatttgtatggaattcttattcaaatacagttctattaaagagtatactcctattggatgaaaaaaacctatttttgaatagtagttgcagcttgtttgtataaatactaaaaaatatcttaacagatttttttccccttaaaatgaattatctttccaaagattagactcagtatgagagtaggtgaggaacatagtttgtgtaatataatctttatttgcttacctgaccactttttattaagctgttttgtttaaaagcttttggttataggcatgaatattgttttgatggttaacttcactgacttatctgtaagtgtcattttatagtactttacagttgtcaaaaaaaatcttacatatattgatctagttgatcggtagaggaagcttgtgaagtaggtaggacaggttatgatgtcttcactgtatggacgtgaacccagggttctaataggttggcttgcccaaggtcacctgctagcttgtaaggtaggaatagggctcaaagtaaaacttttggttcagaagcttgactcataaactatactatatattcccaaaaatgtcagtattgacaacacagtctaactcttaaataaaattatgctaattagttacattcaaaataatgtttataaatttatttgtctatactagtagaagtgatcagtgacatactataaataatcctaaatggttatatttgatagaattcataacacattaaagagaaaatttcacattaaaggaaggtttaaaaatctattttcagattataaaaggtgtctttactggttttcattccttttatctacatgtaattggacatgtaaacttgttaaaaatcaaaatcttactgattgtacagggagaaattaagcattctgttttaaaaattaggcttattgctagactgtaagtttaaaaacaattcatgtyaaaggagcttttcaaattacccagtccaccacagaatcagctaatgtgacagaagtaaatatagtgcgtcataattgctaaaaacagggtgaatttctttcacttaagttggaaaaccagcctctaaaaaattaggtgctggtaatgagagcttaataccatggttccctgcaggtctcagaaacattagtagttcctttcagaacataggtgcaaatggccactcctgtagtttcttttctgtaaaatgggatctggacgaatgataccaaacgtttctttctaacattgtattttataactctggcctatgattgtgttgtgtcttgcattaaaaaaaaaaattt

SEQ ID NO: 338 - DNA, 607 bp, Homo sapiens
  misc_feature (560)..(560): n equals a,t,g, or c
  misc_feature (580)..(580): n equals a,t,g, or c
  misc_feature (601)..(601): n equals a,t,g, or c
gaacaaaagctggagctccaccgcggtggcggccgctctagaactagtggatcccccgggctgcaggaattcggcacgaggaagtttcaatttagaaccccgccaacccctcgcctttggcatggaaacaccatcggtggtaccagtaagggtctctcctttgctgccgacatgggggatttggggttctttctccttcccatctttcctgtgccctttgcagacctaggctagccaccctccaccaggctagccagctccaatctgattttcttagattgtaggtcttggtcccccagcggtctgtcgtgccattgggaaggatttgagggtagacctggccttggtgtccctgccattgcctggggaccaggggccctgagggtcccacgtggtggttaagtcaagtggaccatgtgcttaaacttctggactagctttttctgctggttggacacatcatcttgkgttcgtgatctgatgcgttagccctaacttttacatctgctattggaattkggaattaaagaaaaatagcccactttagaggagagaagatnagaagaggaggctagataangatgttgaaagctaacaaagnaaaagg

SEQ ID NO: 339 - DNA, 789 bp, Homo sapiens
  misc_feature (760)..(760): n equals a,t,g, or c
  misc_feature (777)..(777): n equals a,t,g, or c
  misc_feature (779)..(780): n equals a,t,g, or c
gtcctgaatgaatttagagccaaactgtccaaggctttggcattaacagccaggtccttgcctgctgtgcagtctgatgaaagacttcagcctctgctcaatcacctcagtcattcctacactggccaagattacagtacccagggaaatgttgggaagatttctttagatcagattgatttgctttctaccaaatccttcccaccttgcatgcgtcagttacataaagccttgcgggaaaatcaccatcttcgtcatggaggccgaatgcagtatggcctatttctgaagggcattggtttaactttggaacaggcattgcagttctggaagcaagaatttatcaaaggaaagatggatccagacaagtttgataaaggktactcttacaacatccgtcacagctttggaaaggaaggcaagaggacagactatacacctttmagttgcctgaagattattctgtccaatccaccaagccaaggggattatcatgggtgcccattccgtcacagtgatccagagctgctgaagcaaaagttgcagtcatacaagatctctcctggagggataagccagattttggattwagtaaaggggacacattaccaggtagcctgtcaaaaatactttgagatgatacacaatgtggatgattgkggcttttctttgaatcatcctaatcagttcttttgkgagagccacgkattctaaawggkggaaagacattaargaaggacctatccaccagaaacttctnaacccaaaccaagtgtncnnaaaaaccaa

SEQ ID NO: 340 - DNA, 1394 bp, Homo sapiens
  misc_feature (522)..(522): n equals a,t,g, or c
  misc_feature (1091)..(1091): n equals a,t,g, or c
  misc_feature (1107)..(1107): n equals a,t,g, or c
atatatatatatattttagtgagccaatgctttatgtttttatggaaataatagtttcattttagtcttattcattgattattttatcatttcccttttacctattgattgatagtctgtgtttctaggctcagcttgtcaatcggaaacagaaattagagtctgtggaactttctagccaatcagaaattcaacacttaagcagtaaactggagcgggctaatgacactatctgtgccaatgagttggaaatagagcgcctcaccatgagggtcaatgacttggttggaaccagtatgactgtcctacaggagcagcagcaaaaagaagaaaaattgagggaatctgaaaaactattagaggctctgcaggaagaaaagagagaattgaaggcagctcttcagtctcaagaaaatctcatacatgaggccagaatacmaaaggagaagttacmagaaaaagtaaaggcaactaacactcaacatgctgtagaagctataagtttgggaatctgtgagtgcnacgkgttaaacagctgagccaagaactaatggaaaaatatgaagaactgaagaggatggaagcacataacaatgaatacaaagcagagattaagaagttgaaagaacagattttacagggtgaacaaagttacagttctgcactagaaggaatgaagatggaaatctcccatctaactcaggagttacatcagcgagatatcactattgcttccaccaaaggttcttcctcagacatggaaaagcgactcagagcagagatgcaaaaggcagaagacaaagcagtagagcataaggagattttggatcagctggagtcactcaaattagaaaatcgtcatctttctgaaatggtgatgaaattggaattgggtttacatgaggcaaaagagatttcactagcagacctccaggagaattatattgaggcattaaataaattagtgtctgaaaatcaacaactacagaaagatttgatgaataccaaatctcagctggagatttctactcagatgtgcaaaaaacaaaatgacaggatctttaaaccaacacacagcagaacaactgagntcaaggaatacagagntcaagccaacccatggccagcacaagacatgatgggaataaagactgagcactacaaaacagatcttcattctycaagaggacaagcgtcggatagtataaaccccatgtctagggkgctaagcccccatgagtcctyaaatcagcccttgcagctccaccaggtctttgacttcctactctctatgtaaaactcattctttgccttcagcgctagatacaaatgaagccaatttttctgacactatgtctgagagtatgaatgaccaagaagagtttatatcttcg

SEQ ID NO: 341 - DNA, 378 bp, Homo sapiens
  misc_feature (366)..(366): n equals a,t,g, or c
  misc_feature (370)..(371): n equals a,t,g, or c
gctcgtgccgaattcggcacgagttcggcacgagctctggtgtccggctgtgggcggcttctccgtgggctactagcgggcccggcakckaccagctggtctcggcttccagctcgcgggttcagggaagtggtggagacccaagaagggaagacaactataattgaaggccgtatcacagcgactcccaaggagagtccaaatcctcctaacccctctggccagtgccccatctgccgttggaacctgaagcacaagtataactatgacgatgttctgctgcttagccagttcatcccggctcatggaggcatgctgccccgaaagatcacaggctatgccaggaagaacacccgcaagatcgangagnngcgtgaa

SEQ ID NO: 342 - DNA, 1347 bp, Homo sapiens
gtgaccgcccagagcgcsgysagagcgcggggcgcggggcgcgggggcccagctgagccggccgtcggagtgagaccctgcggcagagacgacggaggcggaagcaacccgatcccggaggcggcggcggcggggggagccggagccgcctgggatgttcagtcatgaaacgagtgcgtaccgagcagattcagatggcagtgtcctgctacctcaaacgccggcagtacgtggactcagatggtcccctgaagcaaggactgcggctgtcacagactgctgaagagatggcggccaatctaacagtgcaatcagaatctggttgtgccaacatagtgtctgcagccccttgccaggcagaaccccagcaatatgaagtacagtttggacgactgcggaattttctcactgattctgattcccagcatagccacgaagtgatgcctctcctctatcctctctttgtctacctccatctcaacctggtccaaaacagtccgaagagcacagtggaaagtttttacagccgcttccatggaatgtttctgcagaatgctagccagaaggatgtcattgagcagctacagaccactcaaaccatccaggacatcctatctaacttcaagcttcgagcattcctagataacaagtacgtggtccgtcwccaagaagacagctacaactaccttatccgctacctccaaagtgacaacaatactgccctgtgcaaagtcctcaccttacatattcrtcttgactcctggcactggttttgatacttggaattttgaggttcagggaattcagagaatttggtagcacagtgtattgggagaaagggaaatttcgggtgacagattgatcaccctggctgacatgtttctggaagtgggtgggtgggtttgattgagaacactttgggctcctgcagtgatggtgggaaagaaaaattctttccaaagctgcacttctcttaataattctctcccctcaaaagaaagattatgataaagaataatttggagtaataagtaacaagatagaattagaaaaatgttgaatttctgaatgaccattcagaggtgtggctttttccacgtctttttctcctgcaatgaactgctcccacgtcctgcactgcaataccagtctaatgaacactttgtgaaacaaatcgtaagtatgtacgcacgcatatcaaactatgctctgaggataaagcaagttctaatttgtggaaaaaggattaaatatttctgttttctgaaaagagttattttgtattttgttttctattaaaatgtatttagtttcaaaaaaaaaaaaaaaaaaaaaaaaaaaaaaaaa

SEQ ID NO: 343 - DNA, 455 bp, Homo sapiens
  misc_feature (427)..(427): n equals a,t,g, or c
  misc_feature (436)..(436): n equals a,t,g, or c
  misc_feature (444)..(444): n equals a,t,g, or c
  misc_feature (455)..(455): n equals a,t,g, or c
gtgcactggtcatttctgaatctgtccagagtttaggcagaagacagagcaggaacagatagatcgtcctcccatctcccagtaggcctagagagatacttaccatgaattgcaaacttgagacgtcatgacacatcactgctctacagcctgggccagaatccagggacagagctgggtatggtggctcaggcctgtaatctcagcattttcagaggccagggcgggcggatcacccgaggtcaggagttcgagaccgcctgccagcatggtgaaatcctgctctactaaaagtacagaaaatagctgggtgtggtggtgcgtgcctgtaggcccagctgcttgggaggctgagacaggagaattgcttgaacctgggaggtggaggttgcagtgggccaagatcacccactgccctccaggctgngtgacagantgattganactcctttcan

SEQ ID NO: 344 - DNA, 2177 bp, Homo sapiens
  misc_feature (6)..(6): n equals a,t,g, or c
  misc_feature (8)..(8): n equals a,t,g, or c
tattgngngggtttttttttttttgagacagggttggccaggctggctctttatctgtttttgtattgttttctcagaggcgctgagtgaagatggtcagatatgtgtgtatttttttaaaaacgatttgaaaaaatatgatgttcctttgtcgtgggaacaagccaggttgcagacgcagaaggagctacagctgagagagggacggtgaggttcatgttcagtatgtttctgttgcttgctaaactgtatttttcttgcaaagtaaatagaaattaacatcctacatgccaaatccagtccactgtgggcagactgtgacaaatcctcaaggaacagatcattcccatgcagtagaaactattctagaacaaagttaaagcatctcacttcatttatcaggcatacctgaccctgaaatcatacctaaccaggagagtacagctgacatttcatctcacttccaaatttggttcgaaagcacagtacctaaaaaagttcacaagtatgctttctcccaggataaacaataacagtgaaaatctattaatgtaatttgttgccataatagaaaaataagtggtaattttagcaggcgttgaaatacgtttcttaaaatttatacctgttcctgataaaatttctttattttgggtactttctttagcttgggttaaaaaaaaaaaaagtcctaacttgataaggctacctaacataaaactaccaaaatagaaaaaaaacatgcttcttggtagaatgttaggaacagtggaatcagaaccagcctgttgtcccgactattattcactattgtcctggaaatcctgaccagtacagggatgtgggatagacaggcacaaatactgaaaggaaggagaaactgtcatttccagacagtacagttgtcagtccaagaaaagtcaagtccatagaaccattctcagttcaataaggtgatcagatagatagatccacaacatgttaaaaaaaaaaaaattctcattcacaacaataaacctgaacagaaagggcacaggatggtggaactttgctgttccttcttgttccccatagagatccttgaagtaccttctccaactccatgatactctaaaaactgttcatcttcataataggagtggagcctaatccttggtctcctcacctcctggtttcccggaatgtctttctcattaacatatgagttctcagggcctgtatgtgcaaaggaaacctgaaccattgaggttcagactaggytgttgacaggatacaatgctgtgaagatgtcagtactggtaagttctaaaattcatcaggataaacaaatatgcatcaattgctgagaaagttttaaataagactaacatggtttgcttggcctgataccaagacatacagtaaagctccagtacttaaaaccatgtggggatgccagagtagataaatggatcagaataaagagtcagaatatgtgacaaaagtgttaggccaaattattgaaattagtggggaaaagacaaacattggcatgtgtttagaaaaaaatgtcagatgccttctctctcaccatttgtaaacattacttccaaatgtatccaagagctatctataaaaaaccttgccaatactagggaagaacagaatctggaaccctagggtgggaagcaagacatgaagcagagaaactccaaaaacctagctgcctcttgaragcagaagcttccaagaggaacaggcagtctcaatgcctctgtgcataagggtccctacagtgcaggggctgccttccctctttgctccactccctgacttgatggaagcttggaagcaggcatggggccagcatgagctgttccaggagggcacatgtgtctgaggcacatgttcttacatgttaatgcacatgtgcaaatgtatctacatgctttacatgatgctgtagaaatattttctcttgaccataaacatttcaaatcatgtacttacagtttggcaataaagccttttcatccttctgcaaacaattttcccattaccattgcttcacatggcaccgtaactgggaaggagggaggcacagagtgtgctcaagaggggaggrttccagcacagaggrtctgatgcgaggagcttctgctgaggagctttttggcgccagtgtttttgttcgaggc

SEQ ID NO: 345 - DNA, 3424 bp, Homo sapiens
  misc_feature (1230)..(1230): n equals a,t,g, or c
  misc_feature (3377)..(3377): n equals a,t,g, or c
  misc_feature (3382)..(3382): n equals a,t,g, or c
  misc_feature (3392)..(3392): n equals a,t,g, or c
  misc_feature (3400)..(3400): n equals a,t,g, or c
  misc_feature (3403)..(3403): n equals a,t,g, or c
  misc_feature (3418)..(3418): n equals a,t,g, or c
ctcccctgctgcagttacggcctgaggatgtcggcttcgacggctactccatgcctcgggagggatcgacaagcaagcagatgccccccagtgatgctgaaggtgacccgctgatgaacatgctgatgaggctgcaggaggcagccaactactccagcccccagagctatgacagcgactccaacagcaacagccatcacgatgacatcttggactcctctttggagtccactctgtgacaggggcccggagcccagcgccctcctcttctcctcaccgcattccacctgcatcccccacatcaccctgaagatgacttcctgagccagcccccagccacagccttagagctgcgggaacaccgagaccccccgtccttcagcctcgacctgggtgcaggcatcccgggccagctgcctgcggaccgcttccttccacagcgagaactgcactaccttctgttgtactttaattattgttttgccttgttgctgtgacctccctaagacactgaagatacttctcgggaaaggatcatcgccgttgaaatgaaaagagagacagagagagaaaaaaaaaagagaacccacatgaagctctgaaaccaaacagcatcctgccatgagcttcccagagacagaagagactggagcaaagtcggaaacacagagaagcacggcttcccctcagcacagaccctccagactgggtctcagagccgtgccacccaccctcccacacagccggccacagggagaactggtgctaaccagggtgcttgctttggtcacgttcaacgcactacagagctacgacacaggggaaccttaggagcaaataaaccgtgctttcatgttttttaaatggtgctttccttacccgagaggtattttgcctgttccaatcgaaccaccccattcaggtccatcagcctctgattaatatccgtgagagtgagtgacggagtgagagtgtgagcgagtggatgtggctgtcagtgcagaacagcatgtgtctctttccttctgatatatgaatgaatcaggtttttttttttttttttctgcaaacactgtgtatagtgagacttgttctactttggagaacaggttaccttttgaaaatgaggttgagtttcttcctttctgatgcattgatttttgaagatttttttttcccccttcccctcttggtcagaatcaatcctttggtgaaagtaagaaccgcagnagttgagttttggtttggtcctgctcagttttggtttttagttgtccatcctcacagtcctacacactcgcctcctcctgctagggctgggggtatctgtgtcctttaaaatggatgaggacctggtcctcgacatgtgggtgagccatggaccttgccttcccttctcgtccttgagggtttagaacacacaccaacacctccagcgtccccgccccagcttccggtggggtgatgcggtcaccctgcaaaagacttgcactttcctcagaaccaacatgacgcagctcaataagggtgagggtcactccctcccagaagccccgtctggacgagccttgcctgacctcttcggtgctgaccttcccaaagtgatgccttactggttttgtactaactgtgttcattttacataagtgtcgtgcctgcctggggtttgttttttttgtcattgttttccccattgaaacaaacagggctaaaaagtcatctgttcattaggagaactcaagttgctgtgacttttctcatccaaaagactcatttgtgtggatgcgtgaccatgggaaaaagaaaaaaaaaaagatccattttttaggttcttttcggtctccagctgrcaacccaactggacaatgatctgtctggtgcaggagaaggcaaaagtttctacaagtctacatgaccttgctgatacttgttctaatagaaacccagtctgctgtgtcttcaacatactggtattttcattacaaagtatggtaaatttttgagttgtttgtttctgttttgtaaagagaatccttattggacaccagtgaaggtgtctctgttttaatgatcagggtttttattccatcttttgcatttcttctatttctgaaggtttgtctcttggcatctttttttagtttcttaccataagagtttgacccgaaactgctcacttcacattggatgacaccatgttcttcctctttgaaaagaaaaggggaatgtgtcccactagtgaaaggaaaacttttcaacactatccctgctttagtctcagcaaactcagactattctgcttagccttcattagtcatctgggtgtgagtgtgtcttgttctgtttttctttttaataaaacttttaaaccatatatttagcctgtgaccaggggggccaaaccctaagatttctggtaaacctgaagggtggccctcctcagacaatttatctcccagcaatgaccctactacactcgcgtactgtgaatttgggaggaggtaaagttgacttctcctcgtgggcagttttccaatcaccttgtgagtagacacctgccaatattgtttgaaacctttttttaatatgacatcctctcttgtcattctcttctcccctttcccacagacttccctcctgggtccaggttcagaaccaagacttctgtacctagtgctgcctgattggtgaacattgacttcaagtagcatagcccttgtgtgactcacaactccgtgtccttcctaaagtttcgggaagcagggttgtctaatatgcacatttcttattttggtcatatttttactttagtgtcactcaccttttacaaagtgactttgtactcatttagggctctatcggaaatgcttccattttgccttttctacagttaggccaattttgaaatatataaattctatgcaacatttatgttgagttaccaatggaagccaaaagttctcttcccaaactgccaagaatgatacaggccataattgaaatgggaataccttttaagtttcattaggggtggggtgggagtgggacaggaacaagacttgcctagatctttgttgtatcttggggacttttactttgttgtttgatgcttaaacttcaaaattctctgtattcaaatttgattgtggcgaatctacttcaaaaaggaaaaataatccaactttgtggatattaaatggaaggtttgctgttttgatctagttgtttccagtggagcagttttatgaaatatgttctataagatgtacattttttcattgtaacatagaaattgtaaataattgattaaagtgctgcattttgatgaattttttctagccatttttaaagagaaaactaggaattgagtattttgngkacnggwatgtttnccatccynccntkcccyttcccgccngcccct

SEQ ID NO: 346 - DNA, 2651 bp, Homo sapiens
ggcagaggtttcatcatgttagccaggatggtctcaatctcctgaccttgtgatccacccatctcagcctcccaaagtgctgggattacaggcatgagccactgtgccaggycaggtagagggttttaagacacagaaaggcaaagttgttcaggacaggtgtctacaatccaagcctsacccaggcatcacattttgtctcagattaggcctcaataaaactgacttgagtgtattgctttgggaggagctcaggttaaaaagtagaaaaacatggcttcaccagaaattgtgtattggcttttgcctcctattccttttgagaactccctgaggaaaactgttcttatcctgtctcccaggctcatacaaagcaggccttcaaccagccagactgactgcctctttctcttttcattcccaagaattatatccagatcgagagacagaagattctgaaagggttcaatgaaatgagagtcatcttggacaatgaggagcagagagagctgcaaaagctggaggaaggtgaggtgaatgtgctggataacctggcagcagctacagaccagctggtccagcagaggcaggatgccagcacgctcatctcagatctccagcggaggttgaggggatcgtcagtagagatgctgcaggatgtgattgacgtcatgaaaaggagtgaaagctggacattgaagaagccaaaatctgtttccaagaaactaaagagtgtattccgagtaccagatctgagtgggatgctgcaagttcttaaagagctgacagatgtccagtactactgggtggacgtgatgctgaatccaggcagtgccacttcgaatgttgctatttctgtggatcagagacaagtgaaaactgtacgcacctgcacatttaagaattcaaatccatgtgatttttctgcttttggtgtcttcggctgccaatatttctcttcggggaaatattactgggaagtagatgtgtctggaaagattgcctggatcctgggcgtacacagtaaaataagtagtctgaataaaaggaagagctctgggtttgcttttgatccaagtgtaaattattcaaaagtttactccagatatagacctcaatatggctactgggttataggattacagaatacatgtgaatataatgcttttgaggactcctcctcttctgatcccaaggttttgactctctttatggctgtgcctccctgtcgtattggggttttcctagactatgaggcaggcattgtctcatttttcaatgtcacaaaccacggagcactcatctacaagttctctggatgtcgcttttctcgacctgcttatccgtatttcaatccttggaactgcctagtccccatgactgtgtgcccaccgagctcctgagtgttctcattcctttacccacttctgcatagtagcccttgtgctgagactcagattctgcacctgagttcatctctactgagaccatctcttcctttctttccccttcttttacttagaatgtctttgtattcatttgctagggcttccatagcaaagcatcatagattgctgatttaaactgtaattgtattgccgtactgtgggctggaaatcccaaatctagattccagcagagttggttctttctgaggtctgcaaggaagggctctgttccatgcctctctccttggcttgtagaaggcatcttgtccctatgactcttcacattgtctttatgtacatctctgtgcccaagttttccctttttattaagacaccagtcatactggctcagggcccaccgctaatgccttaatgaaatcattttaacattatattctctacaaagaccttatttccaaataagataatatttggaggtattgggaataaaaactccaacatataaatttgaggaaggcacgatttcactcataacaatcttaccctttcttgcaagagatgcttgtacattattttcctaataccttggtttcactagtagtaaacattattattttttttatatttgcaaaggaaacatatctaatccttcctatagaaagaacagtattgctgtaattccttttcttttcttcctcatttcctctgccccttaaaagattgaagaaagagaaacttgtcaactcatatccacgttatctagcaaagtacataagaatctatcactaagtaatgtatccttcagaatgtgttggtttaccagtgacaccccatattcatcacaaaattaaagcaagaagtccatagtaatttatttgctaatagtggatttttaatgctcagagtttctgaggtcaaattttatcttttcacttacaagctctatgatcttaaataatttacttaatgtattttggtgtattttcctcaaattaatattggtgttcaagactatatctaattcctctgatcactttgagaaacaaacttttattaaatgtaaggcacttttctatgaattttaaatataaaaataaatattgttctgattattactgaaaagatgtcagccatttcaatgtcttgggaaacaattttttgtttttgttctgttttctttttgcttcaataaaacaatagctggctctaaaaaaaaaaaaaaaaaaaaaaaaaaaaaaaaaa

SEQ ID NO: 347 - DNA, 2180 bp, Homo sapiens
  misc_feature (2152)..(2152): n equals a,t,g, or c
  misc_feature (2161)..(2161): n equals a,t,g, or c
ggcacgagcagcgagcaactgagaagccaagactgagccggcggccgcggcgcagcgaacgagcagtgaccgtgctcctacccagctctgcttcacagcgcccacctgtctccgcccctcggcccctcgcccggctttgcctaaccgccacgatgatgttctcgggcttcaacgcagactacgaggcgtcatcctcccgctgcagcagcgcgtccccggccggggatagcctctcttactaccactcacccgcagactccttctccagcatgggctcgcctgtcaacgcgcaggacttctgcacggacctggccgtctccagtgccaacttcattcccacggtcactgccatctcgaccagtccggacctgcagtggctggtgcagcccgccctcgtctcctcygtggccccatcgcagaccagagcccctcaccctttcggagtccccgccccctccgctggggcttactccagggctggcgttgtgaagaccatgacaggaggccgagcgcagagcattggcaggaggggcaaggtggaacagttatctccagaagaagaagagaaaaggagaatccgaagggaaaggaataagatggctgcagccaaatgccgcaaccggaggagggagctgactgatacactccaagcggagacagaccaactagaagatgagaagtctgctttgcagaccgagattgccaacctgctgaaggagaaggaaaaactagagttcatcctggcagctcaccgacctgcctgcaagatccctgatgacctgggcttcccagaagagatgtctgtggcttcccttgatctgactgggggcctgccagaggttgccaccccggagtctgaggaggccttcaccctgcctctcctcaatgaccctgagcccaagccctcagtggaacctgtcaagagcatcagcagcatggagctgaagaccgagccctttgatgacttcctgttcccagcatcatccaggcccagtggctctgagacagcccgctccgtgccagacatggacctatctgggtccttctatgcagcagactgggagcctctgcacagtggctccctggggatggggcccatggccacagagctggagcccctgtgcactccggtggtcacctgtactcccagctgcactgcttacacgtcttccttcgtcttcacctaccccgaggctgactccttccccagctgtgcagctgcccaccgcaagggcagcagcagcaatgagccttcctctgactcgctcagctcacccacgctgctggccctgtgagggggcagggaaggggaggcagccggcacccacaagtgccactgcccgagctggtgcattacagagaggagaaacacatcttccctagagggttcctgtagacctagggaggaccttatctgtgcgtgaaacacaccaggctgtgggcctcaaggacttgaaagcatccatgtgtggactcaagtccttacctcttccggagatgtagcaaaacgcatggagtgtgtattgttcccagtgacacttcagagagctggtagttagtagcatgttgagccaggcctgggtctgtgtctcttttctctttctccttagtcttctcatagcattaactaatctattgggttcattattggaattaacctggtgctggatattttcaaattgtatctagtgcagctgattttaacaataactactgtgttcctggcaatagtgtgttctgattagaaatgaccaatattatactaagaaaagatacgactttattttctggtagatagaaataaatagctatatccatgtactgtagtttttcttcaacatcaatgttcattgtaatgttactgatcatgcattgttgaggtggtctgaatgttctgacattaacagttttccatgaaaacgttttattgtgtttttaatttatttattaagatggattctcagatatttatatttttattttatttttttctaccttgaggtcttttgacatgtggaaagtgaatttgaatgaaaaatttaagcattgtttgcttattgttccaagacattgtcaataaaagcatttaagttgaatgcgaaaaaaaaaaaaaaaaaaaaaaaaaaaaaaaaccccgggggggggccccggnccccattgncccctttgggggggggttt

SEQ ID NO: 348 - DNA, 1300 bp, Homo sapiens
gagtcagtccctgtttaaacaagagtcatcaggttttgtgaggacctcagcagagtctgtcctcaggcaggagtcattgagaggggtccttggagttctggagctgtattggaggggatctgaggtctgtggctcaagacagtccttgtatgggctctcaagcggtaggggtatcctgcagggcccccaggagcatccctgatcacccctctgcccctccccaccagagctgaagatccctgaaaacgccaacgtcttctatgccatgaactctacygccaactatgactttgtcctsaagaagcggaccttcaccaagggagtgaaggtcaagcacggagccagctccaccctccctcgcatgaagcagaaaggactcaagattgccaagggcatcttctgagggcatcctcccagggtctggctggctggtagccaagcacttatggaccagagtggcccaggccagctgggcgccttcctcccacctgccagcccagggtaccccagactccagtttcatcctgaacctctcccgctgctgggattgacgcctgccattggtcaggctgacctggcctcccgtggaccactcgctgccttaggtgccttctgctctctggaaccagaggactagctgacttttgccaaggagcagtgccaacgggcatggcatggtgccctgcctgcccccgggcrccacctctgtacacttccctgacaccttcccaggtgtgggtcactgccacctgtgcccatgggcaccccagagcacccactgtgaccactgcagttctctcatgcccacaggcactggcctgtgaccttcgcaggggtcccggcccctcccaccactctagcctttctcaggctgcaccaaagattccatcatcagggccaactgagagtgagggagtctcacccaccgcttaccccagccctcccctgggagcagagagagaaaccctcttcatggaccagactctgcacccggtgagtgaggacagtcccagctgagtcccatcgatgttgaatctcatgccactgcaagtgccattcaccactgcgtcctgggctttacgagaccatgcaagacgggggttagtgaggaaggaggatttggggtgggggtggggtgattgaatatttgtataaaaagcaaaaagaaaaaaaaaatgtttgtttactgattggggaggggcaatatttatttgttgtaaatagcaaatgctagacttgaatattatattaaaatcctgtttctactataaaaaaaaaaaaaaaaaaaaaaaaaaaaaaa

SEQ ID NO: 349 - DNA, 2115 bp, Homo sapiens
ttgcgaagatgatgatatggccaagccaaggaagggaacctacagtgaagagtacaggtgtctctgatctacatatccaagaactgcaagaaaaatgtccagatgggcatcagatacctagtccagtccttggcaaaagtctgggctttggaaaccaagggcaagaggcgatgacaactaatctatagtaattaaaactcccacccccctattaagactccaccctcccacatcccccaagcgtgattttgcacaacaagttaaataaaagtaaactgtttattaaaagatacagcaaaggtacagatacagagatacatacaaagatacagatatatatatatatttacatatatatacagtcttgctgttttcatgtgcactatatttagcagcacattatttaatcaggcggcattttaatggggttgttttgacacttggcattattaagatacaactatagccccgtggaaatttcaacgtttgaattccacttctccgacttttaatagtagcaaagaggggaaggagaagggaatggagtaccaaggctgagcattaggttaaacacaagaatttaaaagggccaaggtagcaaagggaaggaaaaataattaaaattaaaggctatctgacaaacaacccagagaaacagtaagaaaccatcattaagggcaatgggctatgtacccaagatgctcacatcaacctacaatgaccttttccaatccagttcttgtgttgaacctgaggatctgscctstccgatcaatccctccacccgataaatttgctaccaccaaaatctagagctatagagccttgaagcaaatcgggaagctaaatagttgtaccttggactaccttcccacaagtgcagggagggcccaatgttgggtagggatgtgataacactgttctctgcaattcgatgcttttcactttgtggcttggttccacaaagtgaattgcatcgagttactgtcaaatgagaagctgcgggttgtttcatctgtcgtctaacccggccctgccgtttaacccggccctaagaagagtgaaacagaatccaaatcagacataacataacaatgaaatggcagattcaggtataaaaaaggaaaaatacataatattcctcctacttacctctgagggcaaattgctgctgaaaacattatcatcatctttgttttcttcaccatttttctccacaggaacccattctccataaacactatccgcttcttttttccgatgttgagatccagatgatacagggaattcttttgttaatgttacctggctttttggtggagttggttttgctgcagcaatattcagattgaaaaaaataggtttgggttcactgagtttaaagggatgatgataaaaaggaggttcttcttcctcttcatccgaaacatgaggtttattcactattacatcatcatcttctttactctgtgcgatctgtttacatttctcagttagttcttctatagtagctcctcctgactttttagcaactttctcttctatagtaggtggaggtgcaggctttaggtttggtggtaaagggacaccagccttagcacacatggcagctgcattagctttggctatttcaagtaattgagccttatccaaatctgtcagacgtttgggtgatctgcctcgttcagaagacctggatcttttacgacggatgggagatctgctaaaccttcttcttaagggtgttcttgatcgccttaatctgactggtgagatactgaagcttcgtcttcttaccacagaccttgatcttctccggcggcttggggtgcggctccgacggctaggggtgcggctccggcggctrggggtgcggctgcggcggctgggggtgcggctgcggcggctgggggtgcggctgcggcggcttggggaaatgctaaagctccttcttctacccacagatctagaccttcgtcgacgacttggagtatgactccgactccgacgacttggggttcgacttcgagctctaactgtctttcggttatccctggagcttgatctttttctttttctttccctagacttggatctgtgctttggagatctttt

SEQ ID NO: 350 - DNA, 1322 bp, Homo sapiens
tctgcctgggatgtaaaccggaccagccgctgcgggcagaaggaaggctcttggctccttcgggaaacccagccccgtcaccgggctccgagcggctcgcaggcgacgacacgkcctcagccccggcagcgccyagcgkcggctgcggaaagcggagggagtccgacgcgggcgcgggcggggagcgtgcgtccgttcgcacaggcagcgggaggaggggcggcgcgaaccatggccggggacagcgagcagaccctgcagaaccaccagcagcccaacggcggcgagcccttccttataggcgtcacgggggaacagctagcggcaagtcttccgtgtgtgctaagatcgtgcagctcctggggcagaatgaggtggactatcgccagaagcaggtggtcatcctgagccaggatagcttctaccgtgtccttacctcggagcagaaggccaaagccctgaaggsccagttcaactttgaccacccggatgcctttgacaatgaactcattctcaaaacactcaaagaaatcactgaagggaaaacagtccagatccccgtgtatgactttgtctcccattcccggaaggaggagacagttactgtctatcccgcagacgtggtgctctttgaagggatcctggccttctactcccaggaggtacgagacctgttccagatgaagctttttgtggatacagatgcggacacccggctctcacgcagagtattaagggacatcagcgagagaggcagggatcttgagcagattttatctcagtacattacgttcgtcaagcctgcctttgaggaattctgcttgccaacaaagaagtatgctgatgtgatcatccctagaggtgcagataatctggtggccatcaacctcatcgtgcagcacatccaggacatcctgaatggagggccctccaaacggcagaccaatggctgtctcaacggctacaccccttcacgcaagaggcaggcatcggagtccagcagcaggccgcattgacccgtctccatcggaccccagcccctatctccaagagacagaggaggggtcaggaggcactgctcatctgtacatactgtttcctatgacattactgtatttaagaaaacaccatggagatgaaatgcctttgattttttttttctttttgtactttggaacgacaaaatgaaacagaacttgaccctgagcttaaataacaaaactgtgccaactactactggtgatgcctaattatgaatccaacgtgtaaccagttataaatacatatatatataaaaaaggaaaaaaaaaaaaaaaaaaaaa

SEQ ID NO: 351 - DNA, 1054 bp, Homo sapiens
ggcagaacttaaactaaatgctatgaaaaaagatcaggacaagactgatacactggaacacgaactaagaagagaagttgaagatctgaaactccgtcttcagatggctgcagaccattataaagaaaaatttaaggaatgccaaaggctccaaaaacaaataaacaaactttcagatcaatcagctaataataataatgtcttcacaaagaaaacggggaatcagcagaaagtgaatgatgcttcagtaaacacagacccagccacttctgcctctactgtagatgtaaagccatcaccttctgcagcagaggcagattttgacatagtaacaaaggggcaagtctgtgaaatgaccaaagaaattgctgacaaaacagaaaagtataataaatgtaaacaactcttgcaggatgagaaagcaaaatgcaataaatatgctgatgaacttgcaaaaatggagctgaaatggaaagaacaagtgaaaattgctgaaaatgtaaaacttgaactagctgaagtacaggacaattataaagaacttaaaaggagtctagaaaatccagcagaaaggaaaatggaagatggagcagatggtgctttttacccagatgaaatacaaaggccacctgtcagagtcccctcttggggactggaagacaatgttgtctgcagccagcctgctcgaaactttagtcggcctgatggcttagaggactctgaggatagcaaagaagatgagaatgtgcctactgctcctgatcctccaagtcaacatttacgtgggcatgggacaggcttttgctttgattccagctttgatgttcacaagaagtgtcccctctgtgagttaatgtttcctcctaactatgaycagagcaaatttgaagaacatgttgaaagtcactggaargtgtgcccgatgtgcagcgagcagttccctcctgactatgaccagcaggtgtttgaaaggcatgtgcagacccattttgatcagaatgttctaaattttgactagttactttttattatgagttaatatagtttagcagta

SEQ ID NO: 352 - DNA, 783 bp, Homo sapiens
  misc_feature (15)..(15): n equals a,t,g, or c
  misc_feature (57)..(57): n equals a,t,g, or c
  misc_feature (654)..(654): n equals a,t,g, or c
cacgacgtccgcggnacggtgggacggaacgcgtgggcggacgcgtgggcggacgcntgggttcggaaacctatcgattacacagttctggatgatgtgggccatggtgtcatggctaaaagccaagcatggaaataaccagcctgcargaactggcacactgtcgagaacaaatcctcctactcagaaaccgccaagtcctcccatgtcaggccggggaacactgggacggaatactccttataaaaccctggaacctgttaaacccccaacagttcctaatgactatatgaccagtcctgctaggcttggaagtcagcatagtccaggcaggacagcatctttaaatcagagaccaaggacacacagtggaagtagtggaggaagtggaagtcgagaaaacagtggtagcagtagtattggcattcccattgctgtgcctacaccttcgccacccactattggaccagcagccccgggctcagctcctggttcccagtatggcacaatgaccaggcagatatctcgacacaactctactacttcttcgacatcttctggtggatacagacgaactccctctgtgactgctcaattttctgctcagcctcatgttaatggaggtccactttattctcaaaattcaattgctgntagtccaactccaccgccaccacctccaccagatggacattcccatgtttggatggactctgccacctcccccaccaccaccaccagtgggatttatgaaagatggaggaggctgcagttagtttcagt

SEQ ID NO: 353 - DNA, 694 bp, Homo sapiens
  misc_feature (29)..(29): n equals a,t,g, or c
acccccagccaggtgccagcacctgagtntgaggacagctggggcttaggaccttaccaacaggtgaacattaacaaccttctcacttctttggccycagatcctggagagctcccagactttgctcagcgttctcaagagggaagctgggaacctgaccaaggctacagccccagaccagaaaagtagcggcggcagggacagctgaccagaccacgggcagggcctgcctccgtgtgcccctcagctcagccccagcaagtgtgtgctcagagcatctttgttcttcacggcagcagctaccttccctcactgtctcaggtgccgagaggggcaggtgccagcctccactggcatcagtgacaagcccagggcacagcccacccgggggtcctcgcttcatgctcacacaggctatggggatggtgggctccaggtcagctctgcaaggggcttgtctctgtggcacccacactcctgccctgccagggaggctctggttgtctgagcaccatgggggccccctcaccttgtccctcctcagccagcagaggcccagggcaagggacaggaggacaggggttctccttcaccacagaacccaaacctcaggtctcacccctgtggcctgtgattatgaataaagattatctttgtaaaaaaaaaaaaaaaaaaaaaaaaaaaaaaaaaaaaa

SEQ ID NO: 354 - DNA, 880 bp, Homo sapiens
  misc_feature (137)..(137): n equals a,t,g, or c
  misc_feature (684)..(684): n equals a,t,g, or c
tttttttttttttttttttttttttttttttttttttttttttaactgttccatctttattagaaaagcaaccaaaaaaagggtgaggggtgagcctggccctaaaggacccctccactgtgacacaggcagagcgnctcatcccggcgtcgaggggtggatatggccagctgggtgtgggcagatttacaaagtcaacacttcatagaaaaggatgccgcctggcgtgcagatggcgaccaatccaccttcacatggctaaggcgggcccctcctcctctgggctcccatgtggtgtggacagcctgacctgggtacagggaggatgccatgaggaggtgggctgggcaggcctgggggctgtgtggggagtggcatccatgtgggcctctggtcctgcccagggtcctgcccagggggcattccaggcctggctggtcccctggggcgtggcggtggggctgcagtggcccctcaaatgtccatgtagtcgtcgtcctcgtctgtctcgctctccagcgaggactcctggctggatgtctccaggacctccagggctggctggcataggctctccttcctcacgttggcagcagactgggcagaaaggatggctgacttcagcttctgcttggtctcctccgagatgctgcctttgggggagagcagggttggggtgggtgncgtgacggtgatctcaggggggaacttggtggcggcggaggggatgaccagctttggcatgttgggcagggggcgggacttarcccggctgggctcaggcttgcctgggtgaccctctggtggctgggcactcccactgctgggggccttggagctggcagctgttgggggagagctcaggggctgagtctcactc

SEQ ID NO: 355 - DNA, 2410 bp, Homo sapiens
  misc_feature (2246)..(2246): n equals a,t,g, or c
  misc_feature (2262)..(2262): n equals a,t,g, or c
  misc_feature (2267)..(2267): n equals a,t,g, or c
  misc_feature (2298)..(2298): n equals a,t,g, or c
  misc_feature (2301)..(2301): n equals a,t,g, or c
  misc_feature (2353)..(2353): n equals a,t,g, or c
  misc_feature (2380)..(2380): n equals a,t,g, or c
gcggacgcgtgggcggacgcgtgggcggacgcgtggggggaaaatgtgtctatattggcagaagacttggaagggtctttagcatcttcagttgctggaccaaacagtgagagtatgatttttgagaccactacaaagaatgaaactatakcccaggaagataaaatcaagttgctgaaagctgcctttytgcaatactgcagaaaagatttaggtcatgctcaaatggtggttgatgagctcttttcctctcactctgatttggattctrattctgaactagacagggcagttacccaaatcagtgtagacctgatggatgactacccagcatctgacccacggtgggctgagtctgtccctgaggaagcacctgggttcaagcaatacgtcactgattatccttcaccaagctagaagacaagatgaaagctcactcttttcttatggactttattcatcaagttggcttatttggacgtctaggcagttttccagttagagggacaccgatggccactcgactgttgctctgtgagcatgccgaaaagctgtcagccgccattgttctcaagaaccaccactcccggctttctgaccttgtcaacacagccatattgattgctttgaacaagagggagtatgaaatcccatccaacctgactcctgcagatgtctttttcagggaggtatcccaagtagataccatctgtgagtgcttactggagcatgaggagcaagtcttgagggatgcacctatggattccattgaatgggctgaagtggtgatcaatgtgaacaatattctcaaggatatgctgcaggctgctagtcattatcgccaaaatagaaactctttgtatagmagagaagaatcactagaaaaagaacctgaatatgttccatggacggcaacaagtggtcctggtggcatccgaacggtaataatacgccagcatgagattgtcctgaaggtggcttatccacaggcagacagcaacctccgaaacatcgtgaccgagcagctggtagccctgatcgattgcttcctggatggttatgtttctcagcttaagtctgtggataaatccagtaatcgggaaagatatgacaatctggagatggaatacctacagaaaagatcagatctcttatctcctcttctttcactaggccagtacctgtgggctgcttctctagcagagaaatactgtgactttgatatattggtacaaatgtgtgagcagactgacaaccagagccgactccagcgctacatgacccagtttgctgatcagaatttttcagactttctcttccgttggtatctggagaaaggaaagcgaggcaaattattatctcagcccatttctcagcatggacagttggcaaattttttgcaagctcatgaacatctcagctggttacatgaaattaatagccaagaattagaaaaggctcatgcaacacttctgggtttggcaaatatggaaactcgttactttgcaaagaagaaaacccttcttggcttgagtaaattggctgcattagcttcagacttttcagaggatatgctacaagaaaaaattgaagaaatggctgagcaggagcgctttctactgcatcaggagaccctacctgaacagctgctggcggagaaacagctaaatctcagtgcgatgccagtattgactgcaccacaactcattggtctatatatctgtgaagaaaatagaagagctaatgaatatgatttcaagaaagctttggacttgttggaatatattgatgaggaagaagatataaatataaatgatctaaaactggaaatcctttgcaaagctcttcagagagataactggtccagttctgatggcaaagatgatccaattgaagtatctaaagacagtatatttgtgaagatcttacagaaacttttaaaagatggcattcagctcagtgagtacttaccggaggtgaaagacctgctacaagcggatcagcttggaagcttaaagtccaatccttacttcgagtttgttttgaaagcaaattatgaatattatgttcagggacaaatataactttttctaaaaatggccattgtttatgaaatctgtataagtgtgtccttatacaaattttaggccataaacaagtgtaagtttgtacaatttcataacatgtatagctgrgtttttatactttatatgtaggaagctaatataaaatagttatgtaactgngattttgggtttcagntatgngacttggtttttccacctgaaatgtgtcagntgntgtcctgtactcggtgccctttctttttactctcaccgtgggccccagggtnctggaagttcttggccctgggttctangctgcttcaccatggttccaaatcaacttt

SEQ ID NO: 356 - DNA, 570 bp, Homo sapiens
aattaactcagccatttttggagaactttggggaacatgaaaaaaaaaaaaaaaaaaaaaaaaaacatttttaaaagaaaaaacggggagaaaaaaatagcttctattgatgagttttatcatctcaattgaatctttcctttccctgatgaagacagctggtggccgagtgcggcaaagaagccagaaggaaccagaatcccagtgccctacacccaccaccagacacactcacacccacacacgttctcagacacacacaagagtgcttgccggttataccaaaccctactattactgcctgcagaaatcaatttaaaaaaataataacaataaacaattttaaaaaggacaaaaaaattaatgattgagaaaagaggcatttttttctgacatttggtcctgcttgaaacaacaaaagaagaagaaaaacccaccatcaccaccgattcctttgcttcttttttccttttttcctaccttgtttgaaaaccgtgggcttgggactgtgaattattgcatgacattcaaaaagaaaaaaaaaataaaaaaaaaaaaaagtcgtatcga

SEQ ID NO: 357 - DNA, 1970 bp, Homo sapiens
gcggccgcgctccgggccggggtcccgggggagcagatcctcagaatggcccttggtgctgcaggcgcggtgggctccgggcccaggcaccgagggggcactggatgactctccaggtgcaggaccctgccatctatgactccaggtcttcagcacccacccaccgtggtacagcgccccgggatgccgtctggagcccggatgccccaccagggggcgcccatgggccccccgggctccccgtacatgggcagccccgccgtgcgacccggcctggcccccgcgggcatggagcccgcccgcaagcgagcagcgcccccgcccgggcagagccaggcacagagccagggccagccggtgcccaccgcccccgcgcggagccgcagtgccaagaggaggaagatggctgacaaaatcctccctcaaaggattcgggagctggtccccgagtcccaggcttacatggacctcttggcatttgagaggaaactggatcaaaccatcatgcggaagcgggtggacatccaggaggctctgaagaggcccatgaagcaaaagcggaagctgcgactctatatctccaacacttttaaccctgcgaagctgatgctgaggattccgacggcagcattgcctcctgggagctacgggtggaggggaagctcctggatgatcccagcaaacagaagcggaagttctcttctttcttcaagagtttggtcatcgagctggacaaagatctttatggccctgacaaccacctcgttgagtggcatcggacacccacgacccaggagacggacggcttccaggtgaaacggcctggggacctgagtgtgcgctgcacgctgctcctcatgctggactaccagcctccccagttcaaactggatccccgcctagcccggctgctggggctgcacacacagagccgctcagccattgtccaggccctgtggcagyatgkgaagaccaacaggctgsaggactcccatgacaaggaatacatcaatggggacaagtatttccagcaggtaacctctctcctgaaccctgggatctggggagcaggcggagttctccagcaggggaagtacckctaccaaggtaactaccacccctsccttctagattcctgagtagcagaagcagtacacagtcatggtcttggagccaagagaccgaccaggattctagttcaggccctactgtggattagctctgtgctgcagccaatccatgttagcccccccaagttaggaagacctggaaaccctacaaagccaaccgctttctggaatgtaatattcttggcacttggagttaggatccccaggttctagtcctgagtctggactctgggtaagtgactcagcgattctgaaccttgtttccttatctttgaagtggagtgacaatacctgtcctatctactctcctgggcagttaggaaaatcaaattgctgcaaaagtgattgagcaaaattccaccaaaacagagaatattcttattaatgcatttaraaataaatacagcagataaacctgaggagtaaaaatagcagttgatatttattgggcacttaccatgtgccaggcactgtcccaagcactttatgtgtattagttcactgacttctcacggcagccctgggagataggtattcttttcatccccactctagagatgaagacactgagccctgaggtgttaacttgctccaggttgcatagtaagtggcagaggcaggactgatacataagcaggctgacccagggcccgcactctcaacccctgccccacactgacccaccccctatcttgtcagccataccggtggctccaccaccagaccagcccaccccaatcccatccccatgcgcactgaggaatcagacttcctctcagcttcttgtggcctttctagaacaaaaggatctacaactgcatgatgatctcttcaagaaga

SEQ ID NO: 358 - DNA, 2645 bp, Homo sapiens
ccggattcaagcaattctcctgcctcagcctcccgagtagctgggactgcaggtggggatgcattccaaaggaactcagacagcaaaggaagagatggaaatggatccaaagcctgacttagattcagattcctggtgcctcctgggaacagactcctgtagacccagcctctagtctcctgagcctatagagcccccaggagactgggacccaaagaacttcacagcacacttaccgaatgcagagagcagctttcctggctttgttcacttgcagaaaaggagcgcaaggcagaggctctgaagcactttccttgtacatttggagagtggcattgccttttagataggatctaggagtgattttattgttttggagaatggaagggcccccatggccctggctttgtcatcagtgactgccatagcaacagcagctctgtacctcatctgttgatcccacctttgaagaggagacacagtgctcaccttaattgcgctggtagcagcttatatcccatgtatcattttcaccattgattggaagctgccttgggaattcagtaccaggcattacccctctgggtgggagagggagaagtgtaaagttggagtgggctggaatcaggtgtggcccgcccagtgtcctctgcagagtggtgaagtagtctggccctcttgggagccctgagtccaggaaaatatgtctgatggagtcaatctagggcttgtttcgaaaaagttcagttactctgtgcagctaaatgctttaggaggaaaggtaggcttaggttgcttttcctctgagggttgattgaaatttcttcagtgaggaatagagaaagggcaggaccctcmtcatcacacagctggtgtttcaggctgtgaccaatgcagggtgggatttcctaactgtggatgaggggatgaggtgtctctgagggatgaggtgtctcagagaattgagtccatggggcagtcagaatagccttaagagaaaatcatgaaggagaagaggtcctcctttagctgcctctacttggtatcttagagagggcttagagggctctcagtcttctgcccatgaaaagacttctttgagcctctgccttcatggctcttagggttctgatcttgatatcagcagccccaaccactttctttctgaatgtctagtcagtatttttccccttttggtgttttatgaagccatgtggtaacgaatgaatctgtatcatttttcctacctgagtggcccaaagccagcaccaaaccctgggagtccctgaagcctaacagaacaggtagaacttgcaaaaggaatttggctgagagctcacttctaatcctgtactcactgtgtctttgtagatagaaacaagctagctttaccaaagagaaatagtgtcatagaagaacaaaacttcatatagaaagttctaggcaagtatttgatggtttccttaaggatgtgagctttgtatttccacctagccttgtaaaatgttcctgtggtattttgtgtcacacatcctacctttgatgagtctcacatcccaccttcctataaacagctaaattaattttgtttcatcttccccagaccaaaatgtttgataatcttatcaacattgtgggaggtcttgtgcaatggaaattttgccatttctccaaaactggtggcataaaggctgatgcttggggagaaccccattgctcgggacaggcaactctgttcaatgggatcttctttggtttgatgttcccattgttttctcagttctgggaagcctagtacattagtactaatgtaatcactgaaaccttttcttgaaataagggaagcagccaaactttgattaaagttgcaagttctggggacttgcgggggttgtcataaactgtaacagtgggttttggttcagcatgtaaatgcaactttgattttcttgaggaccgattgacctgtcatgtccctgtatcctcatgctcatcatctcagcaggcctgagaggctgggtcagtttgggtgttcatcatgaggattgcttctgccatggagctgatggacrtgggcaggttgctgagaaggtggggtgaaagtgagtgccgggggtgggtgagtgccctggtcttgttcataggggagcctttccctagcagtggaacgctgtggtcattttctctagcatattcccttgggaagtctagatttgctattaatctggctgagaatctaagttctgtgccttagagacagtttgcactttcccatattgtgcctgggacagccatatgattttttttcccaccaaacaagtatgcaaacagaaaccagttcaaagggggatggagtaaaagatgaggcagtagaaatgcctttgaatggttttctgtagctaattctctttaaattttgtcctgctttttttctttatgcagtgctaggtgttttaagttttctagtagtattgcttttgagttacagtataacctgagttactcctctgctctaacattgttgcagaagaactagtttattgttagccaggttgcttgaaaggttgagagtggagtggtttggcatttctgttttaaataaacatttaagctcttaaaaaaaaaaaaaaaaaaaaaaaaaaaaa

SEQ ID NO: 359 - DNA, 862 bp, Homo sapiens
gattttcatgatgaggaatgggttggaaagctggcctacttatcagatatattttcacttataaatgaattaaatttaagtctccaaggaactttgactactttcttcaatttgtgtaataaaattgatgtatttaagagaaagttaaaaatgtggttgaagcgcacacaagagaatgattatgacatgttcccttcattttctgaattctcaaattcatcaggcttaaatatgacagacatcacaaggattatttttgagcacctggaaggactttctcaagtgttcagtgactgttttccaccagaacaagacttgcgttcaggaaatttgtggataattcacccttttatgaatcaccaaaataataatctcaccgacttcgaagaagaaaagctaacagagctatcttcagatttaggattacaagcactatttaaatcagtgtctgtaactcagttttggataaatgcaaagacaagttacccagaactccatgaaagggcaatgaaatttttattacccttttcaactgtttatttatgtgatgctgccttttcagctttgactgagtcaaaacaaaaaaatctgttgggttctggccctgccctaagacttgcagtcacatctttaattccaaggatagaaaaattagtgaaggagaaagagtagcaatatgcacattgcttaacagtgaagtcaataatcctgtgttaagttttgtataagtatcctaaaagataatttcctaatgtggatttgtgttttcagtgattaaatgttttaataattaaaaaaaaaaaaaaaaaaaaaaaaaaaaaaaaaaaaaaaaaaaaaaaaaaaaaaaaaaaaaaaaaaaaaa

SEQ ID NO: 360 - DNA, 2658 bp, Homo sapiens
  misc_feature (23)..(23): n equals a,t,g, or c
  misc_feature (27)..(27): n equals a,t,g, or c
  misc_feature (32)..(32): n equals a,t,g, or c
  misc_feature (889)..(889): n equals a,t,g, or c
caactggtacaacacggtccatnatancgacnccatgtgcggattcgcttacgcgcgagaagacgacagaagggggaggcggaggcagaggtggaggcgctttgaaagaagcttaagtgaaaatgatacatgttagaagacatgaaacaaggagaaattctaagagtcacgtgcctgagcagaaatctcgagttgattggaggcgaactaaaagaagtagtatctcacaattacttgatagtgatgaagagcttgatagtgaagaatttgatagtgatgaagagcttgatagtgatgaaagttttgaaaatgatgaagagcttgatagtaacaagggacctgattgtmataaaacaccaggaagtgaaagagagctcaacttaagtaaaattcamagtgaaggaaatgacagtaagtgtctcattaactctggcaacggttcaacatatgaagaagaaacgaacaaaatcaaacataggaatattgacttacaagatcaggaaaaacatttaagtcaagaggataatgatctcaacaaacaaactggacaaataatagaggatgatcaggaaaaacatttaagtcaagaggataatgatctcaacaaacaaactggacaaataatagaggatgatttagaagaagaagacatcaagcgaggaaaaagaaaaaggctatcctctgtgatgtgtgacagtgatgagagtgatgacagcgatatcctagttagaaaagtaggtgttaaacgtccccgtagagtggttgaagatgaaggttcttcagtggaaatggagcaaaagactcctgaaaaaacattagctgcacaaaagcgagaaaaacttcagaagytcaaagaactytcaaaacaaagatctcgtcagagacgcantagtggtagagattttgaggactcygaaaaggaatcttgcccaagcagtgatgaagttgatgaggaggaagaagaggataattatgaatctgatgaagatggagatgattatattatcgatgactttgtagtgcaagatgaggagggtgatgaagagaataaaarccamcaaggagaaaaattgactacatcacaactgaaattagtaaaacagaattctctttattcttttagtgaccactatactcattttgaaagagttgtgaaggctcttctgatcaacgctttagatgaatcttttctgggaacattatatgatggcacaaggcaaaaatcatatgcaaaagatatgctaacatctcttcattatttggataaccgctttgttcagcctcgtctagagagcttggtatctagaagtcgttggaaagagcaatataaggagcgagtagaaaattattctaatgtaagtattcatttgaagaatcctgaaaactgttcctgccaggcttgtggactgcatcgctactgtaaatattcagtgcatttatcaggagagttgtataacaccaggaccatgcaaatagataatttcatgtcacatgataaacaggtgttcactgttggcagaatttgtgccagccgtaccagaatttatcataaactgaaacattttaaattcaaactataccaggaatgttgcaccattgcaatgacagaagaagttgaagatgaacaagttaaagaaacagtggaaagaattttcaggcggtcaaaagaaaatggctggattaaggagaaatatggtcaacttgaagaatatctcaattttgcggattactttcaagaagagaagtttgagttgtaacacatttccatcagagaagattttttaaattcctgtaaatgtgaagatcatgattcttgtttttctgtatcatgtgacatgtttgtacattttatctatatcttcatggcaaaatattttgtttaaaacatgattatcttaattcctgtgaagtggcactctacactctaattaaacttttatctgatgtacataaaagcattatcttaatttttaagtctgtaaatatattttaaagttatataataatggctttataacagatgactgtcaagtgaatgagctgttgatatcctgtcagtttagtcaaaatatattgtatcttaaaaatgtatttagactaacgtctacatgtatttttacggaattcctgtccagatctgtttattcttttacagtattaaatgattttcactaatatattttttactgctatcatctaaatcagtgggccatggaagaaacctcatatatcattcagttcaatcccattgcttcagaatcagatcatagcatatctattctaagtagaggaatgcttttttccttttcttgaaagtttctctttcaaatagatttcaggcctctagagtctttcaaccctcacattcaggaataattttatgtaaattttcatgctttataatgttcttacttttttctattcaattttgtctatatattgatgattaagatgtattttatttatttttatccatagctttttccatataagtatgtatcttagggtcagaactgctgaaagagacaaactcagccaaaaacacttggaaagcatattttggtatctgcattgctttgcatatctaaattttcccataaagtaataaagtaaaatggttgcagagtgaamaaaaaaaaaaaaaaaaaaaaaaaaaaa

SEQ ID NO: 361 - DNA, 1000 bp, Homo sapiens
gttacctcccgcagccgcagccgccgtgctcagcgcgagccccggagcccttgagcgcgaggcgcggagcccccggagcccccaaaccgcagacacatccccgcgccccagagccccggcctgcgcgcccagccgggcccgcgcgatgccctcagaccggcctttcaagcagcggcggagcttcgccgaccgctgtaaggaggtacagcagatccgcgaccagcaccccagcaaaatcccggtgatcatcgagcgctacaagggtgagaagcagctgcccgtcctggacaagaccaagtttttggtcccggaccatgtcaacatgagcgagttggtcaagatcatccggcgccgcctgcagctgaaccccacgcaggccttcttcctgctggtgaaccagcacagcatggtgagtgtgtccacgcccatcgcggacatctacgagcaggagaaagacgaggacggcttcctctatatggtctacgcctcccaggaaaccttcggcttctgagccagcagtaggggggctcggcctgggagtcggggggccccggtcaggccctgcccagagagctcctggttcctgaactgagctgcctctaccgtggtgggctgggcaggcatgtgcccccctagtcagagggcaccaacccacctactctgcccctgggtggatcctgggccggtcgtgttagggttgtccctctgggtgctggctggtgggatgggggagggtggggagcagctcccagcacccctgctgtgtggttcatcttttttttaggcccctgcctgtctgcccatctgcccctcacccacccgaggctytgcccaccgcctggacctgcccacccctgaaagactggcccctggctccccgcccctcggtctccacgtggtgtatggatctgtggtcattgtccctctgcagaataaagattgctcaggcctgcctggcaaaaaaaaaaaaaaaaaaaaaaaaaaaaaaaaaaaaaaaaaa

SEQ ID NO: 362 - DNA, 575 bp, Homo sapiens
gcagaaaggcttccagatgctggcggatccccgctccttcgactccaacgccttcacgcttctcctccgggcggcattccagagtctgctggacgcccaggcggacgaggccgtgttagatcatccagacttgaaacatatcgacccagtggttttaaaacattgtcatgcagcagctgcaacttacatactagaggcaggaaagcaccgagctgacaagtcaactctaagcacttatctagaagactgtaaatttgacagagagcgaatagaactgttttgcacrgaatatcagaataataagaattccctagaaatcctactgggaaggtaggtactgtataaggtgtcaagctgaggcacttttcacttgcaggtatgaatggagagtgttggtgtgaaacaagatcttcgggatcttgacccaargaaaaggagccaaagggcatgtcaagcaattgaagttaagctcatgtttttaaagatcgkttattgagatgattttgaaatgctcctttaccattcataatttaaaaataaagtttaacaatggtttaattcagaatggattaaaa

SEQ ID NO: 363 - DNA, 948 bp, Homo sapiens
ttttttttttttttttttttttttttttttttttttcacatgtgtaacatttattatattaatacttaacaaagccctccaagacccaggctccccctaccccctaccttgggccacgtcttcatcttagtctttggagagaaagctctgaagtcaagtggtgagttttccagaacaagtggaggggcacagggaaggctctgagcaccaccttccccagaacacctcaagctctgccctggccccaggaatagaggtttctgccattcctgaaggtagagaaggtctgggatctgctcatcagtttgtaaacaaatgattcttctccttgacacattctgttctctgctctggccaaagctctgggccctgagacccagtgagatcctggtagctgtccaggctgagagggaggcagcctgcagcctcrtctgtcaccaggtccccttggagttgggaacaccgacgtcctgagacttagtaagaagagtctgaggggctactcctctctccccgtggccccagttactgggtgttctcgtatttcaggtatctaatcagcctgcctgggagcggcaaggtgtctaggagttttatacggtatttcccaatggcctttcgaacccgcagtcggcaaaggtgagccagaggtcttggaggttctgccttctccttgatgacggcccagtcctcaaagctgtcgatgtgttccttcagccgcgagcagagctgcacgttgcccacgtagtccaggaggacatcgatgatgggccccgcccagcggctcacctctggggcagatacgaactcacagaactgcaccacgctgggctccttgtcggccgcgggcgcgtcgttgaacctgctggagggctgcggggccggcgggtgcgggccgttgccgtagaggcatgagaagcagggctcgccgtcgcagcccaggtccac

SEQ ID NO: 364 - DNA, 3280 bp, Homo sapiens
  misc_feature (3262)..(3262): n equals a,t,g, or c
  misc_feature (3280)..(3280): n equals a,t,g, or c
gcaaagttggcatgaaattagaaggcgtggatcccgagcatcagtctgtgtactgtgtcctcaccgtcgcggaggtttgtggataccggataaagcttcactttgatgggtattctgattgctatgacttctgggtgaatgcagacgctctggatatccacccagttgggtggtgtgagaaaaccggccacaaactccatcctccaaaagggtataaagaagaagaattcaattggcagacctatcttaagacatgtaaagctcaagctgctcctaagtcattatttgaaaatcagaatataacagtgatcccatcgggctttcgagttggtatgaagcttgaggcagtagacaaaaagaatccctcattcatctgtgttgctacggtaacagatatggtggacaatcgtttcctggtacattttgacaactgggatgagagctatgactattggtgtgaagcatcaagtccacatattcatccagttggttggtgtaaggaacatagaagaacccttattactccaccaggttatccaaatgtgaaacatttttcttgggataaatacttagaagaaaccaattctttacctgctcctgcaagagctttcaaagtgaaacctcctgcatggattccagaaaaaaatgaagcttgaggttgtagacaaaaggaaccctatgtttattagagtagcaactgtggcagacacagatgatcaccgggtaaaagttcactttgatggctggaacaattgctatgattactggatagatgcagattctcctgatattcaccctgtaggctggtgttcaaaaacaggacatccccttcagcctcctttgagccccttagaattaatggaagcttcagaacatggtggatgctcaaccccgggatgtaaagggattggccatttcaagagagcgagacatctgggccctcacagtgctgccaactgtccctattcagaaatcaatttgaataaagaccgtatttttccagaccgcttaagtggtgagatgcctccggctagtccgtcatttccaagaaataaaaggacagatgcaaatgaaagctcttcttcccctgaaatcagagaccagcatgctgatgatgtcaaagaagactttgaagagagaacagaaagtgaaatgagaacatcacatgaagccagaggtgcccgggaagaacccaccgtccagcaggcacagcgtcggtcagctgtctttctgtcctttaagtccccaattccatgtctgcccttgcgctgggagcagcaaagcaaacttcttccaactgtcgcaggaatccctgccagtaaagtttccaaatggagcacagacgaggtgtcagaatttatacagagcttacctgggtgtgaagaacatggaaaggtatttaaagatgaacaaattgatggagaagcatttctacttatgactcaaacagacattgttaaaattatgagcattaaactgggccctgctctcaaaattttcaattccatcctgatgttcaaagctgcagagaagaattctcacaatgaactttgaagatggtgaattctgaataccatcagcattctgctttaaagctcatgttttattcaaagcacaaggacggttataactcctaagtgagaagtctccaaaactcaaaagagcaacactatcggattatttatattactcaagagacaatatatatgaattcttatgaaagtgcttgagcttttaaccaggtactgtctaacaacagtcatcttttggttctgttcactgagctaaatttatctttgtaaatctttttgagtctggggggtggggggaaggggggcttcattaattatttatggtaatggggggcagagtaagaacttttggcattttgtaaacattgttgaattctctttcatgtacactgtttctttttcaatactttcagaaacctttttatataatcaaatttcaatttaaaccaaattagtcgaaacctggctaagtttagccagtaggactgttatctgtattgttaattttgtgccatattttgaattgcaacattatgctaagtataactttgcaagtcatgatattgcctaactgcttgtcataattgtcagggctgaatagttgtaagaatgacttttctttgaatcagtatttttccttttgcacgcattatgaaatgttaaacaaattacttttcaccagcatctttactataattaccaaaaacatgtatataaaagaatgaaattgaaaaataaaatatataaacataaawaaattaggtagtgtattttgagtggcatcagtctcactcatcttggtgccccggtgtttacaagagccagatggtgtcagaggagtacgcagttgtatgcagttatggttggggggaatgtttgtgagggtcttgaactatttatgagatgatcttgagcttctaattttcattgatgaaattgtggtggtttacagagactaagagctcattctgtcaacagaaacactaatctgtacagagcgctgtctcaggtcatgcattgtcctccaaacccaaaggtttttttcagggttggctagagagcgagtattgtgattttgctgaaaagacaaggtgtgaaggagcaacttcagttgacacaaaatttgaaatgctcacagatcagggaggtgatttcccaargtaatgcccaagacctccgttttggaaggatcccttttctgtagaatacttkgcctcgatatataagcatacagatgcactttaaatgaaaacccttgattataaattgatagctggtagtgtttcttttgcaagaatgcatttctaaggcaaaaggtaaattattttgtccgtcttttgatgtactttctgattccaggattggatatttattcaaggactattttaaaaatagaaagtaagtttgtagcatgctgtctgaattctggggtaagttccacctcttctttagttgctttcgttttttatgatgtaggacttcctttgatatccctgttggaagtccattagcagtcctttgcatttgccaattcaaggtaaaacagggtcagtgacatctgcagtgtcccagtcatttatttgcatgaatctgcttaaataagttttttgttgctgttttttcttttttatgttttgttcagaatttgtacattcaagttgtacttgttatatctgacatgaatgaaataaaatcttaattacaaaaaaaaaaaaaaaaaaaaaaaaaanggggggcccttttaaaan

SEQ ID NO: 365 - DNA, 575 bp, Homo sapiens
  misc_feature (268)..(268): n equals a,t,g, or c
aattcggcacgagggtaggggatggttatcatatgttgtttgggggcccccaggacccagcccttccaggcccagcttccgaacctgagtgccaaattgctggctttcccttctaccctctccactcctccagtgtccgagttggagagtgctctgcagatggagccagctgccttccaggctttatattctgctgagaagccaaagctggaagatgagcatctcgttttcttctgtcagatgggcaagcggggcctccaggccacgnagctggcccggagtcttggatacactgggtacggggaggtgtggctgctagctgggaggtgatggggactgcctgtcattcctgtcartctytcamgsttytttgtctccacagggctcgcaactacgctggagcctatagagaatggttggagaaagagagttaggcaggaggcagcttactgattgccaccccctggccccttaatggccaccttaactaagggtgtgaacgggctgacttggtgaattgggcaactccttatagtgttgtgcacacaaaagcatcaaataaagaacatttaatc

SEQ ID NO: 366 - DNA, 1835 bp, Homo sapiens
ttggccctcctaacggccgccagtgtgctggaatttcgagcggccgccgggcaggtaccaaataagcttcacagaagaacatgaaaattttccyccaacttttttttctttttttttttcaagcagagcctttcacttagggaccaactgcttgtagatgaaataaatcaacattaattacttctagcctgatgtaatatggctggagaaaaggggtctctggaagccggtattttgtttaacttacattctaggtgtgtatataagttgtcgctctataacttctgctgtggttccaacatctatatctgaaaggtggaagcagctgctctgttacaattttcatgtaacacgcttggattctaggtctttcctctttaacacaacttaaagaaagtttcttgtggtttggtcagcatacacacttctcatttcatttgatgtacacagccaaagtgggaattaaaaaaaaaaaattaccaactagttcagagagctaaattgagtctatcattatggcaaagtctgacccaaaattttaatttgtaattttagcatgtgtctcatgcactttggggagcgtcaaactaaatctacaattgccagaagccttgttacagtttaatgcacattaactaaaatgtgtacatttttagtgttcatgataaatgcagttatgaccttattacacttttggcattctttaagaaagcacattaagctttaatatagaaatatttaggttacacttgtgctcaagtaataataaaacatttgttcttttttgatctcatacattctctcctcaggtatggcccatctcctgtacgcttggagcgacctttggctacgtggctggccttgttatttcaccactctggatatactggaatagaaagcaacttacatacaagaacaattaactggagcaaagggagatatttctttgtgcagattctgtaagggctgggcagaaatgtgtatggtcaaagccaagcagttccatttacagctctgttttttacgtagttacaacatgatgtgattgtagctttttaaactatgaaacccctgagagattgtaccttctagttgaaataaagtatttataatagattgtggcttcagatgctgcttactgcttcttaaacctttaaggaacattcttaatacactttatagaattctgaggacaggttttgttttctttcaagttttgaactgcttcattacctataaaaggtctgggtatagctgtagcatttcatttgctttctgagagaaatggacagtttccttggccactgaagatgtttctcacgtaattaaacaacagtttatacatcttgatcctattcttttttttacagtgtgtttctttggagttaaaatggctatgatagcctcatcaaaaacagtcttcaatcccttctgggttaaagctgaacattccacatagcagcatgctcctatctcttttgctagtttctgtccttgttccacacatataggtttttctttcatatcattcagtcttgctaaagttttggggtcatctcggagatcaatctgagttcctattaataaaaagggtacatttggtgcgtattccttaagttccggtacccactcctctttcacattttgaaatgaggctggatttaccaccgagaagcatataaggaagacatcggtcattgggtaagataaaggcctcagacggtcatagtcttccttctgtgccgttaaggcctttgttggttgtcctcaggactcagtaggtctccttcaactgtgactgagcagtccctgcaggcctaggctttacgttgctc

SEQ ID NO: 367 - DNA, 707 bp, Homo sapiens
  misc_feature (23)..(23): n equals a,t,g, or c
  misc_feature (27)..(27): n equals a,t,g, or c
  misc_feature (625)..(625): n equals a,t,g, or c
  misc_feature (688)..(688): n equals a,t,g, or c
  misc_feature (696)..(696): n equals a,t,g, or c
  misc_feature (698)..(698): n equals a,t,g, or c
gggcaggcggatcacgaagtcangagntcgagaccagcctggccaacatagtgaaaccccatctctactaaaaatacaaaaattagtcgggcatggtggtgggcgcctttagtcccagctactcgggaggcggaggttgtggtgagccaagatcatgccactgcactccagcctgggcaacgagcgaaactccatccccccaaaaaaaaaaaaagaaaaaaagaaaacaaaaaaaaggaaaaagtctagaaccaacccaaagacccagccagtgagaatgggtgaagtatgatataaccacactgtgtaatgttattcagcagtgaaaatctatgaaccacagtgacctacagtgtggagttctcttcttcatataatgctgagagaagacaatatatatcatgatgtactatgaataaagktcataaacaacaaaaacattcactattgkttaggcaatttataaaatttttaagctaattttaattacatattttactgscagaaaacctagtttttaaagacaaggaaattataaacccagagattcttatcgcaagggaagagaagggtacacggtcggatgagcccattcagcattctggctgccgtgtggctgctagtnccagatgtcactaagtcattaccatttatttactttttaagcatgaaattacaccctgcaagntgcatcgnantatgccaga

SEQ ID NO: 368 - DNA, 514 bp, Homo sapiens
gcggttcccttctacttcttttcttttctttctggtgaccctggcagtgtaaaactgccacctctttaggtttctgtagagccaaaaataatctcctaatgtcttcctgatgtttgataggtattccctcggaagttaggaattccctttctctccatattgttgcatgggcatggagagttaggtaagcatacttagagtctttatatatatttaccctttttccttctcctaattctagtgtataacggcccctgcttttcctaggatgtctctccctaacaaaggagtggggctttcaggcataattagaaagacakgtgaaaagagtaaagttcgccagtcacaacttastggctgggagaagtatatagtgactgcctgtcctaggatcccctcagatagtgacagatctggaggacagttgtccaggacaggagagtaagactgagacagctgcgccagtgtccaggagacagttaacctcctggccctcaatgatcaagcatacccg

SEQ ID NO: 369 - DNA, 617 bp, Homo sapiens
caaaagctggagctccaccgcggaggcggccgctctagaactagtggatyccccgggctgcaggaattcggcacgagcagtaataaaagattgktattgycttcttaactaacttttcacatgattatcttttccacaatctcagaaatccaggaattgaaagaatctcaaaagtcttccactctatttttatggggaagtaggagaccaagaaaactgttttacctagaattatacaactgagatcaatcgtsattatttttaaaggatcttgaaactttataagattaaaagggatgccaatggtgtggagtaaaaagatcctggacttaggagttaggcatcggccgggagctgtggctcatgcctgtgatcccagcactctgggagacctaagcaggtggatcacttgaggccaggagttcaagaccagcctggcaacagggagaaacctcatctccatgaaaaatgtaaaaattagccagatgtgatggtataagttcgaattctgggttgctcggtccctaggtaattgagktatctaatctcctgagcccaaawttctycagatgtaaaatgggaattttaatggccagaagttgcagkaatggcatgag

SEQ ID NO: 370 - DNA, 773 bp, Homo sapiens
  misc_feature (717)..(717): n equals a,t,g, or c
  misc_feature (734)..(734): n equals a,t,g, or c
  misc_feature (772)..(772): n equals a,t,g, or c
gatttcctcgcgttataacgaatcggcgtctaagggtttaagtgtcacttgacattactgctcccacgtgttctttcccatctggcggccgcggctcctgtccagaccctgaccctccctcccaaggctcaaccgtcccccaacaaccgccagccttgtactgatgtcggctgcgagagcctgtgcttaagtaagaatcaggccttattggagacattcaagcaaaggttggacaactacttttccagaacagaaaggaaactcatgcatcagaaaaggtgactaataaaggtaccagaagaatatggctgcacaaataccagaatctgatcagataaaacagtttaaggaatttctggggacctacaataaacttacagagacctgctttttggactgtgttaaagacttcacaacaagagaagtaaaacctgaagagaccacctgttcagaacattgcttacagaaatatttaaaaatgacacaaagaatatccatgagatttcaggaatatcatattcagcagaatgaagccctggcagccaaagcaggactccttggccaaccacgatagagaagtcctgatggatgaacttttgatgaaagattgccaacagctgctttattggaaatgaggactcatctgatagaatcccctgaaagcagtagccaccatgttcaaccatctgtcatgactgtttggcaaatggaaaccgntggagaaacaaaattgntatttaccaggaataatcacaatagaagggcttattgnt

SEQ ID NO: 371 - DNA, 1761 bp, Homo sapiens
gcactaccgcatcaagcacaataatgtccgagcccagccagaaggcaagaacaacctcttcaagtgtgcttcactgcgaattctgtgaattctcctccggctacatccagagcatcaggcgtcattaccgggacaagcatggtgggaagaagcttttcaagtgcaaagactgctccttttacacaggctttaaatctgcttttactatgcacgtggaagctgggcactcagcagttcccgaggagggccccaaagatcttcgctgtcctctctgcctctatcacaccaaatacaagcgcaacatgattgaccacatcgtgctgcaccgagaagagcgtgttgtccccattgaagtttgccggtccaaactgtccaaatacttgcagggagtagttttccgctgtgataagtgtaccttcacctgctccagtgatgagagcctycagcaacatatagaaaagcacaatgaactgaaaccttacaaatgccagctctgctactatgagaccaagcacacggaggaactggacagccaccttcgggatgagcataaggtaagccgtaactttgagctggttggacgggttaacttggatcagctggaacagatgaaggagaaaatggagagctccagcagcgatgatgaggacaaggaagaagaaatgaacagcaaggctgaagacagagagctgatgagattttctgaccacggggctgctcttaacactgagaagcgttttccatgtgaattttgtggacgggcgttttcacagggctctgagtgggaaagacatgtgctgagacacggcatggcattgaatgacaccaagcaggtgagcagagaagaaatccwcccaaaagagatcatggagaacagtgttaaaatgccctccatagaggaaaaggaagatgacgaggccattgggatagacttttccctaaagaatgaaacagtagccatctgtgtagtaactgccgacaaatctctcctggagaatgcagaggccaaaaaagaatgagcgtttggtgaaattcttaatcaaaccttacttgaacagtgatgaaaaagtgggagggctggcttgggctgagaagggagggacagaaaagagaagacagaacaaagctgctttttaggactgaacaatctattttcaaagcactggtacctgtgtgagtgagtatgtaaattaaagttatttaaatggttggaatatgtggctccttttccatcactacatcttttcttccggatcttcatcatggaagtttcatttgttgcggaatatggaagcacctcccaatggtacggtgcaccctgtggtggtcttggacagtatgtggaaacagaagctccatgacggtagaagacttctcattggggagcaactttttgacgcacaacttttggtgcgtttttctagttttaataccttaagctttttcaagacctaactgcagccgctttgggaaaaaaaaacaaaaaacaaaaaacagaaaacaaaaaaaaaaaaactgctttgcataaaacagtcacctgtttcctagtacctcaaacttaaccaagggaactctctgcatttgtcagtactacctgtcgtcgttgtggttaaatgtagagagaactgctgggcaagatggtgaatggagaaaaaaaaagagttttaaagaaaggaacacaaattgtgcttaaaatccccatgtgggttttatttcttaaaatactgtgatttttttaattattttagtaaaaaacaaaaa

SEQ ID NO: 372 - DNA, 588 bp, Homo sapiens
ccgccgaccacgcttgatccccggccgcggggccaggaagtcggagtttgagccccggaggcagagcggctgccatggccaagtacctggcccagatcattgtgatgggcgtgcaggtggtgggcagggcctttgcacgggccttgcggcaggagtttgcagccagccgggccgcagctgatgcccgaggacgcgctggacaccggtctgcagccgcttccaacctctccggcctcagcctccaggaggcacagcagattctcaacgtgtccaagctgagccctgaggaggtccagaagaactatgaacacttatttaaggtgaatgataaatccgtgggtggctccttctacctgcagtcaaaggtggtccgcgcaaaggagcgcctggatgaggaactcaaaatccaggcccaggaggacagagaaaaagggcagatgccccatacgtgactgctcggctccccccgcccaccccgccgcctctaatttatagcttggtaataaatttcttttctgcaaaaaaaaaaaaaaaaaaaaaaaaaaaaaaaaaactcgagggggggcccggtacccaattcgccgtata

SEQ ID NO: 373 - DNA, 1334 bp, Homo sapiens
  misc_feature (47)..(47): n equals a,t,g, or c
  misc_feature (1073)..(1073): n equals a,t,g, or c
  misc_feature (1237)..(1237): n equals a,t,g, or c
  misc_feature (1321)..(1321): n equals a,t,g, or c
cgggctgcaggaattcattgacgacgacaagttaactgtcgacccanggcttgccgtttgacgaggagcagtcgcggtaggcggtgggcaaggctgccctgggccggaggccgaggcgcggctcggactccagcatggcgaccgcggtgcgcgctgtgggctgcctccccgtgctgtgtagcgggacggcaggtcatttattggggaggcagtgttccctaaacaccttaccagcagcttccattttggcatggaagagtgttctcggcaatggccatttgtcatcactgggaaccagagacacccatccctacgccagcttgagccgtgcactgcagacacaatgctgtatttcttctcccagtcacctgatgagccagcagtatagaccatatagtttcttcactaaattgactgcagatgagctgtggaaaggcgctttagcagagactggtgctggagcaaaaaaaggaagaggcaaaagaactaaaaagaagaaaagaaaggatctgaacaggggtcagatcattggtgaagggcgttatggttttctatggcccggactgaatgtccctcttatgaaaaatggagcagtgcagaccattgcccaaagaagcaaggaagagcaggagaaggtggaggcagacatgatccagcagagagaagagtgggaccgaaagaagaagatgaaggttaaacgggagcgaggatggagtggaaactcatggggaggcatcagtcttggcccccctgaccctggtccctgtggagaaacatatgaggattttgataccaggatacttgaggtaagaaacgttttcactatgactgcgaaagagggaagaaagaaatcgatccgtgtcttggtggctgtggggaacggaaaaggagctgcaggtttttctattgggaaagctactgatcggatggatgctttcaggaaagcaaagaacagagcagttcaccatttgcattatatagaacgatatgaagaccatacaatattccatgatatttcattaagatttaaaaggacgcatatcaagatgaagaaacaacccaaaggttacggnctccgctgccacagggccatcatcaccatctgccggctcattggcatcaaagacatgtatgccaaggtctctgggtccattaatatgctmagcctyacccagggcctcttccgtgggctctycagacaggaaacccatcaacagctgctgataagaarggcctncatgttgkggaaatccgggaggaatgtggscctytgccattgkgggtgcgtccccccgggggcccttgaggaaggatccaaccngaagatgaagttc

SEQ ID NO: 374 - DNA, 771 bp, Homo sapiens
ggcacgagcaagagcactggccaagtcagcttcttctgagagagtctctagaagacatgatgctacactcagctttgggtctctgcctcttactcgtcacagtttcttccaaccttgccattgcaataaaaaaggaaaagaggcctcctcagacactctcaagaggatggggagatgacatcacttgggtacaaacttatgaagaaggtctcttttatgctcaaaaaagtaagaagccattaatggttattcatcacctggaggattgtcaatactctcaagcactaaagaaagtatttgcccaaaatgaagaaatacaagaaatggctcagaataagttcatcatgctaaaccttatgcatgaaaccactgataagaatttatcacctgatgggcaatatgtgcctagaatcatgtttgtagacccttctttaacagttagagctgacatagctggaagatactctaacagattgtacacatatgagcctcgggatttacccctattgatagaaaacatgaagaaagcattaagacttattcagtcagagctataagagatgatagaaaaaagccttcacttcaaagaagtcaaatttcatgaagaaaacctctggcacattgacaaatactaaatgtgcaagtatatagattttgtaatattactatttagtttttttaatgtgtttgcaatagtcttattaaaataaatgttttttaaaaaaaaaaaatttactaagaggggcgcccgtacccaagatgggggggaac

SEQ ID NO: 375 - DNA, 833 bp, Homo sapiens
gagctgccccgtccaggttcatgttcctcttatttctcctcacgtgtgagctggctgcagaagttgctgcagaagttgagaaatcctcagatggtcctggtgctgcccaggaacccacgtggctcacagatgtcccagctgccatggaattcattgctgccactgaggtggctgtcataggcttcttccaggatttagaaataccagcagtgcccatactccatagcatggtgcaaaaattcccaggcgtgtcatttgggatcagcactgattctgaggttctgacacactacaacatcactgggaacaccatctgcctctttcgcctggtagacaatgaacaactgaatttagaggacgaagacattgaaagcattgatgccaccaaattgagccgtttcattgagatcaacagcctccacatggtgacagagtacaaccctgtgactgtgattgggttattcaacagcgtaattcagattcatctcctcctgataatgaacaaggcctccccagagtatgaagagaacatgcacagataccagaaggcagccaagctcttccaggggaagattctctttattctggtggacagtggtatgaaagaaaatgggaaggtgatatcatttttcaaactaaaggagtctcmactgccagctttggmaatttaccagactctagatgacgagtgggatacactgcccacagcagaagtttccgtagarcatgtgcaaaacttttgtgatggattctaagtggraaattgttgaaagaaaatcgtgaatcaggaagggggaaaagggactcccaaaaaggggttgggggaaaaacct

SEQ ID NO: 376 - DNA, 2584 bp, Homo sapiens
ccaactctagatgatccagagttagttataaaatagatgattgcatctaagtccaagaatggatgtcataggaaatatgtttttgtcgagatgactattttattattgtagtttgtcaatttttcttacagatgctgagactcttggtgaatctctcttgggtcttacggtctacgggagtaatgatcaagatccttacgttactctgaaagatacagaacaatatgaacgtgaagatttcttgattaagcccagtgataatcttatagtttgtggccgagctgaacaggaccagtgcaatttagaggtgcatgtttataatcaagaagaagactctttttatgtacaccatgatatactcttgtctgcatatcctctgagtgtggaatggctgaattttgatcctagcccagatgattctactggaaattacattgctgtaggaaacatgacccctgttattgaagtgtgggaccttgatatagtggactctttagagccagtcttcacactcggaagtaaactttcaaaaaagaagaaaaagaaaggaaagaagagttcctcagcagaagggcataccgatgctgtccttgacctttcatggaataagctaatcagaaatgttttagcaagtgcatcagctgacaacactgtaattctgtgggatatgtccttggggaaaccagcagctagcctcgctgtacacacagacaaggtccaaacactgcagtttcatccatttgaagcacagactctgatttctggctcatatgataagtcagtggctttgtatgactgccgaagtccagatgaaagccatcgaatgtggcgattcagtgggcagatagagagagtgacttggaatcacttttcaccttgtcatttcttggccagtacagatgacggctttgtatataatttggatgcacgttcagataagccaatttttacacttaatgcacacaatgatgaaatctctggtcttgatcttagcagtcaaatcaagggctgtctcgtgactgcttcagctgacaaatacgtgaagatctgggacatcttaggagataggccaagtctagttcattctagggacatgaaaatgggagttctcttctgttcttcatgttgccctgatttgccatttatttatgcctttggaggtcaaaaagaagggcttcgggtctgggatataagcacagtctcttcagtaaatgaagcatttggaagacgagagaggcttgttcttgggagtgcaagaaattcatctattagtggcccttttggcagcaggagctcagatacacccatggagtcttaatgaagatcatctaatttcctgcttaccttaactgggaattttaaaaagttggcctaaaaatgttccatgcgtggcagcaaccatgcagagtgactgaaacacaattcatttctgactgacattcctttctgcaactgcggtggcaccacaaatatccggtctttgtgcttgctcttcagatggatggtttgtaaggctcttgttgcatttcttaaaaaagagtaataaaaaggatttttaaaaagtaattccttaaacataccatctgtcacagttaatctagatttgtaaataggtagtaatttatagaatttttaaagcgtaaaatccggtaatattaaaagataggtaaacctaggcctggaaaggctgttatttggctaaaattgcacaggaggccatgaacagaggcaagtgccccagagactccactttcattcctaactgttctcaaattaatgctcatgattgagtattctcagtgcaactcgtagagtttgataagtaaaagttacatgcccctgttttcctagcatgatattcactgttatcaaagacaagaggcagaccattcattcattctcaaaacactgaatgccattctgtgcctagtgctatacaaggcatgggagattcagtgtgaataagtctttgctctccacctaacaagggacagttttaattatagattgtcttcctattaagtatgagttttagtaggcattaaaaatcgtaattagtttgataatatgagacccaaccctaacttgccagaagagtaatcagttcatgaaccattgatatttcctgtatatttcatgaatgtgacttcagtcattctagtgttaatactgtggaatgtcattggtgtagcaacgtgggttcaccaaaacacctttttatacaaaagacagatgygtgaattaaagagattaaaggatagagtattctgtttctttgttttgatttggcttttaggtattaaaataaggcccagatcactaaaaattagtaacagagggagacctctaatagatttaaagtcagttaattctctctgaaatttgatgttttcttctataaagaataactctaaaataggcatcttcccaggactttccattctcaggaaaagacctagttacgtataaaaaataacttctactgctttatgtagtcatataggtctgcctaaaataagaatttgtatttaataaataccaaaattttcaaatggtaaaaaaaaaaaaaaaaaaaagggggggc

SEQ ID NO: 377 - DNA, 4098 bp, Homo sapiens
caaagtgaatgatgtggttccatgggtgttggatgtgattttaaataaacatatcatcagccccaacccacacgtgaggcaagcagcctgcatctggctcctttcccttgtcaggaagctaagtacccacaaagaagtgaagtctcatcttaaagaaattcaaagtgcatttgtttcagttctatcagaaaatgatgaacttagccaagatgttgcatcaaagggscttgggttggtttatgaactaggcaatgaacaagatcaacaggaattggtttctacacttgtggaaacacttatgactggcaaaagagttaaacatgaagtttctggagagacagtggtatttcaagggggagctcttggcaaaacaccagatggtcagggcctttctacttacaaggaactttgttctctggcaagtgatcttagccagccagatctggtgtataaatttatgaatttagccaaccatcatgcaatgtggaactctaggaagggtgctgcttttggttttaatgtaattgctaccagagctggagagcagctggctccttttctgcctcagctagttcctcgactttatcgttaccagtttgatcccaaccttggcattcgacaggccatgacaagtatttggaatgcgttggtcactgacaaatccatggtggataaatatttgaaagaaawtcytcaaratttggttaaraaccttacaagcaatatktggcgarttcsaraatccagctgtttagctttgaatgatttattgagaggaagacccttagatgacatcattgataaacttccagaaatttgggaaacgctttttagagtacaagatgatatcaaggaatctgtacgaaaagcggcagaactagctctgaaaactctgagcaaggtctgtgtgaaaatgtgtgaccctgccaaaggagcagctggccagagaaccatcgctgcccttctgccttgccttctggacaaaggaatgatgagcaccgtgacggaagttcgagccctcagcattaacacccttgtgaagatcagcaaaagtgcaggagccatgttgaaaccgcatgcaccaaaactcattccagctctgctagagtccttaagtgtattggagccccaagttctcaattatttgagcctccgggcgacagagcaagaaaaggctgcgatggatagtgctcggcttagtgctgccaaatcttctccaatgatggaaacaatcaacatgtgcctgcaataccttgatgtgtcagtgctgggcgagctagttcctaggttgtgtgaactgatcagaagtggtgtaggtcttggaactaagggtggctgtgccagtgtcattgtgtcattaactactcagtgtcctcaggacctaacaccttactcaggtaaacttatgagtgctttgctgagtggcctgacagatcggaacagtgtgattcagaaatcttgtgcatttgctatgggccatttagttcggacctcacgggatagcagcactgaaaaactcctgcagaagctcaatgggtggtatatggagaaagaagaacctatctacaagacctcttgtgctttgactattcatgctattggacgatacagccctgatgtattaaagaatcatgcaaaagaagtcctgcctctggcatttttaggcatgcatgaaattgctgatgaggagaaatccgaaaaagaagaatgtaatttatggaccgaartgkggcaggaaaacgtacctggatcctttggtggcattcgattatacctgcaggagttaattactattacccagaaggctttgcagtctcagtcctggaaaatgaaagcccagggtgcaattgccatggcatcaattgcaaaacagactagctctctagtacctccatatctcggaatgatactgaccgcattgctgcaaggcctggctggaagaacgtgggcaggaaaggaggagctattgaaagccattgcctgtgtggtgacagcttgcagtgcagagctggaaaagtctgtgcccaatcaacccagcacaaatgaaattcttcaagctgttctgaaggaatgtagcaaagagaatgtcaaatacaagattgtagcaatcagctgtgcagctgatatcttgaaggccaccaaagaggacagattccaggagttctctaacattgtcatacctctcatcaagaagaactcacttgaaagcagtggggtccggacaaccaaaaatgaagaggagaatgaaaaggaaaaggagctccagctggaatatctgctgggtgcctttgaaagcctgggcaaagcctggccgcgaaacgcggagacccaacgttgttatcgtcaggagctgtgcaaactgatgtgtgaacggctaaaactcagcacgtggaaagtgcagctaggagtcctgcaatcaatgaatgccttttttcaggggttaatgcttttggaagaagaacatgccgatcctgaggctttggctgaaattctgcttgaaacttgtaaatcaatcacatattctttagaaaataagacctactcatctgtgagaacagaagctttatctgtgatagaattgctgcttaaaaaacttgaagaatctaaacagtgggaatgtttgacatctgaatgcagagtgctcctaattgagtctttagctactatggagccagacagcagacctgaactgcaggagaaagcagcgttactgaagaaaacacttgaaaatctggaataaattagaaggggaagaaacaaacaagtgccatgttcattgggggttgaagtggtggtgttctttgaaaaaccaagtgggaaaaagtaaagattaatctgtagcatgcatcattccttggctgaaataaaaagaaaaagccttaaattttgttccttattagctttattttactttatgtttttaaagtatctgggctgagtgagcttaatggaaccttggatgtttgaggggtggttgtaaaggaaactggcagaaatagttactaaaagagttcaagctgttattaaaggaattaatagacagagttgcagagcaagctggataaaaatcttagaactgcattcaaattagttatttcaggaaggggccctataaataacttattttaacctccctcttacacctgaagaaataggaagctgtgtcatctcagaggctttctgaggcctgtgccaaagtcagaacccaggtgtttaatgtctggccctggatactttcttttatggccatctgccaaatcagtgctaaccccggcttacccaagaaacttccaagatgaggtacgtttagggtggcacacagcagtctttgtgccagaactaaactgacccttaccattgggtttctgaaagccagaagctaaacattgtcttgtcatgtgtttaggtggttgatttggagaaaatgattgtttagcatctttacagatggagaggacagagtcagtctccttcggataattccaatcgtcttccttttacaggtggataaagtagattaggacaagatcacacattctatctgtgtctgtggctgcatattttgcaaaaccagaaacaaaatcgcagactgccgtggtttagaccatttataatgtcaaaactgtaatgacaaatttctgttcacttttatgctaccagtatgactttataggggagaaggaaagccttttaattagccacctgggaattactcttttaaaaaatgccttttctcaaaagaacatgataccactccaagtaaatcattgccactaggggttttcctccttccttctgttgcccatgcccctgcctgaaagtgtagggtaagaggaaaaacaagtaaaaccttagtgttgatggtaaactgagaactctgtagcttaccttggattccagagcagaagactggtttacattcagtactcatccttattgacgttaacaccaggaatctccatgtttattatttttcgtggaaactccatgtttattatttttggtggtctctattgaccaatgtatttcaaacttttttgactgcaagtcataataaaaataactttttacatcacgaaaaaaaaaaaaaaaaaaaat

SEQ ID NO: 378 - DNA, 1084 bp, Homo sapiens
  misc_feature (1047)..(1047): n equals a,t,g, or c
  misc_feature (1069)..(1069): n equals a,t,g, or c
ctgcatcctggggctcaagtgctgtcgggactgcaagggaaacgctgggtggggcattgggctccgagcagcccccgatgggtgacaggtctctctgctagataccacgaggaacccgaggcccggcgaggagaacggcaaaggtgagtggggtggggccctatggctggagcacccccagtgtgggcagggctgctgggccctgcagctgtgttggctgtgctgcccgtctcctgcccccatcaatccctaatctgtgagatgggtccttgcctccaagggccggtgaactcaatcagggtgtcagcgccacagcgtggtgtcgccttccttgggtacagtgtgagaggccggccaaggcctggggctgtcttcctcccaccttggaggcggccacagtgctgctgtccccagccctgtcctggactcggcacttatcagcacttttgagctgtcttctggggtcctggtaaaaagggctactctgcctgcctgattcaagacaagggacccccttcccaacagcacccccgccccttgccgtgcaacccagtggtctccagtcaccccaccacatcgtcccctctgtaacctgacggtctccagttcccccaccaccttcccccagaacctgttggtctccagtccccaycccatcaccaccaactcccaactccccactggaacccagcagtctcgtatctccatcagtgaggacagtgtgagaaatggtgtctggctcaggcacttggcagcacttgaggggtcctcagatgtctcctgcccagcaaggatctgactaaagcagtcrtgggtgtgggaggggcctgcaggcatgcctgggttgggggcagctggccctgggcaccctggtcaggtccagtctgccctctggatggcccctcctcttccccagattactactttgtaaccagggaggtgatgcagcgtgacatagcagccggcgacttcatcgagcatgccgagttctcggggaacctgtatggcacgagcaaggtggcggcakgcgtgggtgtgggtgggctnccagggttgctgttggcaacangggatccaggtagtg

SEQ ID NO: 379 - DNA, 1471 bp, Homo sapiens
cggccgccgcagcccgggccatgccgcacggctgctgaccgcacgcaggggccggccccgaggacacatgcggcggcctttgccgcctcgcccctgaccctctgccctgttctccatgttgcatttctcgtcagtttctcgggcggtgtagctgccgctgccaccagagccggcggggcatcgcgctgctcattcatccggccgcactttcttttccgtttccacccatcccttcccatttccttctccctttccccgccagcttcgcatccatctcccccaccccgtaaccccctcctgcctccatccaccggggctatggccgcagaagaggtattgcagacggtggaccattataagactgagatagagaggctaaccaaggagctcacggagaccacccacgagaagggccgggactcaggggaggaggcccatgactatgaggtggacatcaatggtttagagatccttgaatgcaaatacagggtggcagtaactgaggtgattgatctgaaagctgaaattaaggccttaaaggagaaatataataaatctgtagaaaactacactgatgagaaggccaagtatgagagtaaaatccagatgtatgatgagcaggtgacaagccttgagaagaccaccaaggagagtggtgagaagatggcccacatggagaaggagttgcaaaagatgaccagcatagccaacgaaaatcacagtacccttaatacggcccaggatgagttagtgacattcagtgaggagttagctcagctttaccaccatgtgtgtctatgtaataatgaaactcccaacagggtcatgctggattactataggcagagcagagtcacccgcagtggcagcctgaaagggcccgatgatcccagaggacttttgtccccacgattagccaggcggggtgtgtcatccccggtagaaacaaggacctcatctgaaccagttgcaaaagaaagcacagaggccagcaaagaaccaagtccaactaagacccccacaatctctyctgktattactgccccaccgtcatctycagtattggatacaagtgacatccgcaaagagccaatgaatatctacaaccttaatgccataatccgggaccaaatcaagcatctgcagaaagctgtggaccggtccttgcaactgtytcgtcaaagagcagcggctcgggagctagccccatgattgataaagacaaggaagccttaatggaagagatcctcaagctaaagtccctgctgagcaccaaacgggagcagatcgccacattgagggcggtgttgaaagccaacaagcagacagctgaggtggcgctcktaatctcaagamcaatatgaaaatgaaaaagcaatggtgactgaaaccagtgaggagccttagaatgaactgaaggctttgagaagagatgctgcaactttctcatccctgagagcaatgtttgcac

SEQ ID NO: 380 - DNA, 427 bp, Homo sapiens
  misc_feature (380)..(380): n equals a,t,g, or c
  misc_feature (409)..(409): n equals a,t,g, or c
ctttagggggacccttcctcactaacgggaacaaaagctggagctccaccgcggtggcggccgctctagaactagtggatcccccgggctgcaggaattcggcacgaggtttttcataccaacagattttttttacctatctcagttccacgaggtaaattatgaagtgtgatatcttgactttcaaaatatcaacagaaaatatcattttattttagagttttttggatttatattggtgtgtaaatgtttaaggccagcatatggttaaatagaatcagttttgttattgcgggaactactgtttttttctttcagtttttgactgcttgytttcatttgaaaaacgatgktttatttgtttcctgtttcaggagatntactgrccttaagcactataagtggatgnaactggaagctggcatct

SEQ ID NO: 381 - DNA, 2735 bp, Homo sapiens
  misc_feature (2732)..(2734): n equals a,t,g, or c
gctcaaactcccgacctcaggtgatccgccctcctcagcctagcacttcaggaggccgagatagaaggatcactcgagcccaggaattcgagaccagccctgacgatataaatagggaaagagagagagagagagagagagcgcgtgcacgcgagggagaatgcctgcccctctccagcctggccaacagaaggagatcctgtctcaaagaaagtgaaaatgcttcagctagaattataggataatcctgtgtgagataatttacatagtgactggaagagttattaaatattgctttcttgttgctaagttctgtagttgggttagatatctaatgcgtaactattgtgaaagtcaagagattctaatttttccagaaaataatgttgagtttccatgaagaacaggaagtactgccagaaactttccttgctaatttcccttctctgataaagatggacattcacaaaaaagtaactgacccaagtgtggccaaaagcatgatggcttgcctcctgtcttcactgaaggctaatggctcccggggagctttctgtgaagtgagaccagatgataaaagaattctggaattttacagcaagttaggatgttttgaaattgcaaaaatggaaggatttccaaaggatgtggttatacttggtcggagcctgtgacatttgttgacactgtgaactgtccaaaagtctcttaactgcaccttgtgaatggtagttgaggtcttcatacagttcagcctctagaatggtaacaaatcagccaattggattcgaaacaaagaagactatgtaaaactcacccatcacactttgagactactcactggttggaagaatatagtattgcagcaaatcctgtatgaaagagagatgtgggcttcctttttgagtcttgtgttaggtgctgagaccttttacatgggcttatacagggagagagtcttcaataaatgtagtcagcactattttctgcatccagtgtggttgcgtttctcacctgagagtaatcaagataacatctgtcatcttccttggtttattgagtgaaatgcctctcagtcttaggggacatggcagagatgaaagaaagaaagagtgggtttcagaagtgtcagggtggagtgattccaagtgggatggttgtggcattagtttaagctgaataaataatttcaatttggggcagttattctgctttttgtaaagccgtggccaattgtctcctgtaatgactgttggttcaggcatgttgtactttgtagggacaaatgtgcatttgtttgtggcaaaagcctacaattgacaaacttgtaaatttctttgtatataaactagctgtaacctgactatcctttgtgtttactgtttttgtaaatttttttcctctataaatgaaagggtgttggttcagaatggcactttgaataatgtaaaccagtgaaaagtggattttctttacttttgtctttgggtttggggttgtttttgttctttttgaagttttattatttttaaagtgcctcccacctaggcgtaggccatgaccatttggggtacgagagcctaattttgtaggacttaatctgttgaaaagtgcagttacttctggaaattaacctcaatattaggtcagcatgtgaaatgttggatttgacatgtcaggtagggttcagggactgattggtcccatttgccctcaggtcagttgtttaatctcaagacctgttactactgattttattaaatcagagtctttaattcttgcatgtttgtatctaatttctgaacgaatgagcacactttaaccagttatttacagttacctttttcctttaaccggattgtgaaagcttcatgtattttaatttagattctgtgtttttaagggttctgagcatgaagctggcagatagtcggcaggactcattttttcatcatggctggctgatttctccatagattgataacagtattttgttatcttgcttctctgtagttttgcatcagctgtttaactttgagctgagtgaggggagaggggtaaagagaaagaaacttaagttttctttcacagaactccaccattgtgggctttgagagagccctaaagcattgtacctagtggtacctagtgacttccaaccaaagcctttgagtatgcactaaataggtgagaagaaaggagagaaggtttttaggttagaaacctttaaccgatagaaggatatggtatgttgtaaagctggaaccaagtttgcatttttgagggcttgagatgaagggaagactcttaccagatagtaagacagctgagttttcctcagttttctcgtcttaacactagtggacaattctagcattttgtttggaggatttcagagttaacctcatggaattcaggattttttagcaagtttgcttttggttttatcttggcttttagtaatcatgttggctggtctggtcacaggtgactgtgaaacagatgccctggtcttgctttcatcactctaggatcatgaagtgctatgctatttcctggttatgaatattaaggttggaattacatttttattgattgtttggatcagagctcagttcctgtagaaaacgaactgtaaaagaccatgcaagaggcaaaataaaacttgaagtgaatgctaaaaaaaaaaaaaaaaaaaaaaaaaaaaaaaaaaaaaaaaaaaaaaaaaaaannna

SEQ ID NO: 382 - DNA, 552 bp, Homo sapiens
  misc_feature (511)..(511): n equals a,t,g, or c
aaatccccctcactaaagggaacaaaagctggagctccaccgcggtggcggccgctctagaactagtggatcccccgggctgcaggaattcggcacgagcttattttgaggctactccccgtgaaggcaaacaccttcctttctacccccatcttctgggtctctgggatcccccagtacttgcacccaaggctccttggagtcaccttacgtacccctaaaattccctccctccagcctgggaacaaccctgagaaagtattctggttcaccaggggagctgcggggccactctccttatccccacctctccttatccccgcctctycatatccccacctctccatattcccacctctccatatccaagccttaggacccttcacttccccagctgaaaccagccaaaaaaggatcaaaaaaccccccaggaagcttaggtggccaacaccccttctccccatccctgctggggggtctcagtgccacacaagcccctccctcccaactnaccttctactccttcttcccatccctaacttaatccatccc

SEQ ID NO: 383 - DNA, 534 bp, Homo sapiens
  misc_feature (400)..(400): n equals a,t,g, or c
  misc_feature (408)..(408): n equals a,t,g, or c
  misc_feature (494)..(494): n equals a,t,g, or c
  misc_feature (511)..(511): n equals a,t,g, or c
  misc_feature (530)..(530): n equals a,t,g, or c
ggcaaagtggagcacatgaaccagacactcaaacagccactgaagaaatattgccaagagacccatctaaggtgggatcaggtcctacccatggtcctcctccgagtcaggtgcacccttaccaaacaactgggtattcaccctatgaaatcttgttcagccagccacccccaatcataggtcaaattaagggtgatctccgggagctaagggacttaaccttaagaaagcaaatgcagggcttagggatagccatgcaagatgtctatggctgggtacgggaaagaatgcccataagcctggcagacccagcacacccctttaaacccggggactctgtttgggtcaagaaattgaatccaaccactttgggacccctatgggatgggccccatactgnaatcttgnccactcattgagcaagaaaatggcattyctggsttgtcaatgtggaaggaaggcttttctttcartgctgcatggcaactctctgntcttggcccctgaatgncaagctcatgcctcaatgnttaa

SEQ ID NO: 384 - DNA, 1592 bp, Homo sapiens
ggagtcgccgccacgaccgccgggtctcagtgggtgcctgcgccttctccccgcccgcctgccccgggccatccagaaacttgctctacccgccgcgggtgctcggcagtgctgcccatggcccagcccaggagcctatttagggcgccggacgggctggacagaggcgcggctcagtaattgaaggcctgaaacgcccatgtgccactgactaggaggcttccctgctgcggcacttcatgacccagcggcgcgcggcccagtgaagccaccgtggtgtccagcatggccgcgctgctcctgggcgcggtgctgctggtggcccagccccagctagtgccttcccgccccgccgagctaggccagcaggagcttctgcggaaagcggggaccctccaggatgacgtccgcgatggcgtggccccaaacggctctgcccagcagttgccgcagaccatcatcatcggcgtgcgcaagggcggcacgcgcgcactgctggagatgctcagcctgcaccccgacgtggcggccgcggagaacgaggtccacttcttcgactgggaggagcattacagccacggcttgggctggtacctcagccagatgcccttctcctggccacaccagctcacagtggagaagacccccgcgtatttcacgtcgcccaaagtgcctgagcgagtctacagcatgaacccgtccatccggctgctgctcatcctgcgagacccgtcggagcgcgtgctatctgactacacccaagtgttctacaaccacatgcagaagcacaagccctacccgtccatcgaggagttcctggtgcgcgatggcaggctcaatgtggactacaaggccctcaaccgcagcctctaccacgtgcacatgcagaactggctgcgctttttcccgctgcgccacatccacattgtggacggcgaccgcctcatcagggaccccttccctgagatccaaaaggtcgagaggttcctaaagctgtcgccgcagatcaatgcttcgaacttctactttaacaaaaccaagggcttttactgcctgcgggacagcggccgggaccgctgcttacatgagtccaaaggccgggcgcacccccaagtcgatcccaaactactcaataaactgcacgaatattttcatgagccaaataagaagttcttcgagcttgttggcagaacatttgactggcactgatttgcaataagctaagctcagaaactttcctactgtaagttctggtgtacatctgaggggaaaaagaattttaaaaaagcatttaaggtataatttatttgtaaaatccataaagtacttctgtacagtattagattcacaattgccatatatactagttatatttttctacttgttaaatggagggcattttgtattgtttttcatggttgttaacattgtgtaatatgtctctatatgaaggaactaaactatttcactgaaaaaaaaaaaaagattttttctggagacgctatgtttttttgaatataattaacttgcccccaactcaaaatagctgtctgtgttgcaatcattgcaaaatctaaattcttttgttactt

SEQ ID NO: 385 - DNA, 783 bp, Homo sapiens
ggttgctcaggctggtctccaactcccgacctcctgtgatgcgcccacctcggcctctcgaagtgctgggatgacgggcgtgagccaccgtgcccggcctgttgactcatttcgcttttttatttctttcgtttccacgcgtttacttatatgtattaatgtaaacgtttctgtacgcttatatgcaaacaacgacaacgtgtatctctgcattgaatactcttgcgtatggtaaatacgtatcggttgtatggaaatagacttctgtatgatagatgtaggtgtytgtgttatacaaataaatacacatcgctctataaagaagggatcgtcgataaagacgtttattttacgtatgaaaagcgtcgtatttatgtgtgtaaatgaacgagcgtacgtagttatctctgttttctytctcctctcctcgtgtttttctycctycctttctycctttctctccttctttaggtttttcttcctctcttcctttccttctttctctctttctgtccttttttccytcgtgctttawttcyctttcgktccctgtgtttccttcttttttctttcctctctgtttctttttcccttctttccttcgtttctttcctcattctwtctctctttttcgtgtttctttccttyccgtctgtcttttaaaaaatggagtgtttcagaagtttactttgtgtatctacgttttctaaattgtctctcttytctccattttcttcctccctccctccctccctccctgctcccttccctccctccttccct

SEQ ID NO: 386 - DNA, 793 bp, Homo sapiens
  misc_feature (786)..(786): n equals a,t,g, or c
  misc_feature (792)..(792): n equals a,t,g, or c
gctccgtctcaatatgtctcaagatggcggccaatgtgggatcgatgtttcaatattggaagcgctttgatttacagcagctgcagagagaactcgatgccaccgcaacggtattggcgaaccggcaggatgaaagtgagcagtccagaaagcggcttatcgaacagagccgggagttcaagaagaacactccagaggatttgcgcaagcaggtagcgccgctgctgaagagtttccaaggagagattgatgcactgagtaaaagaagcaaggaagctgaagcagctttcttgaatgtctacaaaagattgattgacgtcccagatcccgtaccagctttggatctcggacagcaactccagctcaaagtgcagcgcctgcacgatattgaaacagagaaccagaaacttagggaaactctggaagaatacaacaaggaatttgctgaagtgaaaaatcaagaggttacgataaaagcacttaaagagaaaatccgagaatatgaacagacactgaagaaccaagccgaaaccatagctcttgagaaggaacagaagttacagaatgactttgcagaaaaggagagaaagctgcaggagacacagatgtccaccacctcaaagctrgaggaagctgagcataaggttcagagcctacaaacagccctggaaaaaactcgaacagaatatttgactgaaamccaatacatgaagaactctgcaaggccacgagatgaatgatctgacggccttgaaggcaacccargctgggacccttggaacggcnttttant

SEQ ID NO: 387 - DNA, 2046 bp, Homo sapiens
  misc_feature (73)..(73): n equals a,t,g, or c
gacaggtactggcgcttcaacgaggagacacagcgtggagaccctgggtaccccaagcccatcagtgtctggnaggggatccctgcctcccctaaaggggccttcctgagcaatgacgcagcctacacctacttctacaagggcaccaaatactggaaattcgacaatgagcgcctgcggatggagcccggctaccccaagtccatcctgcgggacttcatgggctgccaggagcacgtggagccaggcccccgatggcccgacgtggcccggccgcccttcaacccccacgggggtgcaragcccggsgcggacakcgcagagggcgacgtgggggatggggatggggactttggggccggggtcaacaaggacrggggcagccgcgtggtggtgcagatggaggaggtggcacggacggtgaacgtggtgatggtgctggtgccactgctgctgctgctctgcgtcctgggcctcacctacgcgctggtgcagatgcagcgcaagggtgcgccacgtgtcctgctttactgcaagcgctcgctgcaggagtgggtctgaccacccagcgctcctgctaacggtgctcagggggcgcctgtggttctgagatggctcccaggggctccctccgcccccaggtagggcccctctcagccctcacacaccctgtctgccccgccctcattatttatgtccaggtgtttgttttgttttgtttttggcaccttacttgaccatttgtttctgtttccccgactgggscagggtgtttagaattttctaaatgtagttctgctccagacagggaattaggcccccatcatcctctggcttggcacagccaggggagcagaggggcagaggcccacattggaagagcagcacctcctcagcctgaaccccagggctgtaactgccaggctctctttgcccagttggagactgtctggcccccctggtcccctccttcccaagtgagtctctctgggccttaggaagagccttccacccaggggcagccccaggccaaaggggacctggaagggaggtgggccgtggcccttgagtccccattgaggcttggttccttcccaatccagtggacttcgcagtccacttctgacagcctcagtgaccctggctccttgtgccagagaacccagcccacccccggcagcagcccccagctcccacctccccttgggcccacacctycttccctctctggagaaagggccctgggcctgcctcaccacggaccaaagggagtctgccagggcccctctccccagggaagcagcagcctcgcccctggcagagatgcctccctgagctagaaccctctgttccttccctgtgcctcctccctccctctccgactcacaccactagcctcaggggtctgagctccagctcctttgggcttcagctgccagtgtcctgagccccagggagagggggctggtgggtgcctaggcctgggcagtggatggccgtgaatgggtgcccacagtgtcaggcactgggcatgaggggttcctcccctccagctccctgtgcccccagggtcctgggaggagagacactggtggggataggccagccgcgcatcagactgtgaaccccacgaaggagcccattgtggcctaagaggctgccctcctgtgctcagccctgaggacagatgcctccttcctcttttccttcccaaagcaagcaagaggccgtggctgctgtgggaaatggtactgtacagctggctctacttccccatggccctgagcgagtggagtctgccacccaggatccccaaggcacttgagggggaaggattctgctggcctctgcgagtggtttcttgtgcactggcaccaagtgcgggtccggcagcttctgccccctgcagaaccggagagccagctaaggggtggggctgcgggggttccgtgtccacccccatacatttatttctgtaaataatgtgcactgaataaattgtacagccggcaaaaaaaaaaaaaaaaaaaaaaaaaaaaaaaaaaa

SEQ ID NO: 388 - DNA, 931 bp, Homo sapiens
gctcctgcctcagcctcctgagtagctgggaccacaggcgactgccaccacacccagctaattttttgtatttttagtagagacagggtttcaccatgttggccaggctggtctcgaactcctgacctcaagcgatccacccacctcggcctcccaaagtgctgggattacaggcgtgagcaccacgcccaactgggaccagggttttctgttttttgatggaggtgaaatctctttgtaatccactaggttttcatcgtaaaaccatcttatgcctgactattaaacctattcttcataaacacaagaacactttaatttttcgttaatttacaaagtaacatcagctgcctatgcctatgataaggtagcagtctgcattcttatggccattagatgttacaaactccttgcctctaaagtcagatcatgaagggataggtgttcatctaaggttacagttatgttaccgaaacacaaaactgccaaaatcttactctgctgttatgaatgtttaccatcagcattattttatcatttaatatgtgctcactgattgttaactgtagcttcagcgcgtgccaagcagttgacttaataggatcatcttgtgaatttgtttacgtgatgccaagcatcaagtcatgttttctttagtgtgtgtgcttacacaggtgttaaacagtttttctctattttaaactgagccttctttttaatatattcccgaagagatatgtaaataagctctcagagtttctgtgatgatttgttgagccttgctggacaagtggtttgtttgtgtgcaaaccaaactttctttacccagtgcaatagatttgtttgactgcttgtgtctttttatgacctgtttgccttttagaaaattggtaaataaagcaagtatatttttaaaaaaaaaaaaaaaaaa

SEQ ID NO: 389 - DNA, 1305 bp, Homo sapiens
  misc_feature (1293)..(1293): n equals a,t,g, or c
aattcggcacagccacactggacagggcagctgctgggttgctactctcgcctccgccatgattccgcccgcagactctttgctcaagtacgacaccccagtgctggtgagccggaacacggagaaacggagccccaaggctcggctactgaaagtcagcccccagcagcctggaccttcaggttcagccccacagccacccaagaccaagctcccctcaactccctgtgtcccagatcctacaaagcaggcagaagaaatcttgaatgccatactacccccaagggagtgggtggaagacacgcagctatggatccagcaggtgtccagcacccctagcaccaggatggacgtggtgcacctccaggagcagttagacttaaagctgcagcagcggcaggccagggaaacaggcatctgccctgtccgcagggaactctactcacagtgttttgatgagttgatccgggaggtcaccatcaactgtgcggagagggggctgctgctgctgcgagtccgggacgagatccgcatgaccatcgctgcctaccagaccctgtacgagagcagcgtggcgtttggcatgaggaaggcactgcaggctgagcaggggaagtcagacatggagaggaaaatcgcagaattggagacggaaaagagagacctggagaggcaagtgaacgagcagaaggcaaaatgtgaagccactgagaagcgggagagcgagaggcggcaggtggaggagaagaagcacaatgaggagattcagttcctgaagcgaacaaatcagcagctgaaggcccaactggaaggcattattgcaccaaagaagtgataatttccacatgattaatttccaacaagacacytgggagttatttactgtgttcctctggcagccaataaaatcatcataagccctttgtaataaaaagctagtttcctgagtgaacaagccataacctcccctaaacaccacctaggtatttgttagaagtcacactattactccaatgtcatcagacacctaaggtctgccagccaggctcctggctggcaatggaagatggtgtggccctgttagtctccgtgtgtggcttactagccagccttgggaactgccaactcaaattctaagaaagccactgctttctcatcatcactctataccaatacttatttctggccaaatgaatctgcttctctgcccctcaaacttttagttcacaattcatcttctaccttaacttggggsttcttggggcctctggctttccttaattaaatgtcttntttttccctact

SEQ ID NO: 390 - DNA, 530 bp, Homo sapiens
  misc_feature (386)..(386): n equals a,t,g, or c
  misc_feature (414)..(414): n equals a,t,g, or c
  misc_feature (430)..(430): n equals a,t,g, or c
  misc_feature (466)..(466): n equals a,t,g, or c
  misc_feature (483)..(483): n equals a,t,g, or c
gatgcaaatcaaaaccacaaaaagataccatctcataccgctcagaatggccataattaaaaagtcaaaaaataacagatgctggaaaggttgtggagaagagggaatgtgtaaacacaactggtgggaatgtaaattagttcargctttgtggaaagcagtatggtgacttcttctagaacttagaactaccattcaacccagcaatcccattactgaacatatacccaaaggaatataaattgttcagtcataaagacatatgcatgtgtatgktcattgcagcactgttcacaataggaaagacatggaatcaacctaaatgkctgtcaatggcggactaaagaaaatgtggcaaatatacatcatggaatactgtgcagccntaaaaaagaatgagatcatgtcctttgnaggaacatggatgganctggagactgttatcctaagtgaactaatgcaggancagaaaatcaaatctgnatgttctcacaagtgtgagctaagcattgtgtccacatggacacaaa

SEQ ID NO: 391 - DNA, 475 bp, Homo sapiens
gccggctttggcgggcccattgtctctcgctgacgccagagatccagctatcgtcttcactgctctgtgccgtcagctcctagaggcccagcctctgtggccctgtgacctgcaggtattaggagggtcacagctaggacgccgggaccccctggaagcctagaaatgggaccattgcaatttagagatgtggccatagaattctctctggaggagtggcattgcctggacgctgcacagcggaatctatatagggatgtgatgttagagaactacagaaacctgatcttccttggtattgttgtctctaaaccaaaccygatcacctgtctggagcaaggaaaaaaacctttaactatgaagaggcatgagatgattgccaaacccccagttatgtattctcatttgcccaagacctttggtcagagcagagcataaaagattctttccaaaaagtgatactaaggaagatatg

SEQ ID NO: 392 - DNA, 823 bp, Homo sapiens
  misc_feature (1)..(1): n equals a,t,g, or c
  misc_feature (98)..(98): n equals a,t,g, or c
ngaaactaactcctcactaaagggaacaaaagctggagctccaccgcggtggcggccgctctagaactagtggatcccccgggctgcaggaattcggnacgagcaggcctgtagttctagcactttgggaggccgaggcaggaggattacttgagcctacaagtttgaggccagcatgcacagcatagcaagactgcatctctacagagagtaaaaaaaattacccgagtgtggtgatgtgcatctgtaatctcagctacttgggaggctgaggtgagaggatcacttgagcttgggtgaggtgaggctgcagtgagtcctgatcatgctgctgcactcaatcttggacaacagagcaagaccctgtctcaaaaaaaaaaaaaatatatatatatatatatattatttttatgaggtgaagtgcatcaaacttgggaaagatttgaggaggctgggaacctcctggaaaaccactccttgaagaaagatatgagagacatttagaagtgattcctgctttcagaaggaggtggattcaaatacatcaaaagtcccttcctctgctaagtgtttatagttcaatgaataatttcaatatttktatgtgttcttgtcattttatttttttctgaaaaacttccaaaaatttgaaaataaaattacagccttttcttcttaaaaaatttgttactgtgagctttaattggtacacaggaaattggtttattttctaaggatatttcacattggagaatcagttgcctgtgcttacgggggtgaaaagagagttctcgtataaaaataaagatcgaaggtataaaag

SEQ ID NO: 393 - DNA, 1719 bp, Homo sapiens
  misc_feature (677)..(677): n equals a,t,g, or c
  misc_feature (1248)..(1248): n equals a,t,g, or c
  misc_feature (1284)..(1284): n equals a,t,g, or c
ggatacaaagcagaataaggacagggagaagtcacatggacaaagttcagaggaagccaggtgcaagcttccaagagcctcttcctatggaatcacacaggacatgcttaatttctccaggatggaattgggacagcacatgtgaaatgctgtctatcaagaaagcttattagagactcggttcctaaggtttttagtgggaactggtcacatggaccccttcttgctatcatctgccaagattcccttctcccagaaggaaactagacttttagcataaagcacattatttgcacaatttaggcacaatgaaccactcttctcagggaatgatgggaaacctcccaaatccgagttcccggacatcagtccaaggtcaactttgcaagccgccctttccaagaatttcagtcttagtcctgctacgttaactcttttctgtacaatatctatatcaagtgtctcaagggctagttaaaagaatatttgaagaaattagagaaaattccaaaaattatacatacaattaaggaagtasaaaattggatgtagaaaaataattagaaaattaatcattattgacactaagagagaaatctgagggataatttaaggacttcctttagataatgagttatgacataagataaagtcacccatagcctgtatctcccccnaatccttccctaagtagagaatatgggcctactttatttgaaacacttctgaaaagtatttcttgaaaacactctttagaaccttctaagaaatgacagctcatttagtcatttgccattcagattgtataccagcttatataataccttgattcattaattatttgctgaacaatcctaaaaattatgtttatccattacccattcatacttttactatctttctacacccaatatgtatgcagttcaggttttcaaactcttacttgagtaaaaagggagaacaggtatttaaaagcatatttctagccaggcgccgtggctcacacctgtaatcccagcactttgggargccgaggcaggtgtatcacaaggtcaggacttcgagaccagcctggccaacatagcgaaacccatctctactaaaaatacaaaaaattagctgggtgtggtggcgggcacctgtaatcccagctacttgggaagctgagacaggagaagaacttgaamccgggaagcggaagttgcagtgggccaagatcacaccactgcactccagcccgggarwtantgagagmyccatctcaaaaaaaaaaaaaraaaagcntatttcaggtwtgttcaggtatggataaagaaacaacagaaagattaaggawtaaaaatacatgatgacgtgaggtctttgaattgtggtggtaagtagatatagcattgaacagaagtttaagtaagtatagaaatctgaccttaggccccttaaaaacctgaccttaggcccttctcattsactacttcttaaccgttagctatgtgctgaataaaagctggaaaaccagagaaattaaagaggaaagagggaggggaaaacaaagtggaagcttcacagaggcatccacaggtcattccaaaaccatagtattatgctcactattagcaacaatctaaatgaagaaaaggagaagaaaggaaaagaaaggccacattgccggggcttacacaagtctaattccaagatttaaaaaaaaaaaaaaaaactcga

SEQ ID NO: 394 - DNA, 377 bp, Homo sapiens
cgaaactaaccctcactaaagggaacaaaagctggagctccaccgcggtggcggccgctctagaactagtggatcccccgggctgcaggaattcggcacagcaggaaataaccaacttgatgcgtgttatgacccattttaagcctcccatgatcacagtttttaaaatacaattaaggactggtccttttctaggtgacacaagaaaggtaatagctagaacagaagaaagaggggtccccaaaaatgtaaccttaaaatttgacacttgkgccactattgatagtaagcagcatggwtgwggatgtggktctctaaattggaaaaaaaagttcacagtaaaaaaaaataagtatatctgtcaagaatcatattta

SEQ ID NO: 395 - DNA, 1078 bp, Homo sapiens
  misc_feature (465)..(465): n equals a,t,g, or c
gtcacgcccgaggccgtcaagtctgtcctgctggtggtgctgcccctgcctgcctgcctcaacccactgctgtacctgctcttcaacccccacttccgggatgaccttcggcggcttcggccccgcgcaggggactcagggcccctagcctatgctgcggccggggagctggagaagagctcctgtgattctacccaggccctggtagccttctctgatgtggatctcattctggaagcttctgaagctgggcggccccctgggctggagacctatggcttcccctcagtgaccctcatctcctgtcagcagccaggggcccccaggctggagggcagccattgtgtagagccagaggggaaccactttgggaacccccaaccctccatggatggagaactgctgctgagggcagagggatctacgccagcaggtggaggcttgtcagggggtggyggctttcanccctctggcttggcctttgcttcacacgtgtaaatatccctccccattcttctcttcccctctcttccctttcctctctccccctcggtgaatgatggctgcttctaaaacaaatacaaccaaaactcagcagtgtgatctatagcaggatggcccagtacctggctccactgatcacctctctcctgtgaccatcaccaacgggtgcctcttggcctggctttcccttggccttcctcagcttcaccttgatactgggcctcttccttgtcatgtctgaagctgtggaccagagacctggacttttgtctgcttaagggaaatgagggaagtaaagacagtgaaggggtggagggttgatcagggcacagtggacagggagacctcacagagaaaggcctggaaggtgatttcccgtgtgactcatggataggatacaaaatgtgttccatgtaccattaatcttgacatatgccatgcataaagacttcctattaaaataagctttggaagagattacacatgatgtctttttcttagagattcacagtgcatgttagtgtaataaagagataagtcctacagtagtaaaatctattgaactttgaaaaaa

SEQ ID NO: 396 - DNA, 473 bp, Homo sapiens
  misc_feature (432)..(432): n equals a,t,g, or c
  misc_feature (449)..(449): n equals a,t,g, or c
  misc_feature (451)..(451): n equals a,t,g, or c
  misc_feature (462)..(462): n equals a,t,g, or c
gaactgatgctgagttgttttcggcagatgtaaataactactgctgctgtctagatgctgaagctgaactggagacccttcaggagcctgataaggctgtgcggaggtcaragtaccatctgtgggagggacagaaagagagcctggagaaaagagcatttgcttctagtgagctatcaaacgtggatggtggtgattatacaacaccctctaaaccctgggatgtagcccaagataaagaaaacacattcattcttggaggagtttatggagaactcaaaaccttcaatagtgatggggagtgggcagtcgtaccacctartcacacaaaaggaagtctgktacagkgtgcagcttctgatgttgtgacgatagctggtacagatgtctttatgaccccaggaaacagttttgctcctgggcacaggcagntattggaaacccttcgngncatttgaacanaatgatcagcc

SEQ ID NO: 397 - DNA, 648 bp, Homo sapiens
  misc_feature (453)..(453): n equals a,t,g, or c
  misc_feature (520)..(520): n equals a,t,g, or c
  misc_feature (522)..(522): n equals a,t,g, or c
  misc_feature (609)..(609): n equals a,t,g, or c
  misc_feature (627)..(627): n equals a,t,g, or c
  misc_feature (647)..(647): n equals a,t,g, or c
gtgttaatatccattatggtaaatgagagattttggtaaatgaagtttcaaccctcttactgctttccccacattccccatcctcctaatgtagttaaatcataatatttagtcaaatcagtgttaagcatttgctttattgtgattatctaaatagtattctctgctgagccatgtagagcactatgtttatgtttccttttttgtacacagttacaaatgtatcacacaataggtcaagtttttgtttgtttgtttagagacaaggtctcactctcttgcccaagctggagkgcagtggkgcaatcaagcttcactgcagcctcaaatacctaggctcaagggatcctcctgcctcagtctctccattagctgggacctcagatgtgcaccaccatgctcttttgtagagatgcatcttttgtagagatgggatctttctgtattggccangatggtctggaacacctggcttcaagcaatcctccctccttggcctcccaaagtgttatgattatangngtgagccactgtgcccagcccagttttgagactggactcctcctggagtcctattctgcctgctctcttccagagctgccacacagntccaagcttgggaggtgnctccctcctactgggtttcnt

SEQ ID NO: 398 - DNA, 641 bp, Homo sapiens
  misc_feature (342)..(342): n equals a,t,g, or c
  misc_feature (551)..(551): n equals a,t,g, or c
  misc_feature (576)..(576): n equals a,t,g, or c
gaacatttctcataaactaaccatgcaactcaaggaactagaaaaacaaaataaactaaactgaaaactgatagaagaaaggaaataatagagttcagacaagaaataagcaaaagagactaaaaagtcaattttaaaaagatcaacagaacaaaaagttgtttctaaaaaagaaacataaaattgacaaacctttaactaagctacctaaggacaaaagataaaaggcctaagtaaataaaatcagagttgtgaaaggagacattacaactgatatcacagaaatacaaaggatagtaggagattattatgaacaactatacaaatttgagaacatagaanaaatgaataaatactgggtacacagaaccttcttgaaagattaaagatttaaagacctaattgaaagattcaattatgaagaaatataaaatgccaacaaaacaacagtgagtgggaaagtaaaaggggttataaaagtcttctatcaaaaagaaaaccccaggatctgacctgatggcttccttgctgaattctagcatacatttcangaataaataccaattattctaaaantattctcaaaattaaggagaaggaatactttctaagcctaaggtagcataatgaagaaattatta

SEQ ID NO: 399 - DNA, 620 bp, Homo sapiens
  misc_feature (479)..(479): n equals a,t,g, or c
  misc_feature (508)..(508): n equals a,t,g, or c
  misc_feature (549)..(549): n equals a,t,g, or c
  misc_feature (591)..(591): n equals a,t,g, or c
  misc_feature (612)..(612): n equals a,t,g, or c
gaggacatcgcattgatggatgcacacaagggtgctgagatgtttcgcagagtccacgtgcccgtccttggccttgtccaaaacatgagtgttttccagtgtccaaaatgtaaacacaaaactcatatttttggtgctgatggtgcaaggaaactagcacagacccttggtcttgaagttctaggagacattcccttacaccttaatataagggaagcttcagatacaggccagccaattgtgttttcacagcctgaaagtgatgaggttggagagtgaacagagatcttctaagtgkcttacaagaacgaaatccttgaaragtttgcagtcactgaaaaaaaagtcaatagaatacgtagaaaagtggtgagtacgttttcacgagatttgatggttttataagcacctggcatttcccctgctggcacttattgctctctgttgccctgtgaagaggaaccttctgccatgactgnaagttttctgaggcctcccagccatgcanaactggagcaattaaacctcttttttaaataaattatcagncttggtatttcctcataacacgtgagaacagacttaatcagngttccttaagcgccctagggnctttggta

SEQ ID NO: 400 - DNA, 1017 bp, Homo sapiens
gcgcaggcggccgggcgggctgtaaccggccgctgaactagcgcttctgtgtccagaggcttcggcctggccgccgtcgcctgtaagctacgaggaggagatttacgacttggccgggcgcagcaaaggccagactctgcgcgaacaggcgctgcgcaccaaccggcaggcacctggcgggcaccatcgcacggtggcgcagaagcccctcaatggccagcgccagctgcagccgcggccgcgcagtcgtcccccctgagcttgggcgaatgtggattgggaaagtcgacattaatcaactcattattcctcatagatttgtattctccagagtatccaggtccttctcacagaattaaaaagactgtacagctggcagcctgttatcgattacattgatagtaaatttgaggactacctaaatgcagaatcaygmgtgaacagacgtcagatgcctgataacagggtgcagtgttgtttatacttcattgctccttcaggacatggacttaaaccattggatattgagtttatgaagcgtttgcatgaaaaagtgartatcaycccacttattgccaaagcagacacactcacaccagaggaatgccaacagtttaaaaaacagttgaaaatggtgaacattgttattttacaattctaagaaatatgttgataaggtaacttttccggtcacacacaacagactgattttcctgtggaagacctcacaggagttctcttgaaccaggagactattttgagctgaaatacctggagccctctcaagctatttgggcctttcaatttgaaacccaggtttggatgattctaagctctatggcagagactgtaatcattttctcttcaccctcaggttggggactcaccctcagggttgggagtgactgctgtctctccagcccccaccaattacaccatgttctggttgttaaaatccagtgtatgcatgaaatgtaataaaagtatcttcgcagcactaagtagagaaaaaaaaaa

SEQ ID NO: 401 - DNA, 2208 bp, Homo sapiens
  misc_feature (2196)..(2197): n equals a,t,g, or c
  misc_feature (2204)..(2205): n equals a,t,g, or c
cggaataggagcgttgcgagacggtcggttccaagtgggcctgggcgcgggggagaggcgggtctgtcctcgggaactgcaaggccctgtgagcgggaggactgggatcccggccgcggctgctggaagcgtcgaagctcagcggggccgcggacactgacctgtgcttagaactcatcctggcccgcagagcctgccgcgagtccctggcgtcccctgtggcgggctcttggagccactttcccgagcggaagtcagcccgcggctcggactccggcgggacctgctcggaggaatggcgccgccgggttcaagcactgtcttcctgttggccctgacaatcatagccagcacctgggctctgacgcccactcactacctcaccaagcatgacgtggagagactaaaagcctcgctggatcgccctttcacaaatttggaatctgccttctactccatcgtgggactcagcagccttggtgctcaggtgccagatgcaaagaaagcatgtacctacatcagatctaaccttgatcccagcaatgtggattccctcttctacgctgcccaggccagccaggccctctcaggatgtgagatctctatttcaaatgagaccaaagatctgcttctggcagctgtcagtgaggactcatctgttacccagatctaccatgcagttgcagctctaagtggctttggccttcccttggcatcccaagaagcactcagtgcccttactgctcgtctcagcaaggaggagactgtgctggcaacagtccaggctctgcagacagcatcccacctgtcccagcaggctgacctgaggagcatcgtggaggagattgaggaccttgttgctcgcctggatgaactcgggggcgtgtatctccagtttgaagaaggactggaaacaacagcgttatttgtggctgccacctacaagctcatggatcatgtggggactgagccatccattaaggaggatcaggtcatccagctgatgaacgcgatcttcagcaagaagaactttgagtccctctccgaagccttcagcgtggcctctgcagctgctgtgctctcgcataatcgctaccacgtgccagttgtggttgtgcctgagggctctgcttccgacactcatgaacaggctatcttgcggttgcaagtcaccaatgttctgtctcagcctctgactcaggccactgttaaactagaacatgctaaatctgttgcttccagagccactgtcctccagaagacatccttcacctgtcccagcaggctgacctgaggagcatcgtggaggagattgaggaccttgttgctcgcctggatgaactcgggggcgtgtatctccagtttgaagaaggactggaaamaacagcgttatttgtggctgcactctctacttaatcattggagatgccactttgaagaacccaatcctctggaatgtggctgatgtggtcatcaagttccctgaggaagaagctccctcgactgtcttgtcccagaaccttttcactccaaaacaggaaattcagcacctgttccgcgagcctgagaagaggccccccaccgtggtgtccaatacattcactgccctgatcctctcgccgttgcttctgctcttcgctctgtggatccggattggtgccaatgtctccaacttcacttttgctcctagcacgattatatttcacctgggacatgctgctatgctgggactcatgtatgtctactggactcagctcaacatgttccagaccttgaagtacctggccatcttgggcagtgtgacgtttctggctggcaatcggatgctggcccagcaggcagtcaagagaacagcacattagttccagaagaaagatggaaattctgaaaactgaatgtcaagaaaaggagtcaagaacaattcacagtatgagaagaaaaatggaaaaaaaaaactttatttaaaaaagaaaaaagtccagattgtagttatacttttgcttgtttttcagtttccccaacacacagcagatacctggtgagctcagatagtctctttctctgacactgtgtaagaagctgtgaatattcctaacttacccagatgttgcttttgaaaagttgaaatgtgtaattgttttggaataaagagggtaacaataggaaaaaaaaaaaaaaaaaggggggccggtttanngacccannttt

SEQ ID NO: 402 - DNA, 612 bp, Homo sapiens
  misc_feature (603)..(603): n equals a,t,g, or c
gaacaaaagctggagctccaccgcggtggcggccgctctagaactagtggatcccccgggctgcaggaattcggcacgagcagacagtgcttattaatccaactaattacccagttagaagcaccaaatgaaaaacaacagcaagaagctacacatattatctcctttaaggctgagcaactttgagaagccagcctcctatggtttgattgcctctggagccccactgtattatgttgttcctgctgataaccctgaggctcatcaaaaacaagaaatacaccatctattttaggaagatgcccagtaggagtttttttaatttggctactgaaatggaatttcagtatggaagaggtagacttccatacctacttccccactgatgccatgctttaagccccctgactctagtacttggagatctgaattctgtacttgcttgkttattattcctcactccattaagggactcttcataataagttataaatccctttcatggagataattcatagctcaacctyccttttcttccaaaacatattactyacctaccatgtacccmagccttggaccattyagtaaaatggtatggcttanattgcagta

SEQ ID NO: 403 - DNA, 2520 bp, Homo sapiens
  misc_feature (630)..(630): n equals a,t,g, or c
  misc_feature (889)..(889): n equals a,t,g, or c
  misc_feature (2516)..(2517): n equals a,t,g, or c
ccctgtccaagtccaacagcaatgccgtctccgccatccctattaacaaggacaacctcttcggcggcgtggtgaaccccaacgaagkcttctgttcagttccgggtcgcctctcgctcctcagctccacctcgaagtacaaggtcacggtggcggaagtgcagcggcggctctcaccacccgagtgtctcaacgcgtcgctgctgggcggagtgctccggagggcgaagtctaaaaatggaggaagatctttaagagaaaaactggacaaaataggattaaatctgcctgcaggagacgtaaagctgccaacgttaccctgstcacatcactagtagagggagaagctgtccacctagccagggactttgggtacgtgtgcgaaaccgaatttcctgccaaagcagtagctgaatttctcaaccgacaacattccgatcccaatgagcaagtgacaagaaaaaacatgctcctggctacaaaacagatatgcaaagagttcaccgacctgctggctcaggaccgatctcccctggggaactcacggcccaaccccatcctggagcccggcatccagagctgcttgacccacttcaacctcatctcccacggcttcggcagccccgcggntgtgtgccgsgttcacggccctgcagaactatctcaccgaggccctcaaggcatggacaaaatgtacctcagcaacaaccccaacagccacacggacaacaacgccaaaagcagtgacaaagaggagaagcacagaaagtgaggctctcctcccgccccgcccctcccacgcctcaccagccccccgcgcgcccaccctccggcgggtgacagctccgggatcagcaacccttcctgctgctgctactgctgctgctgntgccgccgccgccgccgccgctgcccttgggtccccccgagtctccgggactgccctctcgactgtcagtggggcagcctctccgactctgcacccgcctcgacctccccacccgctcccacacccctgtgccctcatgtggagcctaagagaacagaacaggccgtgaagccagcagagaaaagttctgccaagtttgtgaacccttttttttttaaacaaaacaacaaatcaacaacagcaacaacaacaacaaaaattaaaaacttttttctaaaaaaaaagtgaaaataaaaaaaattatatgcgcttcatgggactgagtcaccaccttcccttacatacttcagttcagattgtagccatacttaaaaaaaaaaaaaaagccaaaagatgatgacaacatttttatcagtattgtgaataaacttgaacacaaatacacgaagttccatgtcatgtcttcagttgtagaagtttttcctctttaaggtaaagcgaccaacttgaactttctctggcaacacgattcgcagttatataagggaatcagtgttcacgtctctgtatatatttatttatgtgtaatttaatgggaattgtaaatatggtgagtctgttttaagcctttttttttttatttatctgatcttgtttacctcttgtttagtgggttttgaatcttccctattagttcttcatgtggttcatggtactgatttagaaatccagtgtttgggggatttttttctctgggattcatgaatttagccctgttgtagcatgttaaaggtgacaaacagctggacaaatttttaaaaagtaaaataaaattttatctataattagtattattacatttagcttttcattgaaccgaaagaaaaaaagtgatattggaccctggaaagattttgaaacttgagtggtttgataacccttctatgtattgtagggagaaaaaaaaaagtttattttattccactgtcctcccttaaaagcatcatttgagcaataaatgaatattgtctttaaaccaagggttagggaattttcctctctctctctctctcctctctctttctgttcaaagaacttcaaacatttgggaccacctggtattctgtattttcactggccatattggaagcagttctagttgcattgtattgagttgtgctggcagtagtttccatgcctgtcaatgtatcatagtcctttgttgcccagataaataaatatttgatacgctttatgtcgatttttttttattcagtggctgtctttacccaggcgtatttttgttcttggcagtattttttattcagtatggttacagtaattgagtttaactctcccttggcaattgctccttgcaataagcagctgaacccattgtttccctcaagtataataaaaacttactttcaacttggagttcagagcagggtatcatttagatattccactgtgtctgtattcagacaaatgacacaataaaacccaatgtattcttttggataaaagattgtttgtactgctaaaggaatgacatactgtcttttccttactagaaacatwaattttmttattaaaaataaagttttattttatttatgttgaaaannaca

SEQ ID NO: 404 - DNA, 2541 bp, Homo sapiens
ggtcagctcacagcaggcgttaacagcctctaattgaggaaactgtggctggacaggttgcaaggcagttctgctccccatcgtcctcttgctgactggggactgctgagcccgtgcacggcagagagtctggtggggtggaggggctggcctggcccctctgtcctgtggaaatgctggggcaagtggtcaccctcatactcctcctgctcctcaaggtgtatcagggcaaaggatgccagggatcagctgaccatgtggttagcatctcgggagtgcctcttcagttacaaccaaacagcatacagacgaaggttgacagcattgcatggaagaagttgctgccctcacaaaatggatttcatcacatattgaagtgggagaatggctctttgccttccaatacttccaatgatagattcagttttatagtcaagaacttgagtcttctcatcaaggcagctcagcagcaggacagtggcctctactgcctggaggtcaccagtatatctggaaaagttcagacagccacgttccaggtttttgtatttgataaagttgagaaaccccgcctacaggggcaggggaagatcctggacagagggagatgccaagtggctctgtcttgcttggtctccagggatggcaatgtgtcctatgcttggtacagagggagcaagctgatccagacagcagggaacctcacctacctggacgaggaggttgacattaatggcactcacacatatacctgcaatgtcagcaatcctgttagctgggaaagccacaccctgaatctcactcaggactgtcagaatgcccatcaggaattcagattttggccgtttttggtgatcatcgtgattctaagcgcactgttccttggcacccttgcctgcttctgtgtgtggaggagaaagaggaaggagaagcagtcagagaccagtcccaaggaatttttgacaatttacgaagatgtcaaggatctgaaaaccaggagaaatcacgagcaggagcagacttttcctggaggggggagcaccatctactctatgatccagtcccagtcttctgctcccacgtcacaagaacctgcatatacattatattcattaattcagccttccaggaagtctggatccaggaagaggaaccacagcccttccttcaatagcactatctatgaagtgattggaaagagtcaacctaaagcccagaaccctgctcgattgagccgcaaagagctggagaactttgatgtttattcctagttgctgcagcaattctcacctttcttgcacatcagcatctgctttgggaattggcacagtggatgacggcacaggagtctctatagaacacttcctagtctggagaggatatggaaatttgttcttgttctatattttgttttgaaaatgatgtctaacaaccatgataagagcaaggctgttaaataatatcttccaatttacagatcagacatgaatgggtggaggggttaggttgttcacaaaaggccacattccaagtatttgtaatctagraagtgttatgtaagtgatgttattagcatcgagattccctccacctgattttcaagctgtcacttgtttccttttctcccctctctgggttgactgcatttctagactctcgccggcccaggcccatcttccaaagcaagaggaaggaatgataatggtgactcaggggaagaagaaacagccctcctctgaaagcctggactgtccggctgtgaactggctggcaggttctgcacgtgggtgggggccagggcctgggctttactcaattgcagagaaaaaactttctccctgcatctcatacctttacctctggccagttggccaccagggggagtgggctgaagggagagtagatggtgcaaagcaagcccatctctgagtagaaaaatcacccagagcacatgctgacctgataactggggtgttgagaccagctttgtccatggtatgatgtttgatttatgaagacgcattgttagaaatccatttggcttcttcatagaagtggcttcccagaggaagaggcctctcagaaaccatgttctatttaagttctgagtcctgatgagtgttccccaggatgcacattgaagggagggctcaggcagctgagggctgagaatgaggcagttggaatctagacactatgctgggttccctgagtcgtcaggccagacatttcaacaaggctgtggggagcagggctgtgactctggctgagcccaggaaagcgacaagggtgaactgggagaggacttactcagagaccccaacaggtgatactgcacaaagcctggttcttcaattttcctaccctgtatctaacataggagtttcatataaaacggtgatatcatgcagatgcagtctgaattccttgcctgaattaaatttatgtatcctctccaaaaaaaaaaaaaaagggcggccgctctagaggatccaagcttacgtacgcgtgcatgcgacgtcatagctcttctatagtgtc

SEQ ID NO: 405 - DNA, 1442 bp, Homo sapiens
tcgaaaaagctatttakgtgacactatagaaggtacgcctgcaggtaccggtccggaattcccgggtcgacccacgcgtccgggaagttggcccggcggctgctgggcttggctgctgggcggaggtggtgggctagcttgggtcccttggaggcctcagcagggcttcagtaactacctgggtgggctgcctgaggagagaagtgaagtgtgggaaacttggggaccctgtaggagcgctatgaaggttcagaaggttgtggtgctccccttgcttgaagtgcagtgggcagttcttgagccccccaataagcctcagaaccaccttcattagtttttgacccctcttaccaaggattgtggcagaaaggaagatgttaccaagtatttcagtgaattccccaatgcaggggaacggagtgttgaactccagggatgcagcaagacacacagctggagcaaaacgctacaaatacctgagaagactttttcgttttcggcagatggactttgagtttgctgcatggcagatgctctacctatttacttccccacagagagtttacagaaattttcattatcgaaagcagacaaaggatcaatgggccagagatgaccctgctttcttggtcctgttaagtatttggctctgtgtgtccactataggatttggctttgtcctggacatgggattttttgagacgataaagctgctcctttgggttgtcttcatagattgtgtaggcgttggtcttctcatatcaactttaatgtggtttatctcgaacaagtacttagtgaagcggcaaagcagggactatgatgtggagtggggttatgccttcgacgtgcatctgaatgctttttatcctctcttagtcattctgcattttatccagctcttcttcattaaccatgttatcctgacggacacatttattggatattttgttggaaataccttgtggctggtggcagtgggctattatatctatgtaacctttctaggatacagtgcattgccatttttgaaaaatacagtaattcttctttatccatttgcgcctctcattctgctctacggcctgtccctggcactaggatggaacttcacccacacactgtgctccttctacaagtacagagtaaaatgaaggcgctgggagactatgccatcttacctgtgccacaggcagagatggtgaggggatgatttcttccgaaacttgcaaataaactgtctttgtagatatcttcagagtgtaaagtttgcaaatttgagtaagtatataatgtaacgctattgtcaatacattccttaaaactactaaaaggtacatttctataataaatattttttaaaaaaaaaaaaaaaaaaaaaaaaaaaaaaaaaaaaaaaaaaaaaaaaaaaaaaaaaaaaaaaaaaaaaaaaaaaaaaaaaa

SEQ ID NO: 406 - DNA, 974 bp, Homo sapiens
  misc_feature (563)..(563): n equals a,t,g, or c
gtcggggtggggtaggctgggggtgagcccttaactcttagaagggtggggtgtggggcagaaggagcagatgcctggatttgagggtgcaggagatgggctggtgcagacgtggggcctcctggctgcaggggccggcagtgaagaggttagctcccagcccaggcagggcataaatttggggcacagctcccactctcaggacctgcccgtcacaatggccgtagggaagttcctgctgggctctctgctgctcctgtccctgcagctgggacagggctggggccccgatgcccgtggggttcccgtggccgatggagagttctcgtctgaacaggtggcaaaggctggagggacctggctgggtaaggacttccagggaccctctgtgacttcccaactttccccagccctgaccctgctcactgtcagcgcccttccctcccacaggcacccaccgcccccttgcccgcytgcgccgagccctgtctggtccatgccagctgtggagcctgaccctgtccgtggcagagctaggcctgggctacgcctcataggagaangtcatcttccgctactgcgccggcagctgcccccgtggtgcccgcacccagcatggcctggcgctggcccggctgcagggccagggccgarcccacggcgggccctgctgccggcccactcgctacaccgacgtggccttcctcgacgaccgccacgctggcagcggctgccccagctctcggcggctctgcggctgtggtggctgagggtgcccggcctggcacccagaagctgcagtgctgggggagctcggctgacttatttattggagacctggatgcagagacaacgaggaggggagtgggctggggcgaccagcagtgagtgcaataaaggacaccactctcccggcaaaaaaaaaaaaaaaaaaaaaaaaaaaaaaaaaaaactcgagggggggtcccggtacc

SEQ ID NO: 407 - DNA, 1235 bp, Homo sapiens
  misc_feature (391)..(391): n equals a,t,g, or c
aattcggcagaggtcccggtcttttttttgcctgtccaccatctccctattaccctttggtcgagagggaaagcagaagaagtctgctggtcacagcggggcacctcgaggagaggacgactaggagcacacggcccggaaaggtccagaataactgtgcttgaagaagaaaattcccaacatggacaaaccacgcaaagaaaatgaagaagagccgcagagcgcgcccaagaccgatgaggagaggcctccggtggagcactctcccgaaaagcagtcccccgaggagcagtcttcggaggagcagtcctcggaggaggagttctttcctgaggagctcttgcctgagctcctgcctgagatgctcctctcggaggagcgccctccgcangagggtctttccaggaaggacctgtttgaggggcgccctcccatggagcagcctccttgtggagtaggaaaacataagcttgaagaaggaagctttaaagaaaggttggctcgttctcgcccgcaatttagaggggacatacatggcagaaatttaagcaatgaggagatgatacaggcagcagatgagctagaagagatgaaaagagtaagaaacaaactgatgataatgcactggaaggcaaaacggagccgtccttatcctatttaatgtgttcggcctttaattctgttttgcctgctaatagtattgccattgccacctggactttctgtttgcattttcttaatgccttttcccatattctgaattttaactttttgtgaggctttattttagatgtttagcatgtaactcgcttaaagttgaggtttccccctaaaatctacaagtttccctctttcagtcatgagccctacacatttgcatgaaagatgtacattatatattgtgaaacgaaaaaagcaattttcaaatggtatatattgtatcccatttttgtaaaaaaaatgtatatttatatattaatatgcaaagaaaaagctaaaagtatagacttcaaaggcataacagtggttgtgtggtaagataataggtgattttttaaatttttgttttatctgaatttctcattttttcaggacaaacgttttacttgtgttgcaaaaatatataatgaaaaaatcacacaattttgaagaaaactgtcaatcagcttataacgacaatgtggcacttaataaatacttgtcagaactttaaaaaaaaaaaaaaaaaaaaaaaa

SEQ ID NO: 408 - DNA, 1497 bp, Homo sapiens
gagagagagaagcatcagtaaagagaaatcagacccgtgaattkgatggtactgaagttttaaagggagatgagytcaaacgatatgtcaataaacttcsaarcaagagtacagttttcaaaaagaagcatcagataatagctgaacttaaagctgaattcggtcttttgcagagkactgaagaacttcttaagcaacgtcatgaaaatattcaacaacaactgcaaactatggaggagaaaaagggtatatctggatatagttacacccaagaagagctagaaagagtatctgcactgaagagtgaagttgatgaaatgaaaggacgaacattggatgatatgtctgaaatggtraaaaaactgtattcattggtatctgaaaagaagtcagctcttgcctcagttataaaagagctacgacagttgcgtcaaaaatatcaagaactgacccaggagtgtgatgaaaagaaatcccagtatgatagctgtgcagcaggcctcgaaagcaatcggtccaaattagaacaggaagttagaagactccgtgaagaatgtcttcaagaagaaagtagataccattatacaaattgtatgattaagaacctagaagttcaacttcgtcgtgctactgatgagatgaaggcatatatctcttctkatcaacaagaaaaaagaaaggcaattagggaacagtataccaaaaatactgctgaacaagaaaaccttggaaagaaacttcgggaaaaacaaaaagttatacgagaaagtcatggtccaaatatgaaacaagcaaaaatgtggcgtgatttggaacaattaatggaatgtaagaaacagtgctttctgaaacaacaaagccaaacttccattggtcaggtaattcaggagggtggggaggaccggctaatactgtgaattcttgtgtcatcgtttggggttttacttgataccactagctataagcctaatctcataatgtatttcttttttgaaactgatttgtatagcattttgttttcagaagagccattctttattaagttttcatagaaaataatgttaaggtagatttagtttgaatgttttttcatatgaaaaagaggcttttattcttttccatagtttagacatcactggcgtcttctgagttttatgagacaggaaactaagtttactatctgtaaatgtaaacatatgtccattaagaaacatgtagtttttttttagaatgtaataacccagtggcttactgtttttcttaatctcttttaaaaaaactttagaagaatcttttaggaactaatatctcttgttctgaagaaacatttatctgacgttcagcagttcctacagttttacttcagtttatttttcttctgtaaaatgcaagaaaatttaatattttgactaacatgtcttttctgtttgtatcatttaaaggcaaataaacttggtacgtatttcatatctatttaaaaaatgtaaaaaaaaaaaa

SEQ ID NO: 409 - DNA, 350 bp, Homo sapiens
cgccgccgcctaaggggggctggggccggggccagccatcactgccgttgccgggatgccgcgggtgtacatcggccgcctgagctaccaggcccgggagcgcgatgtggagcgcttctttaagggctacgggaagatcctggaggtggatctgaagaacggatatggttttgtggagtttgatgatctgcgtgatgcagatgatgctgtttatgaactgaatggcaaagacctttgtggtgagcgagtaattgttgagcatgcccgcgcccacggcgagatggcattacggttctggacgcatggatatggttatagaagaatgggccgagataaatatggccctccta

SEQ ID NO: 410 - DNA, 1808 bp, Homo sapiens
  misc_feature (6)..(6): n equals a,t,g, or c
  misc_feature (15)..(15): n equals a,t,g, or c
  misc_feature (21)..(21): n equals a,t,g, or c
gcttgnccatgattncgccangctcggaattaccctcactaaggggacaaaagctggagctccaccgcggtggcggccgctctrgaactwgtggatcccccgggctgcaggaattcggcacgagaggaaatataaatgtgcatgttctctacatgtggcttaagtaattacttaataattaccacattcttgctcctcagtatctcttcccttgttccccctacacctagcaaattatttgactcatccagtcattggaaatactgagttcgaatcaaaatgctggagtgagaaggaatgttacacgtagtgcagcctctccatgtagacatgaaaaaactgaggtccagaatttgtgccttatccaaagtcacaggtttatgtggtgatactcttcctctcctagagcctttaattataattattactattattatcatcaacagtttagcttttctctgccatctgagaagatgaactaacgaatggctaaagttagaagtttagaatggaaataaggtctgactcttgaaatccttccagcatctttttctttagcaactctgttccacaggcagtgggagaaaaaaaaaaaattaagggtaagaataaaagactgaaggagacagctagctaagaacagttcagaaaattagacaaatattttggccacattaaactttagttttcccaaactttctgaaatgtaaatatcttttctttttttatattttgaagactcttctccaaaattttgataaatggctttttataataacttaaccaatctttagagaattccatattttcagactttcacaaaatcaggttttggaatctgtagaggctacagaccctatatatggtttgattcggttttatattacaacacagcttatgctactgtctaaaatgttgaataaatcaaagtatttatgtactaaagatatttaacctacacttatatttttcttgcagatttatgaaggtacttcacaaattcaaagacttattgtagcccgtgaacacattgacaagtacaaaaattaaaaaaattactgtagaaatattgaataactagaacacaagccactgtttcagctccagaaaaaagaaagggctttaacgttttttccagtgaaaacaaatcctcttatattaaatctaagcaactgcttattatagtagtttatacttttgcttaactctgttatgtctcttaagcaggtttggtttttattaaaatgatgtgttttctttagtaccactttacttgaattacattaacctagaaaactacataggttattttgatctcttaagattaatgtagcagaaatttcttggaattttatttttgtaatgacagaaaagtgggcttagaaagtattcaagatgttacaaaatttacatttagaaaatattgtagtatttgaatactgtcaacttgacagtaactttgtagacttaatggtattattaaagttctttttattgcagtttggaaagcatttgtgaaactttctgtttggcacagaaacagtcaaaattttgacattcatattctcctattttacagctacaagaactttcttgaaaatcttatttaattctgagcccatatttcacttaccttatttaaaataaatcaataaagcttgccttaaattatttttatatgactgttggtctctaggtagcctttggtctattgtacacaatctcatttcatatgtttgcattttggcaaagaacttaataaaattgttcagtgcttattaaaaaaaaaaaaaaaaaaaaaaaaaaaa

SEQ ID NO: 411 - DNA, 1272 bp, Homo sapiens
accactgtatttaagcccccaaacagctggtgctgtgaacgaaacattcagaacagagagctagctactgctggataaataccaagctggagacctgtacttaacaactgttgagtctctaaaaatggacaggaaaattaaaaacacatttaaaaagtgcttaataaaatgtttttgatttatagttttaattatattcccctgtgctatagttttttgaatttgcttaatttgggggagatttacattttaaaatatggatatgcataagccatcccaaaggtaaccataaaaatatctactaactctacaaagttttaacaaatttttaaaagtacagtaaaaatacaaatctttctaaaagttgttgagagcatacagaatccatgaactctctttatagaagtgaaaataaaatatgcattacctgaattcacttctagataatttatgtgcagactgcaataaaaactgaatgaagttttctagctgtggaatagatgtcctcatggcagaattttcaaaccatttttctggtagacatgctgctacctgttaatcaaaacacatggctggtttacaatgacagttatctaagaaatcttgctaatataatctcatagtgatactgtaagctgagtatcattctccccattttatagtttatggttaaataaaaatttctaaagatttccctttgtgtccaaggctacatatattttggaattcattctttaatgctaagaacttaaaatacactactctctatgaacactccctggtagtactagtaattctttctatattcttgtatttgtgagtcattaaatctgtacaaaacataatttacaactaaaaaccaaaaatgtctagacacaaaatatttggtcaatacaactctaaaatacatacattcactattattttataaagaaattggatggcctagcatatgatctatatggagttaaggaaccaaatgggtgattctaagatacaaagaatgaaagataaattaattatgtttttaatcttctatcagtgtaatacattgccttaattgtaaagcagcagaatgaatcaatgtaggtgcattcaatttttcttttggaaatggaaattacattttatcattgtcatcctaagagtaatacaagattttgagaaaagttttggtaaaaacagaaaaatgttagaaaaaatttaaaaagtaaaaaaaaaaaaaaaaaacycgggggtacttctrgrgcggccsggggcccatgcgttttt

SEQ ID NO: 412 - DNA, 1121 bp, Homo sapiens
  misc_feature (1105)..(1105): n equals a,t,g, or c
gcgggaacgaggacacatggggtggctcaccatgttatgcactctctggctgtggggacccagctggtgtttgcctcctcagattccaaggtgatcctggccatccggagagctaagaacctcaggcggctgctgtacgtctcatgcaacccccgggcagccatgggcaactttgtggacctctgcagagccccatctaaccgggtgaagggcattcccttccggccggtcaaggctgtggcagtggacctgttcccgcagaccccgcactgtgagatgctcatcctgtttgagagggtggagcaccccaatggcacaggggtcttggggccccacagccctccagctcaacccacaccaggacccccagataacaccctacaagaaactgggaccttcccctcatcctaggcccaggacccattatggggacaggagctgaagggctcccagggccccaggggcggggaaggcatggcttgctggccaggatattcagaggtaggcagccaaagggcacagaaccctgtgccccaccaggattggcctgctgctaggggccaggggccctgaccaggaagacaggtgggttcctgtagcctgttgcccatccccagggcctttgtggactagccaaggctgtgagggccagaataaacaactgctcaacaaagggtgtttctgtgatgagagccaggggtctgaacacagggcctgggtgccagggaaagggccaaactaggcctaggcagctctgcaagcctctctgcatggctgggggagtcagggcagagcttactttaaaaaagaatgttcgatttgatacttaaacttgaggagaggcagagagaggtctgggaactgcaccagctgggggcatggggtggagaacactgggcagagttggcccctctgtggccagcctggccctcagcccagcagagagggcatcaaccaaggaaggggccatgctggggtgctgctcagctgttacaaaggcagggtccagcctgcagggaggccccaggaggggatctggccagtcaagggtccacagggtgccagcctctcaccctcagaataaagacatcagccattcccttknaaaaaaaaaaaaaaaa

SEQ ID NO: 413 - DNA, 531 bp, Homo sapiens
  misc_feature (531)..(531): n equals a,t,g, or c
gctggcctacaatatgacatttcttatagatttgcatacatatagccaaaggaacagctccatgttttctgaacggcctagagaacatctctcaggtgcctctcctctttctctttgtgttcatcattttggtgaattactggaagatggcagttccaactgaaaaggccattttaaacatttttaagtgtacaattctgtggcattaagtacattcatattgttgtgttatcattacccccatccatttccagaatgtcttcatgttcccagacagtaagtccccattcctctctcctaccagtccctggccatcaccaccattctactttttgtcttaatgaatttgactactctcggtagctgatccttacatcttaacttattctttctgaaccgtgtctagtttatttcttaaaaacaaaaaaactggaggtgatctttacactgatgtattagaactttaccatccttccttattcagygtagcctttaaaataagctccggtacttttcagtggggaatgctgn

SEQ ID NO: 414 - DNA, 475 bp, Homo sapiens
  misc_feature (454)..(454): n equals a,t,g, or c
  misc_feature (463)..(463): n equals a,t,g, or c
  misc_feature (469)..(469): n equals a,t,g, or c
  misc_feature (473)..(473): n equals a,t,g, or c
ggcttgggggaccaaaagacacaaaccccacacctcctattttcgtgttccccaggagacatcaagcaggaaggggtcggtgcatttcgagaggggccgccctaccagcgccggggtgccctgcagctgtggcaatttctggtggccttgctggatgacccaacaaatgcccatttcattgcctggacgggccggggaatggagttcaagctcattgagcctgaggaggtgggcctctcggatgttcccagccctcctttccaaagtttacagcctggaggtgggagaacctgggaaatggtggcacgtgcctccatcatgattcttgctttacctaacctgaawtcttgccaagcctaagtctgtgggctgatgctttgttgcagagctagcttggcactttgcaccaagaatctcaagtgctctttctgaccttacccccaatttttttctntggcccaanggaagnaatntt

SEQ ID NO: 415 - DNA, 675 bp, Homo sapiens
  misc_feature (595)..(595): n equals a,t,g, or c
  misc_feature (637)..(637): n equals a,t,g, or c
  misc_feature (646)..(646): n equals a,t,g, or c
  misc_feature (654)..(654): n equals a,t,g, or c
  misc_feature (658)..(658): n equals a,t,g, or c
agccccagtgggcctgtctccattccaagcctgccccccactatttcttcttccgaggtaccagggtttgaccaacatagctacccttttagttgccatcatccattgtctcttctctgcctctggaatatgaatgtagttcagtatctctgcccctacccccatctctgaagcaagcatgtcrctcttttttgagattatctgaagaattttgctgcagtagccagagggaaaccgggtaaaattttccctatagggaacatgggttaaaagtctcacaagcctcatctgctggtgtttcttggaatgcagagtttggcgtggctttctcagcttcctaagtgcatgttcatccttctagaaagctctttctcctcttggttccctgaaatggtgctctagacccactttccctcagggactgagcctctaacttaattttcctcagtccctttccctacagggagagacacaggtcacattaagaattcatactggccaggctcggtggctcacacctgtaatcccagcactttgggaggccarggcgggcagatcacctgaggtcgggagttcgagaccagcctgaccacgngggaaaaaaccatgtatctctactaaaaaataccaaaattancccggccgnggtgggcnccangccccgtgaaaacccca

SEQ ID NO: 416 - DNA, 883 bp, Homo sapiens
gctcgtgccgaattcggcacgagccatggtgcagagagggttggaagaaaacctgaaaggggtttgcatttaagcccctctgtccccaggacctagggaggaggcccaggtcccaggggcagcagccaaactccccaggccaaaaccccagattctaactcttcttagatggccctaatggcttccctggatgcagagaaggcccaaggacaaaagaaagtggaggagcttgagggagagatcactacattaaaccataagcttcaggacgcgtctgcagaggtggagcgactgagaagagaaaaccaggtcttaagcgtgagaatcgcggacaagaagtactaccccagctcccaggactccagctccgctgcggcgccccagctgctgattgtgctgctgggcctcagcgctctgctgcagtgagatcccaggaagctggcacatcttggaaggtccgtcctgctcggcttttcgcttgaacattcccttgatctcatcagttctgagcgggtcatggggcaacacggttagcggggagagcacggggtagccggagaagggcctctggagcaggtctggaggggccatggggcagtcctgggtgtggggacacagtcgggttgacccagggctgtctccctccagagcctccctccggacaatgagtcccccctcttgtctcccaccctgagattgggcatggggtgcggtgtggggggcatgtgctgcctgttgttatgggttttttttgcggggggggttgcttttttctggggtctttgagctccaaaaaataaacacttcctttgagggagagcacaccttaaaaaaaaaaaaaaaaaaaaaaaaaaaaaaaaaaaaaaaaaaaagggcggccgct

SEQ ID NO: 417 - DNA, 1014 bp, Homo sapiens
  misc_feature (983)..(983): n equals a,t,g, or c
  misc_feature (1014)..(1014): n equals a,t,g, or c
gacacgagcttctgtgagtttttccggtgcacgcgagtgcttctgaaacgtcagctgcgctcccctaggagtgctgagcccgcggaaccgcagccatgactgaggctgatgtgaatccaaaggcctatccccttgccgatgcccacctcaccaagaagctactggacctcgttcagcagtcatgtaactataagcagcttcggaaaggagccaatgaggccaccaaaaccctcaacaggggcatctctgagttcatcgtgatggctgcagacgccgagccactggagatcattctgcacctgccgctgctgtgtgaagacaagaatgtgccctacgtgtttgtgcgctccaagcaggccctggggagagcctgtggggtctccaggcctgtcatcgcctgttctgtcaccatcaaagaaggctcgcagctgaaacagcagatccaatccattcagcagtccattgaaaggctcttagtctaaacctgtggcctctgccacgtgctccctgccagcttcccccctgaggttgtgtatcatattatctgtgttagcatgtagtattttcagctactctctattgttataaaatgtagtactaaatctggtttctggatttttgtgttrtttttgttctgttttacagggttgctatcccccttcctttcctccctccctctgccatccttcatccttttatcctccctttttggaacaagtgttcagagcagacagaagcagggtggtggcaccgttgaaaggcagaaagagccaggagaaagctgatggagccaggacagagatctggttccagctttcagccactagcttcctgttgtgtgcggggtgtggtggaattaaacagcattcattgtgtgtccctgtgcctggcacacagaatcattcatacgtgttcaagtgatcaaggggtttcatttgctcttgggggattaggtatcatttggggaggaagcatgtgttctntgaggttgttcggctatgtcccagtgtcgtn

SEQ ID NO: 418 - DNA, 651 bp, Homo sapiens
  misc_feature (645)..(645): n equals a,t,g, or c
gcggcggcggcttctggaggggcaggttcagacaactcagtggagcattcagattacagagccaaactctcacagatcagacaaatctaccatacggagctggagaaatacgagcaggcctgcaacgagttcaccacccacgtgatgaatctcctgcgagagcaaagccggaccaggcccatctccccaaaggagattgagcggatggtcagcatcatccaccgcaagttcagctccatccagatgcagctcaagcagagcacgtgcgaggcggtgatgatcctgcgttcccgatttctggatgcgcggcggaagaracggaatttcaacaagcaagcgacagaaatcctgaatgaatatttctattcccatctcagcaacccttaccccagtgaggaagccaaagaggagttagccaagaagtgtggcatcacagtctcccaggtatcaaactggtttggaaataagcgaatccggtacaagaagaacataggtaaatttcaagaggaagccaatatttatgctgccaaaacagctgtcactgctaccaatgtgtcagcccatggaagccaagctaactcgccctcaactcccaactcggctggtcttycagttcttttaacmtgtcaaactctggagatttgntcatga

SEQ ID NO: 419 - DNA, 640 bp, Homo sapiens
  misc_feature (600)..(600): n equals a,t,g, or c
  misc_feature (609)..(609): n equals a,t,g, or c
  misc_feature (619)..(619): n equals a,t,g, or c
gggccaacgatatgttggccaccaaagacgtggtgaccctggaggatttgcacgggcgacgcctgattaccctgaacgccaacaatcctttgcagcgacgcatcacatcagccatggaggctcggggtgttgcaggcgtctccagcgttgaaaccaccgccgcgcactccgcctgcggaatggtgtccggggggctcggcatcaccgtgtgtgatccattcaccgsctcctactcgaaatacccgggccttacgttcagaccgctggaccaggacatacccttcgaggtttcgatggtatttccgggtcaccagcagcgctccaagctcgcctcggatttcatgcaggtcgtggaaggtatcttcaggtcggagtttatttccatgattcccgtgaagcgtactaatcgcgagtcacttcagttcggttgagtaattcagcggcacccattgcacgcggcgccctgacacgcaaatgcccaggccggaaacgaaggtgcccggccgacmaggcgccttttcgagcagcttaacacgtctccggcatgtgcggtttcttgccgataaactcatatcaccgacgggtcgggaactgacggancgctggatnaaaatacggnaacataatttttggcctttgt

SEQ ID NO: 420 - DNA, 123 bp, Homo sapiens
  misc_feature (119)..(119): n equals a,t,g, or c
tcaaacgcgcccgcggacgctctagaactagtggatcccccgggctgcaggaattcgatatcaagcttatcgataccgtcgacctcgagggggggcccggtacccaattcgccctatantgag

SEQ ID NO: 421 - DNA, 642 bp, Homo sapiens
  misc_feature (509)..(509): n equals a,t,g, or c
  misc_feature (598)..(598): n equals a,t,g, or c
  misc_feature (608)..(608): n equals a,t,g, or c
  misc_feature (616)..(616): n equals a,t,g, or c
  misc_feature (622)..(622): n equals a,t,g, or c
tcggccgctctagccctagtggatcccccgggctgcaggaattcggcacgagctcgtgccggaaaattatgcatctcatctagtttcataaaaggaagtttggaggacctgctcccatcaaaacactggaagatgcagagacttttgtcagctcctggctaattagataatgctaatcatgtgagtagcaataaaaattcgaagtcctcccagttcagaatgctcacatctctttatatccagcatcctcttacatctgcacctatgctcaacgcactcaagcctcagcacaagcttcttcgtagttctagccttttcccggaaaatcagcttagtctgcccaccgtasccgctatgcttcgtgtcctaacamcamcttycccgggcacctgtcctaacgccaccttcccaggcacctgtcgtaacgccaccttccccgggcgcctgtcctaacgccaccttcccggcatacagagaatccgtgcccttttgtgccgcagtcacgttgngaccagctcttcaggtgttaggccggttggcccttcgcgtccttcatagaatctgatccagggaccacacgttgcatttaattggccgngctctttagnttcctttnttctgnacccccatttttcaaggggg

SEQ ID NO: 422 - DNA, 718 bp, Homo sapiens
  misc_feature (14)..(14): n equals a,t,g, or c
cccccttttagggngaaatgggtaccggcccccccccgactttttttttttttttttttttttttttttcaacaggtcaaaaagaacctttattactttttatgattgccacttatgctttcttgccagatgcctttggagcaggtgctttctgggctggagctttttgacccttctgagcttttggagcaggcgctgctttctggcctgtggctttctgggcaggaaccttctgggctggagcctttttactcgcggcggtgatcttttttgctggaactttagcagcagcagcagcagcagcagcagcagcagcagcagtacccttagtaccaggtgcttttttgggagaagctttcaggagagctgccttttgaagcttcttaacttcattcttgattattctgttcctcattttctttgccttcataactttaaaacgatcaaaatctgtcatcttggctttcctttctctggcttcaatcttcttggcccatcgtgtggctgcccattttgtattgatgtctgccttctgccaggcttgtcggacatacttctggtgggcactgtgcggaaacttgaggatgaaatcagtgagctgcatgcacttgaaaggcatggcctgtctcctcacttgagtgcaaggtccatcgaccaaagccctgttctgatcaataacatctacaatcgcgaccaattttccggcatgaggtccaaa

SEQ ID NO: 423 - DNA, 4397 bp, Homo sapiens
  misc_feature (3)..(4): n equals a,t,g, or c
  misc_feature (14)..(14): n equals a,t,g, or c
ccnncctatattanttacgcctgcaggtaccggtccggaattcccgggtcgacccacgcgtccgcggacgcgtgggggagttttgttgaagttgcaaagtcctggagcctccagagggctgtcggcgcagtagcagcgagcagcagagtccgcacgctccggcgaggggcagaagagcgcgagggagcgcggggcagcagaagcgagagccgagcgcggacccagccaggacccacagccctccccagctgcccaggaagagccccagccatggaacaccagctcctgtgctgcgaagtggaaaccatccgccgcgcgtaccccgatgccaacctcctcaacgaccgggtgctgcgggccatgctgaaggcggaggagacctgcgcgccctcggtgtcctacttcaaatgtgtgcagaaggaggtcctgccgtccatgcggaagatcgtcgccacctggatgctggaggtctgcgaggaacagaagtgcgaggaggaggtcttcccgctggccatgaactacctggaccgcttcctgtcgctggagcccgtgaaaaagagccgcctgcagctgctgggggccacttgcatgttcgtggcctctaagatgaaggagaccatccccctgacggccgagaagctgtgcatctacaccgacaactccatccggcccgaggagctgctgcaaatggagctgctcctggtgaacaagctcaagtggaacctggccgcaatgaccccgcacgatttcattgaacacttcctctccaaaatgccagaggcggaggagaacaaacagatcatccgcaaacacgcgcagaccttcgttgccctctgtgccacagatgtgaagttcatttccaatccgccctccatggtggcagcggggagcgtggtggccgcagtgcaaggcctgaacctgaggagccccaacaacttcctgtcctactaccgcctcacacgcttcctctccagagtgatcaagtgtgacccrgactgcctccgggcctgccaggagcagatcgaagccctgctggagtcaagcctgcgccaggcccagcagaacatggaccccaaggccgccgaggaggaggaagaggaggaggaggaggtggacctggcttgcacacccaccgacgtgcgggacgtggacatctgagggcgccaggcaggcgggcgccaccgccacccgcagcgagggcggagccggccccaggtgctccmctgacagtccctcctctccggagcattttgataccagaagggaaagcttcattctccttgttgttggttgttttttcctttgctctttcccccttccatctctgacttaagcaaaagaaaaagattacccaaaaactgtctttaaaagagagagagagaaaaaaaaaatagtatttgcataaccctgagcggtgggggaggagggttgtgctacagatgatagaggattttataccccaataatcaactcgtttttatattaatgtacttgtttctctgttgtaagaataggcattaacacaaaggaggcgtctcgggagaggattaggttccatcctttacgtgtttaaaaaaaagcataaaaacattttaaaaacatagaaaaattcagcaaaccatttttaaagtagaagagggttttaggtagaaaaacatattcttgtgcttttcctgataaagcacagctgtagtggggttctaggcatctctgtactttgcttgctcatatgcatgtagtcactttataagtcattgtatgttattatattccgtaggtagatgtgtaacctcttcaccttattcatggctgaagtcacctcttggttacagtagcgtagcgtgsccgtgtgcatgtcctttgcgcctgtgaccaccaccccaacaaaccatccagtgacaaaccatccagtggaggtttgtcgggcaccagccagcgtagcagggtcgggaaaggccacctgtcccactcctacgatacgctactataaagagaagacgaaatagtgacataatatattctatttttatactcttcctatttttgtagtgacctgtttatgagatgctggttttctacccaacggccctgcagccagctcacgtccaggttcaacccacagctacttggtttgtgttcttcttcatattctaaaaccattccatttccaagcactttcagtccaataggtgtaggaaatagcgctgtttttgttgtgtgtgcagggagggcagttttctaatggaatggtttgggaatatccatgtacttgtttgcaagcaggactttgaggcaagtgtgggccactgtggtggcagtggaggtggggtgtttgggaggctgcgtgccagtcaagaagaaaaaggtttgcattctcacattgccaggatgataagttcctttccttttctttaaagaagttgaagtttaggaatcctttggtgccaactggtgtttgaaagtagggacctcagaggtttacctagagaacaggtggtttttaagggttatcttagatgtttcacaccggaaggtttttaaacactaaaatatataatttatagttaaggctaaaaagtatatttattgcagaggatgttcataaggccagtatgatttataaatgcaatctccccttgatttaaacacacagatacacacacacacacacacacacacacaaaccttctgcctttgatgttacagatttaatacagtttatttttaaagatagatccttttataggtgagaaaaaaacaatctggaagaaaaaaaccacacaaagacattgattcagcctgtttggcgtttcccagagtcatctgattggacaggcatgggtgcaaggaaaattagggtactcaacctaagttcggttccgatgaattcttatcccctgccccttcctttaaaaaacttagtgacaaaatagacaatttgcacatcttggctatgtaattcttgtaatttttatttaggaagtgttgaagggaggtggcaagagtgtggaggctgacgtgtgagggaggacaggcgggaggaggtgtgaggaggaggctcccgaggggaaggggcggtgcccacaccggggacaggccgcagctccattttcttattgcgctgctaccgttgacttccaggcacggtttggaaatattcacatcgcttctgtgtatctctttcacattgtttgctgctattggaggatcagttttttgttttacaatgtcatatactgccatgtactagttttagttttctcttagaacattgtattacagatgccttttttgtagttttttttttttttatgtgatcaattttgacttaatgtgattactgctctattccaaaaaggttgctgtttcacaatacctcatgcttcacttagccatggtggacccagcgggcaggttctgcctgctttggcgggcagacacgcgggcgcgatcccacacaggctggcgggggccggccccgaggccgcgtgcgtgagaaccgcgccggtgtccccagagaccaggctgtgtccctcttctcttccctgcgcctgtgatgctgggcacttcatctgatcgggggcgtagcatcatagtagtttttacagctgtgttattctttgcgtgtagctatggaagttgcataattattattattattattataacaagtgtgtcttacgtgccaccacggcgttgtacctgtaggactctcattcgggatgattggaatagcttctggaatttgttcaagttttgggtatgtttaatctgttatgtactagtgttctgtttgttattgttttgttaattacaccataatgctaatttaaagagactccaaatctcaatgaagccagctcacagtgctgtgtgccccggtcacctagcaagctgccgaaccaaaagaatttgcaccccgctgcgggcccacgtggttggggccctgccctggcagggtcatcctgtgctcggaggccatctcgggcacaggcccaccccgccccacccctccagaacacggctcacgcttacctcaaccatcctggctgcggcgtctgtctgaaccacgcgggggccttgagggacgctttgtctgtcgtgatggggcaagggcacaagtcctggatgttgtgtgtatcgagaggccaaaggctggtggcaagtgcacggggcacagcggagtctgtcctgtgacgcgcaagtctgagggtctgggcggcgggcggctgggtctgtgcatttctggttgcaccgcggcgcttcccagcaccaacatgtaaccggcatgtttccagcagaagacaaaaagacaaacatgaaagtctagaaataaaactggtaaaaccccaaaaaaaaaaaaaaaaaaaaaaaaaaaaaaaaaaaaaaaaaaaaaa

SEQ ID NO: 424 - DNA, 1965 bp, Homo sapiens
cgttccccgggagaaacatggccgggagcagcgaggaggcgccagactacgggcgaggcgtcgtgattatggatgattggccagggtatgacttgaatttattcacgtacccacagcactattatggagacttggagtatgtcctcatccctcatggtatcattgtggacagaattgagcggctggccaaggatattatgaaagacataggatatagtgacatcatggtcctgtgtgtgcttaaaggaggttacaaattctgtgctgatctcgtagaacaccttaagaacatcagccgaaattcagatcgatttgtctcaatgaaggttgatttcatcagactaaaaagttacaggaatgaccagtccatgggtgagatgcagataatcggaggcgatgatctttcaacgctggctggaaagaatgttctcattgttgaggatgttgtcggaactgggaggaccatgaaagcactactcagcaatatagagaaatacaagcccaacatgattaaggtagccagtttgttggtgaagagaacatccagaagtgacggctttagacctgactatgctggatttgagattccaaacttatttgtggtgggatatgccttagattacaatgaatacttcagagatctgaatcacatatgcgtcatcaatgagcacggtaaagaaaaatatcgagtctaaagacatgaattctcaccactaaagtcccagataggcatcatatttacgcctgtacttgggaagccagctgtcaagtttgtccccccaggcatcttcactcagcaggatataaaagaaaaaaatgttcaaatgagagagctttcttttctgaggttaatataaagagtatcaaaggttcctaaggaaaagaaagcagtgcttttatttgacttgttccaaattaaacactccgccttgtgactcagcaatgctatctaccttcacactcctgagctccgccttcctttgttttgatacagtcattatatttgattagtattcccaggaatacccccacctagttactcaaatatttttcacttaactttttatactcttattttggtaataagcttacaatattaagaagctggggacttttttttaactgaagacttgagtcccctataccgggaatgcagctattaatagattcccatattttaaaaggagggaaaggacaatttaatawaaatttctgtttgtgcatttctgacaggccattattatctgctttgacaaagcctttctgaaacgcagtgtacaatgaatcttaatgatgttatgaaacgagctttgctcggggctcttgattggagcttccggtatgtgatgacggtatgtcatgtatgcatggatgtactcaactgtgtttaatactctgaattttaattagaaaaaaatacaatagcagcaaggccctggtttctaagctgtatccttttattcatgtgggacatgagcaaatggcagaattaggggcgagtgctttcaatgctcgaaactaagcaagtataaatttttcctcttatttgcatgaaaggacaagacactgttatgccctgtcctaaatgtgaagacagaggttgaattttttaaaaaatatctttaaaagactgatcacaaaatccaaggtgctacaggaaacaagcacactcaagaaagtttttttctgaataacakttttttccaatttctccgttttataagacatttcctaatttatggggattttaattgaaaataaacttgagtcccaatagagctgtttttttctcacttcctacaaaatgcaaatgcaaaataaataactaagcagcttttgtttggttctgaaccgtatgtggcgtattgttattaggttctagcttcctttaaactaataaagaataagaaaacttaaaaaaaaaaaaaaaaaaaaaaaaaaaaaaaaaaaaaaaaaaaaaaaccc

SEQ ID NO: 425 - DNA, 1362 bp, Homo sapiens
cacaacaatgaccttcacatgctttgtgttttttgacatgttcaatgcactaagttccagatcccagaccaagtctgtgtttgagattggactctgcagtaatagaatgttttgctatgcagttcttggatccatcatgggacaattactagttatttactttcctccgcttcagaaggtttttcagactgagagcctaagcatactggatctgttgtttcttttgggtctcacctcatcagtgtgcatagtggcagaaattataaagaaggttgaaaggagcagggaaaagatccagaagcatgttagttcgacatcatcatcttttcttgaagtatgatgcatattgcattattttatttgcaaactaggaattgcagtctgaggatcatttagaagggcaagttcaagaggatatgaagatttgagaactttttaactattcattgactaaaaatgaacattaatgttaaagacttaagactttaacctgctggcagtcccaaatgaaattatgcaactttgatatcatattccttgatttaaattggcttttgtgattgagtgaaactttataaagcatatggtcagttatttaattaaaaaggcaaaacctgaaccaccttctgcacttaaagaagtctaacagtacaaatacactatctatcttagatagatatatttttttttatttttaaatattgtactatttatggtggtggggctttcttactaatacacaaataaatttaatcatttcaaaggcattctatttggtttagaagttgattcccaggagtgccatatttcagctactgtatttcctttttcttgtaatgtaagcagctcagataccatgtgctatcatttttgtatcaagttttttgcacaggatgtgaccactgtcagatcactgttcttttctttctttttgtgattgaaaagcctatactacaatttgaagtaaawttttgtttttcttagtaagtgtaaatggttgctttatttttattttaaaaaggtatgtctttggtttggcagaattcatgcagggctatcaagtggtgttctagggtaacagtgtccataattaacgcttagtcatagagtcaaaaacatttaagactgattgggttgaagtttataataaattatattaacatgtcttcctttttgaggtaaagatatatactttgtcaaatatcattttgtcatcctctaaatataaatccaaatacctcagctaagtaattctattttattatttttactgttatgtatgtttttaakcatatttcttaggaagtataggccactggacttagaataaaaagtccccaaacccaacaaatggtttatgaa

SEQ ID NO: 426 - DNA, 1121 bp, Homo sapiens
  misc_feature (1112)..(1112): n equals a,t,g, or c
gcccacgcgtccgccaggaactattcggaagtgtgattggctgttgctaggaaccgtctcaaggccttatgggccctggttacggaagccgaggaaggctgagcgcgggctctcaaggaaagtagtcgcggaatctcagttagcggtggagaggcagtatgtccggttcaatggcgactgcggaagctagcggcagcgatgggaaagggcaggaagtcgagacctcagtcacctattaccggttggaggaggtggcaaagcgcaactccttgaaggaactgtggcttgtgatccatgggcgagtctacgatgtcacccgcttcctcaacgagcaccctggaggagaagaggttctgctggaacaagctggtgtagatgcaagtgaaagctttgaagatgtaggacactcttctgatgccagagaaatgctaaagcagtactacattggtgatatccatccgagtgaccttaaacctgaaagtggtagcaaggacccttcaaaaaatgatacatgcaaaagttgctgggcatattggattttacccatcataggcgctgttctcttaggtttcctgtaccgctactacacatcggaaagcaaatcctcctgaggaggccttgctgaagttagaaagtgcatccactttggggcgaaaactagagacttgcttgggggctgcagaagtgccctctcctcgaatcctgccagttgcattcttcccccttggagccaagacgattggccagacatcacctcagatctgagaccagcgtcttccatctctcagagccttactcccaaagtacctgctcactgttccgtgttgaacaattgccggtgtttcctctcttcactggtttccatgagtacccttatatttcacaactttctgttcataagttatagtgacattgctctttggtaaaaatgcctgctttccaatactttgattgcatattagacattcttaacagggcggcagtctagtgttgaaagttttatttttccatttttcttttaagtaaattttttttaaaaaattctgatttagggctaggtgtggtggcycagggccgtwaatccgggcacttgggggggccaaggttgggangatcggttt

SEQ ID NO: 427 - DNA, 614 bp, Homo sapiens
  misc_feature (611)..(614): n equals a,t,g, or c
cgggtcgacccacgcgtccggcagatttgtggtgcgttctgagccgtctgtcctgcgccaagatgcttcaaagtattattaaaaacatatggatccccatgaagccctactacaccaaagtttaccaggagatttggataggaatggggctgatgggcttcatcgtttataaaatccgggctgctgataaaagaagtaaggctttgaaagcttcagcgcctgctcctggtcatcactaaccagatttacttggagtacatgtgaaagaaaacgtcagtctgcctgtaaatttcagcaagccgtgttagatggggagcgtggaacgtcactgtacacttgtataagtaccgtttacttcatggcatgaataaatggatctgtgagatgcactgctacctggtactgctttcagtgtgttccccctcagcccctccggcgtgtcaggcatactctgagtagataatttgtcatgcarcgcatgcaatcagaatctcactgagccacccatcattgtgaaataattacctcarttgtwcaggacttggtgatcaggattcaggcactcacttggattctactgctcaataaacgttattaaacttgaaaaaaannnn

SEQ ID NO: 428 - DNA, 1804 bp, Homo sapiens
  misc_feature (56)..(56): n equals a,t,g, or c
  misc_feature (213)..(213): n equals a,t,g, or c
gattaggtgagaatggagcatctgggaaacagaactcagaacaaatagacatgcangatatcaaaagtgatttgagaaaaccgctagttaatggaatctgtgattttgataaaggagatggttctcatttaagcaaaaacattccaaatcataaaacttccaatcatgtaggaaatggtgagatatctccaatggaaccacaagggactttanatatcactcagcaagatactgccaaaggtgatcaactagaaagaatttctaatggacctgtattaactttggggtgggttcatctgtgagcagtatacaggaggcttcaaatgcggcaacacagcaatttagtggtactgatttgcttaatggacctctagcttcaagtttgaattcagatgtgcctcagcaacgcccaagtgtagttgtctcaccacattctacaacctctgttatacagggacatcaaatcatagcagttcccgactcaggatcaaaagtatcccattctcctgccctatcatctgacgttcggtctacaaatggcacagcagaatgcaaaactgtaaagaggccagcagaggatactgatagggaaacagtcgcaggaattccaaataaagtaggagttagaattgktacaatcagtgaccccaacaatgctggctgcagcgcaacaatggttgctgtgccagcaggagcagatccaagcactgtagctaaagtagcaatagaaagtgctgttcarcaaaagcaacagcatccaccaacatatgtacagaatgtggtcccgcagaacactcctatgccaccttcaccagctgtacaagtgcagggccagcctaacagttctcagccttctccattcagtggatccagtcagcctggagatccaatgagaaaacctggacagaacttcatgtgtctgtggcagtcttgtaaaaagtggtttcagacaccctcacaggttttctaccatgcagcaactgaacatggaggaaaagatgtatatccagggcagtgtctttgggaaggttgtgagccttttcagcgacagsggttttcttttattacccacttgcaggataagcactgttcaaaggatgccctacttgcaggattaaaacaagatgaaccaggacaagcaggaagtcagaagtcttctaccaagcagccaactgtagggggcacaagctcaactcctagagcacaaaaggccattgtgaatcatcccagtgctgcacttatggctctgaggagaggatcaagaaaccttgtctttcgagattttacagatgaaaaagagggaccmataactaaacacatccgactaacarctgccttaatattaaaaaatattggtaaatattcagaatgtggtcgcagaaacatgaatgaagattgaaaaagaattttgctgtgcagccttccatatttagaaagattgttaaagagacatgaaaataacttatcagtgctagccattagtaacatggaagcttcctccacccttgccaaatgcctttatgaacttaattttacagttcagagtaaggaacaagaaaaagactcagaaatgctgcagtgaaaaataattccacttacacagtgggggactcaaagtcagccacatttcacatactgttactgaagaaagcaccaagtcttaatggaacaaagaccatagaatgaattattttatctcctcccatgatgctgagaggaagcttcgtattctgatctctgagtgaatccctttgttctctgtttaaaaaaatctaaaaagaaaaaaaaaaaaaaaaaaactcga

SEQ ID NO: 429 - DNA, 1708 bp, Homo sapiens
  misc_feature (10)..(10): n equals a,t,g, or c
  misc_feature (1564)..(1564): n equals a,t,g, or c
  misc_feature (1610)..(1610): n equals a,t,g, or c
  misc_feature (1663)..(1663): n equals a,t,g, or c
  misc_feature (1688)..(1688): n equals a,t,g, or c
  misc_feature (1692)..(1692): n equals a,t,g, or c
accaaracyntgtgtcaaaaaaaaaaaaagaatatagatttttaaatggcttttacttttatattcgctaaactttctcaaactggatcctgcttattacaggaaagagttcttggttgttttctccttggccctatccctgatttacccttagagccacaccagggtatgttgaggtgatccagtatatggacagaggaagggaaacagctaagaatgactccagcccccatcctatgcactcacagaagcttcccatatcctcttggagagagaggaagaaagtttttccttttattccttatagtctggctcccactaaaatatgtcaaggcataaagtcttgctattccatcaattttagaggatgtgacaaggggcctttcctttttctcaaaccaaaacggttacagaccctagatattccctaagggaggaagagaaagcttagagagagcagaagaaaagtcagaaggatccaaagtctcatagaaaggcactggggttggctctaggatccttctgattccgaaatctcattgctagccaaacaccaaggatctctgtaaagctaaagaagagtccaacaccccctaggattttcagggcttcgtctgaatgcttaagaaacttttctccacacatctggcatgtggggctctggctcttgcagattgcagtgcagaaatcataatcttgttgatacagggttgtgaggttgaataagccacaacaatcaaaacttctttccagttcatcccgagtcttgttgctcatgacccaccaagaagcattgatgacatctgtctgtttgcttcggttaatagccagacatgagcaagagattacaaattggaagatgaagaccaaaccaaggatgatcatgtaaaagaacagcaggacttggtggtggttgacagcacccaccagtccagccactgcaataaggagaaggaagactcccacagcaatgactccgccgatgatgtggatgctggacaccagacccaggcccttgccccaagcagccactccaatgagcaacaagctcaccagcatgtagaccacgttgagagcgcaaagcgcattcttggagcaggcaaagccgccacaaaccatctccccagctctggggacccaagtggtcccaaggacttggggggagggtattggggaccgtcttccaggaccccgacagcttctgtctctttaaatcgaggccagccaaacccaatactctgcgcctgcaccgtccctcccctgcctctggattggcgaaatgcgtggctaatcctggacgtccaaggcctgcatgccaatcaacccgcattacgtcaccgacccgccttctgtccctctccttttgttttttcattgggcgaaacttaaaactaggggcagggtttctagagactctcttagggactacagcctaaactccaaaagcttaggttgaaagctgagctttctgtggtcggagttaggagagggctaattcccagggagacggctctggaggaacttaggtgaaggggagacggcgggaggggcgggtagggggccnttctgagagttggggcaaaaaagggttccccccaaggaaggagggncccttccccaacccttttcccctgttttgcaatggaccccaactgacgccatnttttgttattgcgtcaagttcgggnacanccaagggccacaattg

SEQ ID NO: 430 - DNA, 1825 bp, Homo sapiens
  misc_feature (732)..(732): n equals a,t,g, or c
gagaagtctggcaggacagctggactccagcaggaggggtgggtgccggaggcggggccggggcccctggagctggggtccgaggtgagcacgtctgtgatgcggctgaagctggaggtggaggagaagaagcaggccatgctgctgctgcagagagcgctggcgcagcagcgagacctcacggcccggcgggtcaaggagacagagaaggcgctgagccggcagctgcaacggcagaaggaggcmctacgaggccaccatccagcggcacttggccttcattgaccagctgattgaggacaagaaggtcctgagtgaaaagtgcgaggctgtggtggccgagctgaagcaggaggaccagagatgcaccgagcgtgtggcccaggcacaggcgcagcacgagctggagattaaaaaactcaaagaattaatgagcgccaccgagaaagcccgccgggagaagtggatcagtgagaaaaccaagaagatcaaggaggtcactgtccgaggtctggagcccgagatccagaagctgattgcaaggcacaagcaggaagtgcggaggctcaagagcctgcacgaggcggagctgctgcagtcggatgagcgggcctcgcagcgctgcctgcgccaggccgaggagctgcgggagcagctggagcgggagaaggaggcgctgggccagcaggarcgcgaacgtgctcggcagcggttccagcagcacctggagcnaggagcagtgggcgctgcagcagcaacggcagcggctgtacagtgaggtggctgaggagagggagcggctgggccagcaggcagccaggcagcgggcrgagctggaagagctgaggcagcagctggaggagagcagctctgcactgacccgagccctgagggctgagtttgagaagggcagggaggagcaggagcgccggcaccagatggagctgaataccctgaagcagcagctggagctggagaggcaggcgtgggaggccggccgcaccaggaaggaggaggcgtggctgctgaaccgggaacaggagctgagggaagaaatccggaaaggccgggacaaggagattgagctggtcattcaccgctggaggccgacatggcgctggccaaggaggagagtgagaaggctgccgagagccgcatcaagcgcttacgggacaagtacgaggccgagctctccgagctggagcagtcggagcggaagcttcaggagcggtgctcggagctgaagggccagcttggggaggccgagggcgagaatctgcgtctgcagggccttgtgcggcagaaggagcgggcgctggaggatgcgcaggcggtgaacgagcagctttctagcgagcgcagcaacctggcccaggtgatccgccaggagttcgaggaccggctggcagcctctgaggaggagacgcggcaggccaaggccgagctggccacgctgcaggcccgccagcagctggagctggaggaggtgcaccggagggtgaagacagccctcgcgaggaaggaggaggccgtgagcagcctccggacacaacatgaggctgcggtgaagcgggccgaccacctggaggagctgctggagcagcacaggaggcccacgccaagtaccaagtgaccagggatgccgggaacactgtcgaagaacggaaggcagaggacagaggctggacgtgggcccaraggcccacagggacgcccacctgccccccacagaggctggtggttgagatgcccacggctaagcacctgtggctgcattttaacagtaaaggaggccgttgwtttcaaaaaaaaaaaaaaaaaaaaa

SEQ ID NO: 431 - DNA, 2861 bp, Homo sapiens
  misc_feature (2853)..(2853): n equals a,t,g, or c
atgatagattctttttcttttcccccctagtgtttactaaaggacaagtcaccacaggacagtacaggatgcttgccaaaagaggtggatatgtctgggttgaaactcaagcaactgtcatatataacaccaagaattctcaaccacagtgcattgtatgtgtgaattacgttgtgagtggtattattcagcacgacttgattttctcccttcaacaaacagaatgtgtccttaaaccggttgaatcttcagatatgaaaatgactcagctattcaccaaagttgaatcagaagatacaagtagcctctttgacaaacttaagaaggaacctgatgctttaactttgctggccccagccgctggagacacaatcatatctttagattttggcagcaacgacacagaaactgatgaccagcaacttgaggaagtaccattatataatgatgtaatgctcccctcacccaacgaaaaattacagaatataaatttggcaatgtctccattacccaccgctgaaacgccaaagccacttcgaagtagtgctgaccctgcactcaatcaagaagttgcattaaaattagaaccaaatccagagtcactggaactttcttttaccatgccccagattcaggatcagacacctagtccttccgatggaagcactagacaaagttcacctgagcctaatagtcccagtgaatattgtttttatgtggatagtgatatggtcaatgaattcaagttggaattggtagaaaaactttttgctgaagacacagaagcaaagaacccattttctactcaggacacagatttagacttggagatgttagctccctatatcccaatggatgatgacttccagttacgttccttcgatcagttgtcaccattagaaagcagttccgcaagccctgaaagcgcaagtcctcaaagcacagttacagtattccagcagactcaaatacaagaacctactgctaatgccaccactaccactgccaccactgatgaattaaaaacagtgacaaaagaccgtatggaagacattaaaatattgattgcatctccatctcctacccacatacataaagaaactactagtgccacatcatcaccatatagagatactcaaagtcggacagcctcaccaaacagagcaggaaaaggagtcatagaacagacagaaaaatctcatccaagaagccctaacgtgttatctgtcgctttgagtcaaagaactacagttcctgaggaagaactaaatccaaagatactagctttgcagaatgctcagagaaagcgaaaaatggaacatgatggttcactttttcaagcagtaggaattggaacattattacagcagccagacgatcatgcagctactacatcactttcttggaaacgtgtaaaaggatgcaaatctagtgaacagaatggaatggagcaaaagacaattattttaataccctctgatttagcatgtagactgctggggcaatcaatggatgaaagtggattaccacagctgaccagttatgattgtgaagttaatgctcctatacaaggcagcagaaacctactgcagggtgaagaattactcagagctttggatcaagttaactgagctttttcttaatttcattcctttttttggacactggtggctcactacctaaagcagtctatttatattttctacatctaattttagaagcctggctacaatactgcacaaacttggttagttcaatttttgatcccctttctacttaatttacattaatgctcttttttagtatgttctttaatgctggatcacagacagctcattttctcagttttttggtatttaaaccattgcattgcagtagcatcattttaaaaaatgcacctttttatttatttatttttggctagggagtttatccctttttcgaattatttttaagaagatgccaatataatttttgtaagaaggcagtaacctttcatcatgatcataggcagttgaaaaatttttacaccttttttttcacattttacataaataataatgctttgccagcagtacgtggtagccacaattgcacaatatattttcttaaaaaataccagcagttactcatggaatatattctgcgtttataaaactagtttttaagaagaaattttttttggcctatgaaattgttaaacctggaacatgacattgttaatcatataataatgattcttaaatgctgtatggtttattatttaaatgggtaaagccatttacataatatagaaagatatgcatatatctagaaggtatgtggcatttatttggataaaattctcaattcagagaaatcatctgatgtttctatagtcactttgccagctcaaaagaaaacaataccctatgtagttgtggaagtttatgctaatattgtgtaactgatattaaacctaaatgttctgcctaccctgttggtataaagatattttgagcagactgtaaacaagaaaaaaaaaatcatgcattcttagcaaaattgcctagtatgttaatttgctcaaaatacaatgtttgattttatgcactttgtcgctattaacatcctttttttcatgtagatttcaataattgagtaattttagaagcattattttaggaatatatagttgtcacagtaaatatcttgttttttctatgtacattgtacaaatttttcattccttttgctctttgtggttggatctaacactaactgtattgttttgttacatcaaataaacatcttctgtggaccaggaaaaaaaaaaaaaaaaaaaaaaaaaaaaaaaaaaaaaaaaaggggggnccccccaa

SEQ ID NO: 432 - DNA, 361 bp, Homo sapiens
ttcgtcgaggtgagccagctctatgactgcaactggatcgtggtcaactgctccacaccggccaactacttccacgtgctgcgccggcagatcctgctgcccttccgcaagccgctgattatcttcacacctaaatctctgctgaggcacccagaggccaagtccagctttgaccaaatggtatccgggaccagcttccagcgggtgattcctgaagatggggccgcagcacgggccctgagcaggtgcagcggctcatcttctgcacgggaaaggtgtactatgacctggtgaaggagcggaaggccagggacctgggaggagaaagtggccatcacgcgcctgggagcagatcttttcc

SEQ ID NO: 433 - DNA, 929 bp, Homo sapiens
  misc_feature (914)..(914): n equals a,t,g, or c
  misc_feature (923)..(923): n equals a,t,g, or c
  misc_feature (926)..(926): n equals a,t,g, or c
acactatagaaggtacgcctgcaggtaccggtccggaattcccgggtcgacccacgcgtccgcgcctgctgagtttcactcgcctcggagcacaccatggccgggcacctccgcacccccctgctcctgctggccgccctggccctgcaccctggcactggctgtggacttgggtcccagggcaagccggaaaaatggcaagtctccaatggtgggcggcctgttggacgccgatgtcaacgaggagggcgtgcagcaggcgctgaacttcgccctcagcgagtataacaaggcgagcaacgacgcgtaccacagccgcgcaatgcgcgtggtgcgcgtccgcaagcaggtcgtggctggattgaactacttcttggaggtggagattggacgaaccagatgtacaaagtctcagcccaacttggacagctgtccctttcatgaccagccacacctgatgaggaaaacgctctgctctttccagatatacactgtcccctggctgggcaagacctccttggtgaagtccagctgccaggatgcatagaggaccctatgacaggctgggccactcaaccccctttctcccatccctatccccttgtagagctcctaacctttagaaggttggctttgtccaagtgacagcccctcagtgttgtagtcccaaggggcaaatggagaattattctgggggcattttttgaacagctaagcaactgtaactcctttaattcctttccaaatgcaccagtatgtagtacatgtattctgttctatctcaataaaatgtaacatcagctaaaaaaaaaaaaaaaaaaaaaaaaaaaaaaaaaaaaaaaaaaaaaaaaaaaaaaaaaaaaaaaaaaaaaaaaaaaaaaaaaaaaaaaaaaaaaaaaaaaaaaaaaaggggnaaaaaaaanaanata

SEQ ID NO: 434 - DNA, 762 bp, Homo sapiens
  misc_feature (689)..(689): n equals a,t,g, or c
  misc_feature (691)..(691): n equals a,t,g, or c
  misc_feature (748)..(748): n equals a,t,g, or c
ctatagaaggtacgcctgcaggtaccggtccggaattcccgggtcgacccacgcgtccgaagttgtccaactcacagaaactgcccactttgtggttaccagacatgaagtcacctgttatatctgtaaaaaatgcctctactgagtactctgggacatacagttgtacagtcacaaacagagtaggctccgatcagtgccagctacgcctgaatgttgttccaccttcaaatagagctggaacaattgcaggagcaattgtaggaattttgcttgctctagtgctcattggtcttatcgtcttttgctgtcgtaaaaagcgcagagaagaaaaatatgaaaaggaagttcatcatgatatcagggaagacgtgcctcctccaaagagccgtgcgtccaccgcccggagctacatcggcagcaatcactcgtccctgggctccatgtctccttccaacatggaagggtatgccaagactcagtataaccaggtaccaagtgaagacttcgaacgtactcctcagagcccgactctcccacctgctaaggtagctgcccctaatctaagtaggatgggagcggtgcctgtgatgattccagcacagagcaaggacgggtccatagkgkaragcctctgsacttycatctgtgctttccaggtttcttttctcctcttcgggtaggaaganantccgtttctaaattctgctaaggggcttcaacatatatcaagaatttaaccagaacnggaaattatggctt

SEQ ID NO: 435 - DNA, 605 bp, Homo sapiens
  misc_feature (473)..(473): n equals a,t,g, or c
  misc_feature (510)..(510): n equals a,t,g, or c
  misc_feature (515)..(515): n equals a,t,g, or c
  misc_feature (518)..(518): n equals a,t,g, or c
  misc_feature (525)..(525): n equals a,t,g, or c
acactatagaaggtacgcctgcaggtaccggtccggaattcccgggtcgacccacgcgtccggcaacgatgaagccaccgcccctccgacaagcacagggggctataccaagcacaggctgctgaccgggctcccgggtcccacctctgcctcctcggccaccgggcaggactgcctggagccggacaccgaggaacctaacctgtccgcgccgaaggcagccactgatggcaccagagcccagcctccggcgagggaagctgctacaggactgctttttcgaggacagcagctccacggaagaggctggggacaaaatcgtcttcaatgtaaatctgagctctgtattcgtgagcaccctcgatgatgatgtgagcaccctcgatgacgattcgggtgtccctccagtgttaccaagttttccagaagaggattcccacacamcggaaccaaagcttttytggacamcgacngggaagggacccaacaacacttttccacttccactgnagagnggnccttggnctgaaaatgtgcttttctgacaaaaagtgaccggtcttgaagcctaatggttgacattcggggaatgggttatataatga

SEQ ID NO: 436 - DNA, 577 bp, Homo sapiens
  misc_feature (536)..(536): n equals a,t,g, or c
  misc_feature (552)..(552): n equals a,t,g, or c
  misc_feature (561)..(561): n equals a,t,g, or c
gggtcgacccacgcgtccgggcgcagaccaactgcgatgatgctgaagatgcaggctcctcttctgatggccttgggctgcttctcgccggccctgcggcccacgcacacgtccccgcccacgccccggtgaacccgccaccccaggtaattagctttttctgggagaactgccatgaaaggaaggaccctgtgctgctcaaaagcatgactctggaacctgaccccattgcctatcctgggaatgtgactatcagcgccgagctccaggtccgtgtccccctcagcagtcctcagaaggtggaattaattatagagaagaaagtggccaatttctggatcaaagttccatgtatgagccatgttcgttgcatctttgaagacatytgccaaatattagactttttaatcccccctggacagscctgsccagagcccctgcatacctatgggcttccctgcactgtsccctcaagcaggcacctactcaatgcccaaagactcaagttaccctgcccaaacacggacctgcccggnttgatcacctccgggntcctaccgnatttggcttttcctca

SEQ ID NO: 437 - DNA, 2398 bp, Homo sapiens
  misc_feature (1964)..(1964): n equals a,t,g, or c
  misc_feature (2091)..(2091): n equals a,t,g, or c
cccacgcgtccgcttaccgctgcttgctggagcgagcttccacttaactcccgtcccggtccccgcgcgccatgtgcctcctcggcgggctgagcgccccgccgctgctgctgctgccgctgctgccgctgctgctgtgtccgcctacgggcagggtgactgcagctttcccccagagctacctaatgccatacaaagtgtgggtgaccaacagagttttcctgaaaaattcacagtaacatacaaatgtaaagaaggctttgtaaaggttcctggcaaggcagactccgtggtctgtctcaacaataaatggtcagaggtggcagaattttgtaaccgtagctgtgatgttccaaccaggctacaatttgcatctctcaawaagtcwkwcaccaamcagaatyatttcccagtgggttccgttgtggaatatgaatgccgacctggctaccaaagggaccatcttctctcaggaaaactaacttgccttctgaattttacatggtccaaacccgatgaattttgtaaaagaaaatcatgtcctaatcctggagatttaagacatggtcatgtcaacattccaactgacatattgtatgctgcagttatccacttctcgtgtaacaaggggtacaggttagtcggtgcagcttctagttactgttccattgtaaatgacgatgttggctggagtgatccattgcctgaatgccaagaaattttttgtccggaaccaccaaaaattagcaatggagtcattctagatcaacagaacacttatgtgtatcaacaggctgtaaaatatgagtgtataaaaggcttcaccctgatcggagagaactctatttattgtactgttaagggtgaccaaggagaatggagtggccgccgcctgaatgcaaaggttctcagatttctacagtcataccagcaacagagacaccaccacagtaagtgcttcagctacaaagccacatcagctctcagaaacccaccactgcaaatgttacaggtaccaaagttacatcagctcctcagaaacccaccacagggaatgttccaggtaccgaagctacatcaactcctcagaaacccactacagcggatgtttcagagaccccgtcagcagtccagaatcccatcacggcaaatgcgtttgtacacaggccatgccagcaacccatagatcctccacagcaaaagcttcatttacacagagtcttccagcaacacgaaagtccactgctatacatgccccagtgactaagggtctccatacaacaaaaagattgacctctgctcgtattacagcaaaacagagttcagctactcccaggacaaccagcgcacctcatggaagagggaccctctcttcagatgctgccatcattgcagttggtaagtttggttcttcggcagttaaaaaaaattgtcatcactgtgggatgtacaatccttattcctggaggagaatattgtctttttactgccttaggaatactattaagatgaaatgtttaaggtcagggagaagacgggtaaatgcattttatcgacgtgtttggtggaccccgttaggtactcggtacgttcctaagtcttcccaaccgtgttcttgttccaaggtaattttagggcaacttcacatcatttggccagtcaatcaagtatccctgaacgcctattgtctcaatgcattatcattctaggggccaaaaacaacaataaggaagctattatcaatacagtttttaagcctcaagtgttttacaagtactcacaaactactycttggttgtttctagacgtctgttccagataaaccagaatgctacytttgattaacatcctgttcttttttccctttcctgtcagtgatttaaagcaaagatagctttaaaattattctgttgctatagacttaaggacatatctatgttgcaaatttctttttcttgttcccnagtcttttgttgttcattaaatatattatttgatgttatacattttaccaagaagattaataactcctaaagaagatggcaaaagaaatgtttaagaagcaatacagctaagttggcatattaaaanggaatgcccagtagaaaatatgcacattaaaaagtgaatattttaaaattatgtccttataagctgaggtctcctatttatgcatgcatgagtgaaacaagggactgaagctgaaaaggtgttttttaattattattattatttatagttcttttatagttcttttatattttgaatgaacctctccttagctaaaatagttatcttgaaagatttgaacagttggattcactttgtttgtttgatattttcaatagaaataaatgcattctaaatgaaaaaaaaaaaaaaaaaaaaaagggcggcc

SEQ ID NO: 438 - DNA, 1310 bp, Homo sapiens
  misc_feature (691)..(691): n equals a,t,g, or c
  misc_feature (792)..(792): n equals a,t,g, or c
  misc_feature (1257)..(1257): n equals a,t,g, or c
  misc_feature (1264)..(1264): n equals a,t,g, or c
  misc_feature (1272)..(1272): n equals a,t,g, or c
  misc_feature (1284)..(1284): n equals a,t,g, or c
gcgaccggcgagtgtgcgcaaacttcggccaccgacggcggtgcgcgaggaccgcggctgacctgccggcgccatgcgcgccctgcccggcctgcgggggctccgggggccgccgcccgcgctgcggctgccgctgctcctcctgtgcctcctcgccggcgagcgcgggagctgggcggacggcaacactacagcttcacctcttacaagtctacccatcccagaagtaatgatgacaaaatactctaacctttccttgaagagtcataacatctcgctgactgcttcacctcttacaagtctgcccatcccggaagtaatgatgacaaaatactctaacctttccttggagagtcataacttctcgctgactgcttcacctcttacaagtctgcccatcccggaagtaatgatgacaaaatactccaaccttttcttggaaagtcataacatctcactgactgaacattccagtgtgccagtggaaaaaaatatcactttagaacgaccttctgctgtagaactcacatgtcagttcacaacttctggggatgtgaattcagtaaatgtgacttggaaaaaaggggatgaacaacttaagaattaccatgtcagtgccacagaaggcatcctgtatacccagtacaagttttccatcattaatagcgaayaactgggaagctattcttgnttctttgaagaggaaaaggaacgaaggggcacatttaatttcggagtccctgaagttcagagaaaaaacaaaccattgatcacttatgtgggggattccgntgkcttggtgtgkaaatgccgacactgtgctcctttaaattggacctggtacagtggtaataggagtgtacaggttcctcttgatgktcacatgaatgaaaagtatgcgatcaatggaacaaacgcgaatgaaacaaggcttaagataatgcagctttcagaagacgataaaggatcttattggtgccatgcaatgttccagttgggcgagagccaagaaagtgttgaactggttgtgataagttatttggtgcccctcaaaccatttcttggaatagttgttgaagttattcttttagtggctattattctgttttgtgaaatgcacacccaaaagaaaaagatgcacatggatgatgggaaagaatttgaacaagttgaacagttgaaatcagacgatagcaacggcatagaaaataatgcccccaggcacagaaaaaatgaagctatgagccagtgaaagcngaacatngtgtcaanagtaataggagngtgtgtgcgtttccgttcccgccccc

SEQ ID NO: 439 - DNA, 745 bp, Homo sapiens
  misc_feature (636)..(636): n equals a,t,g, or c
  misc_feature (652)..(652): n equals a,t,g, or c
  misc_feature (722)..(722): n equals a,t,g, or c
tcgacccacgcatccgaagatgttcttgctgccccttccggctgccgggcgagtcgtcctccgacgtctgggcgtgaacagttctgggcacggggtctcgccgccgcagacatgacgaagggtcttgttttaggaatctatagtaaagacaaagaagatgatgtgccacagtttacgagtgcaggagagaatttcgataaattggtgtctggaaagttgagagaaattttgaacatatctggacctcctctgaaagcaggcaaaacccgaaccttttatggtctgcatgaggacttccccagcgtggtggtggtcggcctcggcagaaaggcagctggagtcgatgaccaggaaaactggcatgaaggcaaagaaaacatcagagtcgccattgcagcggggtgcaggcaggttcaagacctggaaatctcttctgtggaggtggatccctgtggagatgcacaggcggctgcggaaggagcagtgcttggtctctacgagtatgatgacctaaagcagaagaagaaggttgtcgtatctgcgaagctccatggaagtggagaccaggaggcctgcagaagggtgtcctctttgcttctggcagaacttggcacgccacttgatggagactccagncaatgagatgacgccnactaaatttgctgaaattattgagaagaatctcaaaagtgctagtagtaaaacagaggtccacgtcaganccaaatcttggatttggggaacc

SEQ ID NO: 440 - DNA, 915 bp, Homo sapiens
  misc_feature (4)..(4): n equals a,t,g, or c
  misc_feature (13)..(13): n equals a,t,g, or c
  misc_feature (23)..(23): n equals a,t,g, or c
  misc_feature (903)..(903): n equals a,t,g, or c
cccnaactttggnccccttaaancggcccccccttttttttttttttttttttttggggggaaaaagtcagtttatttgatgtgtttcttagtaatggaattgtggggaagaacaaaagcgggctctgggactcacattgctttgggggaggctcaagcttcccagaatcccttgtccctccccactttgggcacttaggggtggggctggggagtgagagggacaaggcagggcatgattgattaaagctaacgagcagacagaaggcactggtgggtcacatctcgggcctgggagagggagggcgtgggccaggccccatgtgacaccaggggctccttggcatccaggcttggcgtctagtcctttcccttccctttcttggctttggcctttgctttggtcttgggggtgcagggcttggtgacgcggatggtctcctggcactgagcattgtagcgcgccttcttcagggtgccttggcggactttggtgcctgtgcccccatcacacgcaccccagttctcaaacttgtacttgcagtcggctccaaactccttcttccagttgcagggcaccctgcaccggatgcgctgggtctgggccccgcaggtgccctcgcggaaacccacgccgcaatccttgctgctgggggtgcagggcccccaggcccactcagcgcactcgctccccgggccgcccttcttcaccttatctttctttttggcgaccgcggaggtgagcgccagcagggcgaggagggtgaggaggaggaagcctcggtgctgcatctcgctcgctgcccgcgctgcttcgctccctcccgcgccgggcccgtcccgctccggccgccgcggccccttttgtctccagaaccggtctccccttctgtcgtcttctancagccgtacccg

SEQ ID NO: 441 - DNA, 1024 bp, Homo sapiens
  misc_feature (67)..(67): n equals a,t,g, or c
  misc_feature (976)..(976): n equals a,t,g, or c
  misc_feature (1014)..(1014): n equals a,t,g, or c
  misc_feature (1018)..(1018): n equals a,t,g, or c
tcgacccacgcgtccggccggggcgccctccggaagcttttccaactttccagaagtttctcgggangggcgggaggaggggaacgccatatatagacctggagagccgggagcgcggagagtggaatcggtccgcggctcgagtgggtctctagtccggcgccagcccgcccggcccagccctcacaggtccttcgtggtgcataccatccgcctcccagccatgcgcttcctcctgcttaccagcacttgctgcctcctggccatggccctggctgccgaggtgaagaagccagcggccccaggcacagcagagaagctgagccccaaagcggccacgctggcagagcgcagtgctggcctggccttcagcctgtaccaggccatggccaaggaccaggcggtggagaacatcctgctgtcgcctgtggtggtggcctcatccctggggcttgtgtcgctggggggcaaggccaccacagcgtcccaggccaaggcggtgctgagtgcagagcagctgcgtgatgaggaggtgcacgcgggcctgggcgagctgctgcgagccttcagcaacagcacggcgcgcaacgtgacctggaagctgggcagccgcctgtatgggcccagctcggtgagcttcgcggaggactttgtgcgcagcagcaagcagcactacaactgcgagcactccaagatcaacttccgcgacaagcgcagcgccctgcagtccatcaatgagtgggccgcacagaccaccgatggcaagctgcctgaggtcaccaaggacgtggagcggacggatggcgcgctgctggtcaacgccatgttcttcaagccgcactgggacgagaagttccaccacaagatggtggacaaccgaggcttcatggtgacccgctcgtataccgttggggttacgatgatgcaccgcacaggactctacaactactacgacgacgagaaggagaaaaggggnaaaaaaaaggggcccccctttttgggggccccccaaangggnaaaaaa

SEQ ID NO: 442 - DNA, 2260 bp, Homo sapiens
  misc_feature (2242)..(2242): n equals a,t,g, or c
  misc_feature (2245)..(2245): n equals a,t,g, or c
  misc_feature (2260)..(2260): n equals a,t,g, or c
gctttggctttttttggcggactggggcgccctccggaagcgtttccaactttccagaagtttctcgggacgggcaggagggggtggggactgccatatatagatcccgggagcaggggagcgggctaagagtagaatcgtgtcgcggctcgagagcgagagtcacgtcccggcgctagcccagcccgacccaggcccaccgtggtgcacgcaaaccacttcctggccatgcgctccctcctgcttctcagcgccttctgcctcctggaggcggccctggccgccgaggtgaagaaacctgcagccgcagcagctcctggcactgcggagaagttgagccccaaggcggccacgcttgccgagcgcagcgccggcctggccttcagcttgtaccaggccatggccaaggaccaggcagtggagaacatcctggtgtcacccgtggtggtggcctcgtcgctggggctcgtgtcgctgggcggcaaggcgaccacggcgtcgcaggccaaggcagtgctgagcgccgagcagctgcgcgacgaggaggtgcacgccggcctgggcgagctgctgcgctcactcagcaactcsacggcgcgcaacgtgacctggaagctgggcagccgactgtacggacccagctcagtgagcttcgctgatgacttcgtgcgcagcagcaagcagcactacaactgcgagcactccaagatcaacttccgcgacaagcgcagcgcgctgcagtccatcaacgagtgggccgcgcagaccaccgacggcaagctgcccgaggtcaccaaggacgtggagcgcacggacggcgccctgytagtcaacgccatgttcttcaagccacactgggatgagaaattccaccacaagatggtggacaaccgtggcttcatggtgactcggtcctatacygtgggtgtcatgatgatgcaccggacaggcctctacaactactacgacgacgagaaggaaaagctgcaaatcgtggagatgcccctggcccacaagctctccagcctcatcatcctcatgccccatcacgtggagcctctcgagcgccttgaaaagctgctaaccaaagagcagctgaagatctggatggggaagatgcagaagaaggctgttgccatctccttgcccaagggtgtggtggaggtgacccatgacctgcagaaacacctggctgggctgggcctgactgaggccattgacaagaacaaggccgacttgtcacgcatgtcaggcaagaaggacctgtacctggccagcgtgttccacgccaccgcctttgagttggacacagatggcaacccctttgaccaggacatctacgggcgcgaggagctgcgcagccccaagctgttctacgccgaccaccccttcatcttcctagtgcgggacacccaaagcggctccctgctattcattgggcgcctggtccggcctaagggtgacaagatgcgagacgagttatagggcctcagggtgcacacaggatggcaggaggcatccaaaggctcctgagacacatgggtgctattggggttgggggggaggtgaggtaccagccttggatactccatggggtgggggtggaaaarcagaccggggttcccgtgtgcctgagcggaccttcccagctagaattcactccacttggacatgggccccagataccatgatgctgagcccggaaactccacatcctgtgggacctgggccatagtcattctgcctgccctgaaagtcccagatcaagcctgcctcaatcagtattcatatttatagccaggtaccttctcacctgtgagaccaaattgagctaggggggtcagccagccctcttctgacactaaaacacctcagctgcctccccagctctatcccaacctctcccaactataaaactaggtgctgcagcccctgggaccaggcacccccagaatgacctggccgcagtgaggcggattgagaaggagctcccaggaggggcttctgggcagactctggtcaagaagcatcgtgtctggcgttgtggggatgaactttttgttttgtttcttccttttttagttcttcaaagatagggagggaagggggaacatgagcctttgttgctatcaatccaagaacttatttgtacattttttttttcaataaaacttttccaatgacaaaaaaaaaaaaaaaaaaaaaaaaaggggsgggccgctcctagagggatccctccganggngcccaatcgaaaatn

SEQ ID NO: 443 - DNA, 475 bp, Homo sapiens
  misc_feature (453)..(453): n equals a,t,g, or c
caaagaattcggcacgagggtggtctgatcttcctgcggctgaaccgcccggctgagccgacattgccggcgtcttggcgattcggcccgacgagctccgctttcgctacagcatggtggcctactggagacaggctggactcagctacatccgatactcccagatctgtgcaaaagcagtgagagatgcactgaagacagaattcaaagcaaatgctgagaagacttctggcagcaacgtaaaaattgtgaaagtaaagaaggaataatctaccctgactaaagcttgaaatgctacatttccaaggtgaagatgtgtgggcacatgttatggcagattgaaaaggatctcattccatgggaaaaaaaaaaatcctgtcttgttcataaattgacaatgtcaataaattgaaatatggttcactgttaaaaaaaaaaaaaaaaggggggccnttttaaagratccaagtttacg

SEQ ID NO: 444 - DNA, 1171 bp, Homo sapiens
gccgacgctctgcccggctgctgccgctgaggaaagccgggacgcggaccccggcacgaggagcttctttgctccggacgcccctggacgtggcgggcagccgcgagggtaaccaccatgatcccctgggtgctcctggcctgtgccctcccctgtgctgctgacccactgcttggcgcctttgctcgcagggacttccggaaaggctcccctcaactggtctgcagcctgcctggcccccagggcccacccggccccccaggagccccagggccctcaggaatgatgggacgaatgggctttcctggcaaagacggccaagatggacacgacggcgaccggggggacagcggagaggaaggtccacctggccggacaggtaaccggggaaagccaggaccaaagggcaaagccggggccattgggcgggctggcccccgtggccccaagggggtcaacggtacccccgggaagcatggcacaccaggcaagaaggggcccaagggcaagaagggggagccaggcctcccaggcccctgcagctgtggcagtggccataccaagtcagctttctcggtggcagtgaccaagagctacccacgggagcggctgcccatcaagtttgacaagattctgatgaacgagggtggccactacaatgcttccagcggcaagttcgtctgcggcgtgcctgggatctactacttcacctacgacatcacgctggccaacaagcacctggccatcggcctggtgcacaacggccagtaccgcatccggacctttgatgccaacaccggcaaccacgatgtggcctcaggctccaccatcctggctctcaagcagggtgacgaagtttggctgcagatcttctactcagagcagaacgggctcttctatgacccttactggacagacagcctctttacgggcttcctaatctatgccgaccaggatgaccccaacgaggtatagacatgccacggcggtcctccaggcagggaacaagcttctggacttgggcttacagagcaagaccccacaactgtaggctgggggtggggggtcgagtgagcggttctagcctcaggctcacctcctctgcctctttttttccccttcattaaatccaaacctttttattcatcaaaaaaaaaaaaaaaaaactcga

SEQ ID NO: 445 - DNA, 467 bp, Homo sapiens
  misc_feature (390)..(390): n equals a,t,g, or c
  misc_feature (405)..(405): n equals a,t,g, or c
  misc_feature (411)..(411): n equals a,t,g, or c
  misc_feature (467)..(467): n equals a,t,g, or c
cggcgggccgagaggtggttacattcgttgaaggacaccagctgcggaatttgcggctttggcagattgaaatcatggcaggtccagaaagtgatgcgcaataccagttcactggtattaaaaaatatttcaactcttatactctcacaggtagaatgaactgtgtactggccacatatggaagcattgcattgattgtcttatatttcaagttaaggtccaaaaaaactccagctgtgaaagcaacataaatggattttaaactgtctacggttcttaacctcatctgttaagttcccatgcctggagaagctaatgccaactcatcatgtgataattcaatttgtacaataaattatgaacctggaaaaaaaaaaaaaaaaaaaaccncggggggggccccgnaccccnttggcccttggggggcggttttccattccatggcctggttttacaggggtgtcgtn

SEQ ID NO: 446 - DNA, 2537 bp, Homo sapiens
  misc_feature (2517)..(2517): n equals a,t,g, or c
gccgtgtcacctcccacagatctgggcggaccccggcaaatacgccctgatgggagctgctgcccagctgggcgggattgtgcggatgacactgagcctgaccgtcatcatgatggaggccaccagcaacgtgacctacggcttccccatcatgctggtgctcatgaccgccaagatcgtgggcgacgtcttcattgagggcctgtacgacatgcacattcagctgcagagtgtgcccttcctgcactgggaggccccggtcacctcacactcactcactgccagggaggtgatgagcacaccagtgacctgcctgaggcggcgtgagaaggtcggcgtcattgtggacgtgctgagcgacacggcgtccaatcacaacggcttccccgtggtggagcatgccgatgacacccagcctgcccggctccagggcctgatcctgcgctcccagctcatcgttctcctaaagcacaaggtgtttgtggagcggtccaacctgggcctggtacagcggcgcctgaggctgaaggacttccgagacgcctacccgcgcttcccacccatccagtccatccacgtgtcccaggacgagcgggagtgcaccatggacctctccgagttcatgaacccctccccctacacggtgccccaggaggcgtcgctcccacgggtgttcaagctgttccgggccctgggcctgcggcacctggtggtggtggacaaccgcaatcaggttgtcgggttggtgaccaggaaggacctcgccaggtaccgcctgggaaagagaggcttggaggagctctcgctggcccagacgtgaggcccagccctgcccataatgggcactggcgctggcaccccggcccttctgcatttcctcccggagtcactggtttctcggcccaaaccatgctccccagcagtggcaatggcgagcaccctgcagctgggcgggcaggcggcaggcgcggaactgaccctctcgcgggactgaccctgttgtgggcagtggtctccccccttggcgcctccttgcgcaggcccagcctccactctcctcgtctaggtttctttacctccagggatcagctgtgtgtgtgtgacctccctaccgggctatcggcctcttgggagccagcggcagggccggcacctgcgtgcctgtgcccgtgtgcgtgagacagagcccttgcccctgctgctgccccgagggctgccctgccctggaagggcccctctgcctccacaccagtggagtcttcgagacttgggagctgcttggcctcattttcagccatgagcagacggcctgtggtccctgggcctgaggcacggactcgtagcaccagggtttggaggctgcgaccgccccggagagcagcttcacactggcgccacagaggagccccacgtgcactccccggcctgcatccggcttgggtacacrggcccagaggactggggtgactcacgggccctgtgctgtgatgttgagagctgagaaaaacctccaaggccctgagccccatgcccagccctgccttggtcccccaacccccagagcttggagtctgggccccacacccagccctgccttggtccctgagcctcagagcgtggaattgctgccctgtggacactggctgggaaggcaggtcttcccctagcacatggggaccccggcctcgagggtgacctccctaccttgcccctgccagccaccaagcgcaggtgcagcgggggccagactcctgccggcctcagaggacacctggcccagcacaggcagctagaagggccggtgggcaccggggccgggaagcccccacctcaccacctgagggcccctgggaggctcctctggcctggctgggctgggtctggggccgccacaggcccctcacggggcggcagaggcaacttcagtgtccctgttagagcaacacgggtccctccgtggggggctgggtgcggccccctgccgtgtatttcctccccagggagtggggcctccccgggagctgacgccaccaccctgcttagccctcacagggccccaaggtgtccgagtgtgttgggtctgaacgcgaaataaagaaatcctctcagcccgcctttgccagcgtcgtccctcccaccccacccagaccacgtccaacagcctgggactttcgggaccctggggtcggggcaccgtgtggagtgagacaggcgtgaaagacagcggctgcggccacccagggcaccagccacatcctcttcctcgtccccgcccctcagcctccctcctctggctcctggctggtgggtctgggggcaaggcagaggcgctccaggtggaggggggcgggccggggtgcccacgctggggtgacgcaagaagaaaactcccgggcctcagagtcggcgccggaaacctaggtctgggtttccctcgtggtggttstgtactgaggacctggaagtgatcatattttggatatattcggttaaataaaatcagcggttaggattcanaaaaaaaaaaaaaaaaaaaa

SEQ ID NO: 447 - DNA, 532 bp, Homo sapiens
gcctgccactctacgtccgctcttttctacgtagcgcgcgcgtgcagcccaccgtgcccgcctccgcagcatccagcccgcgacggcgagaacacccagcccaaacagatctgcaccttctgcctcagcaaccagagaaagttgagcaaggaccgcgacagaaagacagcgattcgcagttaggaggtggccggcagcagccaggaggcagacgctgctgggggaggtggacgcccggggtgactgcagacagcccccaccttggacctgagctgggcaaggcccaccgcaagcatgcccccaggccagccctggctgcgagcggggccgagggacagacggacgtacagacaggcgccggcagcgggactctgcgctggccccagcacctgcccgggcccactggaactttctgcgctggcttttcttccggccactgtgtgatggcatcttgtgtttttgatatgataatataaagtctgaaaattttgtataattaaaaacaaaacagtatcttccaaawaaaaaaaaa

SEQ ID NO: 448 - DNA, 938 bp, Homo sapiens
ggtcagaggtcgcgcaggcgctggtaccccgttggtccgcgcgttgctgcgttgtgaggggtgtcagctcagtgcatcccaggcagctcttagtgtggagcagtgaactgtgtgtggttccttctacttggggatcatgcagagagcttcacgtctgaagagagagctgcacatgttagccacagagccacccccaggcatcacatgttggcaagataaagaccaaatggatgacctgcgagctcaaatattaggtggagccaacacaccttatgagaaaggtgtttttaagctagaagttatcattcctgagaggtacccatttgaacctcctcagatccgatttctcactccaatttatcatccaaacattgattctgctggaaggatttgtctggatgttctcaaattgccaccaaaaggtgcttggagaccatccctcaacatcgcaactgtgttgacctctattcagctgctcatgtcagaacccaaccctgatgacccgctcatggctgacatatcctcagaatttaaatataataagccagccttcctcaagaatgccagacagtggacagagaagcatgcaagacagaaacaaaaggctgatgaggaagagatgcttgataatctaccagaggctggtgactccagagtacacaactcaacacagaaaaggaaggccagtcagctagtaggcatagaaaagaaatttcatcctgatgtttaggggacttgtcctggttcatcttagttaatgtgttctttgccaaggtgatctaagttgcctaccttgaatttttttttaaatatatttgatgacataatttttgtgtagtttatttatcttgtacatatgtattttgaaatcttttaaacctgaaaaataaatagtcatttaatgttgaaaaaaaaaaaaaaaaaaaaaaaaaaaaaaa

SEQ ID NO: 449 - DNA, 947 bp, Homo sapiens
  misc_feature (70)..(71): n equals a,t,g, or c
ggcaacttttggcaaaaggttagcatttaagcctcttgcctctcattcttttcattcacgactcacaganngcagggacagcgcgccatgaccgagagatggcgatccaggccaagaaaaagctcaccacggccaccgaccccattgaaagactccgactgcagtgcctggccaggggctctgctgggatcaaaggacttggcagagtgtttagaattatggatgacgataataatcgaacccttgattttaaagaatttatgaaagggttaaatgattatgctgtggtcatggaaaaagaagaggtggaagaacttttccggaggtttgataaagatggaaatggawcaatagacttcaatgaatttcttctcacattaagacctccaatgtccagagccagaaaagaggtaatcatgcaagcttttagaaagttagacaagactggagatggtgttataacaatcgaagaccttcgtgaagtatataatgcaaaacaccacccaaagtaccagaatggggaatggagtgaggaacaagtatttaggaaatttctggataactttgattcaccctatgacaaagatggattggtgacccctgaggagttcatgaactactatgcaggtgtgagcgcatccattgacactgatgtgtacttcatcatcatgatgagaaccgcctggaagctttaagcacatgacctggggaccaggccctgggacagccatgtggctccaaatgactaaatgtcagctcaaaaaccagaatcgtatttgatttcacactcatcctaatgtttttttctgtgtcaaaatattgcattttctggggccaaaaaacaggcagaaataaaagacattgagtagccaactgtgagtttgccttgcctaagactgtttcctttgttctaaaataggacttaaataaaatgagctctgtaaaaa

SEQ ID NO: 450 - DNA, 717 bp, Homo sapiens
  misc_feature (5)..(5): n equals a,t,g, or c
  misc_feature (56)..(56): n equals a,t,g, or c
  misc_feature (631)..(631): n equals a,t,g, or c
  misc_feature (651)..(652): n equals a,t,g, or c
  misc_feature (663)..(663): n equals a,t,g, or c
aaganctgagaaaggggccaaggcttactgagaggaccttggtgtaccccctgganctgcccaaggagcccaccagtccccccttccggccctgtcctgaaccagatgagaaactttgggatcctgtcggttactactattcagatggctcccttaagatagtacctgggcatgcccggtgccagcccggtggggggcccccttcgccacctccaggcatcccaggccagcctctgccttctccaactcggcttcacctggggggtgggcggaactcaaatgccaatggttacgtgcgcttacaactaggaggggaggaccggggagggctcgggcaccccctgcctgagctcgcggatgaactgagacgcaaactgcagcaacgccagccactgcccgacwmcaacmmmraggagtcatcagtatgaggggaacccccaccgcgtcggckggaagcgtgggaggtgttagctccttacttttgcacaggcaccagttaccttcagggacatggcacgggcacctggttctgtctgggacagatattgcccagcacccacccggccatggaggaccttgttttgttcagcacgggcattgccatttggtgtggttcaccagggcaccagcnttgcagaaggcattttcctnntttttgtggantcacagacaagggggaccccagccggcaaaatttttcaaggcagagttttcaag

SEQ ID NO: 451 - DNA, 1375 bp, Homo sapiens
  misc_feature (1354)..(1355): n equals a,t,g, or c
  misc_feature (1359)..(1359): n equals a,t,g, or c
tcacagccggcctagtgtgaaagcagtttttaaggacagttgaacaggaaagctcctggattcctgcacatagatcttgtgcccctccaaagtgcctgaccgaagctggctttggtgctgacatcggaatggagaaattcttcaacatcaagtgccgagcttccggcttggtgcccaacgtggttgtgttagtggcaacggtgcgagctctgaagatgcatggaggcgggccaagtgtaacggctggtgttcctcttaagaaagaatatacagaggagaacatccagctggtggcagacggctgctgtaacctccagaagcaaattcagatcactcagctctttggggttcccgttgtggtggctctgaatgtcttcaagaccgacacccgcgctgagattgacttggtgtgtgagcttgcaaagcgggctggtgcctttgatgcagtcccctgctatcactggtcsgttggtggaaaaggatcggtggacttggctcgggctgtgagagaggctgcgagtaaaagaagccgattccagttcctgtatgatgttcaggttccaattgtggacaagataaggaccattgctcaggctgtctatggagccaaagatattgaactctctcctgaggcacaagccaaaatagatcgttacactcaacagggttttggaaatttgcccatctgcatggcaaagacccacctttctctatctcaccaacctgacaaaaaaggtgtgccaagggacttcatcttacctatcagtgacgtccgggccagcataggcgctgggttcatttaccctttggtcggaacgatgagcaccatgccaggactgcccacccggccctgcttttatgacatagatcttgataccgaaacagaacaagttaaaggcttgttctaagtggacaaggctctcacaggacccgatgcagactcctgaaacagactactctttgcctttttgctgcagttggagaagaaactgaatttgaaaaatgtctgttatgcaatgctggagacatggtgaaataggccaaagatttcttcttcgttcaagatgaattctgttcacagtggagtatggtgttcggcaaaaggacctccaccaagactgaaagaaactaatttatttctgtttctgtggagtttccattatttctactgcttacactttagaatgtttattttatggggactaagggattargagtgtgaactaaaaggtaacattttccactctcaagttttctactttgtctttgaactgaaaataaacatggatctagaaaaccaaaaaaaaaaaaaaaaaaaaaaaaaaaaaaaaaaaaaaaaaaaaaaaaaaaaaannaaanaaaaaaaaggggggcc

SEQ ID NO: 452 - DNA, 4516 bp, Homo sapiens
ggcacgagcagagttctcttggaaaagctctaggaatcctgggcttccaacgagttgaaggaacataggatgaaaccatggaagtyttcctcaratctggggagggagcctggcccaaragcccgtggagctaatgaaaacagaacagctgaatagatttsctggatttggtattggacttgcaagtctctttacagaaaatgtattggcacatccttgcattgttctacgccgccaatgtcaggttaattaccatgctcagcattaccatctcactccatttacagtcatcaatattatgtacagtttcaacaaaactcagggacctagagccctgtggaaaggaatgggaagtacatttattgtccagggagtcacacttggagcagaaggcataattagtgaatttacacctttgccaagggaggttttacataaatggagtcctaaacaaataggagaacaccttctactgaaatccctaacttacgtggtggcaatgcctttttattcagcaagtctgattgaaacagtgcagagtgagataattcgagataatactggcattttggagtgtgktaaagaaggaattggaagagtgataggcatgggagtgcctcatagcaaacgacttcttccgcttctttccttgatcttccctacggtgcttcatggagttcttcattacatcatcagctcagttattcagaagtttgtcctactaattctaaagagaaagacttacaatagccacctagctgagagcactagccctgtgcagagtatgttggatgcttattttccagaacttattgctaactttgctgccagtctttgttctgacgttatactttacccattggaaacagttttgcaccgccttcacattcaaggaacacgcacaataattgacaatacagaccttggctatgaagtgcttccaattaatacacaatatgagggaatgagagactgtatcaataccataaggcaggaggaaggagtgtttggtttttataaagggtttggtgctgttataatacagtacacactgcatgcagctgttttacagattaccaaaattatttactctacacttcttcaaaataacatttgagatttaggttccttcactgagtagtctggaagatataatctggataatttgctatgaagttatgagggatacaagtgaaatactggggaagaaaatggattggaaagtaaaattggtactaaagcccatactgattatcttgactttgwtttttaaggcataggtatatattttggatcaaaatccttccaaatttgaaaactcaataaaaataacacttattaaattctagttagtgtagcactcatgctgaagtaaacatgatcgtaggcagaagcaaaattttattataaaatctaaaacaaaactttatagagttgaatctattccatctgacttcaatatttgccaaacgtttattttacctcctagattgatgttggtatagtatccttaatacagtgtagtatattaatgtccttaatacaatcaggaggtttttacctttaagcaaataaattatgtcattattgaaaaagacttaagggatgattagacttggcaatctgtaagcaggagtataaatgttttaaattgcattgtccctatgtaactatcttaatggctatatatatgtattttataaagccatttatgtatacacatgtaacttggaatttccttcatccctacacattttctacacttacatcaccttattgcataaaacaaagtcacgcgctttctgcttgaacatcaaaatatcaaaaaccaaggtacccaaaagatacaagtcagagacaacatccttgtccatatccaaacccagtgtttcagtgctagcaacttaatttctcatacatttatagagtttggtttgctttgctagttgtgtgaatcattgggctgtttttagagccactgttaagagagaatataaaataatcatgacaattactactgtttccacatttacaaattgtgtacttaaatgaacctcatttcccttttatttctgaatggcttgtctgagaggaaacaaaattaaaattcatctgggaatttgtgcctcttgtctagtatatagtcaccactaaataatggcttccgtttttattttctttcaggttttgctttaaattttgttttccaaaatagatgtacgtggagggaaaagcaattattcttatcaccttttatttaaacttctttagatgaatactgaagaaaaatccaaaccttaaaggaaatgtgcccttgtattttatgggtgaggggaaaaagtacatttgtacatttcaacatataataagcaaaaaaattactaatcagtttaataaaaacattttgtctattcctaaatgtaatttggtgggttaagcactttgtgtagtaaaatgatatgtgtctgctctatcattagacattttaaagtttcatgtcttcacgtgaataatcacagttgtatcatgaaccatttagcgctctgaagcacagtgactttgcactgatattgtccaaccaagaatgcatacgaatagaaattcattttacttgctaaatgtcacagaaatggttactttttgcaaatagtagtgttggaacaaaaaagtgatatccaaaaagtgtaaaaacagtaataagtagcaaatctctcgtgtgtgtgtgtgtgtagttactgaaacacctacattttccatttttaaattccaccaaaagggggaaaataaaattaaacaccactgatcacattttatattttatggtgactattttagattaaggtttactttgtccaaccaatagcatttaaattgttttcaattaggatagtttcagataagagtaaaccagaaaatttcaagtttgaaaaatttctagaaaagaatctgaatagaatcaagtatttactagtgaaaatctgtaggatcctttgtttagctaaaaattaaatatttcaggatattttttggaagttagcatgaaaatagttagttacataaattcattttattgtagaataattataagaccgataggctgaaccatrcacaaataaggttgatcttgttttcctttttggagaaagagaatacaaattaacattaaaattgaaatgtagaaagtaaaatatgaataattttttacaaccactccaaattagttgaaacaaaatcttgaacggtcacgcacttaaatttaagctagccaaatatgttgcactgaattttgaaaagaatgagtgagatamctgtaagatacgctcgttcccttttaaaaattgttatttttctttaacatgggtgccaaatcaaatatccatgggctatacttcttaagataataacagctcaaaataatattttttaattcagtagaactaatagcattatggaaaagattctattaaatgttccacaggcccactggtcctcttatataagccaaattttggccatggagcttgtgatacacttgccttacattgtagggtttcttaatttgagtcaagtacactgaaagcaattaaaaactggtaaatattaatttactatgtaaagtgaacttacgaattaacttactaaatacatatatgtagaccttcccgaaatgccattctcaattttattttatgggctccaaaaaaaattatctgggttaataaggttatctattaaagcccccagaatctcagcactagatgtcataaatatgaaatagtaaaaacaaggtcacttgaaaatgggtatttaataccttagctggtgttttcagaagcatacagaactggaaaggtaagaacttgcttactattgcagatatacctgaccactcacaactgtctttttagcagcagctttgttaaaactgcacaaagcattcactttattgattgagtacaaatgctttagtgtttctacctaagtattagtacatctgttcaggaaatggaaaaaaaaaatgctgcttaaatttgttttatcagctgaggttgtggaggatttttgtccactgatcttttgcaacagaaaagcatactttgtcagcttctaataagatagccaggtttgaattatttgcaaaatttatataagcaaataagatctcttggtaacaattgacattgcactagaatttgaatgatactgttgttggcatttctgtttctctttcaagtagttgtaaataatctctttttctcatataaacggaatgcataatgtcttactcttgagtcatttagtagcattgatatggtaccaagttgtatagcagagtaacaaaatcatgatttgacaatgaaatttacatattgcctcacctagagatgttttgtctgtatgacttttttttttttaagtttgtcttactgttactttaaatgttttgggtaaattgtgtaatatgaaaagttcaataaaatgtcgaaataaaaaaaaaaaaaaaagggcggccgct

SEQ ID NO: 453 - DNA, 695 bp, Homo sapiens
  misc_feature (10)..(11): n equals a,t,g, or c
  misc_feature (129)..(129): n equals a,t,g, or c
agttcggcannggggggacgccgggaacaggaatttcttcacatggctcctggagaagtgaccatcacagttcgcctcatccgttcctttgaacatcgcaatttcaaacctgtagtgtatcacggagtnaatttggaccaaactgtaaaggaatttatcgtatttctaaagcaagatrtccctttaaggaccaacctgccaccaccattcagaaattataaatatgatgcactaaagattattcatcaagcacataaatcaaagacaaatgaacttgtgttgagtttggaagatgacgaaagactcctgctgaaagaagacagcactctgaaagcagctggaatcgccagtgaaactgaaattgcattcttctgtgaagaagattatargaactacaaagctaatcccatttcatcctggtgaaaacatctcgagggcttcctttttgcatacctgtattaagctctttattccactgctgagtttttgaaattgacaaacaaatcttaaaaaattaatcccaggctatactctttgagctaaaatctggttatttctttctcttcaggtctttctttccttctctctttctttttctttgttgttgtaaaataatatattatgagaaaaacatttgatctttttaaagggaaataaattgttattaaaaattaaaaaaaaaaaaaaaaaaaaaa

SEQ ID NO: 454 - DNA, 2308 bp, Homo sapiens
ggaagacaggagcaagcaggtctgcgcctccccggccctgcgcccgcgcccagagcgccgggactcgagcctggcacccccggctggatccccaccccgaggactcggggagccaccaccctacccccaccaccacccagggcggccagggcgcgcgtctggaaagaaggaagggaaacgcaagagccaggcttagtctaactcagtctggtctgaggacgcttatttcccttctctggttcccatggcccgcgaaatcaagtcctagaggcgctttattctcaggactgggaatcagtttgggggagggaggaggacacccggttcctggggacgtttgaaggaagggcgagggatggagaaagggggtcgagtaactcaagtgttagaagttcgttgacttttgactggggagaaaggaaccttaaacttggggaggagaagggagtcctggagttgttacctaagaacaaagatggggcggaatggaggctacagcccgaaagccaggccagcagtggcgttcttctgtgtccccaagtagtggacttgagcccgctgagacctcggcaggagtctcgtcccagggcaggtgggtgtgcggggtgagccgcggagcggttccagctcgggtaaagaggaagttacctcgggtcctttgcactccaactcggcggcgccccgagcccgaggggccccagccaacccgacgcccgtgtgttgtgtgtgtctaacacccggtccgtgccrgccgccgcgcccgcccgccgctgcccccagctcgaggaggacatcgcggccaaggagaagttgctgcgggtgtcggaggacgagcgggaccgggtgctggaggagctgcacaaggcggaggacagcctcctggccgccgaagaggccgccgccaaggctgaagccgacgtagcttctctgaacagacgcatccagctggttgaggaagagttggatcgtgcccaggagcgtctggcaacagctttgcagaagctggaggaagctgagaaggcagcagatgagagtgagagaggcatgaaagtcattgagagtcgagcccaaaaagatgaagaaaaaatggaaattcaggagatccaactgaaagaggcmaagcacattgctgaagatgccgaccgcaaatatgaagaggtggcccgtaagctggtcatcattgagagcgacctggaacgtgcagaggagcgggctgagctctcagaaggccaagtgccgacagctggaagaacaattaagaataatggatcagaccttgaaagcattaatggctgcagaggataagtactcgcagaaggaagacagatatgaggaagagatcaaggtcctttccgacaagctgaaggaggctgagactcgggctgagtttgcggagaggtcagtaactaaattggagaaaagcattgatgacttagaagagaaagtggctcatgccaaagaagaaaaccttagtatgcatcagatgctggatcagactttactggagttaaacaacatgtgaaaacctccttagctgcgaccacattctttcattttgttttgttttgttttgttttgtttttaaacacctgcttaccccttaaatgcaatttatttacttttaccactgtcacagaaacatccacaagataccagctaggtcagggggtggggaaaacacatacaaaaaggcaagcccatgtcagggcgatcctggttcaaatgtgccatttcccgggttgatgctgccacactttgtagagagtttagcaacacagtgtgcttagtcagcgtaggaatcctcactaaagcaggagaagttccattcaaagtgccaatgatagagtcaacaggaaggttaatgttggaaacacaatcaggtgtggattggtgctactttgaacaaaaggtccccctgtggtcttttgttcaacattgtacaatgtagaactctgtccaacactaatttattttgtcttgagttttactacaagatgagactatggatcccgcatgcctgaattcactaaagccaagggtctgtaagccacgctgctcttcygagacttccattcctttctgattggcacacgtgcagctcatgacaatctgtaggataacaatcagtgtggatttccactcttttcagtccttcatgttaaagatttagacaccacatacaactggtaaaggacgttttcttgagagttttaactatatgtaaacattgtataatgatatggaataaaatgcacattgtaggacattttctaaaaaaaaaaaaaaagggsggccgcyctagrggatt

SEQ ID NO: 455 - DNA, 1330 bp, Homo sapiens
cgtgggtacagcaaactgtacccacattaccatagccctaggcagtggtttctaggtggcgagaattccatatgcctggccagactccaaaaagcttgcttcccaaaaataccaccctatacactctsctggaaatctacattgagacattgatttcattgggccaaacagaggcccaatctcaagggaccttctagtaaactacaagcccctgggcattgagccctgaggcctcatggtgaatcacatactagctacttgcctcagtgataggaaaacctgagaggaagccccctggctggtgtggggaggggaggtggagttgttcccctggggaggggctgctgccagcctgcatgctcctccagcaccaggtagggctgttctatccccagactactcactgctgctcaccttcatctacaacggscgcgtggtgggcgaggcccaggtgcaaagcctggattgccgccttgtggctgagccctcaggctctgagagcagcatggagcaggtgctgttccccaagcctggcccactggagcccacgcagcgcctgctgagccagcttgagaggggcatcctagtggccagcaacccccgaggcctcttcgtgcagcgcctttgccccatccccatctcctggaatgcaccccaggctccacctgggccaggcccgcatctgctgcccagcaacgagtgcgtggagctcttcagaaccgcctacttctgcagagacttggtcaggtactttcagggcctgggccccccaccgaagttccaggtaacactgaatttctgggaagagagccatggctccagccatactccacagaatcttatcacagtgaagatggagcaggcctttgcccgatacttgctggagcagactccagagcagcaggcagccattctgtccctggtgtagagcctgggggacccatcttccacctcacctctttgttcttcctgtctcctttgaagtagactcattcttcacacgattgacctgtcctctttgtgataattctcagtagttgtccgtgataatcgtgtcctgaaaatcctcgcacacactggctggtggagaactcaaggctaattttttatccttttttttttttaattttgagatatacgccctctttcatctgtaagggactaggaaattccaaatggtgtgaacccagggggcctttccctcttccctgacctcccaactctaaagccaagcactttatattttcctcttagatattcactaaggacttaaaataaaattttattgaaagaggaaaaaaaaaaaaaaaaaaaaaaaaaaaaaaaaaaa

SEQ ID NO: 456 - DNA, 554 bp, Homo sapiens
ttggtgatatgggactaaagcaatttcttgatggtcctgcaagcatgaggataagagagctaaatttaagcaactgtgtgcggctaagtgatgcctctgttatgaaactatctgagcgctgccctaatttaaactacttgagtttacgaaattgtgaacatttgactgcccaaggaattggatatattgtaaacatcttttccttggtatcaatagatctctctggaacagacatctctaatgagggtttgaatgtgctttccagacataaaaaattgaaggaactttctgtatctgaatgttatagaatcactgatgatggaattcagattactgactcagcgatggagatgttatcggcaaaatgccattacctgcacattttggatatctctggttgtgtcttgcttactgaccaaatccttgaggaccttcagataggctgcaaacaactccggatccttaagatgcaatactgcacaaatatttccaagaaggcagctcaaagaatgtcatctaaagttcagcagcaggaatacaacactaatgaccct

SEQ ID NO: 457 - DNA, 1204 bp, Homo sapiens
ctatagggaaagctggtacgcctgcaggtaccggtccggaattcccgggtcgacccacgcgtccgggattctcagccatccaggcaagagcactctgggttccacagcacagcagacatggaacgctgaagtctctgaaagtgaagttgtaaaaagaaaaggaatgaaataaccgacccatcatcttctcacccaccctcattgcattccgctgtagtgaaaggacgagccatttctgggcacgtggcagcagtcgctgatctcccagctgaggggctgagcactggaatgctgtggctgcactggccccagtccatagaggggtcaactatgctggctggactggctgccttgttcctggcctaggacttagcttcataactatcacctgcaccgactaggctgaggtgctggtacttgccccaacccctacttttgtatttatatgtgtgtgtgtgtgtgcgtgcgtgcgtgcgtgcgtgtatgtttggtctggaccagcttctgccagcccctggcctttactttcttccttgcctatgcagggcaaacaaaatgtgaaattctgccctcagctgagctgagtaagggctcctgggggttggctggagatgggtgtggcatctgtccaggcctggaaccgtctcaagacagtgctggcaaagctgcagtattgagatgctaaggagctgatgccacctctttgtcttcccctaaaggagaacatggggataacatgggtgtgtgcccacaacactctaggtgcagagcccctgtggcaaagtattacagggtgtgggtggggattaccctgaatcggggattttaatgatggaagcaggcagagcctggtgggtgattctgtcaacagaaaattgcaatcatgcaggggctgggagggttaggatgaaaaaactggggccattggaggcccactgtaggtgggagggagctgattttggggtggggggtgggactagagggcaatactgaaggggttaaacaggtttttgctcctcaagaatttgtttgcctgggcccaggattggagggcttcacaccaataccctgtgtatacaagaatcagatttataatacttccccttttttgttacgtatgaacactataaaccaaattattttgaaaactggtgcatcaccttgtccttagcaataaaatgtgttgagcagaaaaaaaaaaaaa

SEQ ID NO: 458 - DNA, 826 bp, Homo sapiens
  misc_feature (37)..(37): n equals a,t,g, or c
  misc_feature (826)..(826): n equals a,t,g, or c
ggaaggggaatgctatccctactttagggaacaaaanctggagctccaccgcggtggcggccgctctagaactagtggatcccccgggctgcaggaattccccgggcccgggggtcccagccgggttcgtgtcgccatggggcagatcgagtgggccatgtgggccaacgagcaggcgctggcgtccggcctgatcctcatcaccgggggcatcgtggccacagctgggcgcttcacccagtggtactttggtgcctactccattgtggcgggcgtgtttgtgtgcctgctggagtacccccgggggaagaggaagaagggctccaccatggagcgctggggacagaagcacatgaccgccgtggtgaagctgttcgggccctttaccaggaattactatgttcgggccgtcctgcatctcctgctctcggtgcccgccggcttcctgctggccaccatccttgggaccgcctgcctggccattgcgagcggcatctacctactggcggctgtgcgtggcgagcagtggacgcccatcgagcccaagccccgggagcggccgcagatcggaggcaccatcaagcagccgcccagcaaccccccgccgcggcccccggccgaggcccgcaagaagcccagcgaggaggaggctgcggyggcggcggggggacccccgggaggtccccaggtcaaccccatcccggtgaccgacgaggtcgtgtgacctcgccccggacctgccctcccrccaggtgcacccacctgcaataaaygcagcgaagccgggaaaaaaaaaaaaaaaaaaaaaaaaaaaaaaaaaaaaatn

SEQ ID NO: 459 - DNA, 1444 bp, Homo sapiens
ggcacccactcctgcaggtaccggtccggaattcccgggtcgacccacgcgtttggttaaacccagctctaattccaactctgcaagagcttttaagcaaatgcaggacttgtctgcaacagagaaactcactccaagagcaagaagccaaagaaagaaaaactaaagatgatgaaggagcaactcccattaaaaggcggcgtgttagcagtgatgaggagcacactgtagacagctgcatcagtgacatgaaaacagaaaccagggaggtcctgaccccaacgagcacttctgacaatgagaccagagactcctcaattattgatccaggaactgagcaagatcttccttcccctgaaaatagttctgttaaagaataccgaatggaagttccatcttcgttttcagaagacatgtcaaatatcaggtcacagcatgcagaagaacagtccaacaatggtagatatgacgattgtaaagaatttaaagacctccactgttccaaggattctaccctagccgaggaagaatctgagttcccttctacttctatctctgcagttctgtctgacttagctgacttgagaagctgtgatggccaagctttgccctcccaggaccctgaggttgctttatctctcagttgtggccattccagaggactctttagtcatatgcagcaacatgacattttagataccctgtgtaggaccattgaatctacaatccatgtcgtcacaaggatatctggcaaaggaaaccaagctgcttcttgacattaggtgtagcatgtctacttttaagtccctcacccccaacccccatgctgtttgtataagttttgcttatttgtttttgtgcttcagtttgtccagtgctctctgcttgaatggcaagatagatttataggcttaattcttggtcaggcagaactccagatgaaaaaaacttgcatcttcagtatacttcctaaagggcaatcagataatggatatgttttatgtaattaagagttcactttagtggctttcatttaatatggctgtctgggaagaacagggttgcctagccctgtacaatgtaatttaaacttacagcatttttactgtgtatgatatggtgtcctctgtgccagttttgtaccttatagaggcagattgcctccgatcgctgtggttcttattatcaaaattaagtttacttgtatacggaacaaccacaagaaatttgattctgtaaagaatcctctttagctgtggcctggcagtatataaatggtgctttatttaacagaatacctgtggaggaaataaagcacacttgatgtaaaaataattgttttatttttattgacatgactgattgattgctattctgtgcacttaattaaactgattgtgatgacttttaaaaaaaaaaaaaaaaaaaaaaaaaaaaaaaaaaa

SEQ ID NO: 460 - DNA, 1898 bp, Homo sapiens
  misc_feature (1898)..(1898): n equals a,t,g, or c
cctggaacaatgcctttaatttgaaaacaragctattaagaatggcaaaggattgcatagcaagaaggaagtgcctatccaccgtgttgcagatatatctggggatacccaaaaagcaaagcagttcctgccttttcttcagcgggcaggtcgttctgaagctgtggtggaatacgtcttcagtggttctcgtctcaaactctatttgccaaaggaaacttgccttatcaccttcttgcttgcaggcattgaatgccccagaggagcccgaaacctcccaggcttggtgcaggaaggagagcccttcagcgaggaagctacacttttcaccaaggaactggtgctgcagcgagaggtggaggtggaggtggagagcatggacaaggccggcaactttatcggctggctgcacatcgacggtgccaacctgtccgtcctgctggtggagcacgcgctctccaaggtccacttcaccgccgaacgcagctcctactacaagtccctgctgtctgccgaggaggccgcaaagcagaagaaagagaaggtctgggcccactatgaggagcagcccgtggaggaggtgatgccagtgctggaggagaaggagcgatctgctagctacaagcccgtgtttgtgacygagatcactgatgacctgcacttctacgtgcaggatgtggagaccggcacccagttggagaagctgatggagaacatgcgcaatgacattgccagtcacccccctgtagagggctcctatgccccccgcaggggagagttctgcattgccaaatttgtagatggagaatggtaccgtgcccgagtagagaaagtcgagtctcctgccaaaatacatgtcttctacattgactacggcaacagagaggtcctgccatccacccgcctgggtaccctatcacctgccttcagcactcgggtgctgccagctcaagccacggagtatgccttcgccttcatccaggtgccccaagatgatgatgcccgcacggacgccgtggacagcgtagttcgggatatccagaacactcagtgcctgctcaacgtggaacacctgagtgccggctgcccccatgtcaccctgcagtttgcagattccaagggcgatgtggggctgggcttggtgaaggaagggctggtcatggtggaggtgcgcaaggagaaacagttccagaaagtgatcacagaatacctgaatgcccaagagtcagccaagagcgccaggctgaacctgtggcgctatggagactttcgagctgatgatgcagacgaatttggctacagccgctaaggaggggatcgggtttggcccccagccccgctcacgccagtccctcttcctctgccgggagggtgttttcaactccaaaccccagagaggggttgtagattgggtccagctttgcttcagtgtgtggaaatgtctcgtggggtggcatcggggctgcggggtggggaccccaaggctttctggggcagacccttgtcctctgggatgatgggcactgctatccacagtctctgccagttggttttatttggaggtttgtgggctttttttaaaaaaaaaaagtcctcaaatcaggaagaaacatcaaagactatgtcctagtggagggagtaatcctaacacccaggctggccgccagctggcacctgcctctatcccagactgccctcgtcccagctctctgtccaactgttgattatgtgatttttctgatacgtccattctcaaatgccagtgtgttcacatcttcgctctggccagcccattctgtatttaaagcttttgaggcccaataaaatagtacgtgctgtctgcagcccttattgatcaaaaaaaaaaaaaaaaaaaaaaaaaaaaaaaaaaaaaaaan

SEQ ID NO: 461 - DNA, 1090 bp, Homo sapiens
  misc_feature (1056)..(1056): n equals a,t,g, or c
  misc_feature (1081)..(1081): n equals a,t,g, or c
gcggacgcgtgggtggaggacgcgtagacgcgccgcggtccccgcctgccgctgctccgccgcagtcgccgctccagtctatccggcactaggaacagccccgagcggcgagacggtccccgccatgtctgcggccatgagggagaggttcgaccggttcctgcacgagaagaactgcatgactgaccttctggccaagctcgaggccaaaaccggcgtgaacaggagcttcatcgctcttggtgtcatcggactggtggccttgtacctggtgttcggttatggagcctctctcctctgcaacctgataggatttggctacccagcctacatctcaattaaagctatagagagtcccaacaaagaagatgatacccagtggctgacctactgggtagtgtatggtgtgttcagcattgctgaattcttctctgatatcttcctgtcatggttccccttctactacatgctgaagtgtggcttcctgttgtggtgcatggccccgagcccttctaatggggctgaactgctctacaagcgcatcatccgtcctttcttcctgaagcacgagtcccagatggacagtgtggtcaaggaccttaaagacaaggccaaagagactgcagatgccatcactaaagaagcgaagaaagctaccgtgaatttactgggtgaagaaaagaagagcacctaaaccagactggatggaaacttcctgccctctctgtaccttcctactggagcttgatgttatattagggactgtggtataattattttaataatgttgccttggaaacatttttgagatattaaagattggaatgtgttgtaagtttctttgcttacttttactgtctatatatatagggagcactttaaacttaatgcagtgggcagtgtccacgtttttggaaaatgtattttgcctctgggtaggaaaagatgtatgttgctatcctgcaggaaatataaacttaaaataaaattatataccccaaaaaaaaaaaaaaaaagggcggccgtctaaaagatcctccaagggcccaacttacnctgcatgcaactcctagtctccccnatatgagtc

SEQ ID NO: 462 - DNA, 1095 bp, Homo sapiens
  misc_feature (78)..(78): n equals a,t,g, or c
ggcggcgcagaatggccagagcatgccgcgtcactgctccgccgccggctgctgcacacgggacacgcgcgagacgcnmaaccgcggcatctccttccacagacttcccaagaaggacaacccgaggcgaggcttgtggctggccaactgccagcggctggaccccagcggccagggcctgtgggacccggcatccgagtacatctacttctgctccaaacactttgaggaggactgctttgagctggtgggaatcagtggatatcacaggctaaaggagggggcagtccccaccatatttgagtctttctccaagttgcgccggacaaccaagaccaaaggacacagttacccacctggcccccctgaagtcagccggctcagacgatgcaggaagcgctgctccgagggccgagggccacaactccattttctccacctccacctgctgatgtcacctgctttcctgtggaagaggcctcagcacctgccactttgccggcctccccagctgggaggctggagcctggccttagcagccccttttcagacctactgggccccttgggtgcccaggcagatgaagcaggctgcagcgcccagccttcaccagagcggcagccctcccctctcgaaccacggccagtctccccctcagcgtatatgctgcgcctgcccccacccgccggagcctacatccagaatgaacacagctaccaggtgggcagcgccttactctggaagcggcgagccgaggcagcccttgatgcccttgacaaggcccagcgccagctgcaggcctgcaagcggcgggagcagcggctgcggttgagactgaccaagctgcagcaggagcgggcacgggagaagcgggcacaggcagatgcccgccagactctgaaggagcatgtgcaggactttgccatgcagctgagcagcagcatggcctgaggggctgctggactgaccgaggggctgcccagcaagactgcagcctcttcctccctcagatcccaccagacccaccaggtgccataataaagcggattctagamaaaaaaaaaaaaaaaaaaaaaaaaaaaacaaaaaaaaaaa

SEQ ID NO: 463 - DNA, 1821 bp, Homo sapiens
  misc_feature (1373)..(1373): n equals a,t,g, or c
  misc_feature (1554)..(1554): n equals a,t,g, or c
  misc_feature (1599)..(1599): n equals a,t,g, or c
  misc_feature (1691)..(1691): n equals a,t,g, or c
  misc_feature (1753)..(1753): n equals a,t,g, or c
  misc_feature (1763)..(1763): n equals a,t,g, or c
ttcccgggtcgacccacgcgtccgcccacgcgtccggaacaccaactgctgaggctgccttgggaagaggatgatcctaaacaaagctctgctgctgggggccctcgctctgaccaccgtgatgagcccctgtggaggtgaagacattgtggctgaccacgttgcctcttgtggtgtaaacttgtaccagttttacggtccctctggccagtacacccatgaatttgatggagatgagsagttctacgtggacctggagaggaaggagactgcctggcggtggcctgagttcagcaaatttggaggttttgacccgcaggtgcactgagaaacatggctgtggcaaaacacaacttgaacatcatgattaaacgctacaactctaccgctgctaccaatgaggttcctgaggtcacagtgttttccaagtctcccgtgacactgggtcagcccaacaccctcatttgtcttgtggacaacatctttcctcctgtggtcaacatcacmtggctgagcaatgggcastcagtcacagaaggtgtttctgagaccagcttcctctccaagagtgatcattccttcttcaagatcagttacctcaccttcctcccttctgctgatgagatttatgactgcaaggtggagcactggggcctggatgagcctcttctgaaacactgggagcctgagattccaacacctatgtcagagctcacagagactgtggtctgcgccctggggttgtctgtgggcctcgtgggcattgtggtggggaccgtcttgatcatccgaggcctgcgttcagttggtgcttccagacaccaagggcccttgtgaatcccatcctgaaaaggaaggtgttacctactaagagatgcctggggtaagccgcccagctacctaattcctcagtaacatcgatctaaaatctccatggaagcaataaattccctttaagagatctatgtcaaatttttcyatctttcatccggggctgactgaacctatggctaagaattgkgacactctcatgtttcaagccaatttcatctcatttcccagatcatatttcatatccagtaacacagaagcaaccaagtacaatatagcctgataatatgttgatttcttagctgacattaatatttctttcttctttgtgttctcacccttggcactgccgcccatccctcaattcaggcaacaatgaagttaatggatactctctgccctttgctcagaattgttatagcaaaaattttaaaaccaaaaaataagtttgtactaatttcaatatggcttttaaaagtatgatggagaaataaattaggataaaggaactttgaatcacaaaaatatcaaaagtaaaaatntattctcaaaactttaaatttatgaagaatgatgacagtagaagccttcctcttcccttgtcaccttgagataaaaattctttaggcaggaaaagaaatggaagtcagaaaaacattagaataagacaataatgtgggtgtctgaaaaggaacaaatacttattcctcacatagggttagngacaatgggaaaagggacgggagtagaagccacagacatatctangagccctgaatagaggcacagtctgcctcacctcctgaatgaagctgtactagataaccatgtagctttccctgtgccactctggcatgaangagacagtacagtgaatatggctacaggatgtttcttggaaacatgccaatatcttcagaantccccagccnttccctacccttctggctaaggaaagcatgacttatgagagaaccctaggaagaccac

SEQ ID NO: 464 - DNA, 2080 bp, Homo sapiens
aggttaggataaattgagtggcttgaaaatactgttccttgaaaggaccttcttttgaacaccatgtcccaaaaggaaaaggcggcttacttgagtgatcccagggcaccgccgtgtgaatataaagattggctgacaamaatgtcaggaaamcatgatgttggagcttacatgctaatgtataagggcgctaatcgtactgaaacagtcacgtcttttagaaaacgagaaagtaaagtgcctgctgatctcttaaagcgggccttcgtgaggatgagtacaagccctgaggctttcctggcgctccgctcccacttcgccagctctcacgctctgatatgcatcagccactggatcctcgggattggagacagacatctgaacaactttatggtggccatggagactggcggcgtgatcgggatcgactttgggcatgcgtttggatccgctacacagtttctgccagtccctgagttgatgccttttcggctaactcgccagtttatcaatctgatgttaccaatgaaagaaacgggccttatgtacagcatcatggtacacgcactccgggccttccgctcagaccctggcctgctcaccaacaccatggatgtgtttgtcaaggagccctcctttgattggaaaaattttgaacagaaaatgctgaaaaaaggagggtcatggattcaagaaataaatgttgctgaaaaaaattggtacccccgacagaaaatatgttacgctaagagaaagttagcaggtgccaatccagcagtcattacttgtgatgagctactcctgggtcatgagaaggcccctgccttcagagactatgtggctgtggcacgaggaagcaaagatcacaacattcgtgcccaagaaccagagagtgggctttcagaagagactcaagtgaagtgcctgatggaccaggcaacagaccccaacatccttggcagaacctgggaaggatgggagccctggatgtgaggtctgtgggagtctgcagatagaaagcattacattgtttaaagaatctactatactttggttggcagcattccatgagctgattttcctgaaacactaaagagaaatgtcttttgtgctacagtttcgtagcatgagtttaaatcaagattatgatgagtaaatgtgtatgggttaaatcaaagataaggttatagtaacatcaaagattaggtgaggtttatagaaagatagatatccaggcttaccaaagtattaagtcaagaatataatatgtgatcagctttcaaagcatttacaagtgctgcaagttagtgaaacagctgtctccgtaaatggaggaaatgtggggaagccttggaatgcccttctggttctggcacattggaaagcacactcagaaggcttcatcaccaagattttgggagagtaaagctaagtatagttgatgtaacattgtagaagcagcataggaacaataagaacaataggtaaagctataattatggcttatatttagaaatgactgcatttgatattttaggatatttttctaggttttttcctttcattttattctcttctagttttgacattttatgatagatttgctctctagaaggaaacgtctttatttaggagggcaaaaattttggtcatagcattcacttttgctattccaatctacaactggaagatacataaaagtgctttgcattgaatttgggataacttcaaaaatcccatggttgttgttagggatagtactaagcatttcagttccaggagaataaaagaaattcctatttgaaatgaattcctcatttggaggaaaaaaagcatgcattctagcacaacaagatgaaattatggaatacaaaagtggctccttcccatgtgcagtccctgtccccccccgccagtcctccacacccaaactgtttctgattggcttttagctttttgttgtttttttttttccttctaacacttgtatttggaggctcttctgtgattttgagaagtatactcttgagtgtttaataaagtttttttccaaaaaaaaaaaaaaaaaaaaaaaaaaaaa

SEQ ID NO: 465 - DNA, 670 bp, Homo sapiens
  misc_feature (586)..(586): n equals a,t,g, or c
  misc_feature (594)..(594): n equals a,t,g, or c
  misc_feature (637)..(637): n equals a,t,g, or c
  misc_feature (641)..(641): n equals a,t,g, or c
  misc_feature (652)..(652): n equals a,t,g, or c
ggtgaaagttaaagacccaacagaatacactggacctgaaagttatgtggctcaaatgattgtggagaagaatttggattggtttcctcggatgcgagccatgtccctcgttagcaatgaaggcgacagtgagcaaaatgaaattcggagccttcaggagaagttggaatcgaccatgagtctggtcaaacagctgtcgggtcagctggcggagctcaaggagcagatgacagaacaaaggaagaataagcagagactgggcttcctcggatcaaacacaccccatgtgaatcatcacatgccaccacactgataccatggggggaagccgtgactagcctttcatcagtgtcctgcctgatcactgaataaagaactgagatggaaaaaaaaaaaaaaagggcggccgctctagaggatccaagcttacgtacgcgtgcatgcgacgtcatagctcttctatagtgtcacctaaattcaattcactggccgtcgttttacaacgtcgtgactgggaaaaccctggcgttacccaacttaatcgcttgcagcacatcccctttcgccagctggcgtaatagcgaanaggcccgnaccgatcgccttccaacagttgcgcagcctgaatggcgaatgngacncgcccttgtancggcgcattaagccccgg

SEQ ID NO: 466 - DNA, 2411 bp, Homo sapiens
  misc_feature (20)..(20): n equals a,t,g, or c
gctgtacctttgagggaganaacactgtcatgatgctccagacggctaggttcctgatgamaagttatgatcaggtgcactcaggaaagttggtgtgtggcatggtgtcctatttgaacgacctgcccagtcagcgcatccagccacagcaggtagcagtctggccaaccatggtggatatcaacagccccgaaagcctaaccgaagcatataaactccgtgcagccagattagtagaaattgctgcaaaaaaccttcaaaaagaagtgattcacagaaaaagcaaggaggtagcttggaacctaacttctgttgaccttgttcgagcaagtgaggcacattgccactatgtggtagttaagctcttttcagaaaaactcctcaaaattcaagataaagccattcaagctgtcttaaggagtttatgtctgctgtattctctgtatggaatcagtcagaacgcgggggatttccttcaggggagcatcatgacagagcctcagattacacaagtaaaccagcgtgtaaaggagttactcactctgattcgctcagatgctgttgctttggttgatgcatttgattttcaggatgtgacacttggctctgtgcttggccgctatgatgggaatgtgtatgaaaacttgtttgagtgggctaagaactccccactgaacaaagcagaggtccacgaatcttacaagcacctgaagtcactgcagtccaagctctgaagtgtcacaaggacaagtttaatctgcttcagaaagcgcctgtgtgcaactcaaattttgtggaatctttttcgaattcaaatagctatagagcaaatgataaattgacccctttttataaatggagggaaaaaatgaacagatttcagagattaaatgaaaaaaagcagatgttttaagtgcaattaacactgaaagagacctgttaaaccattcagaaaaagcttaagaaatgcgatatgacttccttttgtaatgctgctgatcccagtagactatgacttttgataattagcagaatttaactactgagtagttgattattttcacattttaattgctaatcactggctatataagtgtttttaagcaaaggtatttttgaagtggtgtagaacccttccaagctttcctgctcagtgttctaccagacttaccctggggcctggcttaaaagcaggattgaagaaaagggactgggggaaggaaacttattggaaaacttgatgcgaatgagtttctgcttggcacagtctctgcctgcttgctctcctttgctgatggattgcatttatcaaactattcatgctagcatttttccaacgagggaacttattccgcacgggcctactgtaggaccattgtctcgtgtaattaggaattttccatttgaaggatygctaaattgtcacagtagtaggaagtatagggaaacctctcagctgtggcactgttgtagctttggagtgcagagtgtaactctgggacaatcagatttcacatattctgtcatcttggcataagccattaaaagcttggagattactgtatttggcattaaaaaaaaatgtcacttaggtcagcactcccagacgtagcacagaaaaaccctttgacacaaaccatgtgttctgatttttggttcagaaaatattgaaactgtgagttgttttttttttaacaactgggaaaaaacaaaaacaaaaaactatagttagaaaaatggaagttccataggttctatttcttactctatgtatggctttgttttcagtctatttctaggagctttctctgaatcgctaattgtcctttcagttgaaatctaatttatacaatcattctatacttaaaggttaaatacatcttaattaattttttcttaaagtcaatgtaagtcactttgttttgtttttttttaatctacgccatatgcctcatgaaaccagctgttctagaatcagtcctgagaatatggcttaattccatggaaacataactcctatcttgggacctgacataatatctatctatcctggggaactggtaatatgagacttataggttacagcagaaatgctacatgttgacaaaagccttaatcgttccactgggagaactaattgataattgtgttaagattgaagattaaccctgtgttaatctcacttgagtctatcctgacagtagttcagattctggaaaatgataaactgacctgctagatgtagaattgtttcaaaattagtgttgaaataccttgttcacagatgaatatctgggcaggatctgagggtgtttggaatgacaccccccaatccagttgcatagatgggatgtctttgcaggtttgaggagatcatcgacctgcagagccccctttgacccagtacctca

SEQ ID NO: 467 - DNA, 2270 bp, Homo sapiens
  misc_feature (2202)..(2202): n equals a,t,g, or c
  misc_feature (2233)..(2233): n equals a,t,g, or c
  misc_feature (2266)..(2266): n equals a,t,g, or c
  misc_feature (2268)..(2268): n equals a,t,g, or c
tatagggaaagctggtacgcctgcaggtaccggtccgkaattcccgktcgcccacgcgtycggaagaaacttgtgaacgaagataagtggagaggcaaggtcagttaccaggactacgagattgagatttcggatgcttcagaggtagaaaaggaaattaataaagcccagaatgccatcgccggggaaggaatgggaatcagtcatgagctaatcaccctggagatcagctcccgagatgtcccggatctgactctaatagaccttcctggcataaccagagtggctgtgggcaatyagcctgctgacattgggtataagatcaagacactcatcaagaagtacatccagaggcaggagacaatcagcctggtggtggtccccagtaatgtggacatcgccaccacagaggctctcagcatggcccaggaggtggaccccgagggagacaggaccatcggaatcttgacgaagcctgatctggtggacaaaggaactgaagacaaggttgtggacgtggtgcggaacctcgtgttccacctgaagaagggttacatgattgtcaagtgccggggccagcaggagatccaggaccagctgagcctgtccgaagccctgcagagagagaagatcttctttgagaaccacccatatttcagggatctgctggaggaaggaaaggccacggttccctgcctggcagaaaaacttaccagcgagctcatcacacatatctgtaaatctctgcccctgttagaaaatcaaatcaaggagactcaccagagaataacagaggagctacaaaagtatggtgtcgacataccggaagacgaaaatgaaaaaatgttcttcctgatagataaarttaatgcctttaatcaggacatcactgctctcatgcaaggagaggaaactgtaggggaggaagacattcggctgtttaccagactccgacacgagttccacaaatggagtacaataattgaaaacaattttcaagaaggccataaaattttgagtagaaaaatccagaaatttgaaaatcagtatcgtggtagagagctgccaggctttgtgaattacaggacatttgagacaatcgtgaaacagcaaatcaaggcactggaagagccggctgtggatatgctacacaccgtgacggatatggtccggcttgctttcacagatgtttcgataaaaaattttgaagagttttttaacctccacagaaccgccaagtccaaaattgaagacattagagcagaacaagagagagaaggtgagaagctgatccgcctccacttccagatggaacagattgtctactgccaggaccaggtatacaggggtgcattgcagaaggtcagagagaaggagctggaagaagaaaagaagaagaaatcctgggattttggggctttccartccagctcggcaacagactcttccatggaggagatctttcagcacctgatggcctatcaccaggaggccagcaagcgcatctccagccacatccctttgatcatccagttcttcatgctccagacgtacggccagcagcttcagaaggccatgctgcagctcctgcaggacaaggacacctacagctggctcctgaaggagcggagcgacaccagcgacaagcggaagttcctgaaggagcggcttgcacggctgacgcaggctcggcgccggcttgcccagttccccggttaaccacactctgtccagccccgtagacgtgcacgcacactgtctgcccccgttcccgggtagccactggactgacgacttgagtgctcagtagtcagactggatagtccgtctctgcttatccgttagccgtggtgatttagcaggaagctgtgagagcagtttggtttctagcatgaagacagagccccaccctcagatgcacatgagctggcgggattgaaggatgctgtcttcgtactgggaaagggattttcagccctcagaatcgctccaccttgcagctctccccttctctgtattcctagaaactgacacatgctgaacatcacagcttatttcctcatttttataatgtcccttcacaaacccagtgttttaggagcatgagtgccgtgtgtgtgcgtcctgtcggagccctgtctcctctctctgtaataaactcatttctagcaraaaaaaaaaaaaaaaaaaaaaaaaaaaaanaaaaaaaaaaaaaaaaggggggccgcccaanaggatcccccggggggcccaagcttacgcgtgncngc

SEQ ID NO: 468 - DNA, 1921 bp, Homo sapiens
ggccctgcccacccaggccgcaagagctgccgggacggtccccatcttcttggagcgctttaggctggccggcggcgctgggaggtggagtcgttgctgttgctgtttgtgagcctgtggcgcggcttctgtgggccggaaccttaaagatagccgcaatggctgaaaatggtgataatgaaaagatggctgccctggaggccaaaatctgtcatcaaattgagtattattttggcgacttcaatttgccacgggacaagtttctaaaggaacagataaaactggatgaaggctgggtacctttggagataatgataaaattcaacaggttgaaccgtctaacaacagactttaatgtaattgtggaagcattgagcaaatccaaggcagaactcatggaaatcagtgaagataaaactaaaatcagaaggtctccaagcaaacccctacctgaagtgactgatgagtataaaaatgatgtaaaaaacagatctgtttatattaaaggcttcccaactgatgcaactcttgatgacataaaagaatggttagaagataaaggtcaagtactaaatattcagatgagaagaacattgcataaagcatttaagggatcaatttttgttgtgtttgatagcattgaatctgctaagaaatttgtagagacccctggccagaagtacaaagaaacagacctgctaatacttttcaaggacgattactttgccaaaaaaaatgaagaaagaaaacaaaataaagtggaagctaaattaagagctaaacaggagcaagaagcaaaacaaaagttagaagaagatgctgaaatgaaatctctagaagaaaagattggatgcttgctgaaattttcgggtgatttagatgatcagacctgtagagaagatttacacatacttttctcaaatcatggtgaaataaaatggatagacttcgtcagaggagcaaaagaggggataattctatttaaagaaaaagccaaggaagcattgggtaaagccaaagatgcaaataatggtaacctacaattaaggaacaaagaagtgacttgggaagtactagaaggagaggtggaaaaagaagcactgaagaaaataatagaagaccaacaagaatccctaaacaaatggaagtcaaaaggtcgtagatttaaaggaaaaggaaagggtaataaagctgcccagcctgggtctggtaaaggaaaagtacagtttcagggcaagaaaacgaaatttgctagtgatgatgaacatgatgaacatgatgaaaatggtgcaactggacctgtgaaaagagcaagagaagaaacagacaaagaagaacctgcatccaaacaacagaaaacagaaaatggtgctggagaccagtagtttagtaaaccaattttttattcattttaaataggttttaaacgacttttgtttgcggggcttttaaaaggaaaaccgaattaggtccacttcaatgtccacctgtgagaaaggaaaaatttttttgttgtttaacttgtctttttgttatgcaaatgagatttctttgaatgtattgttctgtttgtgttatttcagatgattcaaatatcaaaaggaagattcttccattaaattgcctttgtaatatgagaatgtattagtacaaactaactaataaaatatatactatatgaaaagagcaaaaacagtttttgattttttttttctttttgtacccaaagcatttaggaaagaactagaatattagctattgacgatgggcctttcccacaggccatttatggtgtctcctaggctggctttgtatatttacacaggaaagttggtaacactagaaataattacttggtcacaaagccttccctttttttttccttttcgagactgagtctcactcctatcgcgcagctgga

SEQ ID NO: 469 - DNA, 749 bp, Homo sapiens
  misc_feature (566)..(566): n equals a,t,g, or c
  misc_feature (569)..(569): n equals a,t,g, or c
  misc_feature (624)..(624): n equals a,t,g, or c
  misc_feature (730)..(730): n equals a,t,g, or c
  misc_feature (737)..(737): n equals a,t,g, or c
gtcagtttatagttgttgtcaactttggttaatatctataaagtgacactgagcctatgaagtgtataaacttaaaattgaagaaatcttggaatcagaggtagacataatagattgtggttctgggaaaggaggtgggagggtgtactggagcatgtgaaataatcatgatcattgagttgaataatcatataatttaacagaaacatctgggctttccaccaatgtcatcatgatgatgattcatcaaagataccctttcatggctggatgcggtggctcatgcctgtaatcccccagcactttgggaggccgaggcacgtggatctctcgaggtcaggagttcaagaccaggctggccaacatggcgaaaccctgtctctactaaaaaaacaaaagttagccaggtccggtggtgtgygcccataatcccagctacttgggagtctgaggcagtgaggcagaagaatcgcttgaacccgggaggcagaggttgcagtgagccgagatcgtgccactgcaccctaacccgggtgagagtaacactatctccaaaaaaaaaaagnacngaaaaaaaaaactcgagggggggcccggtacccaattcgccctatagtgagtcgnattacaattcactggccgtcgttttacaacgtcgtgactgggaaaaccctgcggtaccccaacttaatcgccttgcagcaaaatccccctttcgccagcttggcgnaatagcnaaaaaggccccg

SEQ ID NO: 470 - DNA, 1990 bp, Homo sapiens
gctcgtgccgctgcactggagctgcctggtgaccagaagtttggagtccgctgacgtcgccgcccagatggcctccaggctgaccctgctgaccctcctgctgctgctgctggctggggatagagcctcctcaaatccaaatgctaccagctccagctcccaggatccagagagtttgcaagacagaggcgaagggaaggtcgcaacaacagttatctccaagatgctattcgttgaacccatcctggaggtttccagcttgccgacaaccaactcaacaaccaattcagccaccaaaataacagctaataccactgatgaacccaccacacaacccaccacagagcccaccacccaacccaccatccaacccacccaaccaactacccagctcccaacagattctcctacccagcccactactgggtccttctgcccaggacctgttactctctgctctgacttggagagtcattcaacagaggccgtgttgggggatgctttggtagatttctccctgaagctctaccacgccttctcagcaatgaagaaggtggagaccaacatggccttttccccattcagcatcgccagcctccttacccaggtcctgctcggggctggggagaacaccaaaacaaacctggagagcatcctctcttaccccaaggacttcacctgtgtccaccaggccctgaagggcttcacgaccaaaggtgtcacctcagtctctcagatcttccacagcccagacctggccataagggacacctttgtgaatgcctctcggaccctgtacagcagcagccccagagtcctaagcaacaacagtgacgccaacttggagctcatcaacacctgggtggccaagaacaccaacaacaagatcagccggctgctagacagtctgccctccgatacccgccttgtcctcctcaatgctatctacctgagtgccaagtggaagacaacatttgatcccaagaaaaccagaatggaaccctttcacttcaaaaactcagttataaaagtgcccatgatgaatagcaagaagtaccctgtggcccatttcattgaccaaactttgaaagccaaggtggggcagctgcagctctcccacaatctgagtttggtgatcctggtaccccagaacctgaaacatcgtcttgaagacatggaacaggctctcagcccttctgttttcaaggccatcatggagaaactggagatgtccaagttccagcccactctcctaacactaccccgcatcaaagtgacgaccagccaggatatgctctcaatcatggagaaattggaattcttcgatttttcttatgaccttaacctgtgtgggctgacagaggacccagatcttcaggtttctgcgatgcagcaccagacagtgctggaactgacagagactggggtggaggcggctgcagcctccgccatctctgtggcccgcaccctgctggtctttgaagtgcagcagcccttcctcttcgtgctctgggaccagcagcacaagttccctgtcttcatggggcgagtatatgaccccagggcctgagacctgcaggatcaggttagggcgagcgctacctctccagcctcagctctcagttgcagccctgctgctgcctgcctggacttggcccctgccacctcctgcctcaggtgtccgctatccaccaaaagggctccctgagggtctgggcaagggacctgcttctattagcccttctccatggccctgccatgctctccaaaccactttttgcagctttctctagttcaagttcaccagactctataaataaaacctgacagaccatgaaaaaaaaaaaaaaagggcggccgctctagaggatccaagcttacgtacgcgtgcatgcgacgacatagctcttctatagtgcacctaaattcaattcactggccgcgttttacaacgtcgtgactgggaaaaccctggcgttacccaacttaa

SEQ ID NO: 471 - DNA, 2266 bp, Homo sapiens
  misc_feature (570)..(570): n equals a,t,g, or c
cccacgcgtccgcccacgcgtccgaatgttttggccgcttcaagatggcggtgcaggagtcggcggctcagttgtccatgaccctgaaggtccaggagtacccgaccctcaaggtgccctacgagacgctgaacaaacgctttcgcgccgctcagaagaacattgaccgggagaccagccacgtcaccatggtggtggccgagctggagaagacgttgagcggctgccccgccgtggactccgtggtcagcctgctggacggcgtggtggagaagctcagcgtcctcaagaggaaggcggtggaatccatccaggccgaggacgagagcgccaagctgtgcaagcgccggatcgagcacctcaaagagcatagcagcgaccagcccgcggcggccagcgtgtggaagaggaagcgcatggatcgcatgatggtggagcacctgctgcgttgcggctactacaacacggctgtcaagctggcgcgccagagcggcatcgaggacctagtgaatattgagatgttcctgacggccaaagaggtggaggagtccctggagaggcgtgagacgnccacctgcctggcctggtgccatgacaacaagtcccggctccggaagatgaagagctgcctggagttcagcctcagaatccaggagttcattgaactcatccggcagaataagagactggacgctgtgagacatgcaagaaagcacttcagccaagcagaagggagccagctggacgaggtgcgccaggccatgggcatgctggccttcccgcccgacacgcacatctccccgtacaaggaccttctggaccctgcacggtggcggatgctgatccagcagttccggtacgacaactaccgactacaccagctgggaaacaattctgtgttcaccctcaccctgcaggcyggcctctcagccatcaagacaccacagtgctacaaggaggacggcagctccaagagccctgactgccctgtgtgcagccgctccctgaacaagctggcgcagccctgcccatggcccactgtgccaactcccgcctggtctgcaagatttctggcgacgtgatgaacgagaacaatccgcccatgatgctgcccaacggctacgtctacggctacaattctctgctttctatccgtcaagatgataaagtcgtgtgcccgagaaccaaagaagtcttccacttctcacaagccgagaaggtgtacatcatgtaggccccacgtcgtgaagcgcacgcctcggggacgggctgcagtgggcggggaggccacgcyttcctcctgtcccacgctccagcctgccgcggcgtttctgtttcttgcgaccaaagatccgtgagcaacgataaatactcttaggaagagagaaaataaggtttcataagtttgtacttgaaaacatttggattggtaggattttgtaacacgtcaaccatttgatgcttctgaaaagtactttcaacttgcgaaggaaactcttctttaaagactgacctaaacaccgagggaaacttaagaacgtttaaaatataggagtccgtgatttccctgtgttttcagtttctttccttctgtgaacgatgagacttggagaacgggctggtccttcaccacttcctgttggccctggcctggccggggaaggtggcagcggcaccggactgacctgcagtgacccgcgatgccgcgccacgagggacacttatggcttcattcgagagctgctgccaaaacgcctggcgccgccaccgtcgggggctggcttcgaggacgcccgcctgcctcgcgggtcgtgtccgcgggactgtgttcgtacgtgcatagtttcgatatcacatcgcggggctgtgttcgtagctgcgtcgtttcgatatcacaccctctgtgtgccgccttacttcctgcttcgagaatgtataacgtggaaatccacgggaccaaatttctgcagaggccttgccggatggttccataactgtagagtctaattgctatccattacagaaattaatcgttcagttgaaagaagtactgatgacttttcaaaacaaatgaaccaccgtagctgacagagaaccgtatcgtagaggtttgtagttagtgcttatttttgcatgttgatgttgactagctaataaactgtaaatgtaaaccatgcgaataaaatggttttctatttctcaaaaaaaaaaaaaaaaaaaaaaaaaaaaaaaaaaaaaaaaaaaaaaaaaaaaaagggcggccgct

SEQ ID NO: 472 - DNA, 644 bp, Homo sapiens
  misc_feature (5)..(5): n equals a,t,g, or c
  misc_feature (15)..(15): n equals a,t,g, or c
  misc_feature (628)..(628): n equals a,t,g, or c
aaacnccctttaggnaacctcagttctaatacgactactatagggaaagctggtacgcctgcaggtaccggtccggaattcccgggtcgacccacgcgtccgggaaattcctttatctgaaattttgtctctggaaccagyaaaaacttcagctttaattcctaatggggccaatcctcattgtttcgaaatcactacggcaaatgtagtgtattatgtgggagaaaatgtggtcaatccttccagcccatcaccaaataacagtgttctcaccagtggcgttggtgcagatgtggccaggatgtgggagatagccatccagcatgcccttatgcccgtcattcccaagggctcctccgtgggtacaggaaccaacttgcacagagatatctctgtgagtatttcagtatcaaattgccagattcaagaaaatgtggacatcagcacagtatatcagatttttcctgatgaagtactgggttctggacagtttggaattgtttatggaggaaaacatcgtaaaacaggaagagatgtagctattaaaatcattgacaaattacgatttccaacaaaacaagaaagccagcttcgtaatgaggttgcaattctacagaaccttcatcancctggtgttgtaaatt

SEQ ID NO: 473 - DNA, 747 bp, Homo sapiens
cgaggagccgcccytcttctcctcccacaagccccgcggggacttccccagccccatccatgtgagcggcccccgcttggtccagccccacggccctcgcttcaggctggagggcaacgctgtgctctacggcggctggagctttgccttccggctgcgctcctcctccgggctgcaggtcctgaacgtgcacttcggcggagagcgcattgcctatgaggtcagcgtgcaagaggcagtggcgctgtatggaggacacacacctgcaggcatgcagaccaagtacctcgatgtcggctggggcctgggcagcgtcactcatgagttagcccccggcatcgactgcccggagaccgccaccttcctggacactttccactactatgatgccgatgacccggtccattatccccgagccctctgcctctttgaaatgcccacaggggtgccccttcggcggcactttaattccaactttaaaggtggcttcaacttctatgcggggctgaagggccaggtgctggtgctgcggacaacttcaactgtctacaattatgattacatttgggactttatcttctaccccaacggggtgatggaggccaagatgcatgccactggctacgtccacgccamcttctacacccccgaggggcttgcgccacgggmattcgsctgsaaaaccaacctgaatggggaacattacacactttactttggggggaacttaaccgggggaaaaacctg

SEQ ID NO: 474 - DNA, 1058 bp, Homo sapiens
  misc_feature (1043)..(1043): n equals a,t,g, or c
  misc_feature (1047)..(1047): n equals a,t,g, or c
  misc_feature (1057)..(1057): n equals a,t,g, or c
ggcacgagcttacagacgctgccagcatcgccgccgccagaggagaaatgtctgaagtaagacccctctccagagacatcttgatggagaccctcctgtatgagcagctcctggaacccccgaccatggaggttcttggcatgactgactctgaagaggacctggaccctatggaggacttcgattctttggaatgcatggagggcagtgacgcattggccctgcggctggcctgcatcggggacgagatggacgtgagcctcagggccccgcgcctggcccagctctccgaggtggccatgcacagcctgggtctggctttcatctacgaccagactgaggacatcagggatgttcttagaagtttcatggacggtttcaccacacttaaggagaacataatgaggttctggagatccccgaaccccgggtcctgggtgtcctgcgaacaggtgctgctggcgctgctgctgctgctggcgctgctgctgccgctgctcagcgggggcctgcacctgctgctcaagtgaggccccggcggctcagggcggggctggccccacccccatgaccactgccctggaggtggcggcctgctgctgttatctttttaactgttttctcatgatgcctttttatatttaaaccccgagatagtgctggaacactgctgaggttttatactcaggttttttgttttttttttattccagttttcgttttttctaaaagatgaattcctatggctctgcaattgtcaccggttaactgtggcctgtgcccaggaagagccattcactcctgcccctgcccacacggcaggtagcagggggagtgctggtcacacccctgtgtgatatgtgatgccctcggcaaagaatctactggaatagattccgaggagcaggagtgctcaataaaatgttggtttccagcaaaaaaaaaaaaaaaaaaaaaaaaaaaaaaaaaaaaaaaaaaaaaaaaaaaaaaaaaaaaaaaaaaaaaaaaaaaaaaaaaaaaaaaaaaaaaaaaaaaaaaggggnggcngttttaaagna

SEQ ID NO: 475 - DNA, 1950 bp, Homo sapiens
  misc_feature (1900)..(1900): n equals a,t,g, or c
  misc_feature (1907)..(1907): n equals a,t,g, or c
  misc_feature (1940)..(1940): n equals a,t,g, or c
tcgacccacgcgtccgagaccctggagttacaatggcggcgccatgctgcgctggggctgccgtggaagacgttgggctttcgcccgggttgacggtggttcttgccaccgaagaggggctccgactgggtccacatccaaccagattaggggagagagctcagtggctcagcagcccctccacacggcccagaagacgaggaaaggtgaacacaaatgggctgctgtggtaggtttggaaattcatgcccagatttcctccaactctaaactcttctctggatctcaagttcgcttttcagcacctccaaattctttggtttctttttttgatgcatctctacctggaactttgccggttctcaacaggaggtgtgtagaagcggcggtgatgacaggcctggctctgaactgccacataaacaagaagtccttgtttgacaggaagcactacttctatgcagacctccctgcaggctaccaaattacccagcagaggctcccaattgctgtgaatgggagcttgatatatggcgtctgtgcagggaagaagcagagtcaggtgatccccaagacggtgaggatcaagcagatccagttggagcaagacagtggcaaaagcctccacgacaacctgaggtctcaracgctcattgatttgaacagggcaggagtgggccttctggaggtggtcctggagcccgacatgtcctgtggagaagaggcggcaacagctgtcagggagctgcagctgatccttcaagccctggggaccagccaggcgaacatggcagagggccagttgagagtggatgccaatatatccgtgcatcaccctggggagcctttgggckttcgaacggaagtraagaatctcaacagcatcaggttcctggccaaagccatagactatgaaattcagaggcaaatcaatgaacttgagaatggaggtgaaattctgaacgaaacacgctcatttcatcacaagctggggtgcaccatgtcaatgagagacaaagaaggaaaacaggactacaggttcatgccagaacccaacctgcctcccctggtgctctacgacgccacatctctgcccgcagtgcatacccacagcaagtgatcaatattgaccagattcgggagacactcccggagctccccagtgtgacccgagagaagcttgtccaacagtatgggatgctgctggaacacagcttcactttgctgaacgaagtcggcctactggagttcttccaaaatgtgataaaagaaactagggcagagccaaaaaaggtgactagttgggtcctcaacacttttctgggctatttaaagcaacagaacctcgctgtcagtgagagtcctgtcacaccctctgcactcgctgagcttcttgacctgctggacagcagaacaatttcttcatcagcagctaaacaggtgtttgaggaactgtggaagagggaaggcaagactccagggcagattgtttcagaaaagcagcttgaactgatgcaggaccagggggcactggagcagctctgccactctgtgatggaggcccatcctcaagtggtaatggatgtgaagaacagaaaccccagagctataaataaactgattgggttggtccggaaagcgactcaaagccgagcagatccagtcatgataaaggagatcctggagaagaagctgtcattgtgagatgtttgggatccccttgcccaagggacaacaacaaacagtgcagcctgactgggaacaggatcctgtgaaagctgatgcccatgtgccctgagagctgcctctcaatccctgtccaagccagtatgcattatgcacagkgtcyaccttagcctggctgagtgctccagcacagacacccgctgtatcctagagncggagtncagtaggacctttgtagattacaaaggtggacncttaaaaaaa

SEQ ID NO: 476 - DNA, 3633 bp, Homo sapiens
  misc_feature (3611)..(3611): n equals a,t,g, or c
tggaattcgccctttttaggtgacactatagaaaggtacgcctgcaggtaccggtccggaattcccgggtcgacccacgcgtccgaggtttttgactatagtcaccgccagaaggagcaggatgtggagaaggagctgcgagatggaggcgagcaggacacctgggcaggcgagggcgcggaactctggcacggaacctgctagtggatggagagactggggagagcttccctgcacagtttccagcagacatttccagcataacagaagcagtgcctagtgagagtgagccccctgctcttcaaaacaacctcttgtctcctcttctgaccgggacagagtcaccatttgatttggaacagcagtggcaagatctcatgtccatcatggaaatgcaggccatggaagtgaacacatcagcaagtgaaatcctgtacagtgcccctcctggagacccactgagcaccaaytacagccttgcccccaacaytcccatcaatcagaatgtcagcctgcatcaggcgtccctggggggctgcagccaggacttcttactcttcagccccgaggtggaaagcctgcctgkggccagtagctccacgctgstcccgttggcccccagcaattctaccagcctcaactccaccttcggctccaccaacctgacagggstcttctttccaccccagctcaatggcacagccaatgacacagcaggcccagagctgcctgaccctttggggggtctgttagatgaagctatgttggatgagatcagccttatggacctggccattgaagaaggctttaaccctgtgcaggcctcccagctggaggaggaatttgactctgactcaggcctttccttagactcgagccatagcccttcttccctaagcagctctgaaggcagttcttcctcttcttcctcctcctcttcctcttcttcctctgcttcttcctctgcctcttcctccttttctgaggaaggtgcggttggctacagctctgactctgagaccctggatctggaagaggccgagggtgctgtgggctaccagcctgagtattccaagttctgccgcatgagctaccaggatccagctcagctctcatgcctgccctacctggagcacgtgggccacaaccacacatacaacatggcacccagtgccctggactcagccgacctgccaccacccagtgccctcaagaaaggcagcaaggagaagcaggctgacttcctggacaagcagatgagccgggatgagcaccgagcccgagccatgaagatccctttcaccaatgacaaaatcatcaacctgcctgtggaggagttcaatgaactgctgtccaaataccagttgagtgaagcccagctgagcctcatccgagacatccggcgccggggcaagaacaagatggcggcgcagaactgccgcaagcgcaagctggacaccatcctgaatctggagcgtgatgtggaggacctgcagcgtgacaaagcccggctgctgcgggagaaagtggagttcctgcgctccctgcgacagatgaagcagaaggtccagagcctgtaccaggaggtgtttgggcggctgcgagatgagaacggacgaccctactcgcccagtcagtatgcgctccagtacgccggggacggcagtgtcctcctcatcccccgcacgatggccgaccagcaggcccggcggcaggagaggaagccaaaggaccggagaaagtgagcctggggaagaagggggtttgaagcccaccaagaccgaaactggagaagggctggacctggacctggacctggacctacagcggggacttaaatgccttcttatccaatatatcttctcagatgggatgactgcgggtcagtgtacaggaagaggcaggcactggctggctcagctccactcgggtggagtggaagtggccagaccatttagacggacagggtcctcaccctacccctttcctgtgaggcaggggtggtggtggagttgctggaggtagaggagctatgtggagcaaaggccgacagaggggaaggaatggacctgtgagaggaagggaaggtggcagaaagtctcatttcaggaaggagggatagaaggaaggaaggaaggaaccccccccccccccgaaaaaaaaatcaaagcgggaagaaaatcagagggaaggttaaggttggctctggccaggattccaggcagcaggttggagtgactggtgggcctagatcactggtgtgataaaccccatttcaccccggggggggtggggtacacaracacagggtgggggtggggaggggcggtgttaactctttctgctccttgcattttgacatccctgaaggggagctcttggatatcattggccatgtttcaatcgaatggagccactgggccccaacactggctttgagatttagagtcaaagggtagagtgaacaggaaagggtcacgtggtcccatgttgcaacagccccaacatcacgcatgtcattcactgccttgccactccatctccctccgtgctccagccacccctgagctgaggctcccattgtctccatcagagcctgcatgtgtatgccgtcctcccctggtccggtgtttgtgttccccacccctcacagactgcctgagctcttctgtaagctggggtagggtgatggcagtgctccgggaactgggcctgcagccttcctcttctgggactgctgtgaggcagaggaatgatggagaatctagtgtagcagcctccaggcaggattcagcacaacactggggagtcacccttccctcgggcctctgcctaccaacaactgggcttatcactgggaaaacacaaaaaattacacaacccagcaacaacaaaagaactagtcctcttagaatttcttgcgctttgatttttttagggcttgtgccctgtttcacttatagggtctagaatgcttgtgttgagtaaaaaggagatgcccaatattcaaagctgctaaatgttctctttgccataaagactccgtgtaactgtgtgaacacttgggatttttctcctctgtcccgaggtcgtcgtctgctttcttttttgggtttctttctagaagattgagaagtgcatatgacaggctgagagcacctccccaaacacacaagctctcagccacaggcagcttctccacagccccagcttcgcacaggctcctggagggctgcctgggggaggcagacatgggagtgccaaggtggccagatggttccaggactacaatgtctttatttttaactgtttgccactgctgccctcacccctgcccggctctggagtaccgtctgccccagacaagtgggagtgaaatgggggtggggggaagcactgattcccagttagggggtgcctaactgagcagtagggatagaaggtgtgaacctgggagtgcttttataaattattttccttgtagattttatttttaatttatctctgtgacctgccagggagaggggagagagagagagatgctgttgagcacatgacaaaataaaataaaatggatgattcattcttaaaaaaaaaaaaaaaaaaaattnctgcggtccgtcaagggaattc

SEQ ID NO: 477 - DNA, 1403 bp, Homo sapiens
gcgtcgtygtgggtgggaattgtcgcctaagtggttccgggttggtggatgaccttgagccctcaggaacgagatggcggttctctggaggctgagtgccgtttgcggtgccctaggaggccgagctctgttgcttcgaactccagtggtcagacctgctcatatctcagcatttcttcaggaccgacctatcccagaatggtgtggagtgcagcacatacacttgtcaccgagccaccattctggctccaaggctgcatctctccactggactagcgagagggttgtcagtgttttgctcctgggtctgcttccggctgcttatttgaatccttgctctgcgatggactattccctggctgcagccctcactcttcatggtcactggggccttggacaagttgttactgactatgttcatggggatgccttgcagaaagctgccaaggcagggcttttggcactttcagctttaacctttgctgggctttgctatttcaactatcacgatgtgggcatctgcaaagctgttgccatgctgtggaagctctgacctttttgacttcatactttgaagaattgatgtatgcctctttgcctctgctttgtcatgccattaagctcacaataaggaagaaataacagataagtccattggtggacagccttcttctcttaatcacaagattattttcagaatttaatctttgaggaaaaggtttgagaggaattatatctaagttgtgagactgagttctatattctggtgagttaatggggttgcctcccagcttcttataagactcacagtataactaaacatgatatatcagcttttgcctttcaatttatcaatctcttaaagagaatccaactttattacgattagtatatgatcaaacttccatatttgccttgggaataatggacaaagggaaatactcttaattcatgaataaaaactttgcagaaaattagacagtgtttaattttcgaaaacttccctctctagacagtagataccacctactgatggttacatatactagggaaattttaaaattaggaaatgctgatagctcatattataaatttctaaatcctaggaagaaacgcttggagtgcttctgaatatacagaagttccatttaagggcaagtttccccgtagatgtatcaaaatactaccaactgtaaattgagatttaattcccaaatgtattctacttgttctaaaacaatctgtccacaaatataaaactataagtaataaattgttattttcgcacaatgggaatctctaatgtgaaaatgtattctatgaaaataatttttttaaataaaatgttatataataaaagtgtcttctatgcttttaaaaaaaaaaaaaaaaaaaaaaaaaaa

SEQ ID NO: 478 - DNA, 4171 bp, Homo sapiens
  misc_feature (1)..(1): n equals a,t,g, or c
  misc_feature (12)..(12): n equals a,t,g, or c
  misc_feature (60)..(60): n equals a,t,g, or c
  misc_feature (274)..(274): n equals a,t,g, or c
  misc_feature (3314)..(3314): n equals a,t,g, or c
ntttccaaaganccagtggactggatttaagtaactctttaggaaaaatgtaagggaacnaaaaagggaaacttggaagggatcataaggcagcaagaggctgatatttcaaaattctaagttcagttatgaacaaactggagactgatcttcaggcctccagagaactgaccagtaggctgcatgaagaaataaatatgaaagagcaaaagattataagcctgctttctggcaaggaagaggcaatccaagtagctattgctgaactgcgtsngcaacatgataaagaaattaaagagctggaaaacctgctgtcccaggaggaagaggagaatattgttttagaagaggagaacaaaaaggctgttgataaaaccaatcagcttatggaaacactgaaaaccatcaaaaaggaaaacattcagcaaaaggcacagttggattcctttgttaaatccatgtcttctctccaaaatgatcgagaccgcatagtgggtgactatcaacagctggaagagcgacatctctctataatcttggaaaaagaccaactcatccaagaggctgctgcagagaataataagcttaaagaagaaatacgaggcttgagaagtcatatggatgatctcaattctgagaatgccaagctagatgcagaactgatccaatatagagaagacctgaaccaagtgataacaataaaggacagccaacaaaagcagcttcttgaagttcaacttcagcaaaataaggagctggaaaataaatatgctaaattagaagaaaagctgaaggaatctgaggaagcaaatgaggatctgcggaggtcctttaatgccctacaagaagagaaacaagatttatctaaagagattgagagtttgaaagtatctatatcccagctaacaagacaagtaacagccttgcaagaagaaggtactttaggactctatcatgcccagttaaaagtaaaagaagaagaggtacacaggttaagtgctttgttttcctcctctcaaaagagaattgcagaactggaagaagaattggtttgtgttcaaaaggaagctgccaagaaggtaggtgaaattgaagataaactgaagaaagaattaaagcatcttcatcatgatgcagggataatgagaaatgaaactgaaacagcagaagagagagtggcagagctagcaagagatttggtggagatggaacagaaattactcatggtcaccaaagaaaataaaggtctcacagcacaaattcagtcttttggaaggtctatgagttccttgcaaaatagtagagatcatgccaatgaggaacttgatgaactgaaaaggaaatatgatgccagtctgaaggaattggcacagttgaaagaacagggactcttaaacagagagagagatgctcttctttctgaaaccgccttttcaatgaactccactgaggagaatagcttgtctcaccttgagaaacttaaccaacagctcctatccaaagatgagcaattgcttcacttgtcctcacaactagaagattcttataaccaagtgcagtccttttccaaggctatggccagtctgcagaatgagagagatcacctgtggaatgagctggagaaatttcgaaagtcagaggaagggaagcagaggtctgcagctcagccttccaccagcccagctgaagtacagagtttaaaaaaagctatgtcttcactccaaaatgacagagacagactactgaaggaattgaagaatctgcagcagcaatacttacagattaatcaagagatcactgagttacatccactgaaggctcaacttcaggagtatcaagataagacaaaagcatttcagattatgcaagaagagctcaggcaggaaaacctctcctggcagcatgagctgcatcagctcaggatggagaagagttcctgggaaatacatgagaggagaatgaaggaacagtaccttatggctatctcagataaagatcagcagctcagtcatctgcagaatcttataagggcaattgaggtcttcttcctcccagactcagcctctcaaagtgcaataccaaagacaggcatccccagagacatcagcttccccagatgggtcacaaaatctggtttatgagacagaacttctcaggacccagctcaatgacagcttaaaggaaattcaccaaaaggagttaagaattcagcaactgaacagcaacttctctcagctactggaagagaaaaacaccctttccattcagctctgcgataccagtcagagtcttcgtgagaaccagcagcactatggtgaccttttaaatcactgtgcagtcttggagaagcaggttcaagagctgcaggcggtgagtaaagagaaggggccactaaatatagatgttgctccaggagctccccaggaaaagaatggagttcacagaaagagtgaccctgaggaactaagggaaccscagcaaagcttttctgaagctcagcagcagctatgcaacaccagacaggaagtgaatgaattaaggaagctgctggaagaagaacgagaccaaagagtggctgctgagaatgctctctctgtggccgaggagcagatcagacggttagagcacagtgaatgggactcttcccggactcctatcattggctcctgtggcactcaggagcaggcactgttaatagatcttacaagcaacagttgtcgaaggacccggagtggcgttggatggaagcgagtcctgcgttcactctgtcattcacggacccgagtgccacttctagcagccatctactttctaatgattcatgtcctgctcattctgtgttttacgggccatctatagacttagttgttactctttggaccactcccctcaaaacttggaattctctcacctctaacatcagaacatcaattccagtggaacagtcttcccatttacaggtcttctctccaactcttcacggaaagtgcctgcaaaaacagaggtggatacgaggacaggttggagctgcagggactggcgagtctgctttcttctactgccctgagcctgaacgcttctgcttaatctgagaatcacatttggtttgttgagcctaatatttgttgagattttgcaggaccctgatcttttgtggtcctgtaaaagatactgaggaatgtctttcagccaagccaagaggatggtttcaataaacctaataatctgaagttcagtatcattttgattgataactttctttgccttgtttgcctgtattttctcctgtttcagggggaaggtggctctgcatnaaacagagttcagggaaatgaacatgtcacctcataggacatctgatttaggtctcttgcagaatagggtggtgaaagctgaaggaactccctaggggttttagctgttagatcacatgggaggacagcatcttcttccctgccaatttcagatataattggagggagaatttcaggtcttagactataaggatagaatccctttgcttttgcccttgatcacatgtatactaaggtattaagtggcccaagtctttcctttcaccaaagggcagggagaagtgtctatggacagcagggttccaattcttgtcattccaggaatatctgaatattcctggaatgtggaccctgagacagtgctcaggggccactgggagccaatattaggcattgactctcagccaggagtctgactggtctaacaccacactgcaactcctgacctcttgaagtactaagctactttgctgttagtgacagttattacagtttctcagccccattgtctctgccctctgtggcaatggaaggagaatatagagaagacaaaattaaatatagatagacctgagaaggacagccaggatagaattccatttgtgcctattccctgcctcccctcccctcccccatcctaccagttggttattttctcattgcatacgtgatgtgttcactgcctagcctctccctaaagaagagagaagacaagtgggctgactgatctgctctaaatctactgtggtgattaaatcttggttacaacatcctgggaagtttcctgaacaactgtaaaataataaaattattttcagaatgaaaaaaaaaaaaaaaaaaaaaaaaaaaaaaaaaaa

SEQ ID NO: 479 - DNA, 1455 bp, Homo sapiens
  misc_feature (1434)..(1434): n equals a,t,g, or c
  misc_feature (1437)..(1437): n equals a,t,g, or c
  misc_feature (1455)..(1455): n equals a,t,g, or c
ccgacagtaccggtcggattcccgggtcgacccacgcgtccggaccttcagcgttgccctggcggagcagagacaggccctcggggtggaggtctttggtttcataagagcctgagagagatttttctaagatatgtgtaacacaccaacgtactgtgacctaggaaaggctgctaaggatgtcttcaacaaaggatatggctttggcatggtcaagatagacctgaaaaccaagtcttgtagtggagtggaattttctacttctggtcatgcttacactgatacagggaaagcatcaggcaacctagaaaccaaatataaggtctgtaactatggacttaccttcacccagaaatggaacacagacaatactctagggacagaaatctcttgggagaataagttggctgaagggttgaaactgactcttgataccatatttgtaccgaacacaggaaagaagagtgggaaattgaaggcctcctataaacgggattgttttagtgttggcagtaatgttgatatagatttttctggaccaaccatctatggctgggctgtgttggccttcgaagggtggcttgctggctatcagatgagttttgacacagccaaatccaaactgtcacagaataatttcgccctgggttacaaggctgcggacttccagctgcacacacatgtgaacgatggcactgaatttggaggttctatctaccagaaggtgaatgagaagattgaaacatccataaaccttgcttggacagctgggagtaacaacacccgttttggcattgctgctaagtacatgctggattgtagaacttctctctctgctaaagtaaataatgccagcctgattggactgggttatactcagacccttcgaccaggagtcaaattgactttatcagctttaatcgatgggaagaacttcagtgcaggaggtcacaaggttggcttgggatttgaactggaagcttaatgtggtttgaggaaagcatcagatttgtccctggaagtgaagagaaatgaacccactatgttttggccttaaaattcttctgtgaaatttcaaaagtgtgaactttttattcttccaaagaattgtaatcctccccacactgaagtctaggggttgcgaatccctcctgagggagatgcttgaaggcatgcctggaagttgtcatgtttgtgccacgtttcagttcagttctgaagtgttattaaatgtgttcctcagcgacagtgtagcgtcatgttagaggagacgatctgacccaccagtttgtacatcacgtcctgcatgtcccacaccattttttcatgaccttgtaatatactggtctctgtgctatagtggaatctttggttttgcatcatagtaaaataaaataaacccatcacatttggaacataaaaaaaaaaaagggncgnccgttttagaggatccan

SEQ ID NO: 480 - DNA, 2491 bp, Homo sapiens
gatcagttccaggccccattccmttctctgaacatcttctgacacactgacagtgctgagcagagcaagaaaacgggcaatgctgtgagagccattggaagactgtcctctatggcaatgatctcagggctcagtggcaggaaatcctcaacagggtcaccaaccagcccgctcaatgcagaaaaactagaatctgaagaagatgtgtcccaagctttccttgaggctgttgctgaggaaaagcctcatgtaaaaccctatttctctaagaccattcgcgatttagaagttgtggagggaagtgctgctagatttgactgcaagattgaaggatacccagaccccgaggttgtctggttcaaagatgaccagtcaatcagggagtcccgccacttccagatagactacgatgaggacgggaactgctctttaattattagtgatgtttgcggggatgacgatgccaagtacacctgcaaggctgtcaacagtcttggagaagccacctgcacagcagagctcattgtggaaacgatggaggaaggtgaaggggaaggggaagaggaagaagagtgaaacaaagccagagaaaagcagtttctaagtcatattaaaaggactatttctctaaaactcaaaaaaaaaaaaaaaactcaagatagtaaaagcacctagtgtgatagattatcggttaggtcatttgtgggttgattcttcagaaacagcagttgatacctagcagcgttattgatgggcattaatctatgttagttggcaccttaagatactagtgcagctagatttcatttagggaaatcaccagtaacttgactgaccaattgattttagagagaaagtaaccaaaccaaatatttatctgggcaaagtcataaattctccacttgaatgcgctcatgaaaaataaggccaaaacaagagttctgggccacagctcagcccagagggttcctggggatgggaggcctctctctccccaccccctgactctagagaactgggttttctcccagtactccagcaattcatttctgaaagcagttgagccactttattccaaagtacactgcagatgttcaaactctccatttctctttccccttccacctgccagttttgctgactctcaacttgtcatgagtgtaagcattaaggacattatgcttcttcgattctgaagacaggtccctgctcatggatgactctggcttccttaggaaaatatttttcttccaaaatcagtaggaaatctaaacttatcccctctttgcagatgtctagcagcttcagacatttggttaagaacccatgggaaaaaaaaaaatccttgctaatgtggtttcctttgtaaaccaggattcttatttgtgctgttatagaatatcagctctgaacgtgtggtaaagatttttgtgtttgaatataggagaaatcagtttgctgaaaagttagtcttaattatctattggccacgatgaaacagatttcaactgataaagagctggagaactccatgtactttggaatctcctccaagatagccagagtttaatacatcttcattctcaacactctccaaagaacttgacctaccttatgggttccatatttttcttcttaaatgtgcatcaatcatgccttgcccccaacctttaaatatattcttagacctggtaaatgcactcagacttgcgtctttaggaatttttaactttctttcactacattggcacttaaattttttctttataaagctttttgaaggtcataaacaaagaccataattgatgatagacctaatacatttcctctgtgtgtgtgtgtaacattccaaatactttttttttcttttccactgtttgtaaggtgcaacaatttaatatttttaagggactttttaagagttccttaagaaccaatttaaaattacttcagtgcaatcctacacagtatcaacattagaattttgatattagtcttatgttatcttccattctatttttatctgctttttgctgctagtttcaaactgccagtatttttccttttgcttttaaaatagttacaatatttttcatgatagccacagtattgccacagtttattataataaagggtttttatttgatttagcgcattcaaagcttttttctatcacttttgtgttcagaatataacctttgtgtgcgtgtatgttgtgtgtgtgcatgtgtggcgtatatgtgtgttacaggttaatgccttcttggaattgtgttaatgttctcttggtttattatgccatcagaatggtaaatgagaacactacaactgtagtcagctcacaatttttaaataaaggataccacagtgcatgctgtttgttcaatctttgcagacttctctttctttccatgctaccagttgtaaaggacacagctatatccttcatattgaagaatttgttatcaggaaactaccagtcctgctttac

SEQ ID NO: 481 - DNA, 3104 bp, Homo sapiens
  misc_feature (429)..(429): n equals a,t,g, or c
gcagacacaggactcacgccagctccggtcccaagccctgcagcgcaagggccggcctgtggggagacctcaggccctcttctgagtggtggccaagggactggggagggagagtgagcccagacctgagctcagggaggggagcacagcttctggatgaaagtttggccgggattttctggccacctccacctggtgaatccagcagctggtggccgatggagtttggggcagcaggtggggccctcaactgttgagacaacctcaactgcaccccactcccgttcctctgcgcccagccttcctgcaggaggaggtgcggcgggctgggctggtcctgcccccgccaaaggggaggctgccggcacccccaccccgggacctgctgcgcatccaggaggagacggagcgcctggcccaggagctgcnggatgtgcggggcaaccagcaggccctgcgggcccagctgcaccagctgcagctccacgccgccgtgctacgccagggccatgaacctcagctggcagccgcccacacagatggggcctcagagaggacgcccctgctccaggcccccggggggccgcaccaggacytgagggtcaactttgtggcaggtgccgtggagccccacaaggcccctgccctagagcgcctgctctggagggcctgccgcggcttcctcattgccagcttcagggagctggagcagccgctggagcaccccgtgacgggcgagccagccacgtggatgaccttcctcatctcctactggggtgagcagatcggacagaagatccgcaagatcacggactgcttccactgccacgtcttcccgtttctgcagcaggaggaggcccgcctcggggccctgcagcagctgcaacagcagagccaggagctgcaggaggtcctcggggagacagagcggttcctgagccaggtgctaggccgggtgctgcagctgctgccgccagggcaggtgcaggtccacaagatgaaggccgtgtacctggccctgaaccagtgcagcgtgagcaccacgcacaagtgcctcattgccgaggcctggtgctctgtgcgagacctgcccgccctgcaggaggccctgcgggacagctcgatggaggagggagtgagtgccgtggctyaccgcatcccctgccgggacatgccccccacactcatccgcaccaaccgcttcacggccagcttccagggcatcgtggatgcctacggcgtgggccgctaccaggaggtcaaccccgctccctacaccatcatcaccttccccttcctgtttgctgtgatgttcggggatgtgggccacgggctgctcatgttcctcttcgccctggccatggtccttgcggagaaccgaccggctgtgaaggccgcgcagaacgagatctggcagactttcttcaggggccgctacctgctcctgcttatgggcctgttctccatctacaccggcttcatctacaacgagtgcttcagtcgcgccaccagcatcttcccctcgggctggagtgtggccgccatggccaaccagtctggctggagtgatgcattcctggcccagcacacgatgcttaccctggatcccaacgtcaccggtgtcttcctgggaccctacccctttggcatcgatcctatttggagcctggctgccaaccacttgagcttcctcaactccttcaagatgaagatgtccgtcatcctgggcgtcgtgcacatggcctttggggtggtcctcggagtcttcaaccacgtgcactttggccagaggcaccggctgctgctggagacgctgccggagctcaccttcctgctgggactcttcggttacctcgtgttcctagtcatctacaagtggctgtgtgtctgggctgccagggccgcctcggcccccagcatcctcatccacttcatcaacatgttcctcttctcccacagccccagcaacaggctgctctacccccggcaggwgggytgcggytggtgggggccgggctcacacggcctcatggggaccccgcggtcacagggccactgggagctgcaagatcctcgtccgagaaacggggatgcaggccccgggccgtgcagacagggccgtcagaggtgatggtgtgcatctttagcaggtggcacaactggcgctgggaaccgggggtcccttccctcaggagtccttatggaggcagaccctcacccagtgagggcacggagcccccgggggccctggagggaggagcgaccgcaggctctctgggccccgtgactgctgtgactcaggttcctttgcaggtgtgcacagcagggacgccctgactctcgccctctccctggcaggaggtggtccaggccacgctggtggtcctggccttggccatggtgcccatcctgctgcttggcacacccctgcacctgctgcaccgccaccgccgccgcctgcggaggaggcccgctgaccgacaggaggaaaacaaggccgggttgctggacctgcctgacgcatctgtgaatggctggagctccgatgaggaaaaggcagggggcctggatgatgaagaggaggccgagctcgtcccctccgaggtgctcatgcaccaggccatccacaccatcgagttctgcctgggctgcgtctccaacaccgcctcctacctgcgcctgtgggccctgagcctggcccacgcccagctgtccgaggttctgtgggccatggtgatgcgcataggcctgggcctgggccgggaggtgggcgtggcggctgtggtgctggtccccatctttgccgcctttgccgtgatgaccgtggctatcctgctggtgatggagggactctcagccttcctgcacgccctgcggctgcactgggtggaattccagaacaagttctactcaggcacgggctacaagctgagtcccttcaccttcgctgccacagatgactagggcccactgcaggtcctgccagacctccttcctgacctctgaggcaggagaggaataaagacggtccgccctggcaaaaaaaaaaaaaaaaaaaaaaaaaaaaaaaaaaaaaaaaaaaaaaaaacccggggaattttttt

SEQ ID NO: 482 - DNA, 1377 bp, Homo sapiens
  misc_feature (1149)..(1149): n equals a,t,g, or c
  misc_feature (1361)..(1361): n equals a,t,g, or c
gtgctggccgacgtgagctacctgatggccatggagaagagcaaggycacgccggccgcgcgcgccagcaagaagatactgctgcccgagcccagcatccgcagtgtcatgcagaagtacctggaggaccggggcgaggtgacctttgagaagatcttttcccagaagctggggtacctgctcttccgagacttctgcctgaaccacctggaggaggccaggcccttggtggaattctatgaggagatcaagaagtacgagaagctggagacggaggaggagcgtgtggcccgcagccgggagatcttcgactcatacatcatgaaggagctgctggcctgctcgcatcccttctcgaagagtgccactgagcatgtccaaggccacctggggaagaagcaggtgcctccggatctcttccagccatacatcgaagagatttgtcaaaacctccgaggggacgtgttccagaaattcattgagagcgataagttcacacggttttgccagtggaagaatgtggagctcaacatccacctgaccatgaatgacttcagcgtgcatcgcatcattgggcgcgggggctttggcgaggtctatgggtgccggaaggctgacacaggcaagatgtacgccatgaagtgcctggacaaaaagcgcatcaagatgaagcagggggagaccctggccctgaacgagcgcatcatgctctcgctcgtcagcactggggactgcccattcattgtctgcatgtcatacgcgttccacacgccagacaagctcagcttcatcctggacctcatgaacggtggggacctgcactaccacctctcccagcacggggtcttctcagaggctgacatgcgcttctatgcggccgagatcatcctgggcctggagcacatgcacaaccgcttcgtggtctaccgggacctgaagccagccaacatccttctggacgagcatggccacgtgcggatctcggacctgggcctggcctgtgacttctccaagaagaagccccatgccagcgtgggcacccacgggtacatggctccggaggtcctgcagaagggcgtggcctacgacagcagtgccgactggttctctctggggtgcatgctcttcaagttgctgcgggggcacagnccctttccggcagcacaagaccaaagacaagcatgagatcgaccgcatgacgctgacgatggccgtggagctgcccgactccttytcccctgaactacgctccctgctggaggggttgctgcagagggatgtcaaccggagattggggytgcctgggccgaagtaacctcccccgctgatccccccaacgaagggaagtgaacgcggccgangctttgacattgggct

SEQ ID NO: 483 - DNA, 698 bp, Homo sapiens
  misc_feature (581)..(581): n equals a,t,g, or c
  misc_feature (654)..(654): n equals a,t,g, or c
gacagacccgcctcaaacatggcggcgcccagcgcgcgaggacgtgatccgcttctgctccggcttggattgtagccttgacgaggtctgagcgaccatggaccggccggggttcgtggcagcgctggtggctggtggggtagcaggtgtttctgttgacttgatattatttcctctggataccattaaaaccaggctgcagagtccccaaggatttagtaaggctggtggttttcatggaatatatgctggcgttccttctgctgctattggatcctttcctaatgctgctgcattttttatcacctatgaatatgtgaagtggtttttgcatgctgattcatcttcatatttgacacctatgaaacatatgttggctgcctctgctggagaagtggttgcctgcctgattcgagttccatctgaagtggttaagcagagggcacaggtatctgcttctacaagaacatttcagattttctctaacatcttatatgaagagggtatccaagggttgtatcgaggctataaaagcacagttttaagagaggtggtgaaactgtggccagtgagctcaaganaaatcctgggaggaaaaaaaccctttttatccctgatataaaaaaatgcatgaggagaaactgccctttcttncggcctttcgatattcctgggggaaaaatgtgattggttcagct

SEQ ID NO: 484 - DNA, 1001 bp, Homo sapiens
  misc_feature (995)..(995): n equals a,t,g, or c
  misc_feature (997)..(998): n equals a,t,g, or c
  misc_feature (1000)..(1001): n equals a,t,g, or c
tatgcagagttaccttcctaatgacactgtagaatctggcatccatccagtatatttttgcagcacccattatattgaaatgctactgaaggctgagttgcctcttgtgttttcagcttttcacatgtctggttttgcaccatcacagatttgcctgcaatggataacccagtgtttttggaattacttagattggatagaaatctgccattatattgctacttgtgttttccttggtcctgattatcaagtgtatatctgtatagctgtattcaaacatttacagcaagacattctacagcacactcagactcaagatctgcaagttttcctaaaagaagaagcactgcatgggtttcgagtgagtgattattttgaatacatggaaattttggaacaaaactaccgaacagtgctgctgagagacatgcggaacattagactgcagagcacatagatcatgagacacacggtttaaatttaggttttatttatttttaaacacagcaggggggcttgatgtttttctgtgtctgtaacaacatttactttgtgaatatacatattgtaaatactgagaagtataacgatatatttaagtaggtatgagctcaatttgtgaattcatttttgtaaatttgttgttttgtaaggttattatagaatcagatctagcttacttttagttcttattcatgtttaagagttagtcctggccaggcgcggtggctcatgcctgtaatcccagcactttgggagtctgaggtgggcggatcacgaggtcaagagatcgagaccatcctggccaaaatggtgaaacctcgtctctgctaacaatactgaaattagctgggtgcagtgatgcgcctgtagtccctgctacttgggaggctgaggcaggagaatcgcttgaacccgggaggcggaggttgcagtgagccaagattgtgccactgtactccaggcaggccacagagtgagactctgctcaaaananntnn

SEQ ID NO: 485 - DNA, 1526 bp, Homo sapiens
  misc_feature (29)..(29): n equals a,t,g, or c
  misc_feature (50)..(50): n equals a,t,g, or c
  misc_feature (90)..(90): n equals a,t,g, or c
  misc_feature (100)..(100): n equals a,t,g, or c
ggagccttccggtttggccttaaataatnggggttaaaaatttgggcccnaaaatttaaggtccttaaatccaaatccccaataattttnaatccaaggnctgggcttcccccaaccaaaactttttcctttaaaacaattcccttaaggaatggttggtatggtttttaggactccctggagatggtgggattttggaggtttttaacccatggcttggtcaagccatttaatggattctttagaggtctgcacgccgctgctgtgttyctcattkgattycccacaactttcaacctgcacggcaagtttacttggtctcatatgttcagaatcacatggcacgtttttcacacagattttcttcgatgctttattactcagagcttctttatgcttctgcctttgtaaatactccttaggagttagaattctactaaatttagatgaactcgctttcgtgtctacagacttagtatttgataccatcttttctttaacaatggctctttcgtttgggtttgacaaagagtcacctaatttgaatgtagctcccacacttcctttctgttcttgtttatcatgtttctttttctttacttccatatctaatacgttcccttggtctaactttcgtttttgtttgaagctaactgatttgagtttcaattttatcttttctggtgataatgactgtcccaaagaactatgcttcttatacacatctttatttggcaaaaaagctgtttttgtttttagtggacgtgagttctgtgttacatgtttcttctgtcgggtttcctgagaagcttgttcataagatgctgtcattttattactggagtgaaaggttacctcgtgaaacctcaatttttttcttttgtgattttgcaagggatttagtttatcacatttagatgaaaactgaccagcaactaattcttgttctgtccttggtaagcttttatgttttgttttgggtgtatcttttctactgtcgtcttgtagttcaggaaaatgacttttcccatctggaggagtctttggattatttacaaggctcttaaattgaacaacagtgayatctctatcagaagttctctctccttgtttacaactgttggtatccaaaggagaacactgctctttttgtttctcttcctctgaagatgagttcttgatggaattacactgacactgrggtactccttcgtaaaccatggagagccagcccaatgcacagcagtggatatcatctttctcagagtccagtatcacagaatcacgactttgtccagctgcaggtgcctgcaggtcacactggctaactacttctgtgatgggctcttctttmtgaggttctgccaacttgtctactacatagggttgatcatcctgttcaggaaatatttctttcatttgctctgagcttaatattgtaatttgtatttgatctgctgggtctttggagtcagaactggttttatcagcagtttgatcttctgaggtctggtatgtagtttgct

SEQ ID NO: 486 - DNA, 994 bp, Homo sapiens
  misc_feature (948)..(948): n equals a,t,g, or c
  misc_feature (979)..(979): n equals a,t,g, or c
  misc_feature (983)..(983): n equals a,t,g, or c
gccaccatacccagcctcaacatattttcaataggtgatgggtcattatgaaaaaaggacactgaagctaatgtaacactgaaatggtctcaagaaacaggaaactatagacatgttttagaatatccaatacatggcaagaccaaaatatgaaacctatccttttcatgtattgtttgggactgactcatatttgtactctttgtattgctaatttacatagctgkttaaaaggtcacattcatactaatgatatgcaatgatacattttattgagccaagagtaaggtagaacagaacagcccagggcaatgaggatggggcaaggaggcaggagtagaaaacagcccccaaaagaaaggcaagatgtcacgtgtatataacttacaattctataagtgaagagctatggttctgaaacttttgcttaactccttgccttaattttttatccctccaatatatattttccctctkaattttgattatatattgatcacagctaacattgagaaataaagtaagtaaagtttttatttcccttagataatgttaattcaagactctcgaagagaagcttcagtgcagatggatttgagatgctacaaaacccagtaaaagattcaaaagaaatgtttcaaacctacaaacagatgtacctggagaagagaagcagaagccttggtagcagtcctgtaaaataattacaagatgtggttttgtaattgccactgggaaatttctttccttttctgttcaaaatatttcgctgaaactaatgagaaatgccatgataaagatttctcagagtttggttcccactttcattgtatttcattgaaagtgcttaattaaaatggcttgagractttgggtagccatgtgtaagraatkgatggwatcaccgggggaamcaaggtatttgaattyctmctttattgaccaganttaccattattttaaaaggaatgcttatccnaatncaatttggaaa

SEQ ID NO: 487 - DNA, 1824 bp, Homo sapiens
  misc_feature (1)..(1): n equals a,t,g, or c
  misc_feature (13)..(13): n equals a,t,g, or c
  misc_feature (24)..(24): n equals a,t,g, or c
  misc_feature (43)..(43): n equals a,t,g, or c
ntaccggtccggnaattcccgggngcgacccacgcgtccgcancacttccagggggagaaaaaaaatcatgttatcagaaagcaaagaaggtgaggagaaggaggaagtgaccatggacacaagtgaaaacagacctgaaaatgatgttccagaacctcccatgcctattgcagaccaagtcagcaatgatgaccgcccggaggagtgttgaagatgaggagaagaaagagagctcgctgcccaaatcattcaagaggaagatctccgttgtctcagctaccaagggggtgccagctggaaacagtgacacagaggggggccagcctggtcggaaacgacgctggggagccagcacagccaccacacagaagaaaccttccatcagtatcaccactgaatcactaaagagcctcatccccgacatcaaacccctggcggggcaggaggctgttgtggatcttcatgctgatgactctcgcatctctgaggatgagacagagcgtaatggcgatgatgggacccatgacaaggggctgaaaatatgccggacagtcactcaggtagtacctgcagagggccaggagaatgggcagagggaagaagaggaagaagagaaggaacctgaagcagaacctcctgtacctccccaggtgtcagtagaggtggccttgcccccacctgcagagcatgaagtaaagaaagtgactttaggagataccttaactcgacgttccattagccagcagaagtccggagtttccattaccattgatgacccagtccgaactgcccaggtgccctccccaccccggggcaagattagcaacattgtccatatctccaatttggtccgtcctttcactttaggccagctaaaggagttgttggggcgcacaggaaccttggtggaagaggccttctggattgacaagatcaaatctcattgctttgtaacgtactcaacagtagaggaagctgttgccacccgcacagctctgcacggggtcaaatggccccagtccaatcccaaattcctttgtgctgactatgccgagcaagatgagctggattatcaccgaggcctcttggtggaccgtccctctgaaactaagacagaggagcagggaataccacggcccctgcaccccccacccccacccccggtccagccaccacagcacccccgggcagagcagcgggagcaggaacgggcagtgcgggaacagtgggcagaacgggaacgggaaatggagcggcgggagcggactcgatcagagcgtgaatgggatcgggacaaagttcgagaagggccccgttcccgatcaaggtcccgtgaccgccgccgcaaggaacgtgcgaagtctaaagaaaagaagagtgagaagaaagagaaagcccaggaggaaccacctgccaagctgctggatgaccttttccgaaagaccaaggcagctccctgcatctattggctcccactgactgacagccagatcgttcagaaagaggcagagcgggccgaacgggccaaggagcgggagaagcggcgaaaggagcaagaagaagaagagcaaaaggagcgggagaaggaagccgagygggaacagccggggccaggactgggtcacctatgagctgaatcagcatctcctcctgagtcccagggcccctgcagttcccagtctcttctgtcctgcagcccttgcctctttcccacaggttccactttatatccaccttttccttttgttcaatttttatttttattttttttattattaaatgatgtggtctatggaaaaaaaaataaaaatctgacttagttt

SEQ ID NO: 488 - DNA, 2024 bp, Homo sapiens
gcggctccccgcctgcagccccggaagcgcatcctcaccttccctcgccttcctgttcctggcggagccgggctccgctcgtcttctctgtcttagggctggtgctggccctgcccacgcctagggctccggcgcgtcacgggcctcagctgggattcccgcgcccctcggacggccacgagactcggacatctttccaggaacagcgtgaggaggacagaagcacccaacaggactgctcaagccacctgcgaacactgctgctaccatgcccaagagaaaggcaaaaggagatgctaaaggtgataaagcaaaggtgaaggatgagccacagaggagatcagctcggttgtctgctaaaccagctcctccaaaaccagagcccaggcctaaaaaggcctctgcaaagaagggagagaagcttcccaaagggagaaaggggaaagcagatgctggaaaggatggraacaaccctgcaaaaaaccgagatgcctctacactccagtcccagaaagcggaaggcactggggatgccaagtgaaatgtacatttttgagagctctgtacttatagtgactctactgtttgaaatactatttttttaaatcaagttttataaaagtgtagaattttggcttttttaagttatgttgttagcacacaggacacttccttgttgtcttttgtggaaagggcaagtaccactaatagggtgtatctcagaaactgaattgaaataagggaaaataggattttctgtcctggtttttgaagattgttcttgattcccttgattcccaggagagattctctgacattcacgtgtcagccactttggcacggaagccttacagtgtggggaaccaaaacttcgtgtctcctctttccccgatgccatcagcatagacttgacttccttaaaccgagagttttgatgtggccttggcaaccctaaaatcagctgtgttaggtaacaaaactcaggctttctgttgatgacatcgagatggtgtcacttaaaagagccaagattcctgttttcagtttgtggattcatcctgctggttttactttagtccctccatgtcaaagtgggcctgagaaaagctcatacatgcctcatgtgaagtgtccaccctctctgaaaatctttcttgttcaaaacagcaacgacatatcttgttaacttttacggtgacttttggaggaggggagtttggaaattgtaaaatgttatagattgttgcctatttcctgctgaaagtaaatgtttttaaaaagtatcatataaagctgaatacaaattggtttggggggagatcctttcctacccaaagtcataaatatattctttactgccttgtggaaattttatagttttgcctttcacatttgtctttagtctgtcctgaactgatttttgtgaaaattatgagttagaaattcaacttaacatttttcatattcgaagtggttgtctctgcactatttactgaaaagttcatcctttccccagtgatttgtaacactgcctctttcataaattaaatttttgtgtatgtgtgtgggtcttttgatggtttctattctgactgacatcaatttgtctaatcttgtagcagtacagtacagtcctgattaytgcaactttaggaaaaggtctgataaaaaccaagatgcctccacattttgtcataattgtaaccaatttcacctctgtctccagtatcaccacaaaattgttcttccttggagtgtcttggctattcttagccaactgttcctccatattacttctagaattagaccaacaatttataaatcaaacaaacccaagagcattgaaattttgattggatttgtattgaatttatagattaatctggtaaaccatgtcatctttacaatgttgtcttccaatacatgaatatggtacagctcttcatttacttaggcctttgaaatatctttcaataaagtttataattttctccaaaaaaaaaaaaaaaaaaaaaaaaaaaaaa

SEQ ID NO: 489 - DNA, 784 bp, Homo sapiens
  misc_feature (71)..(71): n equals a,t,g, or c
gagctcgtttggtcccgacagcctcctccttcctcaccgtgtctggacaaccgcgcggagtacgtgcgctnggcgataaactatagactccatgaatttgatgagcaggtggctgctgttcgggaaggaatggcccgcgttgtgcctgttcccctcctctctctgttcaccggctacgaactggagacgatggtgtgtggcagccctgacatcccgctgcaccttctcaagtcggtggccacctataaaggcatcgagccttccgcatcgctgatccagtggttctgggaggtgatggagtccttctccaacacagagcgctctcttttccttcgcttcgtctggggccggacgaggctgcccaggaccatcgccgacttccggggccgagacttcgtcatccaggtgttggataaatacaaccctccagaccacttcctccctgagtcctacacctgtttcttcttgctgaagctgcccaggtattcctgcaagcaggtgctggaggagaagctcaagtacgccatccacttctgcaagtccatagacacagatgactacgctcgcatcgcacttacaggagagccagccgccgacgacagcagcgacgattcagataacgaggatgtcgactcctttgcttcggactctacacaagrttwtttaacaggacactaagrtggggaaacgtyctcgtgagatgagagcctgagccaggcagcagagcactcgctgctgtgtagactgtaggctgcctggtgtgtctgatgagaagcgtccgtcc

SEQ ID NO: 490 - DNA, 3523 bp, Homo sapiens
caaaggccccaaggtgcccaaggagtccttggaggggtcccccaggccgcccaagaaggggaaggrgaagccacccaaggccaccaagaagcccaaggagaagccacctaaggccaccaagaagcccaaggagaagccacccaaggccaccaagaagcccaaagagaagccacccaaggccaccaagaagcccccgtcagggaagaggccccccattctggctccctcagaaaccctggagtggccactgcccccaccccccagccctggccccgaggagctaccccaggagggaggggcgcccctctcaaataactggcagaatccaggagaggagacccatgtggaggcacgggagcaccagcctgagccggaggaggagaccgagcaacccacactggactacaatgaccagatcgagagggaggactatgaggactttgagtacattcggcgccagaagcaacccaggccacccccaagcagaaggaggaggcccgagcgggtctggccagagccccctgaggagaaggccccggccccagccccggaggagaggattgagcctcctgtgaagcctctgctgcccccgctgccccctgactatggtgatggttacgtgatccccaactacgatgacatggactattactttgggcctcctccgccccagaagcccgatgctgagcgccagacggacgaagagaaggaggagctgaagaaacccaaaaaggaggacagcagccccaaggaggagaccgacaagtgggcagtggagaagggcaaggaccacaaagagccccgaaagggcgaggagttggaggaggagtggacgcctacggagaaagtcaagtgtccccccattgggatggagtcacaccgtattgaggacaaccagatccgagcctcctccatgctgcgccacggcctgggggcacagcgcggccggctcaacatgcagaccggtgccactgaggacgactactatgatggtgcgtggtgtgccgaggacgatgccaggacccagtggatagaggtggacaccaggaggactacccggttcacaggcgtcatcacccagggcagagactccagcatccatgacgattttgtgaccaccttcttcgtgggcttcagcaatgacagccagacatgggtgatgtacaccaacggctatgaggaaatgacctttcatgggaacgtggacaaggacacacccgtgctgagtgagctcccagagccggtggtggctcgtttcatccgcatctacccactcacctggaatggcagcctgtgcatgcgcctggaggtgctggggtgctctgtggcccctgtctacagctactacgcacagaatgaggtggtggccaccgatgacctggatttycggcaccacagctacaaggacatgcgccagctcatgaaggtggtgaacgaggagtgccccaccatcacccgcacttacagcctgggcaagagctcacgaggcctcaagatctatgccatggagatctcagacaaccctggggagcatgaactgggggagcccgagttccgctacactgctgggatccatggcaacgaggtgctgggccgagagctgttgctgctgctcatgcagtacctgtgccgagagtaccgcgatgggaacccacgtgtgcgcagcctggtgcaggacacacgcatccacctggtgccctcactgaaccctgatggctacgaggtggcagcgcagatgggctcagagtttgggaactgggcgctgggactgtggactgaggagggctttgacatctttgaagatttcccggatctcaactctgtgctctggggagctgaggagaggaaatgggtcccctaccgggtccccaacaataacttgcccatccctgaacgctacctttcgccagatgccacggtatccacggaggtccgggccatcattgcctggatggagaagaaccccttcgtgctgggagcaaatctgaacggcggcgagcggctagtatcctacccctacgatatggcccgcacgcctacccaggagcagctgctggccgcagccatggcagcagcccggggggaggatgaggacgaggtctccgaggcccaggagactccagaccacgccatcttccggtggcttgccatctccttcgcctccgcacacctcaccttgaccgagccctaccgcggaggctgccaagcccaggactacaccggcggcatgggcatcgtcaacggggccaagtggaacccccggaccgggactatcaatgacttcagttacctgcataccaactgcctggagctctccttctacctgggctgtgacaagttccctcatgagagtgagctgccccgcgagtgggagaacaacaaggaggcgctgctcaccttcatggagcaggtgcaccgcggcattaagggggtggtgacggacgagcaaggcatccccattgccaacgccaccatctctgtgagtggcattaatcacggcgtgaagacagccagtggtggtgattactggcgaatcttgaacccgggtgagtaccgcgtgacagcccacgcggagggctacaccccgagcgccaagacctgcaatgttgactatgacatcggggccactcagtgcaacttcatcctggctcgctccaactggaagcgcatccgggagatcatggccatgaacgggaaccggcctatcccacacatagacccatcgcgccctatgaccccccaacagcgacgcctgcagcagcgacgcctacaacaccgcctgcggcttcgggcacagatgcggctgcggcgcctcaacgccaccaccaccctaggcccccacactgtgcctcccacgctgccccctgcccctgccaccaccctgagcactaccatagagccctggggcctcataccgccaaccaccgctggctgggaggagtcggagactgagacctacacagaggtggtgacagagtttgggaccgaggtggagcccgagtttgggaccaaggtggagcccgagtttgagacccagttggagcctgagtttgagacccagctggaacccgagtttgaggaagaggaggaggaggagraagaggaggagatagccactggccaggcattccccttcacaacagtagagacctacacagtgaactttggggacttctgagatcagcgtcctaccaagaccccagcccaactcaagctacagcagcagcacttcccaagcctgctgaccacagtcacatcacccatcagcacatggaaggcccctggtatggacactgaaaggaagggctggtcctgcccctttgagggggtgcaaacatgactgggacctaagagccagaggctgtgtagaggctcctgctccacctgccagtctcgtaagagatggggttgctgcagtgttggagtaggggcagagggagggagccaaggtcactccaataaaacaagctcatggcaaaaaaaaaaaaaaaaaaaaaaaaaaaaaaaaaaaaattctcggtcg

SEQ ID NO: 491 - DNA, 761 bp, Homo sapiens
  misc_feature (660)..(660): n equals a,t,g, or c
  misc_feature (701)..(701): n equals a,t,g, or c
  misc_feature (709)..(709): n equals a,t,g, or c
  misc_feature (740)..(740): n equals a,t,g, or c
  misc_feature (752)..(752): n equals a,t,g, or c
gggtcgacccacgcgtccggatttttatctgcctttttttgtctggcagtcaaactttcacagtccctgttaactcctgtttcttcttaactttatttcctagcagtaactctgtgcataatccatattgttcagagtttcactaagtaagatgtaatacagcccactgctgatttactgatgaaagaaaatcacttataagatgaaccctgctgtaagacagagatgtctcttgttttgttttcagcagaagctgatcctgtctcattttttcctgctacaggttcctcagtggtgtgctgaatattgtctttccatccactaccagcacgggggcgtgatatgcacacaggtccacaagcagactgtggtccagctcgccctgcgggtggcggatgaaatggatgttaacattggtcatgargttggctacgtgatccctttcgagaactgctgtaccaacgaaacaatcctgaggtattgtactgatgatatgctgcaaagagaaatgatgtccaatccttttttgggtagctatggggtcatcatcttagatgatattcatgaaagaagcattgcaactgatgtgttacttggacttcttaaagatgttttactagcaagaccagaacttgaagctcataattaactcctcacctnacctgatcagcaaactcaattcttattatggaaacgtgccntgtcttanaagtgaaaaataaacaccctgtggaggttgngaaccttactgngggttcaaa

SEQ ID NO: 492 - DNA, 1090 bp, Homo sapiens
  misc_feature (7)..(7): n equals a,t,g, or c
ttttttntttttttttttttttttttttttttttttttttttttttttttttttttttttttttttttttttttcaccaccttatcaaatttattattccaatggcactagtacagctggaggtgctcatggtgacaccgcacaggacttcctgcctgctagaaatcatctacccgcgtgttcctttcccctttctggggcaaaagccactgcgggccatgtacccaaataaacctcttaatgcgtttgttaaaattagtttggacatctgagtttccctctgaagaaatggaaaaagtgttgggtgtcccatcccgcctccccctccccgaccggcccattaagtccctactaagagggcgtgtctgctgcctccggactctggaaataaatattgaaagaaacggcatcaagtgttatggttgagtgatggcacgcagcgggccccagaaacctctcaggggagcgtcgctgtgtcgggacagtctccaggtgtcgtctgagaattcgaggacgtggtgctgtgggtgctgcgagtccccggggcggcaggcgctgcaggaagggccgcctacaatttgtccaggaagttgtccagggcagggatgccttctttcaggcccttgcgcttgcgggtctccgccaccacctggctggggcggctgctgttgtcgaaggggtctccgggcaggatctgccagtggtcaaacacacactgggggaacgcctggccgcccgtgttggacctcaggtcagcggtgaagccaaaggactcgttgacgggcagataggccttgaccacaaacatgggggtgccggccacctgggactcctcgaacacgtggccccgcttcctgttcaaaaccccgtagatgccaccgaccacctgctctggacactggatctccacaaggtagatgggctccatgagrcgtggctgggcggtcagcaaatggcgtagaggcagcgccgtgctgtggggatgatctggccccctccgcggtggatggcgtcggcgtgcagggatgactcgtggacgtcgaagcgcacaccccgcatgttctcctcacacagtgcgccctctcgtgcc

SEQ ID NO: 493 - DNA, 647 bp, Homo sapiens
  misc_feature (31)..(31): n equals a,t,g, or c
  misc_feature (99)..(99): n equals a,t,g, or c
ccttgcatgcccgcgtcgtaacctggatccntaaamcggcccgcccttttttttttttwttgattaaatgttctttatttgatgcttttgtgtgcmcancactataaggagttgcccaattcaccaagtcagcccgttcacacccttagttaaggtggccattaaggggccagggggtgcaatcagtaagctgcctcctgcctaactctctttctccaaccattctctataggctccagcgtagttgcgagccccagtgtatccaagactccgggccagctgcgtggcctggaggccccgcttgcccatctgacagaagaaaacgagatgctcatcttccagctttggcttctcagcagaatataaagcctggaaggcagctggctccatctgcagagcactctccaactcggacaccgggatgttgagcgcccctgggatggtcccagctgccgcctcctcgcgagagcgcacgtcgaagagccgggcccgtccggaggctaggagtgaacggagttcaggaagcgagaccgtgggcgctccagccatggtgcgcgtagcaaccgcgagtctccggagtgcggccctggcccgccctctcggcgcctgcaacatctcccgttccctcccagagctgagctcgtgcc

SEQ ID NO: 494 - DNA, 1407 bp, Homo sapiens
  misc_feature (1321)..(1321): n equals a,t,g, or c
  misc_feature (1362)..(1362): n equals a,t,g, or c
  misc_feature (1396)..(1396): n equals a,t,g, or c
  misc_feature (1405)..(1405): n equals a,t,g, or c
ggcgcccggaccccccagcggcggcccccgcccgcccagccccccggcccgccatgggcgccgcggcccgcaccctgcggctggcgctcggcctcctgctgctggcgacgctgcttcgcccggccgacgcctgcagctgctccccggtgcacccgcaacaggcgttttgcaatgcagatgtagtgatcagggccaaagcggtcagtgagaaggaagtggactctggaaacgacatttatggcaaccctatcaagaggatccagtatgagatcaagcagataaagatgttcaaagggcctgagaaggatatagagtttatctacacggccccctcctcggcagtgtgtggggtctcgctggacgttggaggaaagaaggaatatctcattgcaggaaaggccgagggggacggcaagatgcacatcaccctctgtgacttcatcgtgccctgggacaccctgagcaccacccagaagaagagcctgaaccacaggtaccagatgggctgcgagtgcaagatcacgcgctgccccatgatcccgtgctacatctcctccccggacgagtgcctctggatggactgggtcacagagaagaacatcaacgggcaccaggccaagttcttcgcctgcatcaagagaagtgacggctcctgtgcgtggtaccgcggcgcggcgccccccaagcaggagtttctcgacatcgaggacccataagcaggcctccaacgcccctgtggccaactgcaaaaaaagcctccaagggtttcgactggtccagctctgacatcccttcctggaaacagcatgaataaaacactcatcccatgggtccaaattaatatgattctgctccccccttctccttttagacatggttgtgggtctggagggagacgtgggtccaaggtcctcatcccatcctccctctgccaggcactatgtgtctggggcttcgatccttgggtgcaggcagggctgggacacgcggcttccctcccagtccctgccttggcaccgtcacagatgccaagcaggcagcacttagggatctcccagctgggttagggcagggcctggaaatgtgcattttgcagaaacttttgagggtcgttgcaagactgtgtagcaggcctaccaggtccctttcatcttgagagggacatggcccttgttttctgcagcttccacgcctctgcactccctgcccctggcaagtgctcccatcgccccggkgcccaccatgagctcccagcacctkacctycccywcawccaaagcccattaaaaattaaaaaaatttattaacaaaacccttgagnaaccaaaattggaacggaaattctggtttcggtttcaattncatttggcccccaaaatccttagggcttacccgncggaataangg

SEQ ID NO: 495 - DNA, 328 bp, Homo sapiens
  misc_feature (123)..(123): n equals a,t,g, or c
  misc_feature (156)..(156): n equals a,t,g, or c
  misc_feature (170)..(170): n equals a,t,g, or c
gggtcgacccacgcgtccgcccacgcgtccggatgacttcattgccaaagttgttcaaaggtagccttggccctttttcatctgagtcccatttagagatgtataaagaatgttgttgagtanggcgcggtggctcacgcctgtaatccccacacnttgggaaggccgangcaggcggatcacgaggtcagaagattgagaccattctggctaacatggtgaacccccatctctactaaaaatacaaaaattagtcaggcgcgatggcgggcacatgtagtaccagctactcgggaggctgatgcagaagaataacttggaacctggg

SEQ ID NO: 496 - DNA, 1408 bp, Homo sapiens
  misc_feature (5)..(5): n equals a,t,g, or c
  misc_feature (10)..(10): n equals a,t,g, or c
  misc_feature (819)..(819): n equals a,t,g, or c
gaagnccttngcttatacatctagtctcattaaacacaggaggattcacactggagagaggccttatgagtgcagtgaatgtgggagatcctttgctgaaaactccagtcttattaaacacttgagagttcacacaggagaaaggccttatgaatgcgttgagtgtggaaaatcatttcgccgaagctcttcactcttgcagcatcagagagttcacactagagaaaggccttatgaatgtagtgaatgtgggaaatcctttagcttaaggtccaacctcattcaccatcagcgagttcatactggagaaaggcatgagtgcgggcagtgtgggaaatcctttagccgaaaatctagccttattatacatctgagagttcacactggagaaaggccttatgagtgcagtgactgtgggaaatcctttgctgaaaactccagccttattaaacacttgagagttcacactggagaaaggccatatgaatgcattgattgtggaaaatcatttcgccacagttcttcgttccgtcgccatcagagagttcatactggaatgaggccttataagtgaagcaaattttggaaattctcttgcccaggctttttgctccttcaaggccagagagttcacaccggatcaaggtgttatgagtgtgacaaatggggaatattctttagctagaatgctagcttctttacataaaagagtgctcccactgaagaagtgccttttgagtgcaatgaatgtgagaaagccttcagccctctctcattggttaccacaatatttacatgaggaaaataccacagatgtgnaggtaatattatttttcttcaatataacactggaggaaaccccttatgaggatgccatctgcctaaattgaatgtcatacatcaaatagctgcatacattccaggtatgtgggaactgcatagtatttttcgacctgcccaggtctcttgctagacttctgtgacttacagttctcttctaaaaagcatttcacctttaccacttggcaggtgcccacagtacatcattcgcctaactcatcatgatccagaagtaactttgattttgtttcattcaacagagggattttttagtatcctcagcactcattctattctcatttctttctctccaatgagttaggccatgaacctgactcatttttggcacagaggactcttctgataacttgaaaaaatggactacctttttcagggatcttttggatctcacagagttcttaagatggaattttccagcctgccagtcatgaatctcagacagcctgccacctattgccctgatttgtgttataataaaggccttgttgcttaagacaccttcagtctttgcaggagggcatggaagctccaaaaaaaaaaaaaaaaa

SEQ ID NO: 497 - DNA, 2558 bp, Homo sapiens
ggcacgaggtgcttttctcttcatggcgtcacttgcttttccctttgcatcggcctggggccctggggcctgatttgcagcatcaacagcttttccactgctgtgtgtcagcccaagggccttgtcactgtgagagggtaacgtgtgccacgcccttcctccccaggggctccatgtccagcctggaatcctgcaccagcggcttctcccagctcagcgccgctacctcgtcctcctcctccggccagtctcatagcagctccctggtctccagatagccgggcccagtgtttcagggccgcccgctcgcctccagtgtccagaaatgtccagaatgagaagccagctaactgcagggcctgggaccatgtgggctggagccccaggcctagatgctgcccaagttggggtgtctggagcggatggcaaggatccagaactggcctgtgggtggtgtcagggctcttgaaattgcaaggacagaaccatctccttccggcttcgtgtaaggaagaccaagccaaggccaaggtgtctaccataccacacctttgggacatccgggcttagcgacgtcagccaggcccatctcctctctgtccacctcttgctctgctttcgccatgcaggggaccatcactatcaggtgcccttctcctccccgcagcttgcctgcataagagagcctcttcctcccaaaggctccagcccacttcccagagctgagtcttagcctggaagggggagcgattgccaggtcaattcctgaaccaatcacagttgccaggcacactggagaatgctgattggccagcagggtcatgcccaatctggaccaatcaccgtgatccarggttgcagtgargtgcagtgattggccagcctggatcacatgcacatctctggaaccaaccacctgctctcaaaagcactartgggtgcctygaggartactggggtcccccctaagaagaaggaggaaggatgctggggaggcagaaatgaagggtgtttaccttggcatctgattgcataacgttctgttatgcagtatcaagatgtgcttggtgagcagttaagtgagttacaggcgctgctctttgtggggaacagcacatcctgaagtgaaaatccatgttccctgcacttggccagcatggcctaagcctgaccatccctgattggagagggtgggagagccctgggtttctgctaagttccaggcagtgatggggtgactgaggctgtctgtataccccactggagatgcctttctctcctagggaactgtttaattatgactgtttttggttgtaagccacagagacccatgcccaggtgcttcaacacaaaagcatgatcattcatgggtgcatagaactggccagtccaggagggcttgcttcaggtaaggctagatccagggtctcaacatggagtctcgattccccccgcgagtggaggctgctgtgtctgccctggggcagatatgactctggaactaggttcaatattgacatgagttcccctagttactacacaggagcgtcttgggtctccttggggcctgaggacatttctcctttcctttcctggactccccaaaaggcagccagtcaggggtcaccaacttgaagcctgatctggcctgcttttagtgktgcttttttgcctttagaatggtttaaaaattgaggcatttcgcatcgaaatcaggatttctggcttcccttaggcatttgggagcaccagcagaatggggtcactattgttgcatgaagacaacacctctgcacccctggatgtggccacgccagtccctaccccattgacttgcgcccagcccacattacacatcctcatgacctgcgtggcaggagtctcactgacatggctctgtcagcagtggctggtacccttgtctcctggccttgcttagagttggggctcatctctgctgcagtaactgagccaaggggtggttttgtggccacaagaatcatctttatgcaggctcagcaatgcagggccaggaaacttatatctacgccagcctcaaccccaaacccaaggaagagagaaagtgtcatcttttcagatacatccttcttcctgctgggagagagccttgcccaccttcctgttggctctctgtccgcttctcaggtatctgaacaaaatagattgctttgcactctgaaaaaaaaaaaaaaaaaaaaactcgagagtacttctagagcggccgcgggcccatcgattttccacccgggtggggtaccaggtaagtgtacccaattcgccctatagtgagtcgtattacaattcactggccgtcgttttacaacgtcgtgactgggaaaaccctggcgttacccaacttaatcgccttgcagcacatccccctttcgccagctggcgtaatagcgaagaggcccgcaccgatcgcccttcccaacagttgcgcagctgaatggcgaatggagatccaatttttaagtgtataatgtgttaaactactgatctaattgtttgtgtattttagattcacagtcccaagg

SEQ ID NO: 498 - DNA, 2736 bp, Homo sapiens
  misc_feature (2720)..(2720): n equals a,t,g, or c
  misc_feature (2735)..(2735): n equals a,t,g, or c
gccatttatttgacatcctggggttacagcacgctaaagggcacccactgtccttaacagagaaaaatacactgctgagcagaggattaaacagactcctcacactaccggaagttcagtgcattttccaggattttcaaggcttcgatgctgtcatgttgagagtccactatccacgtttgtttatccaggaataatgcagaaaatctgagcattcgtgaatctaatctttgcagatacttcattttcttagcgtttctggagattacaacatcctgcggttccgtttctgggaactttactgatttatctcccccctcacacaaataagcattgattcctgcatttctgaagatctcaagatctggactactgttgaaaaaatttccagtgaggctcacttatgtctgtaaagatgggaaaaaaatacaagaacattgttctactaaaaggattagaggtcatcaatgattatcattttagaatggttaagtccttactgagcaacgatttaaaacttaatttaaaaatgagagaagagtatgacaaaattcagattgctgacttgatggaagaaaagttccgaggtgatgctggtttgggcaaactaataaaaattttcgaagatataccaacgcttgaagacctggctgaaactcttaaaaaagaaaagttaaaagtaaaaggaccagccctatcaagaaagaggaagaaggaagtggatgctacttcacctgcaccctccacaagcagcactgtcaaaactgaaggagcagaggcaactcctggagctcagaaaagaaaaaaatcaaccaaagaaaaggctggacccaaagggagtaaggtgtccgaggaacagactcagcctccctctcctgcaggagccggcatgtccacagccatgggccgttccccatctcccaagacctcattgtcagctccacccaacasttcttcaactgagaacccgaaaacagtggccaaatgtcaggtaactcccagaagaaatgttctccaaaaacgcccagtgatagtgaaggtactgagtacaacaaagccatttgaatatgagaccccagaaatggagaaaaaaataatgtttcatgctacagtggctacacagacacagttcttccatgtgaaggttttaaacaccagcttgaaggagaaattcaatggaaagaaaatcatcatcatatcagattatttggaatatgatagtctcctagaggtcaatgaagaatctactgtatctgaagctggtcctaaccaaacgtttgaggttccaaataaaatcatcaacagagcaaaggaaactctgaagattgatattcttcacaaacaagcttcaggaaatattgtatatggggtatttatgctacataagaaaacagtaaatcagaagaccacaatctacgaaattcaggatgatagaggaaaaatggatgtagtggggacaggacaatgtcacaatatcccctgtgaagaaggagataagctccaacttttctgctttcgacttagaaaaaagaaccagatgtcaaaactgatttcagaaatgcatagttttatccagataaagaaaaaaacaaacccgagaaacaatgaccccaagagcatgaagctaccccaggaacagagtcagcttccaaatccttcagaggccagcacaaccttccctgagagccatcttcggactcctcagatgccaccaacaactccatccagcagtttcttcaccamgttgaaaccaagactgaagactgaacctgaagaagtttccatagaagacagtgcccagagtgacctcaaagaagtgatggtgctgaacgcaacagaatcatttgtatatgagcccaaagagcagaagaaaatgtttcatgccacagtggcaactgagaatgaagtcttccgagtgaaggtttttaatattgacctaaaggagaagttcaccccaaagaagatcattgccatagcaaattatgtttgccgcaatgggttcctggaggtatatcctttcacacttgtggctgatgtgaatgctgaccgaaacatggagatcccaaaaggattgattagaagtgccagcgtaactcctaaaatcaatcagctttgctcacaaactaaaggaagttttgtgaatggggtgtttgaggtacataagaaaaatgtaaggggtgaattcacttattatgaaatacaagataatacagggaagatggaagtggtggtgcatggacgactgaccacaatcaactgtgaggaaggagataaactgaaactcacctgctttgaattggcaccgaaaagtgggaataccggggagttgagatctgtaattcatagtcacatcaaggtcatcaagaccaggaaaaacaagaaagacatactcaatcctgattcaagtatggaaacttcaccagactttttcttctaaaatctggatgtcattgacgataatgtttatggagataaggtctaagtgcctaaaaaaatgtacatatacctggttgaaatacaacactatacatacacaccaccatatatactagctgttaatcctatggaatggggtattgggagtgcttttttaatttttcatagtttttttttaataaaatggcatattttgcatctacaacttctataatttgaaaaaataaataaacattatcttttttgtgaaaaaaaaaaaaaaaaaaaaaaaaaaaaaaaaaaanaaaaaaaaaaaaaana

SEQ ID NO: 499 - DNA, 1594 bp, Homo sapiens
  misc_feature (115)..(115): n equals a,t,g, or c
ggcagagcttcattctcttccacgtcatttggtggtagtggcatgggcaacttcaaatcgatatcaacttcaactaaaatggttaatggcagaaaaatcactacaaagagaattntcgagaaccggccgcttctgtcctcggacccattccaacaatctcgtaaaacatggtggattactatgaagttctaggcgtgcagagacatgcctcacccgaggatattaaaaaggcatatcggaaactggcactgaagtggcatccagataaaaatcctgagaataaagaagaagcagagagaaaattcaagcaagtagcggaggcatatgaagtgctgtcggatgctaagaaacgggacatctatgacaaatatggcaaagaaggattaaatggtggaggaggaggtggaagtcattttgacagtccatttgaatttggcttcacattccgtaacccagatgatgtcttcagggaattttttggtggaagggacccattttcatttgacttctttgaagacccttttgaggacttctttgggaatcgaaggggtccccgaggaagcagaagccgagggacggggtcgtttttctctgcgttcagtggatttccgtcttttggaagtggattttcttcttttgatacaggatttacttcatttgggtcactaggtcacgggggcctcacttcattctcttccacgtcatttggtggtagtggcatgggcaacttcaaatcgatatcaacttcaactaaaatggttaatggcagaaaaatcactacaaagagaattgtcgagaacggtcaagaaagagtagaagttgaagaagatggccagttaaagtccttaacaataaatggtaaggagcagctgctgcgcttggataacaagtaattcaacgcacgcacttaacagaaatgttaaactataacaagcaccatttgaggattaacaggaacatttttttgaagatttcaaacgaactcgactttcagtataattgtacctaaagtatttataaacagctcatcggagcctctatttgtcatagacttttgagttgattgttgggaccacataataggaccattttttttttgtctttaaaattgttgtaaatctctgtatgcactttgcttttttattaaacgtactccaaggtgagtcttgactctttagtgtaggacaagattgtacactaacaccagcatggacctgcttttcattgtgtctgaaatgtgagccacgtagtgtcggcctgctgtgaagttaacattgccaggacgattcttctacagaaataatttcaatttttttcagtatttagtagtgaaagatattaatacattaatggtaatacatttctggtttaatataaattaaggatgttttctagttgtgcatgaatgctggcaacttagtaagttttgacaattgtttaaatatgtaatgttaagcttaggtttaaaaaagtaaagctggtaaactgggtctttgtcatttgctttaaaaaaaaaaaaaaagaaaataaatgcgaatgtgttggtgcattcttcctgagtgggatctggaaaaaaaaaaaaaaaaaaaaaaaa

SEQ ID NO: 500 - DNA, 2534 bp, Homo sapiens
ggcgatttcatcatgctccgagccgggcggcgcgcgccgcttccgtcgccaccctctctggacagcccagggccgcaggctcatgccctctccgcgtccagtgctgcttagaggtgctcgcgccgctctgctgctgctgctgccgccccggctcttagcccgaccctcgctcctgctccgccggtccctcagcgcggcctcctgcgccccgatctccttgcccgccgccgcctcccggagcagcatggacggcgcgggggctgaggaggtgctggcacctctgaggctagcagtgcgccagcagggagatcttgtgcgaaaactcaaagaagataaagcaccccaagtagacgtagacaaagcagtggctgagctcaaagcccgcaagagggttctggaagcaaaggagctggcgttacagcccaaagatgatattgtagaccgagcaaaaatggaagataccctgaagaggaggtttttctatgatcaagcttttgctatttatggaggtgttagtggtctgtatgactttgggccagttggctgtgctttgaagaacaatattattcagacctggaggcagcactttatccaagaggaacagatcctggagatcgattgcaccatgctcacccctgagccagttttaaagacctctggccatgtagacaaatttgctgacttcatggtgaaagacgtaaaaaatggagaatgttttcgtgctgaccatctattaaaagctcatttacagaaattgatgtctgataagaagtgttctgtcgaaaagaaatcagaaatggaaagtgttttggcccagcttgataactatggacagcaagaacttgcggatctttttgtgaactataatgtaaaatctcccattactggaaatgatctatcccctccagtgtcttttaacttaatgttcaagactttcattgggcctggaggaaacatgcctgggtacttgagaccagaaactgcacaggggattttcttgaatttcaaacgacttttggagttcaaccaaggaaagttgccttttgctgctgcccagattggaaattcttttagaaatgagatctcccctcgatctggactgatcagagtcagagaattcacaatggcagaaattgagcactttgtagatcccagtgagaaagaccaccccaagttccagaatgtggcagaccttcacctttatttgtattcagcaaaagcccaggtcagcggacagtccgctcggaaaatgcgcctgggagatgctgttgaacagggtgtgattaataacacagtattaggctatttcattggccgcatctacctctacctcacgaaggttggaatatctccagataaactccgcttccggcagcacatggagaatgagatggcccattatgcctgtgactgttgggatgcagaatccaaaacatcctacggttggattgagattgttggatgtgctgatcgttcctgttatgacctctcctgtcatgcacgagccaccaaagtcccacttgtagctgagaaacctctgaaagaacccaaaacagtcaatgttgttcagtttgaacccagtaagggagcaattggtaaggcatataagaaggatgcaaaactggtgatggagtatcttgccatttgtgatgagtgctacattacagaaatggagatgctgctgaatgagaaaggggaattcacaattgaaactgaagggaaaacatttcagttaacaaaagacatgatcaatgtgaagagattccagaaaacactatatgtggaagaagttgttccgaatgtaattgaaccttccttcggcctgggtaggatcatgtatacggtatttgaacatacattccatgtacgagaaggagatgaacagagaacattcttcagtttccctgctgtagttgctccattcaaatgttccgtcctcccactgagccaaaaccaggagttcatgccatttgtcaaggaattatcggaagccctgaccaggcatggagtatctcacaaagtagacgattcctctgggtcaatcggaaggcgctatgccaggactgatgagattggcgtggcttttggtgtcaccattgactttgacacagtgaacaagaccccccacactgcaactctgagggaccgtgactcaatgcggcagataagagcagagatctctgagctgcccagcatagtccaagacctagccaatggcaacatcacatgggctgatgtggaggccaggtatcctctgtttgaagggcaagagactggtaaaaaagagacaatcgaggaatgaggacaattttgacaacttttgaccacttgcgctaataaaaaaaaaaaaaactactcttatgtccactttacaaaagaaaacagcattgtgattactcccagggaccgtattttatcttcagtggctgcctgattttacccccacaattaaagttgaaggaatcctgaaaaaaaaaaaaaaaaaaaaaaaaaaaaaaaaagaaaaaaaaataaaaaaaaaaaaaaaaaaaaaa

SEQ ID NO: 501 - DNA, 2445 bp, Homo sapiens
ccacgctgagcagcgagccgggccagtcccagcgaacgcacatcaagacggagcagctgagccccagccactacagcgagcagcagcagcactcgccccaacagatcgcctacagccccttcaacctcccacactacagcccctcctacccgcccatcacccgctcacagtacgactacaccgaccaccagaactccagctcctactacagccacgcggcaggccagggcaccggcctctactccaccttcacctacatgaaccccgctcagcgccccatgtacacccccatcgccgacacctctggggtcccttccatcccgcagacccacagcccccagcactgggaacaacccgtctacacacagctcactcgaccttgaggaggcctcccacgaagggcgamgatggccgagatgatcctaaaaataaccgaagaaagagaggaccaaccagaattccctttggacatttgtgtttttttgtttttttattttgttttgttttttcttcttcttcttcttccttaaagacatttaagctaaaggcaactcgtacccaaatttccaagacacaaacatgacctatccaagcgcattacccacttgtggccaatcagtggccaggccaaccttggctaaatggagcagcgaaatcaacgagaaactggactttttaaaccctcttcagagcaagcgtggaggatgatggagaatcgtgtgatcagtgtgctaaatctctctgcctgtttggactttgtaattatttttttagcagtaattaaagaaaaaagtcctctgtgaggaatattctctattttaaatatttttagtatgtactgtgtatgattcattaccattttgaggggatttatacatatttttagataaaattaaatgctcttatttttccaacagctaaactactcttagttgaacagtgtgccctagcttttcttgcaaccagagtatttttgtacagatttgctttctcttacaaaaagaaaaaaaaaatcctgttgtattaacatttaaaaacagaattgtgttatgtgatcagttttgggggttaactttgcttaattcctcaggctttgcgatttaaggaggagctgccttaaaaaaaaataaaggccttattttgcaattatgggagtaaacaatagtctagagaagcatttggtaagctttatcrtatatatattttttaaagaagagaaawacwccttgagccttaaaacggtgctgctgggaaacatttgcactcttttagtgcatttcctcctgcctttgcttgttcactgcagtcttaagaaagaggtaaaaggcaagcaaaggagatgaaatctgttctgggaatgtttcagcagccaataagtgcccgagcacactgcccccggttgcctgcctgggccccatgtggaaggcagatgcctgctcgctctgtcacctgtgcctctcagaacaccagcagttaaccttcaagacattccacttgctaaaattatttattttgtaaggagaggttttaattaaaacaaaaaaaaattctttttttttttttttccaattttaccttctttaaaataggttgttggagctttcctcaaagggtatggtcatctgttgttaaattatgttcttaactgtaaccagtttttttttatttatctctttaatctttttttattattaaaagcaagtttctttgtattcctcaccctagatttgtataaatgcctttttgtccatcccttttttctttgttgtttttgttgaaaacaaactggaaacttgtttctttttttgtataaatgagagattgcaaatgtagtgtatcactgagtcatttgcagtgttttctgccacagacctttgggctgccttatattgtgtgtgtgtgtgggtgtgtgtgtgttttgacacaaaaacaatgcaagcatgtgtcatccatatttctctrcatcttctcttggagtgagggaggctacctggaggggatcagcccactgacagaccttaatcttaattactgctgtggctagagagtttgaggattgctttttaaaaaagacagcaaacttttttttttatttaaaaaaagatatattaacagttttagaagtcagtagaataaaatcttaaagcactcataatatggcatccttcaatttctgtataaaagcagatctttttaaaaagatacttctgtaacttaagaaacctggcatttaaatcatattttgtctttaggtaaaagctttggtttgtgttcgtgttttgtttgtttcacttgtttccctcccagccccaaaccttttgttctctccgtgaaacttacctttccctttttctttctcttttttttttttgtatattattgtttacaataaatatacattgcattaaaaaaaaaaaaaaaaagggcggccgctcgcgatctagc

SEQ ID NO: 502 - DNA, 1184 bp, Homo sapiens
  misc_feature (173)..(173): n equals a,t,g, or c
ggcacgagggcagcttcgcgggactcgagcccatggggctgctctgggccctggaacccgagaagcctttttggcgcttcctgaagcgggacgtacagattccttttgtcgtggagttggaggtgctggacggccacgaccccgagcctggacggctgctgtgccaggcgcanacgagcgccacttcctcccgccagggttgcggcgccagtcggtgcgagcgggccgggtgcgcgccacgctcttcctgccgccaggacctggacccttcccagggatcattgacatctttggtattggagggggcctcttggaatatcgagccagcctccttgctggccatggctttgcacgttggctctagcttattataactttgaagatctccccaataacatggacaacatatccctggagtacttcgaagagccgtatgctacatgcttcaacatccccaggtaaaaggcccaggcattgggcttttgggcatttctctaggagctgatatktgtctctcaatggcctcattcttgaagaatgtctcagccacagttyccatcaatggatctgggatcagtgggaacacagccatcaactataagcacagtagcattccaccattgggctatgacctgaggagaatcaaggtagctttctcaggcctcgtggacatygtggatataaggaatgctctcgtaggagggtacaagaaccccagcatgattccaatagagaaggcccaggggcccatcctgctcattgttggtcaggatgaccataactggagaagtgagttgtatgcccaaacagtctctgaacggttacaggcccatggaaaggaaaaaccccagatcatctgttaccctgggactgggcattacatcgagcctccttacttccccctgtgcccagcttcccttcacagattactgaacaaacatgttatatggggtggggagcccagggctcattctaaggcccaggaagatgcctggaagcaaattctagccttcttctgcaaacacctgggaggtacccagaaaacagctgtccctaaattgtaatgcatttgtctgttgttgacatgagagattcaagatcagattctagtgttcagtaaccctatgtgaatcagatgtctcctggataacattaaagccatgtctttgtcattaaaaaaaaaa

SEQ ID NO: 503 - DNA, 696 bp, Homo sapiens
  misc_feature (502)..(502): n equals a,t,g, or c
  misc_feature (689)..(689): n equals a,t,g, or c
gaaattttacagtatctctgcctgaagatgaattaattcaggttacagtcacggcagtcgcaatcacttttgacaaaaatcaggctttacaaaccacaaaaacccctgttgaaaagtcattgcaaagagcctcaacagataatgaagaacttttacaatttccactggaactgtgttcagattcacttccttctcatccttttccaccagctaaagccatgacagttgaaaaagcaagtccagtgggtgatggaaatttccggaatcgttctgctccaccttgtgcaaattccacagttggggttgttaagatgacacctctttcttttattcctggagcaaaaataactaagtatcttgggataattaacatgttttttattcgagagactacttctcttcgggaggaaggaggagtcagtggttttctccatgcttttattgctgaagtgtttgcaatggtgagagctcatgttgctgcattaggagggaatgctgktgnctcctacataatgaascagtgtgtcttcatggagaatccaaataaaaaccaggcacagtgtcttataaatgtaagtggtgacgcagtggtttttgttcgtgaatctgacttagaagtggggtcatcttcaacaacctactaccaactggcagtcatcatgtactggaaggcgaaagttccacctganggaaaat

SEQ ID NO: 504 - DNA, 3053 bp, Homo sapiens
ttttttttttaaatgttgcttaatgtagttttagggaattatactttttctaaaatttttttctgacataagtaccctctaacactgaaaggttgtcccctctcaactgcatgctgaatactggatcctagactcttgagagctaaataaagtatatcttttagctgcagtttcatattaaaaatgaatttttaacaatctgcatatttagatgaaatattagggaatagttactaaatgtacaaaatggtataagaaatgtatgttcgtgtcctcattatactccattccataaggtagtaaaatacttgtctgtttttcttacagaagttgattcaagtcagttgagacgccagttgtgtggaggaagtcaggccgccatagaaagaatgatccactttggacgagagctgcaagcaatgagtgaacagctaaggagagactgtggcaagaacactgcaaacaaaaaaatgttgaaggatgcattcagtctactagcatattcagatccctggaacagcccagttggaaatcagcttgacccgattcagagagaacctgtgtgctcagctcttaacagtgcaatattagaaacccacaatctgccaaagcaacctccacttgccctagcaatgggacaggccacacaatgtctaggactgatggctcgatcaggaattggatcctgcgcatttgccacagtggaagactacctacattagctatgcatttcaagagctcacacttatattgtggcatatagtcaacatggaagtagaccagctctgctgatttgaaatttagattttttaaattatgtactggggacaggtttttgtcgctttacattgcttcctagtttacagcatgatgcaaatgattttctaacttagtgttaggagaaattattttccatctttaacctcttagttgtctaagagttaaatattactgaatttcagacgttcaaattgatcatcacaaatcctttaaaacaattacctaaaagaaaccaaaaatcctgccttctttgtgggggaggggggagagaggggaaggaaatggaacaagttgtgtttgtgttagcatgtgggtgatgtaaacttcaaattgggagatgttccgacccccactcccatataagcattcaatcagtgtaacttgcaaaatgcataaacatccgacagtttgaatttatagtgttgatggaagaaatcatttttaatgtgtactgtaaaacttgaaatactcaggagctgagtgaatatgtttgttgctacttacaatcccgacctgttagtcccagtagttttgttttaacatggtctttttcaactttgtttcctgtttaactacagatgacttctgttgtagactcacaagtttaactgttgtattataacagtattacatgtcaacggtgtggttatgacctttatttatataaaaaccaaatatttagtcaatttaccgtgtcttaatttaatctttgtacaccttccatttttaagtgcttaaatgagtactatattgcaataaaatgtagtgatataattaaccagccattaaaaatttacttctacagatacagtgtcaattgagtttatatattaggtacttgcatactttttatgattactatgaaaattagagcaattaaaattaatggtttctacaattaatctgagttctacaacctaaaattgccttcagtttactggcatccctggattagggttagacctgatattgtggctgacacagaaaggcaacaggaaattaacttcattattttcatattcataatatggcatatgagactcaccaggcaagcaaatccccagactggttaaaagtaaaaatttaaaagctgttagctatattttgtgcactgaatctttaatagcaaattgtctacaggctgcagttagagactttgctggaatatccatttctccttttagtccgtgccatttttgccacccctctaacccggggagagtagaagaggtgctgttgctgatgtgggtatggcttgaattcagttaaatatattaaaaagaaaacaattccttcttaaaccactttttcctctaggattgcaaggcacagttctactccagaagaatgaaatgtggttgagcacttcctcaaataggtttatgatttttataatgatcctttaaaatgatctatgaatgatttattagataaattctatacatacaaagtacagattcttcatttagcattgatttacttcttagttttcatctttctgaccatccaccgtcttttaaacctcttggcattttgttttttttggattccccaagcattattcaaaaactggacagcagctcttttcactggtaacctcttgttggcaagagacaggaacttatttacagtagtcctgttggttcctggcccatataatgaattatgtatgaaggcttgtgctgcttgttgccttgaatctctcagatcttggtcttttagccttacggccaagtagcttttattctggctgacagactgtactttttgtactttaactttcttggagtcatttcctttttcacagtcttcatttttcttttgcaaattaacttctttcacctttcctggcgatttcttgatgttagtctgtgaagctgtggttaacttctccaaaatagtgtctggaaggagttttcttttcttctgttcgatgaacagctcctcgcgtcgcttcctcttctccttcaggagcgttttatccctgcgcacggtctcccgcactcgccgctcctcttctctcgcttccgcctgggcgctggcgaaagtcagctcctccggggcctcatcgtcaaactcatcgtccccttcctcgtcttcctccaggggctcggcggccgcgccgctgctgggctgcccgagcaacagcccgtgctccgcctcctcctcctccgaggccagctggccctcgtccaccatcgcctccgccgacgccggggcgcgagacgctcgcggtcggagctgcaccatggcccacgcagcgcctcgtgccg

SEQ ID NO: 505 - DNA, 1035 bp, Homo sapiens
ggaaacacttaggttaaagtgaatcttgtccatataaattatattcatggccgggcgcggtggctcacgcttgtaatcccagcactttgggaggccgaggcgggcggatcacgaggtcaggagttcgagaccacggtgaaaccctgtctctactaaaaaatacaaaaaattagccgggcgtggtggcgggcgcctgtagtcccagctactcggagaggctgaggcaggagaatggcgtgaacccgggaggtggagcttgcagtgagccgaggtcgagccactgcagcctgggtgacaaagcgagactccgtctcaaaaaaaaaaaaaattatattcatatgtattgcattgcaattataattacatatgcagattgattgatagtcatgaataataacgtctgctcctcttacatagaaagaaaaacgatattaaaagaagatcttctctttatttgagactcagaattccttctagaagaaggaagtgctttttgttataggatcccttcttttcctttttttgtttttttgtaagatgtagatgcttattctttgctttagaaaacttctcacttaaaaagatggcatgcacctaggggaataaaaggtcacctcagacaccaggtgtcattcctggtgaggcctgcctcgtcggtggcctggggtctgccggcaggttctggctgcacctgaaggctgcgtgcaccttgtcccctggacaggtctcctttcctggccctgctccagcccagcccttcttctagtggtagctctggctttgcaggcccagctccaggccctgctcctcagagagactcttcsagagctggagctgggcacagccataagacaggactggaccagatgctcctgtaaacatccaggggtgtgccaggcccaccctcacaactgcttgttcaggtatcgtgatgggccactcggtccaaaatcagccaggccatcttttccatcatctcacttcaaataaacataataattatatttgatcatttrmararmaaaaaaaaaaaaa

SEQ ID NO: 506 - DNA, 2934 bp, Homo sapiens
  misc_feature (54)..(54): n equals a,t,g, or c
ttcacctgatattgacaaactggacgttgccacaatgacagagtatttaaattntgagaagagtagttcagtctctcgatatggagcctctcaagtkgaagatatgggaatataattttagcaatgatttcagagccttataatcacaggttttcagatccagagagagtgaattacaagtttgaaagtggaacttgcagcaagatggaacttattgatgataacaccgtagtcagggcacgaggtttaccatggcagtcttcagatcaagatattgcaagattcttcaaaggactcaatattgccaagggaggtgcagcactttgtctgaatgctcagggtcgaaggaacggagaagctctggttaggtttgtaagtgaggagcaccgagacctagcactacagaggcacaaacatcacatggggacccggtatattgaggtttacaaagcaacaggtgaagatttccttaaaattgctggtggtacttccaatgaggtagcccagtttctctccaaggaaaatcaagtcattgtycgcatgcgggggctccctttcacggccacagctgaagaagtggtggccttctttggacagcattgccctattactgggggaaaggaaggcatcctctttgtcacctacccagatggtaggccaacaggggacgcttttgtcctctttgcctgtgaggaatatgcacagaatgcgttgaggaagcataaagacttgttgggtaaaagatacattgaactcttcaggagcacagcagctgaagttcagcaggtgctgaatcgattctcctcggcccctctcattccacttccaacccctcccattattccagtactacctcagcaatttgtgccccctacaaatgttagagactgtatacgccttcgaggtcttccctatgcagccacaattgaggacatcctggatttcctgggggagttcgccacagatattcgtactcatggggttcacatggttttgaatcaccagggccgcccatcaggagatgcctttatccagatgaagtctgcggacagagcatttatggctgcacagaagtgtcataaaaaaaacatgaaggacagatatgttgaagtctttcagtgttcagctgaggagatgaactttgtgttaatggggggcactttaaatcgaaatggcttatccccaccgccatgcctgtctcctccctcctacacatttccagctcctgctgcagttattcctacagaagctgccatttaccagccctctgtgattttgaatccacgagcactgcagccctccacagcgtactacccagcaggcactcagctcttcatgaactacacagcgtactatcccagtgtttgaaagatgtatggtgatcttgaaacctccagacacaagaaaacttctagcaaattcaggggaagtttgtctacactcaggctgcagtattttcagcaaacttgattggacaaacgggcctgtgccttatcttttggtggagtgaaaaaatttgagcyagtgaagccaaatcgtaacttacagcaagcagcatgcagcatacctggctctttgctgattgcaaataggcatttaaaatgtgaatttggaatcagatgtctccattacttccagttaaagtggcatcataggcgtttcctaagttttaagtcttggataaaaactccaccagtgtctaccatctccaccatgaactctgttaaggaagcttcattttcgtatattcccgctcttttctcttcatttccctgtcttctgcataatcatgccttcttgctaagtaattcaagcataagatcttggaataataaaatcacaatcttaggagaaagaataaaattgttattttcccagtctcttggccatgatgatatcttatgattaaaaacaaattaaattttaaaacacctgaagatawattagaagaaattgtgcaccctccacaaaacatacaaagtttaaaagtttggatctttttctcagcaggtatcagttgtaaataatgaattaggggccaaaatgcaaaacgaaaaatgaagcagctacatgtagttagtaatttctagtttgaactgtaattgaatattgtggcttcatatgtattattttatattgtacttttttcattattgatggtttggactttaataagagaaattccatagtttttaatatcccagaagtgagacaatttgaacagtgtattctagaaaacaatacactaactgaacagaagtgaatgcttatatatattatgatagccttaaacctttttcctctaatgccttaactgtcaaataattataaccttttaaagcataggactatagtcagcatgctagactgagaggtaaacactgatgcaattagaacaggtactgatgctgtcagtgtttaacactatgtttagctgtgtttatgctataaaagtgcaatattagacactagctagtactgctgcctcatgtaactccaaagaaaacaggatttcattaagtgcattgaatgtggmtatttctctaagttactcatattgtcctttgcttgaatgcaatgccgtgcagatttatgwggctgctatttttattttctgtgcattactttaacaccttaaagggagaagcaaacatttccttcttcagctgactggcaatggccctttaactgcaataggaagaaaaaaaaaaaggtttgtgtgaaaattggtgataactggcacttaagatcgaaaagaaatttctgtatacttgatgccttaagatgcccaaagctgcccaaagctctgaaagactttaagataggcagtaatgcttactacaatactactgagtttttgtagagttaacatttgataataaaacttgcctgtttaatctcaaaaaaaaaaaaaaaaaaaaaaaaaaaaaaaaa

SEQ ID NO: 507 - DNA, 2244 bp, Homo sapiens
  misc_feature (2222)..(2222): n equals a,t,g, or c
agaagcaggatccatttgaatccaggcgattgtggaaaaatgtgacagactcgctgagagaatctgaaattgataaggccacagagcataagcataccctggaagaacgtcagaggactgaagaaaggcatcgtactgaaacaggcacaccttggaaaaccaaatattttattaaagagggagatggctgggtttatcataaaccactttggaaaataattccaacaacacaaccagcagagtgacacatactatctaaaactcgaccaaatgaggttcttctctgtttaccctaaatcctcccagaatggagtcattgcactgagtgacctgcttcctgattgcgcagactgaaactagctaaacctgaatgtacctactagggcaccataatactgcagcaagaccaaagtggtaaagaaacacagtggaccttttaccaacctgttcatgtgatgtgagcaataccatcttaaaacttgttacctgaatcagtagatgaatcttttatccagttcttgctcctaaagttaagtttgaatcccctatttttgcacaggggcagcagatacacacaacaatgagaactcagtgactttgatttctttgtagtgaaaagtgaagtctccgtttcagagtttgtgtctttctttctgtccataactgaagtattcactactcttgtaaaccaaccaagaggaggagaaagatgacccagaagtggattcagccattgtgcctgaaatcagtgtttaaaaaaaaaaatcaaccaggttgtggtaacaaggcattctatttcttcaaaaagactgtatgcctgtgtctgaggaacttacctattatccacctctgttggaactctcttttaaaaagtacatttatagattgatcagaattataaccatggagaattttttcttctgagcattttaatatacttgaaaacaacattgacttgaaaaatttcagaacatttttcagtacctagttttattaaatattacacttgagagacactttttaaaaatgtgttaatgtcaatatgatgagattttagcctttctccagaactaaggcattaaagaaaatagcaaatattaaaaaataaaactgttacttttttccttctttcttttcacctttaggttaatatccagtattatgtgttatccctttggataagtatgctttattttacctctgttaaaaattaaaataaatgattctattcatatttgtcagtaattcaaaacttatatgtgtaactgaacgcgcatgtaaggtatggttttatttatttttttttttttttgaggaaatttaaatgctaaagaaacaacgaaatgaaaaggtatcaggaaaaaaagatcaggaagttgtattcaggtacaaatctttttttaaataagtattttgttgaggttgaagaattgctggcaattaaaagaatagagctaattatggctttcatcattcattcatgtatttattgagcacctacttattatggtgctcaacacttgttactgcaagctaccttaatttcccaagagtggtgccttactctgttttttctgatatggtcttccaatcagtgtgtgtaacatacctgttgtttatcagccattgtaggtggctgtgtctgttgcatcatcataagaagtttaagctttgtgctctgataaattgtgttctgttaaagaggttagtaggatgaaaacagcaaaacaataattttttcaacaaattgtaaattataagaaaaagagttggtttgtgtacaacaattttaatgattcccttgttcatttttgctgtgaaatgcactgaaaaaaatcctcaaaatgagttatagttcctgtgttgggaaaattgacaaataataaaactagagaacaaacaataatgcttctgtctcttttacgaatggagagagaaagtttatattcagtagagttattgccctgttcatttgagaggggcatggattttctgtttaagtccttcaggaatcttcagctaggtggtaaatttaataagagtttctaaaaattgaaatgtttaacttttaaatattctggagatagaagaagaatataaaatgaaaccaggctgatctgcatgcagtggcatttacaactaactgatcacaaccaattatagattccttattttgtttattgtgaggcagagtcctgactctgtcacccaggatggggtcncagtgcatagctttactaaaag

SEQ ID NO: 508 - DNA, 3578 bp, Homo sapiens
tacttgatccgcatacccacaatggccctcgatgattttgcaaatggtgctgcacagtccggggtattaactctcaatgagaccaacgacatcttcctctggtatactgcagccmaaaagcctgagcttcagtttgtgagtaaagcccgtaagggccttgtcccccagcgctgtcaccgtttccagtcgtgtgcctatcgaagcaaccaatggcgctatcgtggtcgctgtgacagcatccagtttgcagttgataaaagagtgttcattgctggctttgggctgtatggctccagctgtggttctgcagaatacagtgccaagattgaacttaagcggcagggcgttgtcctggggcagaacttgagcaagtacttctcagatgggtccagcaatacctttcccgtatggtttgaatacccagtgcagatcgagccagacaccttctacacagccagtgtgatactggatggcaatgaactcagctactttggacaagaaggcatgacagaagttcagtgtggcaaagtgactgtccagtttcagtgctcctcagatagcaccaatggcactggggtacagggagggcagatccctgaacttatattctatgcttgaaaactcacttcctgaagcagcttgagctycaaagtgcacatctggttccaacttgcctgatgcttagctcatctgcaaatatgtgatcagtgccggtaatttgtaatgaatgaagcggtaggcaggttctaatttcttttaaccttttaattatgtacaggcaaaaatgcagcattccgcttttaactatctgcttaaaagagctaacgttcttattaaggctttgtggtttttagagttgcatctatgaacctggggagattatgtgctttcccaagcgttccaccaccctctcagttttgtccctctgaagataattttggatcaccttgaatttccttttggacgttatttgatgaacagaaataaattgataacaagagttatttttaaacagaactcctcttaccccccaaaacagataaacctcagtgtacaattttgaaagaagttttgccttgtaatgagtaataatttagaaagtagacagtggttgtgtttggctctcgttttattccttttacatttgttgcttctgggatttaaaaaattactaaattcataagatagttaggtattaaacacttcagaatatcaatgtaaaattggaaaataaggaactgggggcatttgtttaggccatgacttctacaagcagatttcttttcttttagtttagaagacaaaaaatttcaatacagatacttcttttagaagtaaatttttagattttattgtcagtagaaaaaagttaaactcctactaatttaaactaagacagtttaaaaaggaagcctgaaaaagactcatactacaaataatttaattgatggcatataagaatatgcagtttgaaaaagccaaactcttctctccacttagcttttgatccccactgtttgcttatttgtataagtcatactgtgtagaatttctattttctttttccccattaaaagaggaccaaacaattctttatacaaatggagtagcaactagttttgtagcactacatttaatgtaatgagatacctttgttcatttttttaaatttgaaatatactttacctgatccactttgattgtatactatattctttgttaattttaattttgtcctgttcctagactgctagaatctggcccctggcatcttaaagtgccaacatatgcctgcagggtttataaaaaatggcctggagtgacacattttattatacctaatattcactgcatcagtatcacatctagctcccttacttgtccacagataatgtaaacaaaggagggaaaaacttattaaattctccttcgctgctggcttgtrctggtttagtgcctgtgtccctggcagtgtccagtgtgttcacttccagttgaagtatccatgtgtttctgggcagcttttctgctcagtgtgatcctgagatggcttccccgccgccacccagagtgtggtccttggccgcctcctgctcctgctctgcaagcctgaaactggcttgtctggagccaggagttagtcctggggtgtgtgtgtgcctgcgcacccatgcgcatgcaagtgtgtttgccagctcaggagctgtctcctctctacctggctagtaagaggtgggacagtaatggtcctcctgctggccccagcaaggcccatgagtgactgccctgacgtattcactgtgcctctgggccacttcttcccctgtagatgtgggcttgttgccttcagccggcttccctgagggaggagaacactggattattggaaatgttttaatcactcttgccattacctacatctattagcatagatgatgaaaagctgttactggtgattatagatgagtatttccaggacaacrttctaaaagtacaattatttcttattggggagattacaggtagtttggcaaagcattgaagtacaaaggtacattttcaattaaaaagcacacttctacaaaagatttggtttttaaattatggttacacatttcagtaactcatagctgctgtgcaaattggtagaccttataagaaggcacttgtttgtaagccagagaagaaactttaattgcatcctatcagattgttgaggtgggtgtgatagtcttcaggtgcagtgcgttcattcactaacgctcactgtcagtgcccatgtttgctagctgcctccatgtgactagtgagctgctggtgaaagtcgtgtgaaatcctgtacactgtgtatagaacaatgtaattttatgttaattgttattactttaaaacatatctaccatctgattggctggtaccgagagctgtgggtaaaatttgaaaattgtatttagaataagaaattttacattttaaaccctattgtcctttatgcattttcaatgaaatggaatgaaggctaatatgcttgctttatttacttttgtaatcttggattttgtagcttttaaaactagaaaccattgttctaacaaagcaggcaactttattctataaacacaactttattaagcagaatacactgtagatgcttttccccaacgtatctggctggcagtctttgtcgttgttcattctggggataaaggggaactaggctagcagttctaatgtgacattctttaagcatatcttaaaatagtatttaagtaaatggtctaatttctacataattattgcactgaacttttttgtttattaaggtgtttaaataagctcagctaattcaagacactgtagtcacttgtgcatcagtgtgcttgaatttagtagcttacagcattatttatgaaggaaaaaatacataaatatgaagtacctcatgttgaatgttattgtactgtatttttaatgtaacagtgcagatcttgttagacacatgaatgtgtataatcatgttaaatgcaaataaaactagttcatagaaaaaaaaaaaaaaaaaaaaaaaaaaaaaaaaa

SEQ ID NO: 509 - DNA, 2231 bp, Homo sapiens
acagacataggcaacagctccawagggtatttcaktgtgtcacctgcttctagatcatctgttagttaactgactttgtgcaaggtctcaccatgtatagcactgccttgcttgagcacggaagtttctgtcaacagcaagctttatgtgctctatcatttttattaaagtatttcagtcaatagtgacccattgtagaatggatgcaggattcacatgtgcaagtgctttgtgacctggcaccatttggttttggccaagcagcagagcagacctcaggacctaacgaggatggttgtgattaggtcaaatagaaaactagcaggccattgctgacaatttttactatataattagaggacttcctaaaatgctttaaaaaaaaatgtgtatggatggaaaatacaaaggaatttttcaaatactcaatttttattggtagtagttatcaagaacaaagtcctcggacttctgatgggaaatctgaactrctgtttctcttttagcgtacaagaagaaatagatccctctcattagcactttaatatcagtgtcacgtgtctggaaggaaattgtattcatttaggtaagcaacacactacataaatatcatagctgttagacccaggggactctcaggtgccagaattggggactcctttaattggaagggagctaaagggtctacctcctacctagaagtcctttctatgtggatatgaattaaattctcttgtctgttttgctctgatggggtctgtgtgggctagctggctctggtgtgtgcctgacgacagactgaactccttaaccatttcagacagcttgaagatgtatgatcattatttgaaaagggagagagggaggactctttgttttctccaccagtttggctcctgaggtttcttcagcgttaggtttctgtagggcccagctttctccagtgtttggctactgcaactctgtgttctgccagtctcttaactcagacagaaacaatgcaaaccagcagacagagcatcaccttgaaagtactaaaacagctgtcaatctagaaatctctgccccgcaaaaactgtcataaatactgcaagacccatgttcagatttccccccttttacaaataatgttttgttttatttcccagctactacaagtgatccaaatgttctttatagcagactttttcctgcagtctaggatccagtcagagatcttgcattaarttatatctctgtaatctttaatttcacgctatctgcaatgttttgtgtttttcatgacattgatgtttttgatgaggtcaggccatttattctgcagaatatctgtcaatttggattttttctaattgttctttcatgattagaatcaggcaaacattttttgacaagaatacatcagagacgactccgtggtgcatcagactgggggcatgtgatgtctgtgtgtcccattattggcgatgttcaattctgtcacttctgttgaggctgcatttgccagatttcagattaaggtacctttttccctttgtaaattaggatatcacctttgtggggtgccgttttgagactgcaaggatatcatcttcccgagtaggccttcatccatggcctcagcatccatgatggttcctgtccggatgctcacttttgaagaaacatttcaaataatagtgattcctttccaattcaaaagtaatcattgctttatagtcttcataaatattttctgtggttatttagttgatgaaagctgttgatgtccatttggatttttttccctccaacacaaacagctgcaggaattggtgccacatagaggctcagcttgcctgtctccatggaagctgtggccacagcagtggctttggaagcctagtaaggaatgacatcactgccaggtgcagtggctcacacctgtaatcccagcactttgggaggctgaggtgggtggatcacttgaggtcaggagttcaagaccagcctgatcaacatggtgaaaccccatctctactaaaaatacaaaaattagctgggtgtggtggtgcgtgcctgtagacccaactacttgggaggccgaggcaggagaatcactggaacccatgaggtagagcctacagtgagctgagatcatgccactgcactccagcctgggtgacagattctgtctcaaaaataaataaagaatgacatcactgaataaaaaaaaaaaaaaaaaaaaaagg

SEQ ID NO: 510 - DNA, 1293 bp, Homo sapiens
  misc_feature (20)..(20): n equals a,t,g, or c
gggcggggcctgcgacacgnggtgggcgggtcctgagtcgcgaccctggtccggacctgacctgaattgcgaccccaacctggactgctcccctgaccgcaacccctacccccgcccaccagtatggcccggcacgtgttcctaacggggcccccaggagttggaaaaacaacattgatccataaagccagtgaggttttaaaatcctctggtgtgcctgttgatggattttataccgaagaagtcagacagggagggagaagaataggattcgatgtcgtcacgttgtccggcacccgggggcctttatcgagagttgggttagagcctccacctggaaaacgtgaatgccgagttgggcagtatgtggtcgacctgacttcttttgagcagttggcactacccgtcttgaggaatgccgactgcagcagtggcccagggcaaagagtgtgcgtcatcgatgagattgggaagatggagctcttcagtcagcttttcattcaagctgttcgtcagacgctgtctaccccagggactataatccttggcacaatcccagttcctaaaggaaagccactggctcttgtagaagaaatcagaaacagaaaggatgtgaaggtgtttaatgtcaccaaggaaaacagaaaccaccttctgccagatatcgtgacgtgcgtgcagagcagcaggaagtgaagacacgtgcattcctgccttccgtgaaggagtgcccagttcaagaggagcctgatggagccctgcctgtcgaggctgtatgcctatggggttatggaaccttgtgggcttttctagagaaaactcaacagctgtttcccataaaatgtttaaaagatcaaattagccttaatgctggattgtctgtacaagattaactatccattgtggcttatctatgcttaaagatttcttgtttatttcctcttgcagtcatgcacatgatttgggtaaactgtgagatgagaaatggttttcagagtattagatggaattcacccccgttgaagtttataaatgtgttcaggggaagcgggaggaaagagttcactgcctaatcagttttgcatgtcatgaaaattaaattcctctccaggtgcagcttcagcctcatgcaacttaaagtgataacagttatttgattttttaaaaaatattattccaaaagaaaaccattttaggtcatctcccccaactctgtttgcttactgcttaataaatataaaaataaatctgatggttacagacaggaaaaaaaaaaaaaaaaaaaaaaaaaaa

SEQ ID NO: 511 - DNA, 1105 bp, Homo sapiens
  misc_feature (13)..(13): n equals a,t,g, or c
  misc_feature (758)..(758): n equals a,t,g, or c
  misc_feature (776)..(776): n equals a,t,g, or c
ttttcagaaactngttagtgacatatagacgtmgcctgcagtaccggtccggaattcccgggtcgacggagctgtaacaacgggctgtggcgcaggcgtcggttcgctgccttccagtacaccaggcgctaaggtcgttggtgcgccgaggaaaccgctactggttaccggcgcgccggtcggatcttcgctttttagcgtcgaattactgaccggaagaatgtcaccctgcgggccagacactgaacttgttcccgcgccaccgcttaaatcgggaggtgcaggcagggcgtaagtctgtttggcgactgtggtacaagccataccaggaccagaaagcgaaccatcctgggcaacaataatcggatcgatacgaactttggtgttgtttgacgtgttaagacggtcagctgccgcgcgagaaagtgaaataacgcggtcgttgccgtaagggccgcgatcattaatgcgcaccacgatcattcgcccgttagccaggttagtgattctggcgtagctggggatcggaagcgttggatgggctgccgtcagctgtgtcggatcgaatgcttcgccagaggccgtcaggttactgccgggttcggcatcatagattgccgccagtcccgcctggctaaatcgagacggatcctgcacgattttgtagcttttaccgtcgcgctggtaatcctgawttgccgtcgcgttcagtggttcgaaacgcgggtccgccccgytaatttcaactatagggccgntacataccgcargctgsngtacacttaccgtctgttgctgaccatcatcgcttgtacatgccgcgagcattcctgccgcgatgcagatyccgagccactgcttacgcattgcgcacctcttacacgcttttcgacaacattttcctgtgggtgtggatgacattacaatcccgaacccagccatcagcacaattagcgccgatcctccattaactggaccagtggggagcgggaaccccttacaaccggcaggaataccgcttaccataccaatwatttacgragacataaacgaataatwtcagcattaagccgccagccatgacgcgaccaaaggtgggtttgcg

SEQ ID NO: 512 - DNA, 1240 bp, Homo sapiens
  misc_feature (310)..(310): n equals a,t,g, or c
  misc_feature (330)..(330): n equals a,t,g, or c
  misc_feature (352)..(352): n equals a,t,g, or c
  misc_feature (433)..(433): n equals a,t,g, or c
  misc_feature (1239)..(1239): n equals a,t,g, or c
gatatacactatccttttttatgggttatggataaaggggaatttatttgataaatagggctccattttcaccattgcaatggtttaagggtgtttgttcacgtttatgtggcctgaagtcccatttttatcactattattatttgagatggagtctcgctctgtcacccaggctggagtgcaatggggcgatctcagctcctggcaacctctgcctcctgggttcaagcgattctcgtgcttcggcttcctgagtagctggggttacagacacccaccaccatgcccagctaatttttatatttttagnagaagatgggggtttaccgnaccatggttgggcaagcctggnctcaaactcctggaccttaaggtgatccacctgccttgggcttcccaaaggtgctgggaattacaggcatgaagccaccgnacctggccccatttaattaatataataaacaagtgcaggctttacctgatttattctcaccttctgktttcttcttctgcattatctgtcaccatgggttggctcctccccactttctcttttttattcttttctctcttttttgccacactaaattgtaatgtgtttgaacaactctgacttaatattacctctaacaaaaagctggaaactgcacaaatattctttgtaggctctaaaagtaggttggctgaagtatgatacctgaactaattattcatttgtatgcttgttttataagtttgacttccatttcatgatttttttggtagctttatgttatttctgttttcagcaatgggtactttgacatctttctgtctctgaattgaattttcattttgcaacggaagagaagacaacatatttattccataatgaaagagctaatgaagtagaataactattaaattgagatgttttagcaaaaaaacaaaaacacaaaccccaaacgggttgttttgttttatttttttctaaaacatttctaacaattcccagtaggaatgggtggggccagccttcctcatttacaatccagctgcagtgagtcaagatcctagcttattcctcccaattgtgtaataaatgcagaaaaatgatgtgacggtcacaattctcaaatccattgcattgtattccacaaaggatatcctggcggaaggtggaaatatggggagggtaccatgatgtaaagaattgcctgggaaatttccttgagtcatgcatttttgtaaaaccttacnt

SEQ ID NO: 513 - DNA, 1645 bp, Homo sapiens
  misc_feature (340)..(340): n equals a,t,g, or c
  misc_feature (351)..(351): n equals a,t,g, or c
  misc_feature (517)..(517): n equals a,t,g, or c
  misc_feature (557)..(557): n equals a,t,g, or c
  misc_feature (1631)..(1631): n equals a,t,g, or c
taaggtacgcctgcaggtaccggtccggaattcccgggtcgacccacgcgtccgaaagagaaagactgtattataattatatatatttgaatatattatgtcatatatgaagaaaacatttttgagccttttatatttaaagaactatttagttatccatattttttcatttgagcatccaaaaagatcaacagatttttcatgttaggtatcatttttatgattacatactagtctacatgtattcattctgttcttcttactcctttttttttttttttcttgagacagagtcttgctctgtcacccaggctggagtgcactgtggcgcgatctcagntcactggaagntcctgggttcaagtgattctcctgcctcagcctcctgagtagctgggattacaggcacgcgccacctgtgcctggccaacatggtgaaaatacaaaaattagctgggcgtggtgtaagaatccaggagccgcagggttttccttggagtgctgcgagggctgtggntgagggtggtgggcacagggagtgggtggggaccttacgngggctggtcttctcctaatccagttctcctggttttcccccgtccccgtctctcgtatttgtggtctccttgtctcctctctcccctttttcccctcccccttctctgtctcttgcttggtgttggttttctgtgtgtctctgtgtgtccccgcgccaccccctgtgctgtgtcccaaaactctgcctggctggtgcctgtcttctctcttgagggcatctgtcacctcttctgcttggtcatctgtgttcctctttatttcttcctggccccatcttgctctctccccacaccgcctgtgtctaccctcctctccccgatcccccacttctccctctctcccctgggccccaatgtcttggactctcctaccagtggcgcttgaggctacaagtccaagtatcttcagctcaagaagaagttagaagatgagttccccggccgcctggacatctgcggcgagggaactccccaggccaccgggttctttgaagtgatggtagccgggaagttgattcactctaagaagaaaggcgatggctacgtggacacagaaagcaagtttctgaagttggtggccgccatcaaagccgccttggctcagggctaatgcgccctgaaggcagagtccagggaccttgacccagcccctctcagcagacgcttcatgataggaaggactgaaaagtcttgtggacacctggtctttccctgatgttctcgtggctgctgttgggggcagagattgacgcccccggtctttgcctctgagcgggagagtctgtgtgtatgtgtcttccccggaatccacaccaccccaccctcctcctgtcccgtggtttcatcatatctctttgcataccccatgtcttccccagttgtcccctggagtttggggggacatcccgcctcaggcatccttctcaaggggaagccaagagaggcatcaggatgggtgggtttctgattgtggcaacgtttgcaaccgttcacgattcaataaatattggatgaatttaaccgaaaaaaaaaaaaaaaaaamttcggggggggccsgktaccaattggcctttnagggggggcgtttt

SEQ ID NO: 514 - DNA, 2225 bp, Homo sapiens
ggcacgaggccacgcccatgcctccgtcgctgcgcggcccaccccggatgtcagccccccgcgccgaccakaatccgtgaacatggcgaacgaggttatcaagtgcaaggctgcagttgcttgggaggctggaaagcctctctccatagaggagatagaggtggcacccccaaaggctcatgaagttcgaatcaagatcattgccactgcggtttgccacaccgatgcctataccctgagtggagctgatcctgagggttgttttccagtgatcttgggacatgaaggtgctggaattgtggaaagtgttggtgagggagttactaagctgaaggcgggtgacactgtcatcccactttacatcccacagtgtggagaatgcaaattttgtctaaatcctaaaactaacctttgccagaagataagagtcactcaagggaaaggattaatgccagatggtaccagcagatttacttgcaaaggaaagacaattttgcattacatgggaaccagcacattttctgaatacacagttgtggctgatatctctgttgctaaaatagatcctttagcacctttggataaagtctgccttctaggttgtggcatttcaaccggttatggtgctgctgtgaacactgccaagttggagcctggctctgtttgtgccgtctttggtctgggaggagtcggattggcagttatcatgggctgtaaagtggctggtgcttcccggatcattggtgtggacatcaataaagataaatttgcaagggccaaagagtttggagccactgaatgtattaaccctcaggattttagtaaacccatccaggaagtgctcattgagatgaccgatggaggagtggactattcctttgaatgtattggtaatgtgaaggtcatgagagcagcacttgaggcatgtcacaagggctggggcgtcagcgtcgtggttggagtagctgcttcaggtgaagaaattgccactcgtccattccagctggtaacaggtcgcacatggaaaggcactgcctttggaggatggaagagtgtagaaagtgtcccaaagttggtgtctgaatatatgtccaaaaagataaaagttgatgaatttgtgactcacaatctgtcttttgatgaaatcaacaaagcctttgaactgatgcattctggaaagagcattcgaactgttgtaaagatttaattcaaaagagaaaaataatgtccatcctgtcgtgatgtgataggagcagcttaacaggcagggagaagcgcctccaacctcacagcctcgtagagcttcacagctactccagaaaatagggttatgtgtgtcattcatgaatctctataatcaaggacaaggataattcagtcatgaacctgttttctggatgctcctccacataaataattgctagtttattaaggaatattttaacataataaaagtaatttctacatttgtgtggaaattgtcttgttttatgctgtcatcattgtcacggtttgtctgcccattatcttcattctgcaagggaaagggaaaggaagcagggcagtggtgggtgtctgaaacctcagaaacataacgttgaacttttaagggtctcagtccccgttgattaaagaacagatcctagccatcagtgacaaagttaatcaggacccaagtctgcttctgtgatattatcttkaagggaggtactgtgccttgttcatacctgtaccccaaattcctaggatggcatctgcccttcagggggcactaaaatgtattattgaaacagcattctgggcttaaataggtgtatgtatgtgttggttgtgactgtactatttctagtatagtgaactacatactgaatatccaagttctcagcacctacttttgtcaaatcttaacattttgccacttcgagatcacattgccattcctcccctccagaggtaacaattwtccwcaattmtgttaratccttcattctaatggacattttattgtgaagaacctgttcatatcctgtgctcaactttgtattgaattatttttctctgaataatttttaggagttcttttattctagacatcaatcatttgtcagttttatatgttgcaaatatcttctagtctatcttgtgacttttctttttactttatggtattttgttgaataaagttttaatgtagtcacataaaaaaaaaaaaaaaaaaaaaaaaa

SEQ ID NO: 515 - DNA, 2759 bp, Homo sapiens
  misc_feature (962)..(962): n equals a,t,g, or c
  misc_feature (965)..(965): n equals a,t,g, or c
  misc_feature (978)..(978): n equals a,t,g, or c
  misc_feature (1589)..(1589): n equals a,t,g, or c
  misc_feature (1591)..(1591): n equals a,t,g, or c
  misc_feature (2724)..(2724): n equals a,t,g, or c
  misc_feature (2727)..(2727): n equals a,t,g, or c
  misc_feature (2737)..(2738): n equals a,t,g, or c
gctgattctctggctgtgtggggcgcacggtcccgggatactggggacggcggggtgggagggcgccgtcctggggccgcggcggccgggcgggggagatggcggcgcgatggagcagcgaaaacgtggttgtagagttccgtgactcccaggcaactgcgatgtctgtggactgtcttgggcagcatgcagtgctttctggccgcagattcttatacatcgtcaatctagatgcccctttcgaaggtcaccgaaagatctctcgccagagcaaatgggacattggagctgtgcagtggaatcctcatgacagctttgcacactattttgcggcttcgagtaaccaacgagtagacctttacaagtggaaagacggcagtggggaagttggcacaaccttacaaggccacactcgtgtcatcagcgacttggactgggcggtgtttgagcctgacctcctggttaccagctctgtggacacctacatctacatttgggatatcaaagacacaaggaaacctactgttgcactgtctgctgttgcgggtgcctcccaggtcaaatggaataaaaaaaatgctaactgccttgccaccagccatgacggcgatgtgcggatatgggataagaggaaacccagtacagcagtggaatatctagccgcccacctctccaaaatccatggcctggactggcacccagacagcgagcacattcttgctacctccagtcaagacaattctgtgaagttctgggattaccgccagcctcggaaatacctcaatattcttccttgccaggtgcctgtytggaaggccagatacacacctttcagcaatggattggtgactgtgatggttccccagctgcggagggaaaacagccttctcctgtggaatgtctttgacttgaacaccccagtccacaccttcgtggggcatgatgatgtggtcctggagttncantggaagaaagcanaaggaagggtccaaggactatcaactggtgacgtggtcccgggatcagaccttgagaatgtggcgggtggattcccagatgcagaggctttgtgcaaatgacatattagatggtgttgatgagttcattgagagtatttcccttctgccggaacctgagaagaccctgcacactgaagatacagatcaccagcacactgcaagccatggggaggaagaagccctaaaagaagatccccctagaaatctcctggaagagaggaaatcagatcaactggggctgcctcagaccttgcagcaggaattctccctgatcaatgtgcaaatccggaatgtcaatktggagatggatgcggcagacaggagctgcacagtgtctgtgcactgcagcaaccatcgtgtcaagatgctggtgaagttccctgcacagtacccaaacaacgccgccccttccttccagtttattaaccccacaaccatcacatccaccatgaaagctaagctgctgaagatcctgaaggacacagccctgcagaaagtgaagcgtggccagagctgcctggagccctgcctgcgccastcgtctcctgccttgagtcckktgtgaaccangnagacagcgcttccagcaacccgtttgcactccccaactctgtcactccccccttaccgacgtttgcgcgggtgaccacggcttacgggtcgtaccaggacgccaacattccctttcctaggacttctggggccaggttctgcggasagkttacctggtatatttcacaaggcccatgacaatgcatcgggcggtgtctcccacagagcctactccgagatctctctcagccttgtctgcttatcacactggcttgatcgcgcccatgaagatccgcacagaggcccctgggaaccttcgtttatacagtgggagccccactcgcagcgagaaagagcaggtctccatcagctccttctactacaaggagcggaaatcaagacgatggaaaagtaagcgtgagggatcagactctggcaatcgacagatcaaggctgctgggaaagtcatcatccaggatattgcttgcctcctgcctgttcacaaatcgctgggagagctgtacatattgaatgtgaatgatattcaggaaacatgtcagaagaatgccgcctctgccttgctcgttggaagaaaggatcttgtccaggtttggtcgctggctacggtagctacagatctttgccttggtccgaaatctgacccagatttggaaacaccctgggctcgacatccatttgggcggcagctgctggagtccctgttggctcactattgccggctccgggatgttcagacactggcgatgctctgtagcgtgtttgaagcccagtctcggcctcaggggctaccaaacccctttgggccttttcctaaccgttcttctaatcttgtggtgtcccatagtcgatatcctagctttacctcttctggttcctgctccagtatgtcagacccagggctcaacactggcggctggaacatagcgggaagagaggcagagcacttgcctcccttggggagaatcctcaccagaagagctccgctttgggaagctgacctacagkgatccccgtgagcgagaacgcgaccagcatgataaaataaaargsttctggaccccggcmatacccagcaatttgrtgactttaaraaatgctattgggaaatcctctaccggtggggctgaaaaanaanccaacttaanngtgaagttggctccgggcccc

SEQ ID NO: 516 - DNA, 687 bp, Homo sapiens
cgcgaaggtgcgtccgrgyatggccgctgaacccgtggacccggcgtccgcgctaacgcgctgggctagtgctaggccacttcatagcttcggggatggtcaatcaggagatgttaaacatgtctaagaaaacagtttcttgttttgtgaacttcaccagactacagcagatcacaaatattcaagctgaaatctaccagaaaaacctggaaattgaactcctgaaactagaaaaagatacagcagatgttgttcatcctttctttttggctcagaagtgtcatactctgcaaagcatgaataatcatttggaagcagtgctgaaagagaagagatcccttaggcaaagactgttgaaacccatgtgccaggaaaacttacctattgaagctgtttatcacagatatatggtacatttgctggagttggctgtgactttcattgagagattagaaacccaccttgaaacaattagaaatattcctcatttagctgcaaatctaaagraaatgaaccaggctttagcaaagatggatatattggtgactgagacagaagaactggcagagaatatactcaagtggcgtaaacaacaaaacgaaggtttttttttcgctgatcccaaatattagctgagaagtatcttataaacatgatattataatggcttcctttaccttttactta

SEQ ID NO: 517 - DNA, 2945 bp, Homo sapiens
  misc_feature (489)..(489): n equals a,t,g, or c
gctcgtgccgtttaggtggtccgcggcggcgccattaaagcgaggaggaggcgagagcggccgccgctggtgcttattcttttttagtgcagcgggagagagcgggagtgtgcgccgcgcgagagtgggaggcgaagggggcaggccagggagaggcgcaggagcctttgcagccacgcgcgcgccttccctgtcttgtgtgcttcgcgaggtagagcgggcgcgcggcagcggcggggattactttgctgctagtttcggttcgcggcagcsgcgggtgtagtctcggcggcagcggcggagacactagcactatgtcggaggagcagttcggcggggacggggcggcggcagcggcaacggcggcggtaggcggctcggcgggcgagcaggagggagccatggtggcggcgacacagggggcagcggcggcggcgggaagcggagccgggaccgggggcggaaccgcgtctggaggcaccgaagggngcagcgccgagtcggagggggcgaagattgacgccagtaagaacgaggaggatgaaggccattcaaactcctccccacgacactctgaagcagcgacggcacagcgggaagaatggaaaatgtttataggaggccttagctgggacactacaaagaaagatctgaaggactacttttccaaatttggtgaagttgtagactgcactctgaagttagatcctatcacagggcgatcaaggggttttggctttgtgctatttaaagaatcggagagtgtagataaggtcatggatcaaaaagaacataaattgaatgggaaggtgattgatcctaaaagggccaaagccatgaaaacaaaagagccggttaaaaaaatttttgttggtggcctttctccagatacacctgaagagaaaataagggagtactttggtggttttggtgaggtggaatccatagagctccccatggacaacaagaccaataagaggcgtgggttctgctttattacctttaaggaagaagaaccagtgaagaagataatggaaaagaaataccacaatgttggtcttagtaaatgtgaaataaaagtagccatgtcgaaggaacaatatcagcaacagcaacagtggggatctagaggaggatttgcaggaagagctcgtggaagaggtggtgaccagcagagtggttatgggaaggtatccaggcgaggtggtcatcaaaatagctacaaaccatactaaattattccatttgcaacttatccccaacaggtggtgaagcagtattttccaatttgaagattcatttgaaggtggctcctgccacctgctaatagcagttcaaactaaattttttgtatcaagtccctgaatggaagtatgacgttgggtccctctgaagtttaattctgagttctcattaaaagaaatttgctttcattgttttatttcttaattgctatgcttcagaatcaatttgtgttttatgccctttcccccagtattgtagagcaagtcttgtgttaaaagcccagtgtgacagtgtcatgatgtagtagtgtcttactggttttttaataaatccttttgtataaaaatgtattggctcttttatcatcagaataggaaaaattgtcatggattcaagttattaaaagcataagtttggaagacaggcttgccgaaattgaggacatgattaaaattgcagtgaagtttgaaatgtttttagcaaaatctaatttttgccataatgtgtcctccctgtccaaattgggaatgacttaatgtcaatttgtttgttggttgttttaataatacttccttatgtagccattaagatttatatgaatattttcccaaatgcccagtttttgcttaatatgtattgtgctttttagaacaaatctggataaatgtgcaaaagtacccctttgcacagatagttaatgttttatgcttccattaaataaaaaggacttaaaatctgttaattataatagaaatgcggctagttcagagagatttttagagctgtggtggacttcatagatgaattcaagtgttgagggaggattaaagaaatatataccgtgtttatgtgtgtgtgcttatttgkttgaatgattttattttccatttctcaaaggttttatttttttggttagggccttaaaatttcaggactgtgattattagtatgtgtgcctaaggaactttttgagtcactcttaagaaagtgaaactgaagagtctaagtgataactataggattaagtcagaattgtttttcctgtcatttgttggaagcttcttgagttctgttattagcattcagggaattgatacccatcaacttgaatggaaaatcgtttgtaggtattacttaagtgaatgttaagagttccaccctgagtggtaatctaaggctgtgcagtcagttacttcagactgctcagaatagttcattagaaaggtaacaaatgagaaatgtattattatacagttctatagtagtgaagtgatggaatacctttcttacttttgtggagttacatctgatgctaagaatttgacctccaactaagcaaacattttaatgagcaaaagttagtgttattaaagttttttatgatagatccaaattgaggacctgtgtcctgtttttataagattgcaacccagctatgctcatttgtttatgttttgtatatggctgcttttgtgttacagtggtagagtttagtagttaggacagagacctgcaaagcaaaataatttacagtctggccctttacagaaaagtttgctgactcatggtcaaaataaatgaaaattttttgtgttagggttgttaagctagggttctttttggtatcatatgcttattttatgtaaatctctcaataaaaaattatttttaagagaaaaaaaaaaaaaaaaaaaaaaaaa

SEQ ID NO: 518 - DNA, 1388 bp, Homo sapiens
  misc_feature (8)..(8): n equals a,t,g, or c
  misc_feature (10)..(10): n equals a,t,g, or c
  misc_feature (12)..(13): n equals a,t,g, or c
ctcgagtntntnntttttttttttttttttttttaggaaaaacatttgtattaaatctgaccmacaataactagttttgaatacaatgttttatacagataagttaaaataaacaaaaaaaaacagtatgactccaatccaaaaggacagtgacacaaacaggcaaagtatacaagcaatataacaggcagcgaaaaattcaaaccactagtcatcaaacaaaagtaaaattttagacctattaacctcgcaaaaaaaagcaactgaaattccaccaccaccatcagtagttgtagtaaaattaatccactcattcaccgctaaagatgatctaaattggtggttgggtatacaacatttgtccagggagagcttgcgcctgtgacaccaaaggctgggtctgcgactgtggcgggagttgtgatggttggttctgagcaactggaggctgctggggctgtggtggcggctggtggtgctgtgtgtgatgcatctgctgcagctgctggggcagagcctgggagggcggaggctgtggctgctgcatcggtggctgctgaattggtggctgggcctgcaaagcctgctgctgctgctgctgctgctgctgctgctgctgttgctgttgttggagctgcagctgtgctattcgctgcagctgctgttgctgctgctgtatctgttgctgattttgatgatgcaatttaattagatgctgctgctgctgctgctgctgctggagctgctgctgctgctgcactactgcttggaactgctgctgcatggcactctgctgagcctggaactgctgctgttgctgctgctgctgctgctgctgtagcgccgcctgctgctgctgctggaactgctgctgttgctgctgctgctgcagcgccacctgctggagctgcagctgggtctgtggagttgccgtagacacgacagccatgctgtgaggggccatccccgaggtcccaggaggcggctgccctgagagagacattggctgtcccatggcaccaaggctacccatcccgcccagagactgtcccgggccccgaggaggcatgccaattccagcggctcccgcagcaggtccgccagtcaggctctggagtgcattcataggatcactgacggaagcttgagatttcttgttatgaatgtctcgaaaatggataatgagcctggccacgagagaaaggtattcgtcccgggtcttggccttcaggaaaacatggctctccatatccttgctggatttacttgtgccacaccagctttcctcatggcatcctcgatttgactgaccagcttctgccggaaggcggtgtccgccagtcggtctcttgcccggaaacgtccatgcctgttccccagctcccgcc

SEQ ID NO: 519 - DNA, 2021 bp, Homo sapiens
gagcaggcagagagatgaggaaactgagacccagaaaggtggaagcacttgtctaaggtcacgcctccaggaagcagtgtgtccacgactccagtccaagtggtcaggctccagagcccacagtcccaggggtccatgatgccgagctgcaatcgttcctgcagctgcagccgcggccccagcgtggaggatggcaagtggtatggggtccgctcctacctgcacctcttctatgaggactgtgcaggcactgctctcagcgacgaccctgagggacctccggtcctgtgcccccgccggccctggccctcactgtgttggaagatcagcctgtcctcggggaccctgcttctgctgctgggtgtggcggctctgaccactggctatgcagtgccccccaagctggagggcatcggtgagggtgagttcctggtgttggatcagcgggcagccgactacaaccaggccctgggcacctgtcgcctggcaggcacagcgctctgtgtggcagctggagttctgctcgccatctgcctcttctgggccatgataggctggctgagccaggacaccaaggcagagcccttggaccccgaagccgacagccacktggaggtcttcggggatgagccagagcagcagttgtcacccattttccgcaatgccagtggccagtcatggttctcgccacccgcmagcccctttgggcaatcttctgtgcagactatccagcccaagagggactcctgagctgcccacatggcctaagatgtgggtcctggatccttcccccttctcaccataaccccctctcagtgtttccccaacttctcccttttagcagggtccctttagagcccaactccaggtcaaatctggagctcaaatcccagtgctccctccccaggagtggggccccaactcttccaagataccagcattcctcaagtcctcccaaaacttcctacccacaccctcttcccaaggccctcaggggcagaaaacatctccttcaacccgtccccactccttcctctgcatgaccttgggcaaacccttgccctttcaagccatcagctcctgcctctctgccatgagggctttggatcagattcctcttctcgccaggatgaggacacgcactgccctccatagacacagatgaaggggtgggggtcattcagctcgaatgggtcccagatgctcacttggcctttccctgcaggatgagtgaagacgtttgcctctcacagtgtgtcttctacctgcattttggcatcaragccccccagcccacccaccacaggcaattactagccctagttgataggtgaggtgggtgaagaaggctggaggtgacatgtccgaggtcacacaacaaagcagcatgcaggaactagaaacacatcttcagcctcctcctgggccagctcttgtgctacaggtggggcggagcagcccctcaccttcctggttccctgagggtcctcagggtggaggacaggtttggcccagaaagactagccagaggcctgatggtcccaggtggctctggatatactttggatatggatttaaatggtctctaagagccgggggtagggggcaggaaaagtgggttgtctttgcccctcaaagtccacctacctagaaaccaagcccacggtcttggccgtgaccctgataataaatgggctctctcagaggcgccagcccctccctccccagccggaggcgtcatctctcttctgtaccactagagggagctctgatgcagctggagagcagcgctcaaggctctcgcccctcccctccctaacccttaccttcagtctccaccagcctgaagggcctcctaggggatcctcaggcggcccccaccagggcacaccctactgtccttgtgcctcacgccccctcctcatcctgcaccccttccatcccaccttccctttcaataaacagctgggatggataaaaaaaaaaaaaaaaaaaaaaaaaaaaaaaaaaaaaaaaaaaaa

SEQ ID NO: 520 - DNA, 1583 bp, Homo sapiens
tgtcagtgcggcggggcgcgcgagcggcgccagctcggggcagcggaacccagagaagctgagggggcggtagcggcggcgacggcgacgacgacgactcccgcgcgtgtgcccagcctcttcccgccgcagccgcccttttcctccctcccttacgtccccgagtgcggcagtaccgcctccttcccagccgcgcggcttcctccagacctctcggcgcgggtgggcaccatgtccttgaagcttcaggcaagcaatgtaaccaacaagaatgaccccaagtccatcaactctcgagtcttcattggaaacctcaacacagctctggtgaagaaatcagatgtggagaccatcttctctaagtatggccgtgtggccggctgttctgtgcacaagggctatgcctttgttcagtactccaatgagcgccatgcccgggcagctgtgctgggagagaatgggcgggtgctggccgggcagaccctggacatcaacatggctggagagcctaagcctgacagacccaaggggctaaagagagcagcatctgccatatacagtggctacatctttgactatgattactaccgggacgacttctacgacaggctcttcgactaccggggccgtctgtcgcccgtgccagtgcccagggcggtccctgtgaagcgaccccgggtcacagtccctttggtccggcgtgtcaaaactaacgtacctgtcaagctctttgcccgctccacagctgtcaccaccagctcagccaagatcaagttaaagagcagtgagctgcaggccatcaagacggagctgacacagatcaagtccaatatcgatgccctgctgagccgcttggagcagatcgctgcggagcaaaaggccaatccagatggcaagaagaagggtgatggaggtggcgccagcggcggcggcggcggtggtggtggcagcggtggcggtggcagtggtggtggcggtggcggtggcagcagccggccaccagccccccaagagaacacaacttctgaggcaggcctgccccagggggaagcacggacccgagacgacggcgatgaggaagggctcctgacacacagcgaggaagagctggaacacagccaggacacagacgcggatgatggggccttgcagtaagcagcctgacaggagcaatggccaccagcaggtgaagggcatcgctgccccaggcctcaagccgggcacccaaccctggatgccaccccccagcgggtaccagaggaaagctggcagcaggcgcctcctcccccaacgcatcccagccagtgccatgtcctctgcaggtggagttactggcctactccttccccatgagccctccctgtctgcactgcccaggccagagggtagagcacaggggtttccccatactacctcccctccccaggacactcccaggcttgggttttttctataggtttggcggggggccacagggaggggaccctgacaataaagagattggatcccaaaaaaaaaaaaaaaaaaaaaaaaaaaaaaaaaaaaaaaaaaaaaaaaaaaaaaaaaaaaaaaaaaaaaaaaag

SEQ ID NO: 521 - DNA, 1836 bp, Homo sapiens
agcctctggagcctggcccagtccgagagccaactgccccagagtctgagcttgaggggcagcccacaccaccagcccctccacccctgccagagacctggactcccacggcccggagcagccccccactgcccccacctgctgaggagcggaccagcgccaagggccctgagaccatggccagcaaattccccagctcatcttcagactggcgcgtccctgggcagggcctggagaatcgtggggagcctcccactcctcccagcccggccccagctccagctgtagcccctggtggcagcagcgagagcagcagtgggcgggcagccggggacaccccggagcscaaggaggcggctggtactgscaagaaggtgaaggtgcggcccccscccctgaagaagacctttgamtctktggacaacagggtcctgtcagaagtggacttcgaagagcgctttgctgagttgcctgagtttcggcctgaggaggtgctgccctcccccaccctgcagtctctggccacctcaccccgggccatcctgggctcttaccgcaagaagaggaagaactccacggacctggattcagcacccgaggaccccacctcgcccaagcgcaagatgagaagacgctccagctgcagctcggagcccaacacccccaagagtgccaagtgcgagggggacatcttcacctttgaccgtacagaagccgaggacgtgcttggggagctagagtatgacaaggtgccatactcctccctgcggcgcaccctggaccagcgccgggccctggtcatgcagctctttcaggaccatggcttcttcccgtcagcccaggccacagccgccttccaggcccgctatgcagacatctttccctccaaggtttgtctgcagttgaagatccgtgaggtgcgccagaagatcatgcaggctgccactcccacggagcagccccctggagctgaggctcctctccctgtaccgccccccactggcaccgctgctgcccctgcccccactcccagccccgcaggggccctgaccccacctmacccagctcggactctggcacggcccaggctgccccgtcactgaytccacccccagagtcggagcctggacagcctggcgtggggagggggctccccagccctcccccccacccccaggtccctccacagctgccacaggcaggtgagggacccctgagaagatgccaggacttatagtaccccctcaggacatggacagtatgtgggggcaggaaggttatctcctcccgggtaaagccatttcgtcctctccagtttggggcggaatgaggcctgctcctcttgtaaatacccccttccctcgaagctccctcccggtgctggggggcagctgaggggctgcaggggcagtctccctcctccaagcccctgtacataacctggagcgtgtgaccttcagagcttttcactttatgcaaaatggctcctgtgagggctgcaagctggagggtggtgcaggccttgggccacagggaggcgcctgtggaatagggggagttcatgcaccccttttttccccagaggggctggactcaggttagtttgggggtgggggctcctgcactttgccacaggcacggggagggttttctcctcaccccctctgccctcccaacttgggttgtactttctaagaaggtgattccccctgcccttgcccccttccccagaacaaaacatgttgatcatgtgcaatatttcttactgtgccgagaagccgcaatgagcgagattaaagctgtttaacacaaaaaaaaaaaaaaaaaaaaaaaaaa

SEQ ID NO: 522 - DNA, 799 bp, Homo sapiens
gattcggcactaggtgttgacatatgaagcctgcctcccaaagtgcctaggacaagtttttattcttgactgcttgtcttttatttccttattcccagtacctggtgtagctcttgattcataacaagtgctatgtaaatgctaattgtatcaattaatattactgcctacttgkagcttcaagtctaatttgaggaaaataaagagcaacagaaaagagaacacttggtccaacacataaaaagggtgataatattttagagagtttgggtagacttgaatattatttgtttagaacctgaatctcaagtctaagtctgtaacaagatttctcttccagatgatgaggagtctgatgaggaagctgtgaagaaaaccaacaaatgtgtactagtctgggagggtacagccaaagaccggagctttggagagatgaagtttaaacagtgtcctacagagaacatggctcgtgagcatttcaaaaagcatggggctgaacactactgggaccttgcgctgagtgaatctgtgttagagtccactgattgagactactgcaagcccttgcctctcctcccttgcctttgtctcttcagtcctctcacttattctatttcccaaccccctcccacttgtttgtgtgatctcagaactgtgccaagcagacactgggacaaagggagaatatcttgctcccctcctgagtcagcctggtgttgccctttattccccttatgtgcatatgattaaagagttatttttaaaaaaaaaaaaaaaaaaaaaaaaaaaaaaaaaaaaa

SEQ ID NO: 523 - DNA, 1354 bp, Homo sapiens
gcggggacggggtcagtgccaagatgtcgacggcggcggttccggagctgaagcagatcagccgggtggaggcgatgcgcctagggccgggctggagccactcgtgccacgccatgctgtacgccgccaaccctgggcagctcttcggccgcatccccatgcgcttctcggtgctgatgcagatgcgtttcgacgggctgctgggcttccccgggggcttcgtggaccggcgcttctggtcgctggaggacggcctgaaccgggtgctgggcctgggcctgggctgcctgcgcctcaccgaggccgactacctgagctcgcacctgaccgagggcccacaccgcgtcgtggcgcacctgtacgcgcggcagctgacgctggagcagctgcacgccgtggagatcagcgcggtgcactcgcgcraccacggcctggaggtgctgggcctcgtgcgggtcccgctgtacacccagaaggaccgagtcggaggcttccccaacttcctgagcaacgccttcgtgagcacggctaagtgccagctcctctttgccctcaaggtgctcaacatgatgcccgaggagaagctggttgaggccctggctgcagccaccgagaagcagaagaaggccctggagaagttgctcccggcctcctcttgagggctgcctgagctggtggcaccctcccctgggccggaagactgggaattcctgctaagtgtggcttctagagtgtttgtgtgtaccccgcttctgactgcctagggcgagtgggcatcctgtcatcatctccactgtcccaagcagtcactaggtggcggccgggccagctggaacccagcccatcctctcaggcagagcagggtggtccgggcacactgggcctgcctctccagcctcaggatgctcttgtttattctgggctcagaccctcctcttgtacgtctcatcacagctggtagagacccaggagtgcctgattgtcccacaggggtggcgcacagctctgggaccactcagaagatgggatgtgtgggtggaggatgccttgtctcggtcagctcattcctgcctccttcctgagccagttcagggcctgggggagagccagcttggggtaggaagttaataatactgttaatttgggttgttgttggatttactttgctagattttctctttcaccacgtgtgaactgtgggtgaggtttcaaagtagcttcaccccacgtggcttggttcccagggacagtcagggcctcgggggcccagctatgtacaacgaagctgtcgaaggagaagacaataaagtcgctccgcagctgcaaaaaaaaaaaaaaaaaaaaaaagtcgagc

SEQ ID NO: 524 - DNA, 1680 bp, Homo sapiens
  misc_feature (1574)..(1574): n equals a,t,g, or c
tttttttttttttttttttttttttttttctgatcagactctttttattgttttgttttttataaacaagtctcaggtggaaaaagaaagaaagggaggagctagctctctgccttctcagccaattgaaatcgtggaaaccaatgggcttcagctagccccactcatcactgctgggggggaaaagacatccctactccccttccccgtggcactcatgatattctcaatgccccaacaagggtcatcttggttcctctcggcgtttctgtcctggcctttggctctggctccggctctgactccgactccggctccggccagggccccgggagcccctagagctgctggagcccctggaagagttgctgccggccgtggaacatgtgctggtgccctggccccgggacaggaagcttggtctgctgtatgggagccaggcctcttcatctgggtggagcacccgctgggctgccaggggcacggcctggaccgctttcctctccccactgcgctcccgctccagggaggacatgctgcctgctgccctcagctctagggcccagctcgcctcttcctctggcggtggcaagggtggtgggggcaagtccccaggactgttctccctcctgtagggaagagccttgggtttcttccggaatcgagcacggggtccttgaagtgggggagtcatctccccattcccctgccaggttctgcctggggcactgctggctgtgctaggggcaggactggggctgaggtggggtgaggctgcagggccagcacccaagccagcaggcctcgcttcacggatgcccagcatgggctgggatacactgagaggggaactcggcccaaggggcaccytcctgggcatctgatggagatggggcatgtcagttgggggctggggagggtcaggaggtgagggtgtaagagtggctgtggactgctgtccataggaaggtgtgggagagggggtttcccttcgggatggggtgaccaggcaccctccactggagctgggctccgtcaggtgacttctctcaggcattggcgggcaccactcctctggctctgagctgccctccagctcctcctccggcccttctaggcagctcagttcacaagaaggaggaggtgggggcagggcttctggccagttcagagagggcatctgcacaggtttccccagaagcttcactttgcctcccttggctccactgtccccctggctccactctggaggagcgtactggctccagggacccagatctcctgagggatgttgggggaagcccccatggaaggtctgcagctcctmccccgctgggtcaatgktgctatagacaggaccctcgccaggggcgrccgtgcccctggccgtctgagctagatacagggagattccygcttcgttgtaatatctgtcgtccgggtcaggattgctagggcagcagcttcccctgggttcctgggccgaggggcttcgagatgggtggggccacgaatctgccagccatgagtagggggcgggccaaggcccatgggtggcctggaactggctccanagaggccctctgagtgcgggaaggacactgccggtgtgtaggcaaaagaggctcaaacacctcagaatctctccagagacgtcccttactaggaagtagcagaact

SEQ ID NO: 525 - DNA, 1123 bp, Homo sapiens
  misc_feature (19)..(19): n equals a,t,g, or c
ggcggacgcgtgggcgtgnccgtgggcggacgcgtgggctcggggagtgaaggcctcgttgagagaaggtctcattcggtgttttgggaagagagtcgtgtgggcccaggtatcgtagcggcgacacgagagagacgggcggtgtgacagccttccactacctgcacgagtgtattggtctgtctgctatcagctatgccgctgcccgttgcgctgcagacccgcttggccaagagaggcatcctcaaacatctggagcctgaaccagaggaagagatcattgccgaggactatgacgatgatcctgtggactacgaggccaccaggttggagggcctaccaccaagctggtacaaggtgttcgacccttcctgcgggctcccttactactggaatgcagacacagaccttgtatcctggctctccccacatgaccccaactccgtggttaccaaatcggccaagaagctcagaagcagtaatgcagatgctgaagaaaagttggaccggagccatgacaagtcggacaggggccatgacaagtcggaccgcagccatgagaaactagacaggggccacgacaagtcagaccggggccacgacaagtctgacagggatcgagagcgtggctatgacaaggtagacagagagagagagcgagacagggaacgggatcgggaccgcgggtatgacaaggcagaccgggaagagggcaaagaacggcgccaccatcgccgggaggagctggctccctatcccaagagcaagaaggcagtaagccgaaaggatgaagagttagaccccatggaccctagctcatactcagacgccccccggggcacgtggtcaacaggactccccaagcggaatgaggccaagactggcgctgacaccacagcagctgggcccctcttccagcagcggccgtatccatccccaggggctgtgctccgggccaatgcagaggcctcccgaaccaagcagcaggattgaagcttcggcctccctggccctgggttaaaataaaagctttctggtgatcctgcccaccaaaaaaaaaaaaaaaaaaaaaaaaaaaaaaaaaaaaaaaaaaaaawaaaaaaaattttggggggggccccct

SEQ ID NO: 526 - DNA, 737 bp, Homo sapiens
  misc_feature (644)..(644): n equals a,t,g, or c
gaattcggcacgaggttttagataggtccatttgccatatacttcatgtataatcacactgttttttgtcagattggtggaagctcttaagctccaggaacaacttaaggctcctgtgaaaactctatcagagggaataaagagaaaggtatgggccaggctcggggtttccctgtgcacccatggctgggtgccgacgggctgttccttgcattgcagctgtgctttgtgctgagcatcctggggaacccatcagtggtgcttctagatgagccgttcaccgggatggaccccgaggggcagcagcaaatgtggcagatacttcaggctaccgttaaaaacaaggagaggggcaccctcttgaccacccattacatgtcagaggctgaggctgtgtgtgaccgtatggccatgatggtgtcaggaacgctaaggtgtattggttccattcaacatctgaaaaacaagtttggtagagattatttactasaaatamaaatgamagaacctacccaggtggaagctctccacacagagattttgaagcttttcccacaggctgcttggcaggaaagatattcctctttaatggcgtataagttacctgtggaggatgtccaccctctatcttgggcctttttcangttagaggcgatgaaacagaccttcaacctggaggaatacagcctctctcaggctaccttggagcaggtattcttagaactctgttaagagca

SEQ ID NO: 527 - DNA, 1639 bp, Homo sapiens
  misc_feature (1614)..(1614): n equals a,t,g, or c
  misc_feature (1627)..(1627): n equals a,t,g, or c
  misc_feature (1634)..(1634): n equals a,t,g, or c
  misc_feature (1636)..(1636): n equals a,t,g, or c
cgcctccctataagacaaagcgcggccgacgggctccgagcgcggcccctgggttcgaacacggcacccgcactgcgcgtcatggtgcaggcctggtatatggacgacgccccgggcgacccgcggcaaccccaccgccccgaccccggccgcccagtgggcctggagcagctgcggcggctcggggtgctctactggaagctggatgctgacaaatatgagaatgatccagaattagaaaagatccgaagagagaggaactactcctggatggacatcataaccatatgcaaagataaactaccaaattatgaagaaaagattaagatgttctacgaggagcatttgcacttggacgatgagatccgctacatcctggatggcagtgggtacttcgaygtgagggacaaggaggaccagtggatccggatcttcatggagaagggagacatggtgacgctccccgcggggatctatcaccgcttcacggtggacgagaagaactacacgaaggccatgcggctgtttgtgggagaaccggtgtggacagcgtacaaccggcccgctgaccattttgaagcccgcgggcagtacgtgaaatttctggcacagaccgcctagcagtgctgcctgggaactaacacgtgcctcgtaaaggtccccaatgtaatgactgagcagaaaatcaatcactttctctttgcttttagaggatagccttgaggctagattatctttcctttgtaagattatttgatcagaatattttgtaatgaaaggatctagaaagcaacttggaagtgtaaagagtcaccttcattttctgtaactcaatcaagactggtgggtccatggccctgtgttagttcatgcattcagttgagtcccaaatgaaagtttcatctcccgaaatgcagttccttagatgcccatctggacgtgatgccgcgcctgccgtgtaagaaggtgcaatcctagataacacagctagccagatagaagacacttyyttstycaaaataaagtaactgccttaatcttatactcatggcttggagttaccttatattcaggtatatgtgatattttgcctggtttgttaaaattgccccatttagattccttctataattgttcttatagataagtaatttatatatgagctgtgttagtattttttcagtgtgagatctctggattctttcacaataaagctgttgaattttaacaggagtattagtacataaattttctactcaacaattccgagataggattatgcctagtttgtcatatcacagaaaaactccaagttaacttcatgttttggaagggcaggtcgtttttaaagtatttctttttttaactggatgaaaaatcttcatgttaggattaattttcttaatcacctccacactgtacagaggaaactcaagccttaaatgtttaagtaaactctgtctcagttttaggattaaaatacccaccggtggtgtgatgatgccatataccgcagggcttgcttctgtcaagtgtgactctatctcagtaattaaaataagtgctgatctactgattttttttaatgggattcatttctaaatgggcattatnaatagagcttggncattttnanaac

SEQ ID NO: 528 - DNA, 2482 bp, Homo sapiens
cacactttgagcgcacttctagtaaacgggtctccaggagtctagatggagctccgattggtgtcatggaccaaagtcttatgarggattttcctggcgctgctggggagatttcagcctatggacctggacttgtcagcattgccgtggtacaagatggggacggcaggagggaagtgagaagcccaactaaagccccacatttgcagctcattgaaggaaagagttcacatgagactctgaatatagtggaggagaagaagcgggcagaggttgggaaagacgaaagagtaatcacagaagaaatgaatggtaaagagatatcacctgggagtggtcctggggagattcgtaaggtggagcctgtgacacaaaaagactccacctccctgtcttctgagagcagcagcagcagcagtgagagtgaggaggaagacgtgggagagtaccgtccccaccaccgagtgaccgagggcaccatcagggaggaacaggagtatgaagaagaggtggaggaagaaccccgcccggcagccaaggtagtagagagggaggaagcagtgcccgaagccagcccagtcacacaagcaggtgccagtgtaatcacagtagaaacagtgatccaggaaaatgtaggtgcccaaaagatacccggagagaagagtgtacacgaaggcgctcttaagcaagacatgggagaagaagcagaggaagagccacagaaagttaacggagaggtgtcccatgttgacattgatgttttgccacaaattatttgttgttcagagccaccagtggtaaaaacagagatggtaacaatttctgatgcctcacaaaggacagaaatctccaccaaggaagtccccattgtccaaactgagaccaaaaccatcacatatgagtctccacagattgatggcggggctggtggtgattcgggcacgttactgaccgcacaaaccatcacatctgagtccgtgtcaacaacgacaaccacacacatcaccaagactgtaaaaggtggaatttctgaaacaagaattgagaaacgcattgtgatcacaggagatggagatattgatcatgaccaggcactggctcaggcgatcagggaagccagagagcagcaccctgacatgtcggtcacaagagtggtggtacacaaagaaacagagttggctgaggaaggggaagattaagtaagaaagtcattttttaaacaacactcaactttgtgaacccctgaagattttttgaccgttccaagtcttaatgccacaccactattccagcgaatttatgctacaactggtaacaatgaccagaagcctgaagaattaaaatgccaacaccaaacctttccttaccagctctggtctatattgctcccatgcatttaatatattattttgttttataaccacttctaaatattctcagttctttctttttgttgttgttaattaaggggttttggttttgttttctgtttactttgtgtgcaactacctgcttttaatgactcactttgatcaaatgacagtgaacaaagccagcccaagctgktaaggtgctgttcacttgaacaggtgctgttgcgcagaaaggaaactctgtgactaatttagatagtggctttccttcttctggattcttttcattgaattctcacagtaaatatttacggagttttcaaattgcagcaaatatactgtatgagaaaatattaatacagattaaaagcctttcttacatcttgaaaattttctaatatttgagaatttcacagggatgttttttatattggacccttttgactttccagtcctgtgactttctacttttagtagagagtcagaatctctggactggagaataatgaagaagttcactgactgtgcactgtgcttagagaccctgccgcaccacagtgccaatgcttgtcagacacatgcccttcggcagcattccagaacaggagggaagagaaagagaaaactttcttcccttctactaaaagattcaggcagcttaaaaccttagtgctttctttcttaacatacccamatttcaattctttccattatttgaacacttgggtagaactcttgctttgtattaaacctctttgtctacacatgtaaaacttaccttttgttattgagcaggcctatctctttcagatagttttatgattcacacaggtttgaggatgctggggagagggggagggggctgtggtggtgttctgttggttacaagaaagttataccatttaaagctggcaccagagacccgatagggacttattaactatattgaacattttttcctttgcctttgaccctatgtatagttacgatgccagattagatttatagcagcctcaagttgtattaaatgatattttgcttcctgtaatactattataaaataaagtttgtttattctctaaaaaaaaactcctctatctcaatcacaa

SEQ ID NO: 529 - DNA, 1259 bp, Homo sapiens
  misc_feature (1256)..(1259): n equals a,t,g, or c
ggcaaaccaagaagatgatggacaaggtagatggcccccaggggaggtgggaagcagagtcttcagtacacggcccgtccgaattatttctcagcctttggggtgcactggtccccagcatcatgggaaaatctgagcttctcaatctagaccaaaaagggaatctgaaaatgccttctactgagtcaggactgagttcttttagctagaaacctgaatctagctctcttctataaggtaattctagcttttctctttctggctttgtttttcttaactccagagaaagaataatctccatttatctacacagaacaagttggaggcttccctcttctcacccaagaaggtctgggttgtaagctgctctcttcaaacccaattttcaggccctactmttttccaagtcaggagcttgaaaggggtgaaaaggaaaggccacaatagtagtttcttccttccctcaaagggcccaactcctcagaataccagaagctaccacttgtcactcatcgaaacatgwgggatctttctgcagttatctaataggcaataaataccaaataattcaaatttagaaaaaagttgctaaggggtagaacccatcattttgatttggacagttgtggttggggaagtctggttgaatggatggttcctggccgtcagtaagacccgatgagagttgagcccgacttcccctctgggaccctgtcttcccaggtggagtttgtccatatgctcaatgctaccatgtgcgccactacccgtaccatctgcgccatcctggagaactaccagacagagaagggcatcactgtgcctgagaaattgaaggagttcatgccgccaggactgcaagaactgatcccctttgtgaagcctgcgcccattgagcaggagccatcaaagaagcagaagaagcaacatgagggcagcaaaaagaaagcagcagcaagagacgtcaccctagaaaacaggctgcagaacatggaggtcaccgatgcttgaacattcctgcctccctatttgccaggctttcatttctgtctgctgagatctcagagcctgcccaacagcagggaagccaagcacccattcatccccctgcccccatctgactgcgtagctgagaggggaacagtgccatgtaccacacagatgttcctgtctcctcgcatgggcatagggacccatcattgatgactgatgaaaccatgtaataaagcatctctggggagggcaaaaaaaaaaannnn

SEQ ID NO: 530 - DNA, 2644 bp, Homo sapiens
  misc_feature (218)..(218): n equals a,t,g, or c
  misc_feature (233)..(233): n equals a,t,g, or c
  misc_feature (2611)..(2611): n equals a,t,g, or c
ggcacgagaaataaataaaaataatgtaaccaacaagtgatagctagtaaatggaagaactgtgagatgtagttaaattagcgatgctttagatattttcataaaagcagtcatatcatggataaataaaagttgaaactcatattgtgatttccctaatatttgatagaattatttatatttcataggatttttgttttttggtttggaaattaganaatttactttttgcnatttccctccaggtaacttaggatatatttagtacattacgttcctcttgcttgtatcgasatcattcaagwgctcttcaaagsatttgttcagatcttcagtactggccagttttcatacagtctcggggttttaaaactttgaaatcaaggacacgacgtctccagtctacctccgagagattagctgaaacacagaatatagcgccatcattcgtgaaggggtttcttttgcgggacagaggatcagatgttgagagtttggacaaactcatgaaaaccaaaaatatacctgaagctcaccaagatgcatttaaaactggttttgcggaaggttttctgaaagctcaagcactcacacaaaaaaccaatgattccctaaggcgaacccgtctgattctcttcgttctgctgctattcggcatttatggacttctaaaaaacccatttttatctgtccgcttccggacaacaacagggcttgattctgcagtagatcctgtccagatgaaaaatgtcacctttgaacatgttaaaggggtggaggaagctaaacaagaattacaggaagttgttgaattcttgaaaaatccacaaaaatttactattcttggaggtaaacttccaaaaggaattcttttagttggacccccagggactggaaagacacttcttgcccgagctgtggcgggagaagctgatgttcctttttattatgcttctggatccgaatttgatgagatgtttgtgggtgtgggagccagccgtatcagaaatctttttagggaagcaaaggcgaatgctccttgtgttatatttattgatgaattagattctgttggtgggaagagaattgaatctccaatgcatccatattcaaggcagaccataaatcaacttcttgctgaaatggatggttttaaacccaatgaaggagttatcataataggagccacaaacttcccagaggcattagataatgccttaatacgtcctggtcgttttgacatgcaagttacagttccaaggccagatgtaaaaggtcgaacagaaattttgaaatggtatctcaataaaataaagtttgatcaatccgttgatccagaaattatagctcgaggtactgttggcttttccggagcagagttggagaatcttgtgaaccaggctgcattaaaagcagctgttgatggaaaagaaatggttaccatgaaggagctggagttttccaaagacaaaattctaatggggcctgaaagaagaagtgtggaaattgataacaaaaacaaaaccatcacagcatatcatgaatctggtcatgccattattgcatattacacaaaagatgcaatgcctatcaacaaagctacaatcatgccacgggggccaacacttggacatgtgtccctgttacctgagaatgacagatggaatgaaactagagcccagctgcttgcacaaatggatgttagtatgggaggaagagtggcagaggagcttatatttggaaccgaccatattacaacaggtgcttccagtgattttgataatgccactaaaatagcaaagcggatggttaccaaatttggaatgagtgaaaagcttggagttatgacctacagtgatacagggaaactaagtccagaaacccaatctgccatcgaacaagaaataagaatccttctaagggactcatatgaacgagcaaaacatatcttgaaaactcatgcaaaggagcataagaatctcgcagaagctttattgacctatgagactttggatgccaaagagattcaaattgttcttgaggggaaaaagttggaagtgagatgataactctcttgatatggatgcttgctggttttattgcaagaatataagtagcattgcagtagtctacttttacaacgctttcccctcattcttgatgtggtgtaattgaagggtgtgaaatgctttgtcaatcatttgtcacatttatccagtttgggttattctcattatgacacctattgcaaattagcatcccatggcaaatatattttgaaaaaataaagaactatcaggattgaaaacagctcttttgaggaatgtcaattagttattaagttgaaagtaattaatgattttatgtttggttactctactagatttgataaaaattgtgcctttagccttctatatacatcagtggaaacttaagatgcagtaattatgttccagattgaccatgaataaaatattttttaatctaaatgtagagaagttgggattaaaagcagtctcggaaacacagagccagggawtatagccttttggcmtgggtgccwgggcttcacatctgtaatcccagcacttttgggaggctgaggccggtngggttgcttgagggccgggggtttcgagacccg

SEQ ID NO: 531 - DNA, 3375 bp, Homo sapiens
  misc_feature (2)..(2): n equals a,t,g, or c
  misc_feature (22)..(22): n equals a,t,g, or c
  misc_feature (25)..(25): n equals a,t,g, or c
  misc_feature (54)..(54): n equals a,t,g, or c
  misc_feature (62)..(62): n equals a,t,g, or c
  misc_feature (267)..(267): n equals a,t,g, or c
  misc_feature (3371)..(3371): n equals a,t,g, or c
  misc_feature (3373)..(3373): n equals a,t,g, or c
gnggggtgagaggagagggaanacntttccctcccgggttttaataggcggggnttttgggngagggaggagccaatattgttcccctaacgccccccttcccttttccggggtttttggggatgggggaactttccccaaacaataaaatttttttttaacccccaataagatttggcccgggcaaattggccaagggggccctgattagaggtattaatttcgcccgcacccaaaggggcctgggggttgggcctttgggtcctnttacttcggtcggtcaagctgcaattaagttatgggatgggcaagaaaagggtttgggtaaaagtagagaaggatcaaggacggatgatgaagtagtacagagagaggaagaagctattcagttggatggattaaatgcatcacaaataagagaacttagagagaagtcggaaaagtttgccttccaagccgaagttaacagaatgatgaaacttatcatcaattcattgtataaaaataaagagattttcctgagagaactgatttcaaatgcttctgatgctttagataagataaggctaatatcactgactgatgaaaatgctctttctggaaatgaggaactaacagtcaaaattaagtgtgataaggagaagaacctgctgcatgtcacagacaccggtgtaggaatgaccagagaagagttggttaaaaaccttggtaccatagccaaatctgggacaagcgagtttttaaacaaaatgactgaagcacaggaagatggccagtcaacttctgaattgattggccagtttggtgtcggtttctattccgccttccttgtagcagataaggttattgtcacttcaaaacacaacaacgatacccagcacatctgggagtctgactccaatgaattttctgtaattgctgacccaagaggaaacactctaggacggggaacgacaattacccttgtcttaaaagaagaagcatctgattaccttgaattggatacaattaaaaatctcgtcaaaaaatattcacagttcataaactttcctatttatgtatggagcagcaagactgaaactgttgaggagcccatggaggaagaagaagcagccaaagaagagaaagaagaatctgatgatgaagctgcagtagaggaagaagaagaagaaaagaaaccaaagactaaaaaagttgaaaaaactgtctgggactgggaacttatgaatgatatcaaaccaatatggcagagaccatcaaaagaagtagaagaagatgaatacaaagctttctacaaatcattttcaaaggaaagtgatgaccccatggcttatattcactttactgctgaaggggaagttaccttcaaatcaattttatttgtacccacatctgctccacgtggtctgtttgacgaatatggatctaaaaagagcgattacattaagctctatgtgcgccgtgtattcatcacagacgacttccatgatatgatgcctaaatacctcaattttgtcaagggtgtggtggactcagatgatctccccttgaatgtttcccgcgagactcttcagcaacataaactgcttaaggtgattaggaagaagcttgttcgtaaaacgctggacatgatcaagaagattgctgatgataaatacaatgatactttttggaaagaatttggtaccaacatcaagcttggtgtgattgaagaccactcgaatcgaacacgtcttgctaaacttcttaggttccagtcttctcatcatccaactgacattactagcctagaccagtatgtggaaagaatgaaggaaaaacaagacaaaatctacttcatggctgggtccagcagaaaagaggctgaatcttctccatttgttgagcgacttctgaaaaagggctatgaagttatttacctcacagaacctgtggatgaatactgtattcaggcccttcccgaatttgatgggaagaggttccagaatgttgccaaggaaggagtgaagttcgatgaaagtgagaaaactaaggagagtcgtgaagcagttgagaaagaatttgagcctctgctgaattggatgaaagataaagcccttaaggacaagrttgaaaaggctgtggaaattacaaattgtggaaatattagtatcagcatttaagagaaagttattttgtgaacaaattaagctgcagctggttactttgtaaccattagaatggtaaaaatttaattaatgtaaattattgggagaaagcttaaaactttcgacaatactgctttgttaataacttgttacaaattaaattttatgtttttaaaaggtggtatttaaacttctgactagaaaattcagattatcaagtaagtgcccctacaaattctcctaaaccttaagaaaagctatttttatgacctgcttctgtgtttatgatcttaagtgataaagtcttagacagttgaaagacaattgctcaatgaccttacctgttgatattaatttatatgacttgatttctttccctaagattgaaaaggctgtggtgtctcagcgcctgacagaatctccgtgtgctttggtggccagccagtacggatggtctggcaacatggagagaatcatgaaagcacaagcgtaccaaacgggcaaggacatctctacaaattactatgcgagtcagaagaaaacatttgaaattaatcccagacacccgctgatcagagacatgcttcgacgaattaaggaagatgaagatgataaaacagttttggatcttgctgtggttttgtttgaaacagcaacgcttcggtcagggtatcttttaccagacactaaagcatatggagatagaatagaaagaatgcttcgcctcagtttgaacattgaccctgatgcaaaggtggaagaagagcccgaagaagaacctgaagagacagcagaagacacaacagaagacacagagcaagacgaagatgaagaaatggatgtgggaacagatgaagaagaagaaacagcaaaggaatctacagctgaaaaagatgaattgtaaattatactctcaccatttggatcctgtgtggagagggaatgtgaaatttacatcatttctttttgggagagacttgttttggatgccccctaatccccttctcccctgcactgtaaaatgtgggattatgggtcacaggaaaaagtgggttttttagttgaattttttttaacattcctcatgaatgtaaatttgtactatttaactgactattcttgatgtaaaatcttgtcatgtgtataaaaataaaaaagatcccaaataaaaaaaaaaaaaaaaaaaaaaaaaaaaaaaaaaaaaaaaaaaaaaaaaaaaaaaananaa

SEQ ID NO: 532 - DNA, 730 bp, Homo sapiens
  misc_feature (151)..(151): n equals a,t,g, or c
  misc_feature (257)..(257): n equals a,t,g, or c
aattcggcagaggtgtctcctgggttcaagcgattctcctgcctcagcctcccaagtagctgggactacaggtgtgtgccactaagctcagctaatttttgtatttttagtagagacggggtttcaccattttgaaccaggatggtcttgnatctcttggacctcatggatctgtccacctctgcccctcaaagtgctggggattacgtgatccacccgcctcagcctcccaaagtgctgggrttacaggcgtgagntgtgcctggcccaccccagcattttttaagatgtatgtattcgttgttctgtttttccagatgattctgtcgtaaagtgatgctatgttgtcgttacaacatcaaagtgattttacggtttttgatgggattattcaagtgtcagaattaactgttcaaaatgttctgaatcatgtagatacatggcaggtaactgtttatgggagaaaagtacagtgctgttacgtggcactgtacagtcatgtgccacgtaacagcgtctgggtcagtgacggacacttacctgacagcggatccacaatattctcgtgcagtgtgtttggaatcctggtctgggctctcgkcgttggccttgtagatcaagtaggggaagtgagtgatgttcagtcatgctgctgggacacttggttttccagatgaaaacacataaataaaactacatgcaccatcaaaaaaaaaaaaaaaaaaaaaaa

SEQ ID NO: 533 - DNA, 1130 bp, Homo sapiens
gggtttctggggattggattcaaagagcagaagtatgatgccaggggctggtaaggactcagccatatagagatttcagctgcattataatgtatatttgagaaattgagttcttattatcagaaaattgacctatgtaatgaaatactagaagaaaactctaaattagaatggctttgttatgaatttttaatgataagtactaacacttaaaagggaaaaaatttttcaaagaaaatgcctaaaaatgtgttgtatctgagatcatcatatatgtagtattacagtgcaaacactattaatgttaatgaggtaggtggatttttttaatgaaaaaacttgaaatattatcaggttgtccccatttatggaatttaagcttgtcagaaagatccagatagctatattaatattttatctgtatttggttgcggttgcttttaaaaataagttttcttataagtcatttcaattttttggtttagagtccatatttcaaaataaaaagttaaaaaaagagtaccttatgtaatttagcaaggtattccataaactcagggaggaaaaaaaaaaaactaagatgagaggctagttataatgatctttatttatatattgcaggaaatgatttcctctctcacaacttagcataatttactgctaatatttttagccatgggttgaaaaaaattaagtggttttgtaagtgctaatcctttgttactcatttaaactggtaaaatgtagtccccgctccctgaggaggacctgtcmaaactcttcaaaccaccacagccgcctgccaggatggactcgctgctcattgcaggccagataaacacttactgccagaacatcaaggagttcactgcccaaaacttaggcaagctcttcatggcccaggctcttcaagaatacaacaactaagaaaaggaagtttccagaaaagaagttaacatgaactcttgaagtcacaccagggcaactcttggaagaaatatatttgcatattgaaaagcacagaggatttctttagtgtcattgccgattttggctataacagtgtctttctagccataataaaataaaacaaaatcttgaaaaaaaaaaaaaaaaaaaagggcggccgc

SEQ ID NO: 534 - DNA, 886 bp, Homo sapiens
cccacgcagtccgttcctgcagcccctgttgattggagagctggccccagaggagcccagccaggatggaccccaggacgcccagctggtggaggacttccgcgccctacgccaggcggccgaggacatggagctgtttgaggccaagcccgccttcttcgctctcctgctgggccacatcctggccatggaggtgctcgcttggcttctcgtctacctcttcggcccgggctgggtgcccagcacccttgccgcccttgtcctggccacctcccaggctcagtgctggtgtctgcagcatgacctgggccacacgtcggtcttcaggaagtcccagtggaaccacgtggcccagcagtttgtgatggggcagctgaagggcttctcggcccactggtggaacttccgccacttccagcaccatgccaagcccaacatcttccacaaagacccagatgtgaccgtggcgcccgtcttcctcctgggggagtcgtccgttgagtacggcaaaaagaagcgccggtacctgcctaccatcgscagcacctgtacttcttcctgatcggcccaccgctgctcaccctggtgaacttcgaggtggaaaatctggcctacatgctggtgtgcatgcagtggacggacctgctgtgggccgccagcttctactcccgcttcttcctatgctacgcccccttctacggcctccctggggccctgctcctcttcgttgctgtcagggtcctggagagccactggttcgtgtggatcacgcagatgaatcacatccccaaggagattggccatgagaagcaccgggaytgggccagytytcagctggcggccacctgcaacgtggagccctcgctcttcattgaatgggtcagcg

SEQ ID NO: 535 - DNA, 1252 bp, Homo sapiens
tttttttttttttttttttttttttttttttttttttttttttttttttttttttttttttttttttttttttttttttttttktgaagggtttttgtttgtttaatacatctgaaaagaatgcatatacaaagaattgagacatgagaaagcattggttcaacactaatgcatctacaagaattaggtttgggaaggtgggaaagattacctcaacatttttaaaaattggaaactgcaaccaaaataagctgaaaaaatccctattaacacttaagaagagtctgcattaagagtctttccatgatttttattaaactagagagcctcacctggctgctctagggttcctcatatgcaaaacagaaataaggggattcccctgactggtccccatgttgttaagtgttctccccacccccaccctacccccagcttcttaatgaagcaggcctccatcctcctaacttgagaggatgtgaatcattccacagatgtctgtcttctagcaccacccctcgtatttcctctacataacaggtcttcagctgcattctaggaacaccatatactactgagctgcaaatctatgctaagcatataagacaatgactgaaagggaaaaaaatttttttaattacaaactcaattcatttggtgcatttcaaaggtgcaatacttttcttcatttatcagtgaaagaagttagaaattaacttcccaaaaaaatcagcaaatggcaaacaaatgtccttgaaagtcacagtcacatatagtgcgtcctagaaaagaggaggggcaagatgggctccacccactttcatgagtttcatcaaatactggatctactcaagggtggagagaaaaggcaactttcaaaaaggagtatgttattaaatgaggcatttactatactccttcctaagagcaccagatggggaacatgttttctaaactagatctaggaagtggaatgtggaatcaatccgtcctcctccccttaagggctaaccactggttaatgaattaaaaaaacaagactaaaaaacaaaccccacacacactcccccccaaaaaaaagaggagggaaaaaaacaaaacaaaacactaagatgtcccagattactctccagagtggaaccagggagcagcttcaacaattccaattagtctgttacagagtcatccacaagcatgccttgcttttaaacaacaaaaaaaaaaaaaaaaaaaaagggcggccgctcgcgat

SEQ ID NO: 536 - DNA, 672 bp, Homo sapiens
ccccctcgagacccctcccatgtcccttcctggcctggccggagccccacctcgtgcctttatccgccctgtcccttcctctctgcgcatctcacccgcccggctggcccccacccccgactctgaatcccgggcgggaggaggacccccgcaccgccccctccccagcgtgtaagtggctctgctattgtgcgtccctggaagtggggacccccttgtccctcctccctcccctgttgtctggccgtcgtcaaccccaccttgactgagtgttgagcccgtccttgggctctggtccctgcggggcaggctctcccgggcccacggggcggacgctgcataccaatttgccctgcaccgcctgtcccggagacggagcccgaaggcctgccatggcggctgtgtcgaggatgcgtggcgcctgccgtggcgggacagcgtgggcaggctcatttctgcccccaacccgggccccaggacaggtcagcgcgccctgccccggtgcccaccgctgccccccatccgccctcctgccacttgcccctgacccccctgccgtgcctcccgcagccctcccatgccgttccactcctccctgcctctgagccgaacatgataataaaagctattattgagcgcttactgcatgccaagtagcgtgctgagttggca

SEQ ID NO: 537 - DNA, 1445 bp, Homo sapiens
atgacgcagttagtcggctgcaatggcgccggtgaggcggtccgcgaagtggcggcctggtggtattgaggcgcgtggtgaaggggtttccactgtcgggtacaggaataagaatgtgagacagaagacatggcggcctaaccacccgcaagccttcgtggggagcgttcgcgagggacaaggctttgcttttcgaagaaaactgaaaatacagcaaagttacaagaaattgctacggaaggaaaagaaggctcaaacgtcactggaatctcaattcacagatcgatacccagataatctgaaacatctctatttagctgaagaggaaagacataggaagcaagcaagaaaagtcgaccatcctttgtcagaacaagttcaccagccgttgcttgaagaacagtgtagcattgacgagcctttatttgaagatcagtgtagctttgaccagcctcagccagaagaacaatgtattaaaacagtaaactcctttacaattccaaagaaaaataaaaagaaaacatcaaatcaaaaagcacaagaagaatatgaacagatacaagccaaacgtgctgctaagaaacaagaattcgagaggagaaaacaggagagagaagaagcccaaaggcagtacaaaaagaagaaaatggaagtgtttaaaatactgaacaaaaagactaaaaagggccaaccaaacttgaatgtacaaatggagtaccttcttcaaaaaatacaagaaaaatgttaaacattttgttcctacaggttaaaatatctgctgcctattaggttcttctgtgacatgtgcctcccagcagtgaactaaatttgtcgacataaactggattgctaaactatgctaaatataagatgttcacatatttttattatggtaaaaaattttctaaatatgttctacatgtttcttatttatttgcctctgaaggaaggttggcctgaagaactgaaagaacctcttattttgcaagacaggcccaagcatgtaatacttttgtaccatatgagatttatatgaaataaattttttaaaaataaggaatcagagctatcaatgaagcatttcaatgaaatatttcaatttagtaaacagttacgttgttttaaaatttattttaatgatgagggaggcaaagactcctcttggactttttatttattttaagtacatgttacagggtgatgggtgctgaaataaactgccctcaccatataacaaagcgaccttcacaaagcagtgaactcaaagtctgatatttataaacattcccttaaatgggtgtacatggcttgttagtctaaggtcttttaaataatgatggaaaccccacagtgtcacagcaagaattaagctttccagttcctatggaccctatactttaagaacattatctctgtctcccttgttggtacccttgtgagctgag

SEQ ID NO: 538 - DNA, 2345 bp, Homo sapiens
tcgctcatatagggcgaattgggtacgggccccccctcgagtttttttttttttttttctggaaaacaaggtttttttttatttgtagctatagctacaacttggcagcatgggggagggtgggaatgtcctggagggtctcccagccctccgcaagcagagtacaaaggctgctcggggggccggccgagggcgcgggtgcagcagtgaaagcagcagcactaaacctggtgcccccctcaggtggggtgtctggaagacggtgggcaatccctgcaggatgggcgaggaccagaccccagggcggggatcctgcatccctagaccatgttgggtcctgggtcagggcacctgggatgctagggaggggttggaaatgggaggggctagacatcaaaacaataactgaggtgggggcaggtggtctcagtgtgggtggtccacaatggggcatggactgcggtctgaagagggcctgtcctcactcaggtctgggctctagcagtgtggcacttccgacagagcacgtgaccgtccagggggaagcagccattgtcatctgcctcaatcgacaggggcttcccgcagtcctcacacttgtaacacttcatgtggaagttcttgtccagggcgaccactcgcacagtctcatctcggccaggctcaggcatgatgggctcagagcagacggagcacctcggggcgtactgcttgtggtagtcggggacacagtggggccggttggcctggtccacgatgaaggaggtgccctccagggggcgggcgcagaccacacaggtgaagcagtgcgggtgataggccttgcccgtggccctcagcatgcggtcagtgatgggctccccgcaggtgttacacttctccagggtgtcagtgtaacagccctcgcagtacggcgccccctccagactgtagaactgctggccctggagctgctgcgcacactggtggcaggtgaagcaggcgatgtggaacagctgccctagagcgcggacggctgctgcgcccgggccaggggttgatggcatcggccgcagagttcgttgacagccacattctgcctctgaggatgctccatgtcctgcattagctgctgggtcagctgctccagctcctccacctccttcagagtcaggggccctggggccccaggggagcgcacctggttttggttctgagccggtgggggcacggggtgctgcttctcctgcactcggggcttctccctctgctgggcataggtgaagctgggaggttgaggggagcctgtgccagcagaaagagcttcggggtgccccaatttttgatttggttgtgacccagatccacctggggctccaggactgaacttggaagccacaggagtaaacttaggagtcactggagaaaacttaggggctggagccggagatgaggctgggggccctcggggctgggtgttagccaaagacacaggctgggtctgggactggacatggagttggacctgaggcttgggctggggctggggctgaacatggaactgtgtctggctctgagccggagccggaacctggggcagaggctgggagctggaaggggacttccaaggaggcaggggtgctgtgcccccggctgcaggcttggtactggacttggaactgaatggagtggccactggtgggggcacatatccagatgacacccgggctttgaaaggatcattcttggtcatgtcatccagcagtgaggacagagagtcgatctccaaatcaatactgctcaccttctccctgggctgtggtgggggcggtatgggggcctcaggccctccctcctcctccggaggaggcggcggggaagggaagatctcctcctccagaggcgcagggggaaatgattcctcgatcgggggagggggcggcgggaaggcacctcccagagcaccctctgcatcgtcgccatccccagcaaggggaggtggaggcaggggaaagtcttccgggggcggcgggggaatctcgcccacccggcccatctgtgcgcgctgggccccgggtgccgggggaggctcgctgtccccgggccggaagggattcactttgggctttggggccaccacagggccgaacttcttctgcggggcgtaaaaagccggagccgagaccgaaacggagatcgcgggagacgggcggggggccgccatggccgggccggcgcgcaggccggagcgtgcgcgccgcgtctcgggtggccgcctcggcgccgggtccgcagactctgcgtcccggtccggagcagcctccagccgggcggggagggacacacggaaggaggagggagggaga

SEQ ID NO: 539 - DNA, 402 bp, Homo sapiens
gccgccagtgtgctggaattcgcccttgagaaggtgccggggggacagggyttgcagcagaagcaagagttgtggaaaatgagcttgtcggccaccagccgctccatggggtacacggtcttctggcaggcggcgcaggtctccttcacctgggcccgcaggctgaaggacttggagcgctgcaccgtgctgctgccgccgcctttggcgtcatgagagggggtggcctgggcggctcctgcagcctggaacatggctcgttggaggtggaagcctcgggtggagaagcggcacccgctgggttctgcaagcggacgcgtgggcggacgcgtgggtcgacccgggaattccggaccggtacctgcaggcgtacctttctatagtgtcacctaaaagggcgaa

SEQ ID NO: 540 - DNA, 2023 bp, Homo sapiens
ttttttttttttggagattttaaaaacactttatttaataaaagttaaacatacaaaactgaaataatacacatcctaaaaattaccttcttccattaataggaagacccttttctatgcatgtatttggcttaaactcaactcaggataactgtgatgatgttcacttacaccaacaaatgcagacaacctgatctaattaacaaaaattacaaacagctaaatgaacataatatacagggaaattatcgtcagattaatgcacaagaaatacaagaaatttttaatgatgaaatattcagtattcttgttcattaatttagccttgtgtttttacaaaaatagtatctacactgtatacagggctatacatcagctttttgttctcccatataaacatcacacatccaaaacatggtaccactgccgtaaatggaaaaaacaaaaaacaggaaaaaagcaaacatacaaaaaacaaaaacaccttagaaaagggagctcatcctaaggtttcttacataaaactaagagtacataaaaataaaacagctagatcaattttagagatggcctaataggcctgggaaacaagttattgaggaaaaacctcaaaacaaactttgccatttacaaattaacctatctttaagcttaactgaacgacagctaagttttaaagctgaaaataagaaaaatgaaaagatctcttttagcaggttggtgtttttgccttggtgttccaatgaattgctagagtatgtgtcaagttcaaagcatctgaaaatttcaagttacaacttacaaaaagtacayaccataggttaagtaggcgcctgatattaggaagatcaataattcatctaagtgctgtatgaaacagcatctacaaaagttgctttattcaacaaactttgagggaaccgtggtactgataatgagaaaagttaaatgaatagcagttatcaaatgcaatttcttcacgtttcattctactgaagccaaccaatgacgacaatggtatcttgcttactcatctaacaaataatttacctttagaaaaatataaggataaaaaggtaaatgtaaagccctgcagagatgaaatccaacagtttttctgattattgaggcatcaaatgcctgacattgtatttagaggtatcttgatattgtgtcataggtttatcagcaattccacaggttcctactccaactttaccagtcacactctcaggtgaagcaaaaatactcctctttacctggccttttttgtttttagaataggctctgttgttgaattgttgccatttcactttctggtcctctctttcctgctcaagttcttttattctctgagcttttttcaaagctttcttctttttatattcacgctgctgggcaatcatttctttttttgacatgggtttgttgccactgtcctcctttgccttccttccttcttctacaggcttgaggttcaacagtggagtcacttcagcattgccataaccagcaaaggtgattgcagcggtgccattttcttcatctatctcctcaatctccgcttcataacactgtccatcttcactccagactgccatacacttgtctcctactttccatgaatgagtaggttgagtagaagcaaaactgtctgaacttgcaagcgtctcagaaggttgagttgacagaaggtctttggttagttctataacttcttgtaaatctttcttcaattttagcaaatcttcattttctccatttccagataatgcagcttcaacttgctggagctgagctttgtagcttgccagctgctttgctaaatcctctgacatcttgtgtggggctgggggcggggcggcgggaaggggtcggggcaaatgagcccagtggtagtggcggtggcagcagcagcagtagcagtagcaggaaaatcaccgcgacgacagcaaggcgacccggtctgaaaaggaagaactcggtcggcggcgagggggaagggaggaacgccctcgtgccc

SEQ ID NO: 541 - DNA, 1653 bp, Homo sapiens
tttttttttttttttttgtgaatatggcggtgagtttcctttaatcaaagacaaccatgacaaatttattaactatcaaaagctacattttactaaaaacaatctgcctttaaaaatgttgaatcatacaatatgtacaatacatgccgctttccgttttggacttcactatccatttgagtccttcagctagcatcaagcacttggcttctgctgcctctgacttggagtaatcacaggctctgaaatctcaaaggtcttcacaatctcctggcagacaataatgaacatttaggcactgggcttactgcaagtgaaggcagagtcagaactatgcaggggcaacaggcagagctttacctcccagtcacggtaactcaaagctataattccttgatttctaacttgtgtgttatgttcaaatccctcattttcttcattaatactaacaggctctgtttgaaagacaaatttttcaaatttatcaaaggttattaaatcggaacaggtaatctaaacggaaactgatgaataatagcaatgaaacctgtattgaaaagatacttataatattacatactttttaggatttcatgcattatggagctgctgtagtattattacagtagccagtcattccatctgtttccatttcaaaaaacatgtagtagagtaacacattccagacatttgaaaakctgcatayctatgtgtcaaccacagagctaagccctagtgagtccaataggacattgagaacattgaaagtagcaagtaagtgcgatggaaatattcactcyccacaggagaccttaggaggacagagtaatggagagtgtgaaattattcaggtaagaatgaaagattcatagaacctcaaagagaaaagaaggtgccggcatctgacaaaacgtgattagaaagagggatactacaaaaatgactgcaatcaccaactttctaaattaagatctgagggaaattatatcatttctttgttaatatttacagcagatgttgaatcaatgatatagatgaatccatcaaaattttagacgctggccatgttttcagtatcttcaggtagttgagcaagatacaatattgtaaaagttaatctacattgaaaattcatttacatttagtaaaatacttaaattctactaacaaatatatttwctctaaaactaatttttccaaacatagtatcatttayctattactggcagtcggtcttggtcaagtcttattcttgcaaaaccatcccgtataatgaaggaaacatgaaagatgttttccactgtacgggggaaagaatgaggatcaaccacaaagtcaaagaaggacattggggtatcaggatcttctcgaaaatatgtctgcaacaatcccaagattctttctacttctttctctgttgcttcttgatgagattcttccattcttcttaactgggcaggcattgccctctcctcytgtatcacaggaacttttcttggacgatcaactcgtggctttggcacagggcactctccgtatattgaacccaacctaatgaaaagtatgctttcatttattttttttgcctgttgtttgttaaacaaactaactttactaactaaaagtagtttgcatggtatagtcaaattcagc

SEQ ID NO: 542 - DNA, 1413 bp, Homo sapiens
  misc_feature (28)..(28): n equals a,t,g, or c
  misc_feature (1236)..(1236): n equals a,t,g, or c
  misc_feature (1267)..(1267): n equals a,t,g, or c
  misc_feature (1387)..(1387): n equals a,t,g, or c
  misc_feature (1399)..(1399): n equals a,t,g, or c
tttttttttttttttttttttttttttntttttttttttttttttttttttttttttttttttttttttttttttttttttttttttttttttttcaggaaccggtatttattatcaaagtcatattcgatgtcaacaagatgccacaactacaaaaaaaattgcgcacattgcaatctcaatgcaaacagtcaaatggaaccccagtcattaaaaaagtaattcaaattaccccaaaaagcaactgaattttttaaacatctttatacatccagccaacaaattaaaatggttaacaagaaaaaatacaaattcagaggtctcgtatcgatgtttaaaaaaggcaactgcttaagcgtttctatcaattcgaacgtcaatctctcggccactcagcttcatgccattcatcatccggcaggctctctcggccacctctggcgactcgaacttaaccacaccacaccccttggacttcccattctccatcttgatgtcggcgtacagcacgtggccgcactcgttgaatttgtcctttagcatcttccatgtgaaatcgaatggcagatttctcacaaatatctggcaggccttcctggccaccccaggagcatggcctccagctccaccaaaggaacctgcgaagcttcctccgaagttgccacgctccatctcgatggcacggtcaaagctggcaccgccaccgccacccatggccaggcccatgcgctcaatgccagcgcccagggccgggcccatggcggggcccatgcgctcgaggctgttggcacccatgcgctccaggcccatgcgctcgaggctgttggcgcccatgcgctccaggcccatccgctccagattgttggcgcccatgcgctccaggccggtggccatgcgatccatcacggggcccatgcgctccaggccagctcccatacctgcgggcaccatgcgctccatgctcaggcccatgcgctcgatggcagggcccacgcgtccggacccacgcgtccgcgacccacgcgtccgcccacgcgtccgcccacgcgtccgccgggcgttgcgggattggggcctgggaacgctcggcccccggcagccgagaagcccgtgactgggctgagcagcaccatcccagccctggggcctgctgactgcccagtcccggcttcacctgcagcgaacccggagcgttgctatcctccaccggactgtcaggctctgcgcgccccgggnaggtcggcggcgaccagcagcgactgcggangacggcgggcggccccgggcatgtacgcccccggaggcgcagggctgcccggcggggccggccggaggagcccgggaggcagcgctctgccaagcagccggagcgtaccttggcctcggncctgcctggcgncctgtctatcacgg

SEQ ID NO: 543 - DNA, 4041 bp, Homo sapiens
  misc_feature (162)..(162): n equals a,t,g, or c
  misc_feature (4022)..(4022): n equals a,t,g, or c
  misc_feature (4039)..(4039): n equals a,t,g, or c
tggaaaggaaactgcccaaagaacatgcccctcagaaagatcgggaagctggaattctagatttctaaactccagaaagacctgaagtgcgagcggggcttccaggaataacgtgagaagcagaaacgggcccttgggaagagctagaggcggctaaaacangagttgaaggacacgttgtattccacagctgcccagcaggagctcaggtcaaaacgtgagcaggaggtgaacatctgragaagaccctgraggaggaggccaagacccacgaggcccagatccaggagatgaggcagaagcactcacaggccgtggaggagctggcgracagctggagcagacgaagcgggtgaaagcaaacctcgagaaggcaaagcagactctggagaacgagcggggggagctggccaacgaggtgaaggtgctgctgcagggcaaaggggactcggagcacaagcgcaagaaagtggaggcgcagctgcaggagctgcaggtcaagttcaacgagggagagcgcgtgcgcacagagctggccgacaaggtcaccaagctgcaggtggagctggacaacgtgmccgggcttctcagccagtccgacagcaagtccagcaagctcaccaaggacttctccgcgctggagtcccagctgcaggacactcaggagctgctgcaggaggagaaccggcagaagctgagcctgagcaccaagctcaagcaggtggaggacgagaagaattccttccgggagcagctggaggaggaggaggaggccaagcacaacctggagaagcagatcgccaccctccatgcccaggtggccgacatgaaaaagaagatggaggacagtgtggggtgcctggaaactgctgaggaggtgaagaggaagctccagaaggacctggagggcctgagccagcggcacgaggagaaggtggccgcctacgacaagctggagaagaccaagacgcggctgcagcaggagctggacgacctgctggtggacctggaccaccagcgccagagcgcgtgcaacctggagaagaagcagaagaagtttgaccagctcctggcggaggagaagaccatctctgccaagtatgcagaggagcgcgaccgggctgaggcggaggcccgagagaaggagaccaaggctctgtcgctggcccgggccctggaggaagccatggagcagaaggcggactggagcggctcaacaagcagttccgcacggagatggaggaccttatgagctccaaggatgatgtgggcaagagtgtccacgagctggagaagtccaagcgggccctagagcagcaggtggaggagatgaagacgcagctggaagagctggaggacgagctgcaggccaccgaagatgccaagctgcggttggaggtcaacctgcaggccatgaaggcccagttcgagcgggacctgcagggccgggacgagcagagcgaggagaagaagaagcagctggtcagacaggtgcgggagatggaggcagagctggaggacgagaggaagcagcgctcgatggcagtggccgcccggaagaagctggagatggacctgaaggacctggaggcgcacatcgactcggccaacaagaaccgggacgaagccatcaaacagctgcggaagctgcaggcccagatgaaggactgcatgcgcgagctggatgacacccgcgcctctcgtgaggagatcctggcccaggccaaagagaacgagaagaagctgaagagcatggaggccgagatgatccagttgcaggaggaactggcagccgcggagctgccaagcgccaggcccagcaggagcgggatgagctggctgacgagatcgccaacagcagcggcaaaggagccctggcgttagaggagaagcggcgtctggaggcccgcatcgcccagctggaggaggagctggaggaggagcagggcaacacggagctgatcaacgaccggctgaagaaggccaacctgcagatcgaccagatcaacaccgacctgaacctggagcgcagccacgcccagaagaacgagaatgctcggcagcagctggaacgccagaacaaggagcttaaggtcaagctgcaggagatggagggcactgtcaagtccaagtacaaggcctccatcaccgccctcgaggccaagattgcacagctggaggagcagctggacaacgagaccaaggagcgccaggcagcctgcaaacaggtgcgtcggaccgagaagaagctgaaggatgtgctgctgcaggtggatgacgagcggaggaacgccgagcagtacaaggaccaggccgacaaggcatctacccgcctgaagcagctcaagcggcagctggaggaggccgaagaggaggcccagcgggccaacgcctcccgccggaaactgcagcgcgagctggaggacgccactgagacggccgatgccatgaaccgcgaagtcagctccctaaagaacaagctcaggcgcggggacctgccgtttgtcgtgccccgccgaatggcccggaaaggcgccggggatggctccgacgaagaggtagatggcaaagcggatggggctgaggccaaacctgccgaataagcctcttctcctgcagcctgagatggatggacagacagacaccacagcctccccttcccagaccccgcagcacgcctctccccaccttcttgggactgctgtgaacatgcctcctcctgccctccgccccgtccccccatcccgtttccctccaggtgttgttgagggcatttggcttcctctgctgcatccccttccagctccctcccctgctcagaatctgataccaaagagacagggcccgggcccaggcagagagcgaccagcaggctcctcagccctctcttgccaaaaagcacaagatgttgaggcgagcagggcaggcccccggggaggggccagagttttctatgaatctatttttcttcagactgaggccttttggtagtcggagcccccgcagtcgtcagcctccctgacgtctgccaccagcgcccccactcctcctcctttctttgctgtttgcaatcacacgtggtgacctcacacacctctgccccttgggcctcccactcccatggctctgggcggtccagaaggagcaggccctgggcctccacctctgtgcagggcacagaaggctggggtggggggargagtggattcctccccaccctgtcccaggcagcgccactgtccgctgtctccctcctgattctaaaatgtctcaagtgcaatgccccctcccctcctttaccgaggacagcctgcctctgccacagcaaggctgtcggggtcaagctggaaaggccagcagccttccagtggcttctcccaacactcttggggaccaaatatatttaatggttaagggacttgtcccaagtctgacagccagagcgttagaggggccagcggccctcccaggcgatcttgtgtctactctaggactgggcccgagggtggtttacctgcaccgttgactcagtatagtttaaaaatctgccacctgcacaggtatttttgaaagcaaaataaggttttcttttttcccctttcttgtaataaatgataaaattccgagtctttctcactgcctttgtttagaagagagtagctcgtcctcactggtctacactggttgccgaatttacttgtattcctaactgttttgtatatgctgcattgagacttacggcaagaaggcattttttttttttaaaggaaacaaactctcaaatcatgaagtgatataaaagctgcatatgcctacaaagctctgaattcaggtcccagttgctgtcacaaaggagtgagtgaaactcccaccctacccccttttttatataataaaagtgccttagcatgtgttgcagctgtcaccactacagtaagctggtttacagatgttttccactgagcatcacaataaagagaaccatgtgctaaaaaaaaaaaaaaaaaaagttgcggcgaagnttatcccttagggaggnta

SEQ ID NO: 544 - DNA, 1156 bp, Homo sapiens
  misc_feature (368)..(368): n equals a,t,g, or c
ggggtttcaccgtgttagccaggatggtctcgatctcctaacctggtgatccgcccgcctcggcctcccaaagtattgggattacccgcgtgagccaccgcgcccggctgcaaataatctttctttttttctgagacagagtctcgctctgttgcccaggctggagtgcagtggcacgatctcggctcacggcacgctccgcctcccgggttcacgccattctcctgcctcagcttcccgagtagctgggactacaggggcccgccaccacgcccggctaactttttgtgtttttagtagagacggggtttcaccgtgttagccaggatrgtctcgatctcctgaccttgtgatctgcccgctcggcntccsaaagtgctgggattacaggcgtgagcaccgcgcccggcggcgaaacacgatattgtactaacatcttaattttgttataaaatctcacaaaccccctgacatagtctcagagatctgtagggccgaggttacatttggagaacccgtactctagggccaaatccattcttcttgccctggctcacttgtcccccccaccgccccgcgctggagccactgcctagttcttcagccctagatggtgctcgccagacctcctctcaatgctcatcacacacagggctattcctttcctccaatgaaccaaacgcctcccgcccacctccaggtcccagtcctctgttccctttgcctggtccacccttgccctccctgggtcgcagacgaggtcggcctcgtcattccccgcagaccgccgcgcgtccctcttgtgcggttcaccacagttgtatttaagtgatcgtgtgagtcgtcgttaaatgcctgtctccccgcggatcatgggctcctcgaggacagggacyggcctgtctgtccactgctgtaaccccgcgccggcatagggacctaaggcccactggagggcgctcatcaagtagctgctggatgttgacgaaggaagcggcggcgcagctcagggatctccgagtcaggacggtcggccagacccacggggtaacgggtctaatcgtgtaggaataaagctgtattccagtgcttccaaaaaaaaaaaaaaaaaaaaaaaaaaaaaaaaaaaaaaaaaaaaaaaaaaaagggcggccgc

SEQ ID NO: 545 - DNA, 1336 bp, Homo sapiens
ggcgagagaactagtctcgagtttttttttttttttttttgcaaccatttatatacagtgttacataacagctctggagtacagtacatgcagcagaatatacctgttgaatataaaatactttccttaaaatcttcatcattggaattccttgaagtctaaatcatagaatgcccattactttgagaaaatggttgaggagtacaaatgtctgcatatgttggccactgaaataatccaaggctaactggaataatattcatagcacaccaggagtgcataaataatttacttacattattaaaatacaacccataaaattcaagttcaagatcttataggattgtctatgtaaatcctttaagtggttgcctggaaatgcattgtttcttctttctcttctcttctttttaaagtcctatataaaatcttcagctgaagtttatttcttcatcaaacaaaaggaccacctttatttgtgtctgctgcctcttctcttcattgcagcagtgcactgtggacagtaccatttgccttttggtgcctctgtcaatccaacgcagccataatggaaccattctatagggcaatcttggttatcacatcccaccatctcaccataagatacctgattacaaatgcagtatcgaggttcatttgggtcgtaagtccaatcaacctgactatttgaatcagattctggcactacagttgtttgttgagagatttcttgtacaacagttgatgatgaagaacacgatgataaggaagaagaggaggaggaagatgatgactgctggcttgaagacttgttgttgtttttgctctttcgaccactccgtgagtcggctgctgatgaactggcattctgtgttaatgttgtcataagtgccgaagatgatgaatagccaactgtttccctggccattgaaaattcttttcccaactgaaagtcattattcttaaatgcttcataactggcttttaaacttgatgttcttcgtccctccttcatctgagctgtagcctgaactgcttgagcagctgccatggtaattgcccctgcaccagttcctgaagataacgagccaatgttataggaycccagaggttgggaggaattcacattgtaggcattgttagaagaggctgtggaattattatttcgacaacctagtgwattttcctagcttcaccaccaaatcgttagcgctccttccttcttacctagcttccttcaccaaatcggactggctcctggactcttttcctatcttcaccacgaactgctgcttgctcgcttgctcctcagtcctagcttcatcaaacactggtt

SEQ ID NO: 546 - DNA, 1568 bp, Homo sapiens
  misc_feature (342)..(342): n equals a,t,g, or c
  misc_feature (1368)..(1368): n equals a,t,g, or c
  misc_feature (1396)..(1396): n equals a,t,g, or c
tcgacccacgcgtccggcggtccgcggcgcgcasctgtttcggtaactgctttgcctcccggctcccgcaggaggatgctggtggtggaggtggcgaacggccgctccctggtgtggggagccgaggcggtgcaggccctccgggagcgcctgggtgtggggggccgcacggtaggcgccctgccccgcgggccccgccagaactcgcgcctgggcctcccgctgctgctgatgcccgaagaggcgcggctcttggccgagatcggcgccgtgactctggtcagcgccccgcgtccagactctcggcaccacagcctggccctgacatccttcaagcgccancaagaggagagcttccaggagcagagcgccttggcagctgaggcccgggagacccgtcgtcaggagctcctggagaagattacggagggccaggctgctaagaagcagaaactagaacaggcttcaggggccagctcaagccaggaggccggctcgagccaggctgccaaagaggatgagaccagtgatggccaggcttcgggagagcaggaggaagctggcccctcgtcttcccaagcaggaccctcaaatggggtagcccccttgcccagatctgctctccttgtccagctggccactgccaggcctcgaccggtcaaggccaggcccctggactggcgtgtccagtctaaagactggccccacgccggccgccctgcccacgagctgcgctacagtatctacagagacctgtgggagcgaggcttcttcctcagtgcggctggcaagttcggaggtgacttcctggtctatcctggtgaccccctccgcttccacgcccattatatcgctcagtgctgggccccygaggacaccatcccactccaagacctggttgctgctgggcgccttggaaccagcgtcagaaagaccctgctcctctgttctccgcagcctgatggtaaggtggtctacacctccctgcaatgggccagcctgcagtgaactccagagacctaggggatgtggctgtgtcggcagcaagagcctttctggatgttccccagctcttctctgggagtctagaacatcctcctacctttctccgcggttagtttttgattccaggttttcgaacactacatcttttttatgttcttccttgtttcaaagcacttattggctgtgtttttgtagttacctattttcacactgtgagcttcccgagaatggggcctgggtttgattcatctgttttctacagggtttaagtctcaggaggtctcaataaacttggtatataaatgttcatgatttgaatgtttgcgacagtcctggaacccgtggatggtctcatctgcatgnacaggtgagaaaaaggcctggagggggngactgacttgcccaaagtcacacacttagtaaatagcaggcctggcctttyaaaattggkttttctgactcctaaatctgcactctttctacctcactaaacttccttttgataagatttctatgaaatttcccagatgcatacaacgttataaataaaaatataggctggg

SEQ ID NO: 547 - DNA, 1452 bp, Homo sapiens
  misc_feature (1443)..(1444): n equals a,t,g, or c
tgaattatagaagtacgcctgcaggtaccggtccggaattcccgggtcgacccacgcgtccgcaacctttccaagggagtggttgtgtgatcgccatcttagggaaaagatgttctcgtccgtggcgcacctggcgcgggcgaaccccttcaacacgccacatctgcagctggtgcacgatggtctcggggacctccgcagcagctccccagggcccacgggccagccccgccgccctcgcaacctggcagccgccgccgtggaagagtacagttgtgaatttggctccgcgaagtattatgcactgtgtggctttggtggggtcttaagttgtggtctgacacacactgctgtggttcccctggatttagtgaaatgccgtatgcaggtggacccccaaaagtacaagggcatatttaacggattctcagttacacttaaagaggatggtgttcgtggtttggctaaaggatgggctccgactttccttggctactccatgcagggactctgcaagtttggcttttatgaagtctttaaagtcttgtatagcaatatgcttggagaggagaatacttatctctggcgcacatcactatatttggctgcctctgccagtgctgaattctttgctgacattgccctggctcctatggaagctgctaaggttcgaattcaaacccagccaggttatgccaacactttgagggatgcagctcccaaaatgtataaggaagaaggcctaaaagcattctacaagggggttgctcctctctggatgagacagataccatacaccatgatgaagttcgcctgctttgaacgtactgttgaagcactgtacaagtttgtggttcctaagccccgcagtgaatgttcaaagccagagcagctggttgtaacatttgtagcaggttacatagctggagtcttttgtgcaattgtttctcaccctgctgattctgtggtatctgtgttgaataaagaaaaaggtagcagtgcttctctggtcctcaagagacttggatttaaaggtgtatggaagggactgtttgcccgtatcatcatgattggtaccctgactgcactacagtggtttatctatgactccgtgaaggtctacttcagacttcctcgccctcctccacccgagatgccagagtctctgaagaagaagcttgggttaactcagtagttagatcaaagcaaatgtggactgaatctgcttgttgatcagtgttgaagaaagtgcaaaaggaacttttatatatttgacagtgtaggaaattgtctattcctgatataattactgtagtactcttgcttaaggcaagagtttcagatttactgttgaaataaacccaactcttcatgaaaaaaaaaaaaaaaaaaaaaaaaaaaaaaaaaaaaaaaaaaaaaaaaaaaaaaaaaaaaaaaaaaaannaaaaaaaa

SEQ ID NO: 548 - DNA, 1334 bp, Homo sapiens
  misc_feature (187)..(187): n equals a,t,g, or c
  misc_feature (1309)..(1311): n equals a,t,g, or c
  misc_feature (1325)..(1325): n equals a,t,g, or c
cgtccgcaaaaaataataatgaaactttccaaaacaaagtgccaggaccagctgggttcactgatgtgtttttgagatacttaaggtagaaatgataccaagtctstacyrtctctttcagaaaataaaagcagrgataacacttcccaamtcattttgtgaggccagkattaccctaatascaaanccaggcaaarayattacaagaaaggaaaactacagatcaatatttccaktgaacacagatgcagaaatcctyaaaatrttagcaaatcaggaatgcaagscttgttcaacatttgatattcagtgyaatccattgcatgcattagcagytcaaagatkaaataygatcatatcaataggtacagaaaaagcatttgacaaaatccaatatccattcatgwtaaaacctctcaacacagaaggaatacaggagaacttactcaakttgrtaaagaactactacaaaaaaccctacakctarcatyatccttgatgtttccaactarayrctttcctactaagatcaggaacatggcaaggaacaccactgcttttcagcattgtactggaagtgctatmtaatgcagtgwtaccaaaaaaaaagaaataaaatgcacataratttgraaggakgaaatacaactttgttcwcaartaacatgattgtctttgtagaraattctaaataacaaaaaccctgctgacattaataagcaattayagcaggrttgyagratryagtcctcaggtakatgataaaaargaattggacatcaagtcattaaaagacayrkagraaccctaaatgcttattgttaagtgaaaaccaatctgaaaaggctttctattttgtatgattgcaattatatgacattttgggagaggcaaaactattgagccagtgaaaggaccagtggttgctgagagttgaggggaaaggagggatggcaggtagagaggtgatttttaaggcagtgaaagtactctctagggtactgtaatttgtcaaaacgcagagaatggaaaacagtgaacggaaaacacagagtaaaccctaatgtcaactctggacttcagttaataataatgtatcactgttggctcattaattgtaacaaatgaaccataatgatgcaagatgttaatgattggggagcctgtggaagatgggaggggaaagggttatatgagaattctctatactttttgctcaactttctgtaaccctaaagctactctaaaaaatgaagtgtatcaagtaaataaataaccaaccaaccaaaaaaaaaaaaaaaaaaaactnnngggggggccccggnaccccaatt

SEQ ID NO: 549 - DNA, 1298 bp, Homo sapiens
aattcggcacgagcagagccgtcgtggctcgttccattctcggcggtggtacctgctcccggtggccctgaggacgtgtgggccaggggcggccccgaaattaggaagcggagggggagcagtctgcaggtctgcggggctaagtgtcgcggcggcgcacctcgcgtcaagaatccggaggaggagactgcaaggataggcccaggagtaatggagtccaaagaggaactagcggcaaacaatctcaacggggaaaatgcccaacaagaaaacgaaggaggggagcaggcccccacgcagaatgaagaagaatcccgccatttgggagggggtgaaggccagaagcctggaggaaatatcaggcgggggcgagttaggcgacttgtccctaattttcgatgggccatacctaataggcatattgagcacaatgaagcgagagatgatgtagaaaggtttgtagggcagatgatggaaatcaagagaaagactagggaacagcagatgaggcactatatgcgcttccaaactcctgaacctgacaaccattatgacttttgcctcataccttgaatcctaaaagttttcgctgaggttaatgtgaacactgctttacaagcttgtatttttgtgatttactttttctgtaagccttttggkgtttacacttaccagtttctaatggaaattagaattctaattgaatattgttttgtctcagcctaaaagttacggtcagcatggcaattcacctattttaggaaaaatactcttttcataatatgaaatgcataaagcagttcaaaaagcagtctgtattccatcatcttcctttttcattccagtccttatttttgtaagtattacttttcctcctccggctacctggactcaaaatctcagttgtctttgacagtttttttcttgtccctgaccaaaaaagaatgatcatacccagaattcaatgtttgatattttaagaatgtatgttctagtgtttttcagagtgagtctaccatctgtataaaaacaccttgggggcaggcaggggcatttaaaaatgtaggacctatcgtccagactcacagagtggggctccagaatctccatttttaacaaactctcttaagtaattctgatgtgtaccaaaatcagtgccattggtgtgtgtgtacgtaactatatacatatgtgtgtgtgtgtatatatataatgtgtcataaccgtaaacaataaacaatatcaagataaaaaaaaaagtcgacgcggccgcgaatttagtagtagtaggcggccga

SEQ ID NO: 550 - DNA, 1448 bp, Homo sapiens
acaacttccggctgtaaagatggcggcttcctagtgagtcggcggctgatttagaaggaggttcaggctacggtgagccgaagggaggattctggcttcccctgtccgtgttccatctagccacacaggagccatggaagtggcagagcccagcagccccactgaagaggaggaggaggaagaggagcactcggcagagcctcggccccgcactcgctccaatcctgaaggggctgaggaccgggcagtaggggcacaggccagcgtgggcagccgcagcgagggtgagggtgaggccgccagtgctgatgatgggagcctcaacacttcaggagccggccctaagtcctggcaggtgcccccgccagcccctgaggtccaaattcggacaccaagggtcaactgtccagagaaagtgattatctgcctggacctgtcagaggaaatgtcactgccaaagctggagtcgttcaacggctccaaaaccaacgccctcaatgtctcccagaagatgattgagatgttcgtgcggacaaaacacaagatcgacaaaagccacgagtttgcactggtggtggtgaacgatgacacggcctggctgtctggcctgacctccgacccccgcgagctctgtagctgcctctatgatctggagacggcctcctgttccaccttcaatctggaaggacttttcagcctcatccagcagaaaactgagcttccggtcacagagaacgtgcagacgattcccccgccatatgtggtccgcaccatccttgtctacagccgtccaccttgccagccccagttctccttgacggagcccatgaagaaaatgttccagtgcccatatttcttctttgacgttgtttacatccacaatggcactgaggagaaggaggaggagatgagttggaaggatatgtttgccttcatgggcagcctggataccaagggtaccagctacaagtatgaggtggcactggctgggccagccctggagttgcacaactgcatggcgaaactgttggcccaccccctgcagcggccttgccagagccatgcttcctacagcctgctggaggaggaggatgaagccattgaggttgaggccactgtctgaaccatccctgtacatctgcaccttcttgtgcaaggaagtccttggcctaaagccttggttctcaaactgggttccttgggacctccggggtgggggggttccaggaggcacgtagggtaccttgcagggtcctaggagggaaacccaggattccaggagggatcccaggaactgtgggcacccattttctgtgtctcccagcccatttccactcctagtttgtcatggataatttttgttcttccctgtgtgatttttgccatcaaaataaaaatttgagactcgttaaaaaaaaaaaaaaaaaaaaaaaaaaaaaaaaaaaaaa

SEQ ID NO: 551 - DNA, 606 bp, Homo sapiens
  misc_feature (600)..(600): n equals a,t,g, or c
gctcggtcggccacggctctgctgggctcctggcgccgcctcctcccagcccgccgcgggctgcgcgcttctgtgggtgggggaaggcaggactgacgcagaatgacaacggcaacacgacaagaagtccttggcctctaccgcagcattttcaggcttgcgaggaaatggcaggcgacatcagggcagatggaagacaccatcaaagaaaaacagtacatactaaatgaagccagaacgctgttccggaaaaacaaaaatctcacggacacagacctaattaaacagtgtatagatgaatgcacagccaggattgaaattggactgcattacaagattccttacccaaggccaattcatctgcctccaatgggccttaccccactccgaggccggggacttcgaagccaagagaaactgaggaaactttccaaaccagtatatctcagatctcatgatgaagtttcctaatctagaggaaagtttatttctgcaaatgatgagccaactagttattgaatgtaaaccagatggsaaaacacttcttgattaggggcaaaattyaatgyttyttaaaaccctccacaatttcgattctcncccttg

SEQ ID NO: 552 - DNA, 876 bp, Homo sapiens
  misc_feature (34)..(34): n equals a,t,g, or c
  misc_feature (42)..(42): n equals a,t,g, or c
  misc_feature (44)..(44): n equals a,t,g, or c
acaagaccatggcctgtggaggggggacaggggngcactggngnttgatctcgcctcctccctcttctctctttctctgtcatctctccactctccattctccatygtgtctctctgtccactttctcctttcctctccctgtgcctcatcttcctctcctctctctctcccttctctcttctccgtttctctttttcaccccactccttcatcttgtctcgctgtmtatattgttttccttctctgtatcttcattgcttttgctttctttcaaactttctccttcacagatttttctttattaatcagaatcatactgaccaacatgtgctgaggactttctgtgtgctctgtgcttcacatacagtcatgtgcatctttccagttccacaagttagttatcctcatttctcggggccatagagctagtgagtgacagagctaggttttgtatgtcaaagcctctgtcctacatgacatggcttttcctgctgccttctcccctggtattcgtctccctcttttctcctctggctctgcctggctctcctctggctctgccgagggggtggttttcagcctgggcccttgcagatgtgtctgtggcagcaggccacacagaccgcagcgggctgggcagcgtcctgagagacctagtgaagccaggcgacgagaaccttcgggagatgaacaagaagctgcagaacatgctggargagcagctcaccaagaatatgcacttgcacaaggatatggaagttctgtcccaggaaawtgtgcsgctcagcaaggagtgcgtggggcctcctgacccagacctagagccaggagaaaccagctaaagacctgcaggctgcacccacctcctccccttc

SEQ ID NO: 553 - DNA, 273 bp, Homo sapiens
ctacatagcgaacaagatcttttcagagtggtgtttctaaaagagcatgtacaaaagtggcctgtggacatttaggcctgggtgatgcatttgctcttcctgtttgtgccaatgtatcaatgtagagttgctctgttttcttcaactgtatttattgctgcatttctcagcataaacttatcccattgtattttttataaataaatattttttttttttttttttttttttttttttttttttttttttttttttttttttttttttttttta

SEQ ID NO: 554 - DNA, 1208 bp, Homo sapiens
ggcacgagcggcgcgagagtagagaaaaggggctctggtgaccgccctwcctggcatccctctaacccaggaggagcgtggggaaaggggctgtgggcctctcggggagcgagctgcgggtagcggcgcactgggtacaggcgcgcgcttggctgtcgcctctgccgctgtgtttgggaggactcgaactggcgccaggaaatattaggaagctgtgattttcaaagctaattatgaaaacatttatcattggaatcagtggtgtgacaaacagtggcaaaacaacactggctaagaatttgcagaaacacctcccaaattgcagtgtcatatctcaggatgatttcttcaagccagagtctgagatagagacagataaaaatggatttttgcagtacgatgtgcttgaagcacttaacatggaaaaaatgatgtcagccatttcctgctggatggaaagcgcaagacactctgtggkatcaacagaccaggaaagtgctgaggaaattcccattttaatcatcgaaggttttcttctttttaattataagccccttgacactatatggaatagaasctatttcctgackattccatatgaagaatgtaaaaggaggaggagtacmagggtctatcagcctccagactctccgggatactttgatggccatgtgtggcccatgtatctaaagtacagacaagaaatgcaggacatcacatgggaagttgtgtacctggatggaacaaaatctgaagaggacctctttttgcaagtatatgaagatctaatacaagaactagcaaagcaaaagtgtttgcaagtgacagcataaagacggaacacaacaaatccttcctgaagtgaattaggaaactccaaggagtaatttaagaaccttcaccaagatacaatgtatactgtggtacaatgacagccattgtttcatatgtttgatttttattgcacatggttttcccaacatgtggaacaataaatatccatgccaatggacaggactgtaccttagcaagttgctccctctccagggagcgcatagatacagcagagctcacagtgagtcagaaagtctccactttctgaacatagctctataacaatgattgtcaaacttttctaactggagctcagagtaagaaataaagattacatcacaatccaaaaaaaaaaaaaaaaaaaaaaaamaaaa

SEQ ID NO: 555 - DNA, 3044 bp, Homo sapiens
  misc_feature (112)..(112): n equals a,t,g, or c
  misc_feature (123)..(123): n equals a,t,g, or c
  misc_feature (3034)..(3034): n equals a,t,g, or c
  misc_feature (3038)..(3038): n equals a,t,g, or c
  misc_feature (3043)..(3043): n equals a,t,g, or c
aaaagagcagtgagagaggtcgggcagatgtgtgatgcatgtgaagcacatgtttacattcactgggtctgccaaaatgtggattgtggtctgcttagattgttacaaggcnaaaggaaaggnagagttctagagataaagaactatatgcttggatgaagtgtgtgaagggacagcctcatgatcacaaacatttaatgccaacccaaattatacctggttctgttttgacagatcttctagatgccatgcacactcttagggaaaaatatggtattaaatcccattgtcattgtactaacaaacagaatttacaagttggaaattttcctacaatgaatggtgtatctcaagttttacagaatgttcttaatcacagtaataaaatttctctgtgcatgcctgagtctcagcagcaaaatactcctccgaagtctgagaaaaatggtggcagcagcccagagagtgatgtaggcacagataacaagttaactcctccagaatcccagtcaccactgcactggttagcagatcttgcagagcaaaaagccagagaggaaaaaaaagaaaacaaagaacttacccttgaaaaccaaattaaagaagaaagagaacaagacaactctgaatctccaaatggcagaacatcacctcttgtgtcccagaataatgaacaaggctcaaccttacgggatttgctgactacaacagctggaaagctacgtgtggggtctacagatgctggcattgcctttgccccagtatattcaatgggagccccaagtagcaaaagtggacggactatgcctaacattcttgatgacataattgcttcagttgttgaaaacaaaattccaccaagtaaaacctccaagataaatgtaaaaccagagcttaaagaagagcctgaagaaagcataatatctgcagtggatgaaaataataaattatacagtgatataccacattcttggatctgtgagaagcatattttatggcttaaggattataagaatagcagtaattggaagcttttcaaagaatgttggaaacaaggacagcctgcagtggtttctggtgtgcataagaaaatgaacattagcctatggaaggcggaatcaattagtcttgattttggagaccaccaagctgatctcctgaactgcaaagatagcatcatttcaaatgccaatgttaaggaattctgggatggttttgaagaagtttcaaaacggcagaaaaacaagagtggagaaacagttgttttaaaattgaaagattggccttcaggagaagacttcaagactatgatgccagcaagatacgaagatcttttaaaaagtctgccattgccagaatattgtaatccagaaggaaaattcaatttggcctctcatttgccaggattttttgtacgtcctgatctaggacccaggttgtgcagtgcctatggtgtagttgctgctaaagatcatgatataggaacaacaaatctccatattgaagtttctgatgttgtaaatatactagtttatgttggcatagcaaaaggaaatggcattctctcaaaagcaggaattctcaagaaatttgaggaagaagatttggatgacattttaaggaaaagattgaaggactcaagtgaaatacctggtgctctgtggcatatttatgctgggaaagatgttgacaagataagggaatttcttcaaaagatttcaaaagaacaaggccttgaagttctaccagaacatgatccaatacgtgaccaaagttggtatgtgaacaaaaagctccgtcaaaggctgcttgaagaatatggagtcagaacctgtactcttattcagttccttggtgatgctattgttttgccagcgggagcacttcatcaggttcagaattttcacagctgtattcaggtaactgaagattttgtgtctccagaacatcttgtagagtcatttcatttaacacaggaactgagacttttgaaggaagaaatcaattatgatgataaactacaggttaaaaatattttgtatcatgcagtcaaagaaatggtgagagccttgaagatacacgaggatgaagtagacgatatggaagaaaattaagtgtgatccagtttgatatttttaggttgttgaactgggattacttaaccttgaatgatgatatgtatgcacactgactttaagcttcataaaaccatcagtgccaagaaattctctttgtagtaattacttgttactgacaccacagcagtatagcatatgtcacagctcctgtgattcaatgttataaaacaagcagaattttaaaagcagcactatatagctgttttgtattatagtgtatatgatgtttgtgaaaatgccagatttaaaatgatgtatttatttttggtaaaaaataaaaaattctatgctatattgttgatcaagtgtaaatgtgaccttgtacagtttactaaaattactgatatttttcactacattgagacagttactgtgagaataggacacaaacaccagctattgcctgcatctgggaaattgctgaatcgcacagcagtcatgtcataatcagaaaattactgccaaataattgtaaaatttgtaaagtataaagtatataaagtagatactaaatacagacacttcaatattttgttgaagctattgactgtacaattaaacattttcaaaaggtgtaatttatttaaaattgtctcattttggtaaaatttatgtgaacttttaaagctaaatattaaacttaatatgctatgtaaatatatacatatatacatttaatgatgtatttttttaaaacattggcttgcttttgttaaagtgcaagtgttacatatggctttgtacattaaagttgaaaggggttttacattttccattaaaaggactttatcaaaaaaaaaaaaaaaaaaaaaamaaaaaaaaaaaaaaaaaaaaaaaaaaaaaaaaaaaaaaaaaaaaaaaaaaaaaaaaaaaaaaaaaaaaaaaaaaaaaggggnggcnttttna

SEQ ID NO: 556 - DNA, 2339 bp, Homo sapiens
  misc_feature (1314)..(1314): n equals a,t,g, or c
  misc_feature (1514)..(1514): n equals a,t,g, or c
  misc_feature (2333)..(2333): n equals a,t,g, or c
  misc_feature (2339)..(2339): n equals a,t,g, or c
ctccttcatgacacgaggtgctggctgaatgggggcgccatgccagaggcccggcacccccgcacaggcgcctctgccctgcacgtggctgctgccaagggctacattgaggtgatgaggttgctccttcaggctggctacgacccagagctccgggacggggacggctggactcccctgcacgcagcggcacactggggcgtggaggatgcctgccgcctgctggccgagcatggcgggggcatggactcactgacccatgcggggcagcgtccctgtgacctggccgatgaggaagtactgagcctgttggaggaactggcccggaaacaggaggaccttcggaaccaaaaagaagcttcccagagccggggccaggagccccaagcgccctctagcagcaaacacagaaggagctctgtgtgtcgtctgagcagtcgcgagaagatttccctccaggacttgtccaaggagcgccggcctggtggggctggggggccccccatccaggacgaggatgagggggaagaaggtcccaccgaaccaccccctgcagaacccagaaccctcaatggcgtctcctccccgccgcaccccagccctaagagtcccgtgcagcttgaagaggcccccttctccaggcgctttggcctcctgaagacagggagttctggtgccctgggtccccctgaaaggcggacagcggagggagcccctggggctgggctgcagcgctcggcttcctcctcctggctggaagggacctccactcaggccaaggagctccgtcttgccagaattaccccgaccccctccccgaagctgccggagccctctgtcctgtctgaggtcaccaagcctcctccttgcttggagaactcctcgcctccctccaggattccggagcctgaatccccagcgaagccaaacgtccccacagcctccacggcgcccccagcggactcccgggaccgacggaggtcctaccagatgcctgtgcgggatgaggagtcggaatcccagagaaaagctcgctcccgtctcatgcgccagtctcggaggtccacacagggtgtgactcttacagacctgaaggaggcagagaaggctgcagggaaggccccagagtcagagaagccggcgcagagcctggacccttcccgaaggccccgcgtccctggagtggagaactctgacagccctgcccagagagaggcgcccgacgggcagggtccgggaccgyaggcggccagggagcaccgcaaggtcggaaaggagtggagggggcctgcggagggggaggaggcggaccgnctgaccgcagccargagtccagcaccctggagggcggcccctcggcccgcaggcagcggtggcagcgggacctcaacccagaacctgagccagaatcggaagagccagacggaggctttaggacgctgtatgcagagctgcgcagggagaacgagcggcttcgcgaggccctgaccgagaccacgctgcggctggcgcanctcaaggtggagctggagcgggccacgcagaggcaagaacgcttcgctgagaggccagccctcctggaactggagagattcgagcgcagggccctggaacgcaaggccgcagagctggaggaggagctgaaggccctgtctgacctccgcgctgacaaccagcgcctcaaggatgagaatgcagcgttgatccgcgtcatcagcaaactctccaagtgacccggaggactttcccgcacccgtatttatacagctgcttctgccacacgcaccccttcccccgtgtgaacacgagtgacagggctccgggggaagtctcagagaagccatagcccccctgggacctccggactgggaggggagcagagtccccaggagccgagggggccacccgaggccaggatggaggtgggaggccgagccaagcagggggacgttgccagaggggaccagggccagagacgggaccaggaaggaactgaggaccaagaagtgcaaggatcagtagccaggaccagagtggccgcctggaggtccccatctcacgtgtgatgccaccccgtcacccctcccctcctgagcagggatccaagaatgtgccaagagtcccgccagcctcagccaggtgggcctgtatatagggtccatgtgcaatagggagggacgtcttctattttttgctgccccctccccgcccactgtctggggcagggggagaaggtattttcgagataaagcacaggcaccacaaataaaagtcgtgaagttgccaaaaaaaaaaaaaaaaaaaaaaaaaaaaaaaaaaaaaaaaaaaaaaangggggn

SEQ ID NO: 557 - DNA, 2731 bp, Homo sapiens
gcccacgcgtsggccgattggagacgggagccaaccagggctgcattggaggttgaaatcacaaagattagacacctttttagataggtgttcttcagcaccactgacaacacggttctgacagtatttcatgacaatggatggtgacagttctacaacagatgcttctcaactaggaatctctgcagactatattggaggaagtcattatgttatacagcctcatgatgatactgaggacagcatgaatgatcatgaagacacaaatggttcaaaagaaagtttcagagaacaagatatatatcttccaatagcaaacgtggctaggataatgaaaaatgccatacctcaaacgggaaagattgcaaaagatgccaaagaatgtgttcaagaatgtgtaagtgagttcatcagttttataacatctgaagcaagtgaaaggtgccatcaagagaaacggaaaacaatcaatggagaagatattctctttgctatgtctactttaggctttgacagttatgtggaacctctgaaattataccttcagaaattcagagaggctatgaaaggagaaaagggaattggtggagcagtcacagctacagatggactaagtgaagagcttacagaggaggcatttactaaccagttaccagctggcttaataaccacagacggtcaacaacaaaatgttatggtttacacaacatcatatcaacagatttctggtgttcagcaaattcagttttcatgatctgaagaaatgatggaatggggagtgtagagaaatgagagtctgtatgattctggaacagagacatcagaaggaaagactggtgaaaagatgtatctttgtatattaatagctgtaatgtagcttcctgatgcttgactaattgaggtgttaattctgacttgagaatctttttcatgaatgattttaaagaaaaatttggattttaaaggtattaaaatatttttgttttgtacgagagtttgttgctctgtatgactcctgtatgcattgtatattgcaatttattactgtcagagatttgtagacagtttcttattttcatattgaatcatgttacttttgtaattcaagtaagcggctgggttaattcatgatgtttgcccttttaataaaatataagggtagagttcattttgaatgcaagttgcctttattataaatttgagtttgtcttggttataccttgcatgataacctagctagatttctagcatttgctgtatttattaaaattattatttttttggtaaaacattaatagtttaagcagcatcatttttttaaaaaatgtaattgaataagtgtgaatgcagaagcaaatattgtctgccctgttaaacttggtgcccattaacagtgtttacactgttcatcgtgcctgttaatgtagttttagttaytggagcttttttaagactagatttggttttgagttacatttttaagaatgtgggaatatatttaagtttaatgtagtcctagtgctcttgaaatggtgcccctttcatttggtacatgattttttttcaaatcatatcttcaagtactatagtattctcttacagaagaggagttttatagtctgatggtaaatgtcttcattttacctttttaattgaaatgtcaagtttcctgttacactatggaaaccaagaaacatcagacatcattgcgtgtacagaccttttgcatgggtgagtggatgaaatggagaacagagtgagtgctgtgaacggtgtgaaatagaagccaacttctagtatgctgtcttcatctctgcaataaactaaacgtaaataatgtaactttgtataatttagtagtatgtacttggattgtttctttttgaaaagtgaggatttgtattttctcatctattctttttggtgttaattaacttgagggatttcttttttaagtttttaatatcaaaaattgctattgtatagtttgcctaaaaggaagttggagtgaatatcatctttgaaggacactcaaatttataaggtagaagcaatttcccagatataggctgaacagaaacatttactttgccagaaggagcctttaggagtatatgtgggctaatcagaggttaataatgtcctcatctcctactctccatttaaaaaacaaacttcattgtagtaaattcaaataggaaaaaatgggggagtagttaagcaaaatcaacagtcatcctactatgttgaaagaaccaatgttaatattttgataaatatcatttgtccttttactttgctaaatatgtatatttttataaaaatgggctcatattgtgcataccattttgtaacctgcttttttcacttaacaatatattgggaacatcttttccaggtcatgcatagtcttctgcatcatttttattggtttattattctgctgtatgactcaatcataattcatttaatcttctattggatattttgactatttacatcttttcacagttataaacagcacttcactgaatcccatgtacatccatgactgttttcttaaattctttgaattgctgggttaccaaatatgcaaaattttaaggcttttgatacttcgttatgagtgtatttttgagatattttccacttgatccaagcagtgtgtcactatataactgataaaagcacttggtctttgattatcaaaaaaaaaaaaaaaaaaaagcat

SEQ ID NO: 558 - DNA, 4007 bp, Homo sapiens
  misc_feature (2836)..(2836): n equals a,t,g, or c
  misc_feature (2847)..(2847): n equals a,t,g, or c
  misc_feature (2924)..(2924): n equals a,t,g, or c
  misc_feature (3634)..(3634): n equals a,t,g, or c
aaaaaaaaaaagaaaaaattcccaaatcttaatgtctgtttcagaattttagtgattttaaagtgatagtagaaaataccaagcatatgaggtatttcaatatgataggcttcttacattttaatagttactcatctttgttccaggacccttgactgatgctagggaaaggataaagcatagaataccagccagtttggctctgattttgagttatttataataaagtttggggattatcataacatctcatatctttgtgtatgttgttttaatgctcggcagagcacaacactgatgataactattaaaaatagaaaataacagccattttactttcaaatctgatgtgatgcaatctgtgaacactaggaggggataaaataagcattgcagggaaacttatttgtaaatagcttcctcacctaaactttgacttggcaatcaatactttctactttgtggaggggattaagaatagaatgggcaggatgagaccatgaaaattataatgattcatgtatatttgtatgatgcttgtaactttgcaaagtcttttttattcattgtctcatttggtcagaacaattttattgaggacatgaatttaacaattagaatttagattttctgactgtagctactaaatgttgtagctactagaccaggtgagctaggtttagagcaaagtatataagccttgtatggactatattagaattttaaaaattgtaattaattccttatcatcattataaaaagcttgatttttttatttgatctaaaaaagcattattccaaagaattttttcaagtagaaatgggagttagttataccagtgttgtttttaactaataaggctattttagaattcagccttgcctgtaaggtctttgagaagggagaggagtaggccaaaaaaaaaaaagtcttgattcctgaatgtgccttawatgctgkgccactcacaccgaggccatcatctcaacattagagttgtgctagattactgcttgactgactagctaggttaggcctaagagtgtttaccgaataatctgcactcactcagtagcccttcttcaggattaaaaacgatgatgacctcatcttagagccctaaagggaaatgcttatgtgggaacaagaaaagtcggtggtactgtcttctgctactactacttagtgctttgctgtgtatagggtgtgttcacatatatctcagttgaatgtcacaagaatccctgaagtgattaaaagtcttgagaggtcaggcaatttttgtaaggctagaaggaaaagtgaggttttagacttcatttcttttaaagttggcaaacaaacattttctgtaatggacaagatagatagattagatagatagatagatagatagatgatgattgattgatgattgatagtaaattatttcaggctttgcaggctataaagtgctgcagctccttagctttgctgttgttatagtgtagctggagccatagacagttagttagttatgagtgagcacagctgggtgccagtacaattttaatgatcaagactcgtggcaggcagaacaaaccatcatttgttgatcctctgcttgaaagcacgaataagtgagaacagagcagtcatatggtttcagaaagtgttattctgggatttcaggataaattttgtaaaactactaacaaacaacacacaggaaactaatttggtataagaaacgacatatccctaaatagtgcttatttaacttcattataaatacatctacttaacaaaaaaatatattttgtgatcttgaggtcacttcgtttaggtcattatctcaacccaacctccccaaactctggtttgagccaatatgtgttctattgttctcagagcaccagccgactgtacaacaattgttataaaaatgtttattgtttaccaaaaccagtggacctcttatcaaatgctgcttggtaacaaaatctatcacagttttaataaaaagaaaaaaaaaagaagctaactatttgtctcattgtcattagttagactttctgcaaggtcacttaatccagacttattcagtgcattaatcagattctcaggtgttgcatgaactccctcttgatcttgccaggcaaccaggagctgcttagctctcatcttcatgtcttcactgtcacactcaatctgcctaatttctgagtctttcatttccaagtagggagccagaatcttccattgttcacccagcttgttggcaaatacctctatttgttctcctgttacaggtttgtctcgccgaacatcaggactttcattttccttcagtagagcatcattatcttcctcatcttcatcctcacctgtttttatttcttcagaaggaggcggtaattccttggctagctttattaccatattttcaagatattctggtaaacttttaaactgctggttggttggctggaagaagtgagggcttctccgtgctaatagtctcagggctctccaaccataatttgaattgttcacagccttatattcattttccaccatattttcagggtctgcctgttcaatggcttcttcaaagaattcctccaaagtgggcatgtgttcccttgtctctgatttacaggcttccatattatcagggcaaagattccaaagccttgttaactcctcatttcccatcagaatttttttggtgggtcctttccctaggaagtcctcgggtgctgttctcttccgaattattctcgtaggtttggtatctgatgttctttctttcacaaaacttgggcaaccttcatttttccacgagttccagtnttcttcagtgnttaatatatgctctaccatctttgaaaatctttctcccatcgggggggttttcagatagtagktgataaactgattntgtagtatcttcaatccaaagtgattgctcatcagttaaaacatagttgaacttttgaatttgacctgccccttgagatattggaataaaatgagatactgcaacaggatgtgtcgacgaaagttactgtcactcagtkgtaaatccatcagcttttcacttgttaaaaattttgcaaaatatacatgttctcctcctgttttcaattcttccatcttttttcttgaggcctgagtatcatctaatttataactcttaaaaacagctaaaacttcttcagaatacttgagaaaagttttccatgaaatcttctcatagcattgcacagggttcctgaagtaatcctgaagtgaccagaattttcgatacaggttgtaatcaattggaatagagcacgttgttggagcttcctcatctcccatttcgccttcttctacatccattccttcttctctatcttcagtktgcttctgacccagggtgctttcctgctcatttgtattgaaaacagtgacattttccagattaaactgactctgcaagttaagacctgatttctcagacagagggaaaagcctggccaaaaagagctgaatccgtccacagaagactgtattctgggatttagacaatcttcttaggagatcattgcacatacgtagtaagtaatttttcccagcagaatagaatgtatttgawttccaagtagncaacatttttttccacaaaagtgaatattgtgtcacactgatccaaaggaagacaatccaaaacatctcccaacaatacaaaaggtgtagatgcggtacaaataccttcagttactcccccaatagcaagagaaataatagctaaaacgttttcacatgatgaatgatttataatttcttcttctagaatacctctgaaagcttggtcaagggtacattttttttcattttcactgcaggtacctggctgaaggtacttaacaatggcttgatgtttttgttgttcaaggcctctctggtagattcgtaaaccgcgtccgcgcttcgggcaaactgaagagcggcggcgtcggagacatcttctcgctgcgcc

SEQ ID NO: 559 - DNA, 793 bp, Homo sapiens
ggctttcttttctgttggcattttggtgaccactagaataaaccttcttttgacacatcttatttttaatatcagtgcctcattagcttactattgccatccccctacatcttggrctcctcctccatattttaatgagagtattgtggtagacatgaaaagcggcttcaatctggaagaactggaaaagaacaatgcacagagcataagagccatcaagggccctcatttggccaatagcatccttttccagtcttccggtctgacaaatggaataatagaagaaaaggacatacatgaagaattgccaaaacggaaagaaaggaagcaggaggagagggaggatgacaaagacagtgaccaggaaactgttgatgaagaagttgatgaaaacagctcaggcatgtttgctgcagaagagacaggggaggcactgtctgaggagactacagcaggtgaacagtctacaaggtcttttatcttggataaaatcattgaagaggatgatgcttatgacttcagtacagattatgtgtaacagaacaatggctttttatgattttttttttaacattttaagcagactgctaaactgttctctgtataagttatggtatgcatgagctgtgtaaattttgtgaatatgtattatattaaaaccaggcaacttggaatccctaaattctgtaaaaagacaattcatctcattgtgagtggaagtagttatctggaataaaaaaagaagatacctattgaaaaaaaaaaaaaaaaaaaaaaaaaaaagtcgtatcga

SEQ ID NO: 560 - DNA, 665 bp, Homo sapiens
gcctggagtcccagctacctgggaggctgaggcaggagaatcacttgaacccgggaggtggaggttgcagtgagccgagatcatgccattgcactccagcctgggcgayagagtaagactgtctcaaaaacaaacaaacaaacaaacaaacaamaacaagtggccagtctgtgagctatagttcccaacacctggtctagactcttctgcccttgctctgcagcttctttcctgttgattgggcattcagggaaggagtttaaaaagtgacactcatggctcatgacaaatgagatactttgggagtgtggaaacatggcttgatatttgccttcagatatttttgcttatataagttctaaatggaagtgataagttcattcttagggtccaagttgaaaggcagtggttcttttgtgaacaccactaactacattcgaaaagcctctccaattccacattccaagtctataacagctttggaaatgagtaacaatgacctctcatgtagtagattaaagcagaggcctttgccatatgattgttttttggcttaaatgtttgcttgccctgtaactgtaatactttggttaccagaatcacttgaaaacaaatacaataaaaaaatttctcaagcagtgaaaaaaaaaaaaaaaaagtcgacc

SEQ ID NO: 561 - DNA, 1062 bp, Homo sapiens
  misc_feature (892)..(892): n equals a,t,g, or c
  misc_feature (1032)..(1032): n equals a,t,g, or c
  misc_feature (1052)..(1052): n equals a,t,g, or c
gcctgaccccgcgccgccgagcgccctgaggactcagcgaagggtgggcgccgccgaggcctcctgccgctggcgggtttccgcggagtgccgcccggctccgctctgccgccggcgcggctcatgggcagagtcggccgggcgggccggcattaaactgaagaaaagatgtccctgtacgatgacctaggagtggagaccagtgactcaaaaacagaaggctggtccaaaaacttcaaacttctgcagtctcagcttcaggtgaagaaggcagctctcactcaggcaaagagccaaaggacgaaacaaagtacagtcctcgccccagtcattgacctgaagcgaggtggctcctcagatgaccggcaaattgtggacactccaccgcatgtagcagctgggctgaaggatcctgttcccagtgggttttctgcaggggaagttctgattcccttagctgacgaatatgaccctatgtttcctaatgattatgagaaagtagtgaagcgccaaagagaggaacgacagagacagcgggagctggaaagacaaaaggaaatagaagaaagggaaaaaaggcgtaaagacagacatgaagcaagtgggtttgcaaggagaccagatccagattctgatgaagatgaagrttatgagcgagagaggaggaaaagaagtaaggcatgaacaaatatgtcttaaacatatataaatactggaagtgcaattccactatgtgctttttcttttcagtttgataaatagttcatttgacattgatttgggtaattttctttctggaatcccagcaatacacatttgcgtcacagttttaatttatattgggttttcatatgtattttcctttgagcttcacaaccactttctaacattnatttattggatactttgggactagcttaaaatctattcctgcactgtctttacctgcagcacagtccagttggccgatgctgaatccactctgttgtttctcttaggggggaagcatagttaacattgagtgtgtctgtnttgggcattgtgacacattncatatcgcta

SEQ ID NO: 562 - DNA, 843 bp, Homo sapiens
  misc_feature (569)..(569): n equals a,t,g, or c
  misc_feature (833)..(833): n equals a,t,g, or c
tcgacccacgcgtccgcgccwckctgtcgtggcgcggcttcccgcggtcttctctgcaaatgggctccgtggcctagcgcccccgtccccgccacccgtgatcgtgcgccgaggcccgcgaggggtcgccgcccagatcccaccagccagcaagctaaagcatggcggccatcccctccagcggctcgctcgtggccacccacgactactaccggcgccgcctgggttccacttccagcaacagctcctgcagcagtaccgagtgccccggggaagccattccccaccccccaggtctccccaaggctgacccgggtcattggtgggccagcttctttttcgggaagtccaccctcccgttcatggccacggtgttggagtccgcagagcactcggaacctccccaggcctccagcagcatgaccgcctgtggcctggctcgggacgccccgaggaagcagcccggcggtcagtccagcacagccagcgctgggcccccgtcctgacctgagcggttaccaccagccccaggcctgcggaggcgctagtccaccagagcccctycccgnccctctccccactccgcatccctcgsccccctccccacctcccaccccccaccctgtaaactaggcggctgcagcaagcagaccttcgcatcaacacagcagacaccaaaaaccagtgagagccccgctctctaccgcccggccccagcactcgctagctttcctgacacctggaactgtgcacctggcaccaagcggaaaataaactccaagcagccagtaaaaaaaaaaaaaaaaaaaaaaaaaaacttgggggggggcccngggcccaaat

SEQ ID NO: 563 - DNA, 1065 bp, Homo sapiens
  misc_feature (1025)..(1025): n equals a,t,g, or c
  misc_feature (1029)..(1029): n equals a,t,g, or c
tgaggatgaggccagcaacccattctccttctgggttggagaaaataccaataacttgttcaggcccagagtcagggaggaggcaaatatcaggtccaagctcaggacaaatagagaagattgttttgaatctgagtctgaagatgagttctataagcagtcctgggttttgcctggagaagaggccamtagtagattcaggcacagagacaaagaagatcctaatactgccttgaaactcagggcccagaaagatgttgacagtgatagggtcaaacaagaacccaggtttgaggaggaagtcattattgggtcctggttctgggcagaaaaagaggccagtttggagggtggagcttyagcaatctgtgaatctgagccaggaactgaggagggggccattggcggatccgcgtactgggctgaggaaaagtccagtttgggggctgtggccagagaagaggccaagccggagtctgaagaagaggccatatttgggtcctggttctgggacagagatgaggcctgctttgacctaaatccctgtcctgtgtacaaggtcagtgataggttcagagatgcagctgaggagcttaatgcatcctccaggccccaaacctgggacgaggtcactgttgaattcaaacctggtctttttcatggggttggcttccgatccacaagcccctttggaattcccgaagaggcttctgaaatgcttgaggcaaagcccaagaacctggaacttagcccagaaggagaagagcaggaatctttgcttcagcctgatcagcctagtcctgagttcacatttcagtatgatccttcctaccggtcagtccgggaaattcgagagcatcttagggccagggagagtgcagagtctgagagttggtcctgcagctgcatacaatgtgagctgaaaattggttctgaagagtttgaagaattccttttattaatggacaaaattcggggatccttttatycatgraatatcttaaaattgcaatgggtatgagaangtgnttctcaaatttacccgagatttcaatccgagatcag

SEQ ID NO: 564 - DNA, 682 bp, Homo sapiens
ttttttacattccacatttttaagtttattgtatatttattgtaaatgtgttgcatattgtattagtctgcccaggactgccataacaaaatacttcagattgggtggtttaamcaacagaaacttgtcttttcacagttctgttttctggaagtcccagatcaaggtgctggtccgtgtgatttctggggagggctctccttggcttgccgatggcctccttctctggtgcaggcacggggggagagcaggcgagccccttgcgtctcttctcagaaagacgaatcctgttggatgagggccccaccctcaggaccgatgtaaccttaatgacttctgtagaggccccatctccaaatacagacatgctgcagttaggtcttcagcatttgttctttaatagaattttcaatgccagcttgcaccattaagtcattgacattcttctgtaagtcctcaatgcgatttcccatttcttccattctgaggtttaatgttgccgtcagagcttgaaaatgttcctgaagttcctgaaatagattttctgccgcgtcccgcagcgcgcgcccgccgggggcttcagggccccgcacgtccatgtggaccgctggccgggggcgtcagtggggggtcccgtgggccgcgcggacccggcgcgaggtggcgacagctaagctccgcg

SEQ ID NO: 565 - DNA, 1701 bp, Homo sapiens
  misc_feature (897)..(897): n equals a,t,g, or c
tagtaacggycgccagtgtgctggaattcgcccttgcartgrcagacrtyyctggtggtggtgcataatctctagtatcacgagaacttgggtaatctctgcttgaatagctgtctttagtagaatacccatcatctcttggggacaaataaacatctctacgagagggcagcggttcccttcgaggtggacctccataactatctcttccacgtgatacaggagctcttcctcccattccactgctactgcgaactggtcctgaaggtgcagatctcttaggaggaggacccccacttcttggtggtggtcctctttttactgggagtggtcccctggaagaactcatgttaaaattcatggaatatccaccgtcatccatgtgtcctccccgtgagggaggtcccctggttcctccacttcctcctcttccacctctaagacctcttggagggcctctacttcttggaggtggaggcggtccacgtctaccactttcaaatgatggtttggtggcttgttccaccttgatggcttttccatctaatgactttccattcatgtctctggctgcatccttagcgtctgctgggctttcaaaggtgacaaaagcaaatcctcttgatttgttggtttcacggtctttcatcaagagtacttccactattcgtccatatttgccaaatactgcttcaagagctttctcatttgtttccgtattaagcccaccaatgaagagctttcctgggcgatctgcttcaaccatttttttttttttttgggccggtgagtcggaggggtgacaatgggttcaagctccaacgagctcggcgataggggcttcctagcagctcagcaccagtggcggctgccgggtgcgaggaccgaaccgcgttngtgccgaattcgggaaaaaggagaaacccagcttgatattgttggaatctggtggacagtaacaaactttggtgaaatttcaggaaccatagccattgaaatggataagggaacctatatacatgcactcgacaatggtctttttaccctgggagctccacacaaagaagttgatgagggccctagtcctccagagcagtttacggctgtcaaattatctgattccagaatcgccctgaagtctggctatggaaaatatcttggtataaattcagatggacttgttgttgggcgttcagatgcaattggaccaagagaacaatgggaaccagtctttcaaaatgggaaaatggctttgttggcctcaaatagctgctttattagatgcaatgaagcaggggacatagaagcaaaaagtaaaacagcaggagaagaagaaatgatcaagattagatcctgtgctgaaagagaaaccaagaaaaaagatgacattccagaagaagacaaaggaaatgtaaaacaatgtgaaatcaattatgtaaagaaatttcagagcttccaagaccacaaacttaaaataagtaaagaagacagtaaaattcttaaaaaggctcggaaagatggatttttgcatgagacgcttctggacaggagagccaaattgaaagccgacagatactgcaagtgactgggatttttgtttctgccttatctttctgtgtttttttctgaataaaatattcagaggaaatgcttttaaraaaaaaaaaaaaaaaaaaaaaaaaaaaaaaaaaaaaaaaaaaa

SEQ ID NO: 566 - DNA, 2433 bp, Homo sapiens
  misc_feature (13)..(13): n equals a,t,g, or c
  misc_feature (948)..(948): n equals a,t,g, or c
aacctaagcaacncattatgggcagtgggattttgggactcgcctttgccctggaaacactggaatcctactttttctggtacttttgacttcagtgacattgctgtctatatattcaataaacctcctattgatctgttcaaaagaaacaggctgcatggtgtatgaaaagctgggggaacaagtctttggcaccacagggaagttcgtaatctttggagccacctctctacagaacactggagcaatgctgagctacctcttcatcgtaaaaaatgaactaccctctgccataaagtttctaatgggaaaggaagagacattttcagcctggtacgtggatggccgcgttctggtggtgatagttacctttggcataattctccctctgtgtctcttgaagaacttagggtatcttggctatactagtggattttccttgagctgtatggtttttttcctaattgtggttatttacaagaaatttcaaattccctgcattgttccagagctaaattcaacaataagtgctaattcaacaaatgctgacacgtgtacgccaaaatatgttaccttcaattcaaagaccgtgtatgctttacccaccattgcatttgcatttgtttgccacccgtcagtcctgccaatttacagtgagcttaaagaccgatcacagaaaaaaatgcagatggtttcaaacatctcctttttcgccatgtttgttatgtacttcttgactgccatttttggctacttgacattctatgacaacgtgcagtccgacctccttcacaaatatcagagtaaagatgacattctcatcctgacagtgcggctggctgtcattgttgctgtgatcctcacagtgccggkgttatttttcacggttcgttcawctttatttgaactggctaagaaaacaaagtttaatttatgtccgtcataccngtggttacctgcatactcttggttgttatcaacttgttggtgatcttcataccctccatgaaggatatttttggagtcgtaggagttacatctgctaacatgcttawtttcattcttccttcatctctttatttaaaaatcacagaccaggatggagataaaggaactcaaagaatttgggctgcccttttcttgggcctgggggtgttgttctccttggtcagcattcccttggtcatctatgactgggcctgctcatcgagtagtgacgaaggccactgaaacccgccgagaaaaagaaacatccctgttgtctgctcagtcaagtccccacacatcagcaatctctcaccacttcttttgcaagtttacagaagcaaacagaaatgtacaggatacttaaaatggaataactttttggttgcaaaacagagacatggttctataatgcttcatgtccctccaagatttgagatcaatttagggattgtgaaatttttttttcaaatttcatacaatcatatttcccagtacttttcacaatcattttttacccatctaactctatgttttgtggcttcccggtctcttagaactttgaaaacatgatatacaataatgtttatttattatacatccagattctgaaataattttcctactgatgttcagctcacactatctgtacctttttagaagagaaaagaatcttgaattgtatatatttattttgctttacagaaaaaaatggtttcgtaaataatttgcctattttggttaacatagcacatggagataatcatctgaaagttatagggcactgccactgctgaatcagagcatgcccaatatttgaggtggctctgatttcctggcagctgaactcgggtagtccagtggcctagctggtaccacatctattcccatccagagacattctctggcaagtgttctcagctgaaaagtggttggggatgattcttaccttggtaattaaatgaagctacacatttgggtaatctagcaaatgaagtattttttccctcttggcaacttgtgtcagagttactctggtctgagtcaactttcgctggggaaaacctatggaacctactgcaaaaagattgtccaaaatgcctaagaaaatactcctctgatgcatttagccttcaaccctacctgtcttgctgaagggagaaaaatgttttagtacattataggcccagcagcttttattcatgtccaccagctagttgcacagagaatcatgtgtacctaactaaggatgatctaggataagtaactcctgttttatattgagtattttagggaagtctttaaaagacttgttttatatctataaatctaggttattacaaatacaagaattttgtaccttaaataagcctcatttctatttcttcttcattaattctccatctagtcttgtgaaaaaaaaaaaaaaaaaaaaaaagggcggccgct

SEQ ID NO: 567 - DNA, 898 bp, Homo sapiens
attccctcaagtgggaccagcctatctctagcactcaagagtctgggagactggaggctggaggggccagtcccaaactcagatgggatcatgtggattcaggtggcaccaggagaccaggggtgtacctgaaggggactgagcgtccctgggccaggagccccattggagaaacctggtaggcgtgagaagctgttgggctggctgcggggggaaccaggagctcctcccggtacttggggggcccagaagagtgtctgcagatctccaccaacctgaccctgcatcttctggagctgctggcctctgccctgctggccctgtgctcacgaccactgcgggcagccttggacacactgggcctgcgtggaccgctgggcctctggctacatggcctactgtccttcctggctgccctgcatgggctccatgctgttctgagcctacttactgcccaccctttgcacttcgcctgcctctttggtctcctgcaggccttggtgctggctgtcagcctccgggagcccaatggggatgaggcggccactgactgggagagtgaggggttggagagggaaggtgaggagcagaggggagacccgggaaaggggctgtgaccgtggggtgggggcaaagggtgaagagagtgtgggctttaggagaaaagtgtgaggcatgacccaaattgtaagcatagggacctcagggatggggaagaaacccgagtacgagggtgcagggccccccttcatacacaggagagaacagaactatttagggtgtttgtgtttatggacagtgagggcactgctcttggattcaccagctgttatttttgcttttacttttctcccaccttcagtttttttttttttttccacctccactttttaaaagc

SEQ ID NO: 568 - DNA, 387 bp, Homo sapiens
  misc_feature (346)..(346): n equals a,t,g, or c
  misc_feature (365)..(365): n equals a,t,g, or c
ggtacgcccgcaggtaccggtccggaattcccgggtcgaggggcccaagcttacgcttgcatgcgacgtcatagctctctccctatagtgagtcgtattataagctaggcactggccgtcgttttacaacgtcgtgactgggagatctgctagcttgggatctttgtgaaggaaccttacttctgtggtgtgacataattggacaaactacctacagagatttaaagctctaaggtaaatataaaatttttaagtgtataatgtgttaaactagctgcatatgcttgctgcttgagaggtttgcttactgagtatgawttatgaaaatattatmccaggagctagnggattctaaatggttgggnattttagaattcacagtcccaa

SEQ ID NO: 569 - DNA, 429 bp, Homo sapiens
  misc_feature (1)..(1): n equals a,t,g, or c
  misc_feature (405)..(405): n equals a,t,g, or c
  misc_feature (420)..(420): n equals a,t,g, or c
ntcttttttttgatttctaaaaagacgcaacaaaaattttttattgtaaattgacaatttataattgtataaatgtatgggttacaaagtgatatcataaattgtggatacaatatggaatagttaaatcaagctagttaacatatgcaatacttcaaatacatttctgtgatgagaacatcaattttgaaatgtrtaatacyccattattaagtatakgcaccacactgtacaaaatctccctttacatttaagaatctgtacattaggccggccgcggtggctcacatctgtaatcccagcactttgagaggccgaggcgggtggatcacctgaggtcaggagtttgagaccaacctggccaacatggtgaaaccccgtctccactaaaaatacaaaaattanctgggcgtggtggcncacgcctgt

SEQ ID NO: 570 - DNA, 923 bp, Homo sapiens
  misc_feature (4)..(5): n equals a,t,g, or c
  misc_feature (28)..(28): n equals a,t,g, or c
  misc_feature (699)..(699): n equals a,t,g, or c
  misc_feature (714)..(714): n equals a,t,g, or c
  misc_feature (721)..(721): n equals a,t,g, or c
  misc_feature (767)..(767): n equals a,t,g, or c
  misc_feature (785)..(785): n equals a,t,g, or c
  misc_feature (891)..(891): n equals a,t,g, or c
  misc_feature (896)..(896): n equals a,t,g, or c
gacnntctagaatagtgggtcccccggntgcaggattcggcacgagcgcatagccgcactactacttgaccgcatggaggactttgcaggatgatcctcgggccctgggggcccgtgggcaccgtcgttctgtcagcagaggctcctaccagctgcaggcgcagatgaaccgtgccgtctatgaggacaggccccctggcagcgtggtgcccacgtcagcagcagaggcaagtcgggccatggccggggacacgtcactgagcgagaactatgcctttgcgggcatgtatcatgtttttgaccagcacgtggatgaggcagtcccaagggtgcgcttcgccaatgatgaccgacaccgcctggcctgctgctcactcgacggcagcatctccctgtgccagctggtgcctgccccacccacagtgcttcgcgtgctacggggccacacccgtggtgtctccgacttcgcctggtccctctccaatgacatcctcgtgtccacctcactggatgccaccatgcgcatctgggcctctgaggatggtcgctgcatccgagagatccctgaccccgatagcgctgaactgctctgctgcaccttccagcctgtcaacaacaacctcactgtggtggggaacgccaagcacaacgtgcatgtcatgaacatctccacaggcaagaaagtgaaggggggcttcnagcaagctgacaggnccgtgkncttgctctgtcctttgatgcccctggccggytgctctgggcsggtngatgaccgtggcaagtgncttctctttcctctttgatatggccacagggaacttaccaaagccaaccgttggtggtgcatgaagggagccyttgaacaaaatttwaacccggkcyttggtcaanccccnaggccccggaatccttaaatggttaaa

SEQ ID NO: 571 - DNA, 335 bp, Homo sapiens
tacttttccaccagaaaattgactgcatcggccagagtgataccagcatcgatatgttccttaataacagtttcatcactgaacggcgtgtcgttcagtgtcaggccatagtgttgttccagcaggcgtgtcagtagcatttgccagacagccactggcgacaggcagggcttcgccgcctgcgaaattgtagcaggtagagtgttcatgcttgctctcgtgaaattagttagcgttgagtggggtaaacagcgatgtatacgtagccgcaactaccaagagtatcggcttcgcaggtaaaaccgttgtggtacagggtgacgcattgggcatgg

SEQ ID NO: 572 - DNA, 2322 bp, Homo sapiens
tttttttttttttttttttttttttatgtagcccaaggagtttagtctcctttgctcagacagacagatctttattagtgttttcaacttattttgctcacaacttcccagcaagaaatgtcttacattgcaaccagttctcacatttagatgtatgggtgaaaagtttcacaaaacagtatttgcctttactacatgatgcattctggcctactttattctgcttcattgctgtgtaatgctggtgaccacttgctaattgatttcccattttactaaatgggctgggacccacggtctgaaaaccctgccttaggctgcaagcatttctgtgatctctgcgagctactccatataggtaaacacacgcgaggtaaactaggaaacagcttctgcttttgcagattagaagtgaagttgacatcacgccaagtacgaaaaggctaaacagctgacaaaatttccacttgagcaaccctggggagcgcaaacaggaggaatcggggcaagggtgacttgaagaaagcactggcagatcacgcactttaaggcaactctacactgcacaatgtcaaataacctagcatggggcggcactaaatggctgcaggaaagccgagtcttcttccacatccggcggctcccctcggatgcgagcgctggcccagggtgtgtttacagaggtgagggcttcccgtggacccttctcgttgggagcgcttagcctcaggagcggattcagggcacaggcagaggacgtccacaaacaccacaggaagccgccacccaggggcgtggaaaggcccaatgcctcgtctgggattcacggccggcaaagcggcccctccggaacgggacagcacagcggctcacctctgcgcctctgggggtgcggggggagcctcgccctccacgctctctgggggaccgcccgccctagcccccgcctgggattcgcgggtggacggttgggggccccgggcgccccccagcgcgtagcttttctccttctcgtgggtcttctggtgctcggctagggccaggctgaagtgsaaggtcttccagcagccctgacaggcgtagcgcttccggccgccatggctgctgtggtgctccatcaggtgcgagagccacgcgaaggcctccccgcactcgccgcaggcatagggcttcccgcgggacaagcccggctcgtcagccccagggccctgccggcctccagccctgcgctgtcgccggagctagagacgccctcgaggctctgcccgtccccatcctcggggtgcggcctcttggttcccagtttcgccgtgcccctgtccggggcaggctgctggatgacggactgcctctgcgatccggtggcagagtcggactccgcgtcctgggggtcctgcgggtccggggccttcccaggctgctcttcctcytcctcagtggtgcccgacgggggatcggcaagggcgtcccmagggggcgcctccgtaggcagctcaggcagcacccccgcgggggcggcctcctcgcaggcgcacccagcgctctcctgccgcctcccgccttctgggaggctgcttccttgtggatctctttccaccaaccggagttcctcagtgtccagcctggaggcagcgtcaggctgggaaagctgatacccccacaggagcagcttccggtagctcttcaggttctcctcggcagggtccaggtggccccactcccccaggtgctgagggtcctctggaaaggacttcagcttctgctcggtgttggcagggccgtcctcttcggtctttgcttctctgaccctcctctgttccagaaacagggggtccggagaaagccagggtgtctcagaaggtgccgggatctccccagctccaagggcctgctggggctcgcgagctcgcctggtagcagcagagggtccatgtgcctctcgtacactccatcgctaagaattgaggatgagcccgcaggggagcccagcagcatccctggctcttccaggacatcagcgaggccctccaccagggaggctgccttcttgcagctctcagggtactgtgccaccacccagggccggaccttatcaggcaggatgcccaggaactgctccagcaccagcagctccagcatctgctccttggagcgcgcctcaggcatcagccactggcggcacagctcatgcagccgggccagggtctggtggggcccggcagcctcctggtagacaaattcccggaaacgcaggcgggagaactccaggtcagcaggggtcctctcagggatggtctcgggttcttcctgctggactccggc

SEQ ID NO: 573 - DNA, 2894 bp, Homo sapiens
  misc_feature (1362)..(1363): n equals a,t,g, or c
  misc_feature (1686)..(1686): n equals a,t,g, or c
actagttctagatcgcgagcggccaccctttttttttttttttttttttttttttttttttttttttttttttttttcagtgctcaataaagatttattacattaaaaattccattgccaaaccctgaggcactcagggctctgaccggtgcagccatgacctctgaacccagaacacatggaagcagcagcagctgagttgccaactcaagtcttggcctgcctggctttgctggcgaactcctgcacacccttcaaggccctgttcaaatgtctctgtcttaggctgacgcagctgctgcccttctgtggccatacagtgctccttttcacagatgatggctcctgcagggagtgcccccagtgcccagcacagggccaggcacacagtggtgcacgggaacgtctgctgatgcccaccctaaggccaatcaaggagccacggggctgggtcctggtcctcacatcctcttccgcatcttgcccttcttggagcgggcaccccggccgaaggcgccctgctgcagctcctggacgcggcggcggttgcgggcagagagctgcttgaggccaccacgctgcaggaagtgcagcttctgggcccggcgccgctgcttcaggatctgctgcttggtcttgagttccgggcggactcggcctgcaggggtgcctggggcgtggggccgggatgcacctgcttggccacggtctcgcttcccacctcttcgctctgggcctcgccggtcagatgccccttcttcgtccgagtcacgatcatcaattttctgtttctgtttccacttctgatagaggtctcgcttgtaggagctgctgatgtagcggccgctctctgtcttaatcttcttcttgtcttcctgtcctgactgtcccacaaaccgcttcttcttacggtcccacttgagctgctgccggcccctcgtcaggttctgggcttcatcccccatcaagtccaggacagcgccagctgcctgctgctcaaaggctcccccttccccgctgatgctcaggccccgctcgctgtcaaagtccttgggccggtaggggatgtagaattcctggtcccgctgccgggcctcctccctccgcctcttggctcccctgttgggtcctgaccgctgccgcttccggcccacgacctctgagaaaatgtcckcccgggagcggtagttctttatgctgtccaccagcctcagccgctgcagctcctcctcctcaaaacgcgagctgaagagggggtgcakgcccagccccacaaggtccatctccttggccctcttgatggactcagcgarggcgccgggcgtgagcgcacatactgctgctgggcgttatcagcaacgnnggccaggccccgtagctccagcgatgcctccagggtgctctgcagaccactgtcctcctcgtccaccacactctgtggcacccgacccagcatgccatccacaccggccacacctgagggctccttgaggggtcgggcgagggtgagggagcggcccaggaacaggtgcagatccagcaggtaggggatttcatcaggggccaccaaggagtagctgtgccacttcggccagcccgagccacacggcccacgcggtgcaggaagagtttgcccttggcggggaagctgtagttgatgacattgtccagcagcgggatgtccangcctcgggcggccaggtcagtcacaatgagagtggagcacttgccaagcgtgaatttggcgagattgatcttgcgggctgtcgggtctagggcactgtagatgtgggcgcagctcacccgctgggtcgtcagcagctcagtgaggtactcggcgtggtgcttcgtggccacaaacaccacggtctggtcctggggccgcaccacgttgtgcagcaggtggagcagcacggcagccttggtgtcctcccgcacgaggaagaaggaggtcttcagctgctcgttgagcttggtatccacgtcaagccggatgagcacgggctccgtgaggccagcccgggcaaattccaccagcagtttgggcagcgtggcggagaacagcaccgtctggtggcccccggggaggcgggcgatgatctcctgcagctgctctgcgaaacccatttcaaaaagccggtcagcttcatcgaacaccacgtattccacactctgcagcttcaggctcatttccacagccacatgcaccaaccgtccgggcgtggcaataattatgtcgggattttcgtgcagggctgcaaactggtcttccatcctgtctccacccaggatcagggcagtcttgaggccagtgaacttgcctagctccttagtgaacttcagggtctgcagggccagctctcgggtcggcgagaggatgagggcgcgggccccggtctgggcactgtgggtcttgagccgctcgaacattgggaggaggaagcaggctgtcttgccactgcccgtccgggccatggccaccacgtccttgccatccaagatcaccgggatggtcttcctctggatgggtgttggcaccttgtaccccttcttcatgatgcctttgaacaccgggtagctcaggcccatggactggaagcctccagacttcttcttcttcttgttctgggcacgcaccatctcccgggtgtccggctccacatccgaggtgcattccgaggtggggaaggtgggcaggggtcttccaggtcccagcttccgggcccgggcgtcatcttccgcctggatctcaaactcgccgtcctccgagtgctgccgcgggcctgggaggccgcgcctcggcgcttccggagccctttcttcttcctccactgggccatggcagctcgcgaccgaggtccagccgccgggcgcttgtcggccgccattcgggc

SEQ ID NO: 574 - DNA, 2442 bp, Homo sapiens
  misc_feature (2179)..(2179): n equals a,t,g, or c
gcccacgcgtccgcccacgcgtccgcccacgcgtccgacggaagcgagcctgttgcgccagtgccccctgcttctgccccagaaccggtcgaaaaccgtgtatgagggattcatctcggctcagggaagagacttccaccttaggatagtgttgcctgaagatttacaactgaagaatgcaagattattatgtagttggcagctgagaacaatacttagtggataccatcgaatagtacaacagagaatgcagcactctcctgatctaatgagctttatgatggagttgaagatgcttttggaagttgccttaaagaatagacaagagctgtatgcactacctcctcctccccagttctactcaagccttattgaagagataggaactcttggttgggataaacttgtgtatgcggatacctgcttcagtaccatcaagttaaaagcagaagatgcttctggtagagagcatttaatcactctcaagttgaaggcaaagtatcctgcagaatcaccagattattttgtggattttcctgttccattttgtgcctcctggacacctcaggtaaattctcctcagagctcctkaataagcatttatagtcagtttttggcagcaatagaatcactaaaggcattctgggatgttatggatgaaatcgatgagaagacctgggtacttgagccagaaaaacctccacggagtgcaacagcacgcagaattgcattaggtaataatgtttccataaatatagaggtagaccccaggcatcctactatgcttcctgagtgcttctttcttggagctgaccatgtggtaaaacccctgggaattaagctgagcaggaacatacatttgtgggatccagaaaatagtgtgttacaaaatttgaaagatgttttagaaattgattttccagctcgtgctatcctggaaaaatctgattttactatggattgtggaatttgttatgcttatcaacttgacggtaccattcctgatcaagtgtgtgataattcccagtgtggacaacctttccatcaaatatgcttatatgaggtaaaaaataaaaatattgtcaagacttttttccgctaacacaacataggaagtattcctgtttgaaatacacagaatctaaaatctgttgagtcaatagtgatcctctcttttgccattaactccttttaccagtttattccagatgcttatgtgcttcatttcttcatcacagttactaatgagtggagaaatgttctgaagtatccaagggagaaaatctatccagaatatattcatggactagcttattgacacataacaaattaaattgatggtacattggaatctttctataaattccttgttaccacaatgtaagcttcataggtttacccgaggtggaggtggttgaaagtggcagtaatacagtgaaaatgaaattagtactatgtagtatctattacttttcaggctgcatttaagaatagaatatatccaatactactacttttcatgttgagaagaatgccttttgtgatctgagtctcacagcactcaggcaatgccactttacttactgtatgtgaagtctactttcattcctgtctttagtgcctggcttcaccttagggcctagttgatacatgataaactgtgtgtaactatatacagaacaccttgcaattgtatgttgcttcggtttcagtcttccttaatatcacatctttacttttgtgattagaggtagcagttggtgccgtctgtactttgccaatggagwwcttaggcagaggcatctatttaccttatataaaatcatgaaattacagaaatacaggtcaaattacagaaatactctaagggaacatgtgatttcttttgtaattatgaatattcatttaatttttaaaaattcactggctcatgcttataatcaatgggttgaaaattaacccactgttagtgattcagaccagaactaagagggaaattttcaagagcctgtagtatctttaacagcaggagttgttaatttgtgattaatggatttagggaaagtctatgaatgccaggaacttagtatgcaytatttytatgtatgtctattctggggataaagaaaatgcgtaattcttatcagattcttaaaggggcccataatctggttataanccagtggtttaggccttcaattccatgttgatttcccttgttactcaacatcttaatagtctgctattggctcaggaaatacatcccttactcttgcaaaacaaaattaagctaagtcttctggaataaaaacataatgcacttaaaaacaaagggaatgacatttggagtatctgtaatttgtaatcatgctgacgcttctcctttatcttttaaaatttgcagtggctgagaggactactaactagtagacagagttttac

SEQ ID NO: 575 - DNA, 1663 bp, Homo sapiens
gcggacgcgtgggcggacgcgtgggcggacgcgtgggtgagtccagtgagccgacagtccataagaaactcccagaagcacagccccacttcagagcccacccccccgggggatgccctaccaccagtcagctccccacatactcacaggggctaccagccaacaccagccatggccaagtacgtcaagatcctgtatgacttcacagcccgaaatgccaacgagctatcggtgctcaaggatgaggtcctagaggtgctggaggacggccggcagtggtggaagctgcgcagccgcagcggccaggcggggtacgtgccctgcaacatcctaggcgaggcgcgaccggaggacgccggcgccccgttcgagcaggccggtcagaagtactggggccccgccagcccgacccacaagctacccccaagcttcccggggaacaaagacgagctcatgcagcacatggacgaggtcaacgacgagctcatccggaaaatcagcaacatcagggcgcagccacagaggcacttccgcgtggagcgcagccagcccgtgagccagccgctcacctacgagtcgggtccggacgaggtccgcgcctggctggaagccaaggccttcagcccgcggatcgtggagaacctgggcatcctgaccgggccgcagctcttctccctcaacaaggaggagctgaagaaagtgtgcggcgaggagggcgtccgcgtgtacagccagctcaccatgcagaaggccttcctggagaagcagcaaagtgggtcggagctggaagaactcatgaacaagtttcattccatgaatcagaggaggggggaggacagctaggcccagctgccttgggctggggcctgcggaggggaagcccacccacaatgcatggagtattatttttatatgtgtatgtattttgtatcaaggacacggagggggtgtggtgctggctagaggtccctgcccctgtctggaggcacaacgcccatccttaggccaaacagtacccaaggcctcagcccacaccaagactaatctcagccaaacctgctgcttggtggtgccagccccttgtccaccttctcttgaggccacagaactccctggggctggggcctctttctctggcctcccctgtgcacctggggggtcctggcccctgtgatgctcccccatccccacccacttctacatccatccacaccccagggtgagctggagctccaggctggccaggctgaacctcgcacacacgcagagttctgctccctgaggggggcccgggaggggctccagcaggaggccgtgggtgccattcgggggaaagtgggggaacgacacacacttcacctgcaagggccgacaacgmaggggacaccgtgccggcttcagacactcccagcgcccactcttacaggcccaggactggagctttctctggccaagtttcaggccaatgatccccgcatggtgttgggggtgctggtgtgtcttggtgcctggacttgagtctcaccctacagatgagaggtggctgaggcaccagggctaagcaattaaaccagttaagtctcccaaaaaaaaaaaaaaaaaaaaaaaaaaaaaaaaaaaaaaaaaaaaaaaaaaaaaaaaaaaaaaaaaaaaaaaaaaaaaa

SEQ ID NO: 576 - DNA, 2984 bp, Homo sapiens
  misc_feature (2953)..(2953): n equals a,t,g, or c
  misc_feature (2974)..(2974): n equals a,t,g, or c
  misc_feature (2979)..(2981): n equals a,t,g, or c
gaaagaaagcagttaaagcagttctgtgggtctcagcagatggactcagagttgtggatgaaaaaactaaggacctcatagttgaccagacgatagagaaagtttctttctgtgccccagacaggaactttgatagagccttttcttacatatgccgtgatggcaccactcgtcgctggatctgtcactgcttcatggctgtcaaggacacaggtgaaaggttgagccatgcagtaggctgtgcttttgcagcctgtttagagcgcaagcagaagcgggagaaggaatgtggagtgactgctacttttgatgctagtcggaccacttttacaagagaaggatcattccgtgtcacaacagccactgaacaagcagaaagagaggagatcatgaaacaaatgcaagatgccaagaaagctgaaacagataagatagtcgttggttcatcagttgcccctggcaacactgccccatccccatcctctcccacctctcctacttctgatgccacgacctctctggagatgaacaatcctcatgccatcccacgccggcatgctccaattgaacagcttgctcgccaaggctctttccgaggttttcctgctcttagccagaagatgtcaccctttaaacgccaactatccctacgcatcaatgagttgccttccactatgcagaggaagactgatttccccattaaaaatgcagtgccagaagtagaaggggaggcagagagcatcagctccctgtgctcacagatcaccaatgccttcagcacacctgaggaccccttctcatctgctccgatgaccaaaccagtgacagtggtggcacacaatctcctaccttccaagggaccgagtggggtcaatcttctggtgctgcctctccaggtctcttccaggccggtcatagacgtactccctctgaggccgaccgatggttagaagaggtgtctaagagcgtccgggctcagcagccccaggcctcagctgctcctctgcagccagttctccagcctcctccacccactgccatctcccagccagcatcacctttccaagggaatgcattcctcacctctcagcctgtgccagtgggtgtggtcccagccctgcaaccagcctttgtccctgcccagtcctatcctgtggccaatggaatgccctatccagcccctaatgtgcctgtggtgggcatcactccctcccagatggtggccaacgtatttggcactgcaggccaccctcaggctgcccatccccatcagtcacccagcctggtcaggcagcagacattccctcactacgaggcaagcagtgctaccaccagtcccttctttaagcctcctgctcagcacctcaacggttctgcagctttcaatggtgtagatgatggcaggttggcctcagcagacaggcatacagaggttcctacaggcacctgcccagtggatccttttgaagcccagtgggctgcattagaaaataagtccaagcagcgtactaatccctcccctaccaaccctttctccagtgacttacagaagacgtttgaaattgaactttaagcaatcattatggctatgtatcttgtccataccagacagggagcagggggtagcggtcaaaggagcaaaacagactttgtctcctgattagtactcttttcactaatcccaaaggtcccaaggaacaagtccaggcccagagtactgtgaggggtgattttgaaagacatgggaaaaagcattcctagagaaaagctgccttgcaattaggctaaagaagtcaaggaaatgttgctttctgtactccctcttcccttacccccttacaaatctctggcaacagagaggcaaagtatctgaacaagaatctatattccaagcacatttactgaaatgtaaaacacaacaggaagcaaagcaatctccctttgtttttcaggccattcacctgcctcctgtcagtagtggcctgtattagagatcaagaagagtggtttgtgctcaggctggggaacagagaggcacgctatgctgccagaattcccaggagggcatatcagcaactgcccagcagagctatattttgggggagaagttgagcttccattttgagtaacagaataaatattatatatatcaaaagccaaaatctttatttttatgcatttagaatattttaaatagttctcagatattaagaagttgtatgagttgtaagtaatcttgccaaaggtaaaggggctagttgtaagaaattgtacataagattgatttatcattgatgcctactgaaataaaaagaggaaaggctggaagctgcagacaggatccctagcttgttttctgtcagtcattcattgtaagtagcacattgcaacaacaatcatgcttatgaccaatacagtcactaggttgtagttttttttaaataaaggaaaagcagtattgtcctggttttaaacctatgatggaattctaatgtcattattttaatggaatcaatcgaaatatgctctatagagaatatatcttttatatattgctgcagtttccttatgttaatcctttaacactaaggtaacatgacataatcataccatagaagggaacacaggttaccatattggtttgtaatatgggtcttggtgggttttgttttatcctttaaattttgttcccatgagttttgtggggatggggattctggttttattagctttgtgtgtgtcctcttcccccaaacccccttttggtgagaacatccccttgacagttgcagcctcttgacctcggataacaataagagagctcatctcatttttacttttgaacgttggccttacaatcaaatgtaagttatatatatttgtactgatgaaaatttataatctgctttaacaaaaataaatgttcatggtagaaaaaaaaaaaaaaaggggnggcccttttaaaggatccaanttttnnnccc

SEQ ID NO: 577 - DNA, 512 bp, Homo sapiens
ggcacgaggagggtggtactggggcggtaasaggctgtgagctctccggccacacccgctccttcacctttaaggtagaggaagaggatgatgcggmmrcgtgctggcactaaccatgctctgcctcaccgagggagccaaagacgagtgtaatgtggtagaagttgtggcccggaaccatgaccatcaggagatcgcagtccctgtggccaacctcaagctgtcctgccaacccatgctcagtctggatgacttccagctccaaccacctgtaaccttccgcctgaagtcgggytctggccmtgtgcggatcactgggcggcaccagattgttacgatgagcaatgatgtttctgaggaggagagcgaggaagaggaagaggacagtgatgaggaagaagttgagctgtgccccatccttcctgccaaaaagctaggggggcaggccctagcctcctaggtcagctccatgtgccatgcacgccatgcaccctgttcactgacaagtgtca

SEQ ID NO: 578 - DNA, 1277 bp, Homo sapiens
  misc_feature (21)..(21): n equals a,t,g, or c
  misc_feature (24)..(24): n equals a,t,g, or c
  misc_feature (72)..(72): n equals a,t,g, or c
ggaagcttcttaggtgttctntanaaggccgcctgcaggtaccggtccggaattcccgggtcgacccacgcntccggccggaagcaggcgccgcttcgaggcccgcggaaaacgcgcgccgagacccgctcctgcagtattagttcttgcagctggtggtggcggctgaggcggcatggatctcagcgagctggagagagacaatacaggccgctgtcgcctgagttcgcctgtgcccgcggtgtgccgcaaggagccttgcgtcctgggcgtcgatgaggcgggcaggggccccgtgctgggccccatggtctacgccatctgttattgtcccctgcctcgcctggcagatctggaggcgctgaaagtggcagactcaaagaccctattggagagcgagcgggaaaggctgtttgcgaaaatggaggacacggactttgtcggctgggcgctggatgtgctgtctccaaacctcatctctaccagcatgcttgggcgggtcaaatacaacctgaactccctgtcacatgatacagccactgggcttatacagtatgcattggaccagggcgtgaacgtcacccaggtattcgtggacaccgtagggatgccagagacataccaggcgcggctgcagcaaagttttcccgggattgaggtgacggtcaaggccaaagcagatgccctctacccggtggttagtgctgccagcatctgtgccaaggtggcccgggaccaggccgtgaagaaatggcagttcgtggagaaactgcaggacttggatactgattatggctcaggctaccccaatgatcccaagacaaaagcgtggttgaaggagcacgtggagcctgtgttcggcttcccccagtttgtccggttcagctggcgcacggcccagaccatcctggagaaagaggcggaagatgttatatgggaggactcagcatccgagaatcaggagggactcaggaagatcacatcctacttcctcaatgaagggtcccaagcccgtccccgttcttcccaccgatatttcctggaacgcggcctggagtcagcaaccagcctctagcagctgcctctacgcgctctacctgcttccccaacccagacattaaaattgtttaaggagaaccacacgtaggggatgtacttttgggacagaagcaaggtgggagtgtgctctgcagccgggtccagctacttccttttggaaccttaaatagaatgggtgttggttgattaaaaaaaaaaaaaaaaaaaaaaaaaaaaaa

SEQ ID NO: 579 - DNA, 805 bp, Homo sapiens
  misc_feature (761)..(761): n equals a,t,g, or c
gacccacgcgtccgagcatttagcagagtgcttgcttcactctattctctcagaactaaaaattcagaagatatctatggaccacaattacattcacgccctctgcagggtgtatgtgggtatttgtcggcaactcggagacttggaaagagctcgtttgttttgctacagcctacttaaagaagattttccggagtctgaaaaattaactttgtttattgcaaacatgtgggcatgatatatttctctctcaatcggtgattaataaagcaatgcagttagttgccaggcaacgtgctaaaggagaggttctgaactgcttgagagcttttcttaattgggaaaagaatgccccggtagatgttggcttcatggtttctaagctgcttttgaccatacagttatgtccmaaaacagaatttcaacctagtgaaaaatttggtgaagacctaagtgataacacttgggaatacatatttgccattgatctgctctgctgccatcagaaatggatctggacgcatgataacatcataagtaaggagctgtggcctgtgatggataaatggataaaatacagaaaaggacatgcaaacattgcgtatactcctgatattattatagcctccaattactgagrctgattggtcgtttaggccaattgggtttgaaagaagggttttccatctgctgtgaaaaaatattaagttcggttattggtatgtttattacagcatgctcacggtgaaggttattacccntgggggtataccagtttagcagcccgtgtatgctcctttgtgac

SEQ ID NO: 580 - DNA, 916 bp, Homo sapiens
  misc_feature (557)..(557): n equals a,t,g, or c
  misc_feature (715)..(715): n equals a,t,g, or c
  misc_feature (766)..(766): n equals a,t,g, or c
  misc_feature (835)..(835): n equals a,t,g, or c
  misc_feature (859)..(859): n equals a,t,g, or c
gtgccagtctatacaggattctcagcaagttacagaagtatctttgacaactcttgtgaactttgtggacattacccagaagccacagcctccaaggggccaacccaaaatggactggaaatggccattcgacttctttcccttcaaagtggcattcagcagaggagtattctctcaaaaatgctcagtctctcccatccttatcctgtgcctcttactacttggagttctcaacctagagactatgtgaagaaaagaaaataatcagatttcagttttccctatgagaaactctgaggcagccacttatcttggctaaatagaacctcacctgctcatgaccagagagcatttaggataatagaggacctaactgaaggaatccttgtatatgaaaggagttattttagaaaagcaataaaaatattttattcatcatagctctctgctttgggctctgcaggccaccagatacacatgaggcccctacttctcaagctgggaaggccaagagccttccttcagcctttctggttatgttacacctagctgaatgnttacaaggtctggatccatcagccctcaggcayagttgggccaagcagaaagagagaacacttctgctgtcaccttgaatgaactcaggaatagcttccctctggactgtagaggagctaactgtttggaacagaaaactgctggctggtgattttgnctggtcctttgccaacatctgggcacaccctttgcccagaccgagtggggnaaagcagtctttcttctagtttccaaagtaaaatggggaatcccagctttcttttctactacaaatganccctaccatttattctgccttttncttccggtcattggaggaaaaataaaactgggttgagaaagctttgtgctaaaaaaa

SEQ ID NO: 581 - DNA, 1026 bp, Homo sapiens
gagaaaccactttttgttgaacatctatgtaccaaaccaagtcagtaaggcactcatggtaccggcgccggcgcagctgtgactgtcgctgcagacggaaactgactggggtcaattcaagtcatgcaggctgtgagaaacgcggggtcgcggttcctgcggtcctggacttggccccagacagccggcagggtcgtggccagaacgccggccgggaccatctgcacaggcgctcgacagctccaagacgctgcggccaagcagaaagttgaacagaacgcggctcccagccacaccaagttcagcatttaccctcccattccaggagaggagagctctctgaggtgggcaggaaagaaatttgaggagatcccaattgcacacattaaagcatcccacaacaacacacagatccaggtagtctctgctagtaatgagccccttgcctttgcttcctgtggcacagagggatttcggaatgccaagaagggcacaggcatcgcagcacagacagcaggcatagccgcagcggcgagagctaaacaaaagggcgtgatccacatccgagttgtggtgaaaggcctggggccaggacgcttgtctgccatgcacggactgatcatgggcggcctggaagtgatctcaatcacagacaacaccccaatcccacacaacggctgccgccccaggaaggctcggaagctgtgatgggaaggaggcctgcacttggacctgacctcaagcctcagctccagtgggaccttgtaaaatgctccctgtcagagctctccagaatatgcttgttggagatccttcaggcagtaagggagagttttgcctccttacacagtggcctttgcttgcacctccagctggagatgggtgtgccccagaagtaagctttgcatctcttacaagaggggagctacaggggcagccgtggcctaggcccaaactctgctctgagaaaataaatatctgtaccacctgtcaaaaaaaaaaaaaaaaaaaaaaaaaaaaaaaaaa

SEQ ID NO: 582 - DNA, 627 bp, Homo sapiens
  misc_feature (29)..(29): n equals a,t,g, or c
  misc_feature (69)..(70): n equals a,t,g, or c
  misc_feature (616)..(616): n equals a,t,g, or c
  misc_feature (622)..(622): n equals a,t,g, or c
  misc_feature (627)..(627): n equals a,t,g, or c
ctatttaggtgacactatagaaggtacgnctgcaggtaccggtccggaattccgggtcgcccacgcgtnngaaagttctagtggcttgaggtatccgcaggagcggccgggtggcgggaggaaccgttacgggaactgaagttgcggattaagcctgatcaagatgacaacctcccaaaagcaccgagacttcgtggcagagcccatgggggagaagccagtggggagcctggctgggattggtgaagtcctgggcaagaagctggaggaaaggggttttgacaaggcctatgttgtccttggccagtttctggtgctaaagaaagatgaagacctcttccgggaatggctgaaagacacttgtggcgccaacgccaagcagtcccgggactgcttcggatgccttcgagagtggtgcgacgccttcttgtgatgctctctgggaagctctcaatccccagccctcatccagagtttgcagccgagtagggactyctcccctgtcctctacgaaggaaaagattgctattgtcgtactcamcttcgacgtactccggggtctttttgggagttttctcccctaaccatttcaacttttttttggatctcgttttgnatgctnccccn

SEQ ID NO: 583 - DNA, 2471 bp, Homo sapiens
  misc_feature (2401)..(2401): n equals a,t,g, or c
  misc_feature (2468)..(2468): n equals a,t,g, or c
gcggccgccggtcctccctccacctcctcctcggccccccctcgcttccctcctcccacttcccgagctccggcgtgtcccggccacgctcgacgctgctgcaggaacaaaggaagaccccgcggcggcggcggcgccacctccgcctgctgctccgacccgctcccggcccgcggcggcggcaccagggcgcccggctcagccttcccggaggcctcggcccggcctcatcgtgccggcttcgcgcgcgaacccggctttcgcatttgggaccctgcagggccctgaaaaggagcctttaaaagtcaattctactccatttggcaaagagggaactgaaatctggaaagtaaggacttgcccaaggtcactgacttagtggcagactagagacttgaactcaggtctccattcccagcagaaaaatatggctcaggagactaaccagaccccggggcccatgctgtgtagcacaggatgtggcttttatggaaatcctaggacaaatggaatgtgttcagtttgctacaaagaacatcttcagaggcagcaaaatagtggcagaatgagcccaatggggacagctagtggttccaacagtcctacctcagattctgcatctgtacagagagcagacactagcttaaacaactgtgaaggtgctgctggcagcacatctgaaaaatcaagaaatgtgcctgtggctgccttgcctgtaactcagcaaatgacagaaatgagcatttcaagagaggacaaaataactaccccgaaaacagaggtgtcagagccagttgtcactcagcccagtccatcagtttctcagcccagtacttctcagagtgaagaaaaagctcctgaattgcccaaaccaaagaaaaacagatgtttcatgtgcagaaagaaagttggtcttacagggtttgactgccgatgtggaaatttgttttgtggacttcaccgttactctgacaagcacaactgtccgtatgattacaaagcagaagctgcagcaaaaatcagaaaagagaatccagttgttgtggctgaaaaaattcagagaatataaattacttcttgtgaagagactgaaactttgtttttattttaatatatcgtaggaaaacattaaagagcagatgcatggccatttttctttgatgttctccagagttttacattacacttgtctgtcttataattgatattttaggatgtttgggtgtttgttacaggcagaattggatagatacagccctacaaatgtatatgccctcccctgaaaaaaattggatgaaaatctgcacagcaaagtgaaacacacagataataggaacaaaatgtagttcccatgtgccaaacaaaataaatgaaatctctgcatgtttgcagcatatctgccttttgggaatgtaatcaaggtataatctttggctagtgttatgtgcctgtatttttttaaaatggtacaccagaaaaggactggcagtctacttctaccatagttaaacttcaccctctttaatttcacaacatattctttggaagcaggaagaaatgctcataaagaggatcagaccttctttcccgtgaaaccagtatttggcgccatatataagcctggttaaattggtcatctaaagctgtcaaataagacattctgtgaaaggtaaacatcgaaactggttataagtaaaaccatcaagccaacaacagggtcttgagataacctttgaagcttattgtactggcctgcaccagaagatgtctgcattactcattgctaaaaatgtgtagcacagaactgcactaggattaatttgtttacaagaagaaatttaaactctacgtttggttttcacatacagcagctctattgaataacatgcatctgaattttaagttgcaaaggtatctgaataatttttcatgtgcatcttttgtcgaatgttttggttcaagaaagaatgtttaaagctttttaaaagacttcagttcttaatgtaactgtacccttctgcatggaaaatcataaccaacatggctgcagtagacttcttagtggtatccagcrccacttgcagagggctgctttatcatattgtacttgggtgtaggactctagtgttcttgggtgtattgcatgggctgcattatctacagcattgtacaataacaactagaaaaggcagtatacttcactgatgcttgtctggtaataatcacttctgtggttataatggaaggttttttgtgatgtatgaaacttggtgktttttatatataaatgagtatagttagtgttgtggtaatgcctgttttcatctgtaaatagttaagtatgtacacgaggcactmcttctgattatgcaatgttcagtcctagttttacttttattcntaaagcattcagtttgccttccaatttatgacctagtccgagtagaccgcagagtgaccgaaagtcnaat

SEQ ID NO: 584 - DNA, 2319 bp, Homo sapiens
  misc_feature (2283)..(2283): n equals a,t,g, or c
  misc_feature (2285)..(2285): n equals a,t,g, or c
  misc_feature (2305)..(2305): n equals a,t,g, or c
gccggttctccgaaacatggagtcctgtaggcaaggtcttacctgaatcaggatgagggagtggtgggtccaggtggggctgctggccgtgcccctgcttgctgcgtacctgcacatcccaccccctcagctctcccctgcccttcactcatggaagtcttcaggcaagtttttcacttacaagggactgcgtatcttctaccaagactctgtgggtgtggttggaagtccagagatagttgtgcttttacacggttttccaacatccagctacgactggtacaagatttgggaaggtctgaccttgaggtttcatcgggtgattgcccttgatttcttaggctttggcttcagtgacaaaccgagaccacatcactattccatatttgagcaggccagcatcgtggaagcgcttttgcggcatctggggctccagaaccgcaggatcaaccttctttctcatgactatggagatattgttgctcaggagcttctctacaggtacaagcagaatcgatctggtcggcttaccataaagagtctctgtctgtcaaatggaggtatctttcctgagactcaccgtccactccttctccaaaagctactcaaagatggaggtgtgctgtcacccatcctcacacgactgatgaacttctttgtattctctcgaggtctcaccccagtctttgggccgtatactcggccctctgagagtgagctgtgggacatgtgggcagggatccgcaacaatgacgggaacttagtcattgacagtctcttacagtacatcaatcagaggaagaagttcagaaggcgctgggtgggagctcttgcctctgtaactatccccattcattttatctatgggccattggatcctgtaaatccctatccagagtttttggagctgtacaggaaaacgctgccgcggtccacagtgtcgattctggatgaccacattagccactatccacagctagaggatcccatgggcttcttgaatgcatatatgggcttcatcaactccttctgagctggaaagagtagcttccctgtattacctcccctactcccttatstgttgtgtattccacttaggaagaaatgcccaaaagaggtcctggccatcaaacataattctctcacaaagtccactttactcaaattggtgaacagtgtataggaagaagccagcaggagctctgactaaggttgacataatagtccacctcccattactttgatatctgatcaaatgtatagacttggctttgttttttgtgctattaggaaattctgatgagcattactattcactgatgcagaaagacgttcttttgcataaaagactttttttaacactttggacttctctgaaatatttagaagtgctaatttctggcccacccccaacaggaattctatagtaaggaggaggagaaggggggctccttccctctcctcgaatgacgttatgggcacatgccttttaaaagttctttaagcaacacagagctgagtcctctttgtcatacctttggatttagtgtttcatcagctgtttttagttataaacattttgttaaaatagatattggtttaaatgatacagtattttaggtatgatttaagactatgatttacctatacattatatatattttataaagatactaaaccagcatacccttactctgccagagtagtgaagctaattaaacacgtttggtttctgaataaattgaactaaatccaaactatttcctaaaatcacaggacattaaggaccaatagcatctgtgccagagatgtactgttattagctgggaagaccaattctaacagcaaataacagtctgagactcctcatacctcagtggttagaagcatgtctctcttgagctacagtagaggggaagggattgttgtgtagtcaagtcaccatgctgaatgtacactgattcctttatgatgactgcttaactccccactgcctgtcccagagaggctttccaatgtagctcagtaattcctgttactttacagacaggaaagttccagaaactttaagaacaaactctgaaagacctatgagcaaatggtgctgaatactttttttttaaagccacatttcattgtcttagtcaaagcaggattattaagtgattatttaaaattcgtttttttaaattagcaacttcaagtataacaactttgaaactggaataagtgtttattttctattaataaaaatgaattgtgacaaaaaaaaaaaaagggccngncccgttttaaaagggatccnaagctttaccgtac

SEQ ID NO: 585 - DNA, 534 bp, Homo sapiens
gggaaagcagacttgaggaatccacaattagagatctttatacatctaaatgacatttactctgtggtggggattcctgtgttcagggtttccctagccagcagacttacatcaagacagctggactgcgatctacaatagcgtgggcaatggcatctctggctgacattaaggtaccatatggctctgactgaaacctggctgtgactgaggactctgcttcctctgtagacatatcaagtggtggatgtcttttctcccctatctcgagcacgactgggcctgacagtggggctggtgcatttgttttagatccaatgtgtggacttggaacaatacttttggaagctgctaaagaatggccagatgtgtattatgtaggtgctgatgtcagcgactcacagttactaggtacttgggacaatctgaaagctgcaggccttgaggataaaattgaattacttaaaatctctgttatagaattgccattgccttcagaaagtgttgatattattatttctgacattccatttg

SEQ ID NO: 586 - DNA, 1309 bp, Homo sapiens
  misc_feature (15)..(15): n equals a,t,g, or c
  misc_feature (18)..(18): n equals a,t,g, or c
  misc_feature (1069)..(1069): n equals a,t,g, or c
aacttggatcctttnaancggccgcccctttttttttttttttttttttttttgtagaaggaagggctttattcagctgggagcatcagcargctactgccttaaaatccgagctccccgaatgcacaatttcygtcccttttaagggctcacaayactaaagatttcacatgaaagggtcatgattgatttgagcaagcaggcggtatgtgacaggggctgcatgcaccggtggtcagagagaaacagaacagggcagggagtttcacaatgttcttctatacaatgtctggaatctatgaataacatcagtttctaagttatgagttgatttttaactactgggtttaggccaggcaggcccaggcctggtttygggcctggcgcygggctgcytgtctttggttytacttccttgttgtttttttcttaaaagaggtactgagtataaaacaatataaaacaatatgagagggtctctctcttccctcatttcccctctttgagactctcactttttatyagtgggagttctcactyttrtttttgctacttatgtmttttygtgcaatagattgatagtgatttayatagtatgcttgtgctgaagcattttkgtgaactaaggtkgcracgaagttttttatcatttggagaaatacaggtatmagacaagggagcagtaagcaggttcctattactattattaytyttattayaagagttttaaatyywcctattgctgggaaccaatttycaaacatggctcccggactgagtccatgccacacttgcacaggtacatgtgccagttttgttatatctttaactatatyctcaactacttgcccctgatcatctatgtgtagacaataattagtamggtyaaattttyyacaaactcctccttcagctgctagcaagtaatcaagagctagtctattttgatagatagcatttctcatcakagtctcttgccaggcaagaacagtcaaggcttgagtggttttattagtaataatttctaaaacwgcttgtaaccatatgattcggttgagcatgtagatgngggttccatatccccatgagacatcttgtgaccaagtggcaggtccatagtattgtaagattttttcagggggccattcatcgtctttccaatcacctatggctatgcttcwtttttcacrggaagcacagactgggaagcccagaagtttacctgtttttatgggcactaagaagaaagatggcttaatggtgccaattacacagctacctgtccactgatcaggcagcttagcataag

SEQ ID NO: 587 - DNA, 842 bp, Homo sapiens
  misc_feature (346)..(346): n equals a,t,g, or c
ggcacgaggtgcgccgtcaccacgggcggggcggggcctgggtccaccggggttctgaggggagactgaggtcctgagccgacagcctcagctccctgccaggccagacccggcagacagatgagggcccaggaggcctggcgggcctgggggcgctacggtgggagaggaagccaggggtacctgcctctgccttccagggccaccgttggccccagctgtgccttgactacgtaacatcttgtcctcacagcccagagcatgttccagatcccagagtttgagccgagtgagcaggaagactccagctctgcagagaggggcctgggccccagccccgcagggnacgggccctcaggctccggcaagcatcatcgccaggccccaggcctcctgtgggacgccagtcaccagcaggagcagccaaccagcagcagccatcatggaggcgctggggctgtggagatccggagtcgccacagctcctaccccgcggggacggaggacgacgaagggatgggggaggagcccagcccctttcggggccgctcgcgctcggcgccccccaacctctgggcagcacagcgctatggccgcgagctccggaggatgagtgacgagtttgtggactcctttaagaagggacttcctcgcccgaagagcgcgggcacagyaacgcagatgcggcaaagctccagctggacgcgagtcttccagtcctggtgggatcggaacttgggcargggaagtccgccccytccagtkaccttcgctccacatcccgaaactccacccggtcccactgccctgggcagccatcttgaatatgggcggaagtactt

SEQ ID NO: 588 - DNA, 1455 bp, Homo sapiens
  misc_feature (1295)..(1295): n equals a,t,g, or c
ggagaatgccatcgagaccatgcagctgacgaacgacaagatcawcagcatggtgcagcagcacctggatgaccccagcctgcccatcaacccgctctccatgctcctgaacggcatcgtggacccagctgtcatggggggcttcgcaaactacgaaaaggccttctttacagaccggtacctgcaggagcaccctgaggcccatgaaaagatcgagaagctcaaggacctgattgcttggcagattccttttctggccgaagggatcagaatccatggagacaaagtcacggaggcactgaggccgttccacgagaggatggaggcctgtttcaaacagctgaaggaaaaggtggagaaagagtacggcgtccgaatcatgccctcaagtctggatgatagaagaggcagccgcccccggtccatggtgcggtccttcacratrccttcctcatcccgccctctgtctgtggcctctgtctcttccctctcatcggacagcaccccttccagaccaggctccgacgggtttgccctggagcctctcctgccaaagaaaatgcactccaggtcccaggacaagctggacaaggatgacctggagaaggagaagaaggacaagaagaaggaaaaaaggaacagcaaacatcaagagatatttgagaaagaatttaaacccaccgacatttccctgcagcagtctgaggctgtgatcctttcggaaacgataagtcccctgcggccccagagaccgaagagccaggtgatgaacgtcattggaagcgaaaggcgcttctcggtgtccccctcgtcaccgtcctcccagcaaacaccccctccagttacaccaagrgccaagctcagcttcagcatgcagtcgagcttggagctgaacggcatgacgggggcggacgtggccgatgtcccaccccctctgcctctcaaaggcagcgtggcagattacgggaatttgatggaaaaccaggacttgctgggctcgccaacacctccacctccccctccacaccagaggcatctgccacctccactgcccagcaaaactccgcctcctccccctccaaagacaactcgcaagcagacatcggtggactcygggatcgtgcagtgacrtcgcaaggctctctggaaagagtgtgctgcccctccccatctccatgccctctccttctgtgtcccctgagtctgctgtttacctcattgggcctgtgatgttaacatttcgtgcgactgctttttcttcaaaggagttcagttctcaccatggagtgagtggncctttagcgtcatggagcaaggtgggtctgggaggtagatatgggtccgggatgtgcctatcgtagttatcagarttgggggcctctgagtgtgtctggctctgagagagtctgagtcttgcccaaacattctttctttttgtgccaaatgacttgcatt

SEQ ID NO: 589 - DNA, 514 bp, Homo sapiens
  misc_feature (142)..(142): n equals a,t,g, or c
  misc_feature (178)..(178): n equals a,t,g, or c
  misc_feature (228)..(228): n equals a,t,g, or c
  misc_feature (325)..(325): n equals a,t,g, or c
  misc_feature (456)..(456): n equals a,t,g, or c
  misc_feature (503)..(503): n equals a,t,g, or c
gaaaagatagtacaaaaagaaaatctttatccgagagtgaatctgatgacagcaaatgaaagggatgctgctgaaaaaccaggagactttgccagaactcttgatcctaagcaaagaattggtgccacagactgcagtgaanaattaatgtttctaatggaatgcaaagactcagacnaggctgacttggtgctggcaaagaggcaaacgcaaaggggcaaacacgangtcctkcaaattgcaaattatttttatgaagagagactaacttggcattcctgtccagaaaatgaaactcaaaaattgttgcactgcagtatactsncatatagtgtgtgtgtgtgtaaaacctaggtcttgattttcttattagtgtgaaatactctatttttaaaaaaatagagatagagtctcactatgttgcccaggttggtctcaaactctgggctcaagtgnatcctcctgccttggcttcccaaaagtgctggggactacagacgtgnggccaccctgg

SEQ ID NO: 590 - DNA, 423 bp, Homo sapiens
  misc_feature (2)..(2): n equals a,t,g, or c
  misc_feature (4)..(4): n equals a,t,g, or c
  misc_feature (392)..(392): n equals a,t,g, or c
  misc_feature (412)..(412): n equals a,t,g, or c
cncnaaacaggaggagaagtctgcactgctagaccacatttgggtgacaaggtggcttgatgatattggcttaccccagtacaaagaccagtttcatgaatctagagttgacggacgaatgctgcaatacctaactgtgaacgatttactcttcttaaaagtcaccagccaactacatcatctcagcatcaaatgtgccattcacgtgctgcatgtcaacaagttcaacccccactgcctgcaccggcggccagctgatgagagtaacctttctccttcagaagttgtacagtggtccaaccacagggtgatggagtggttacgatctgtggacctggcagagtatgcacccaatcttcgagggagtggagtccatggaggcctcatttgtnagtgggctctctggcctagnccacctgcctt

SEQ ID NO: 591 - DNA, 1449 bp, Homo sapiens
  misc_feature (660)..(660): n equals a,t,g, or c
aattcggcacgagcagcgtcgcgcggcccagttcccttttccggtcggcgtggtcttgcgagtggagtgtccgctgtgcccgggcctgcaccatgagcgtcccggccttcatcgacatcagtgaagaagatcaggctgctgagcttcgtgcttatctgaaatctaaaggagctgagatttcagaagagaactcggaaggtggacttcatgttgatttagctcaaattattgaagcctgtgatgtgtgtctgaaggaggatgataaagatgttgaaagtgtgatgaacagtgtggtatccctactcttgatcctggaaccagacaagcaagaagctttgattgaaagcctatgtgaaaagctggtcaaatttcgcgaaggtgaacgcccgtctctgagactgcagttgttaagcaaccttttccacgggatggataagaatactcctgtaagatacacagtgtattgcagccttattaaagtggcagcatcttgtggggccatccagtacatcccaactgagctggatcaagttagaaaatggatttctgactggaatctcaccactgaaaaaaagcacacccttttaagactactttatgaggcacttgtggattgtaagaagagtgatgctgcttcaaaagtcatggaatwagctcgcnttccaaaaacttgactggttttaaagtaagaaggtggtcaaaaagaaatgcatttggatctttcaatgctcgtacaatacacctgtgggcatcaactcgagcctgggaagcattgtcctctgtgtaacttccgagcaattccaccatgacttttgaagcagcatcactcttcttacaatccacaagtgcctcataaagtagtcttaaaagggtgtgctttttttcagtggtgagattccagtcagaaatccattttctaacttgatccagctcagttgggatgtactggatggccccacaagatgctgccactttaataaggctgcaatacactgtgtatcttacaggagtattcttatccatcccgtggaaaaggttgcttaacaactgcagtctcagagacgggcgttcaccttcgcgaaatttgaccagcttttcacataggctttcaatcaaagcttcttgcttgtctggttccaggatcaagagtagggataccacactgttcatcacactttcaacatctttatcatcctccttcagacacacatcacaggcttcaataatttgagctaaatcaacatgaagtccaccttccgagttctcttctgaaatctcagctcctttagatttcagataagcacgaagctcagcagcctgatcttcttcactgatgtcgatgaaggccgggacgctcatggtgcaggcccgggcacagcggacactccactcgcaagaccacgccgaccggaaaagggaactgggccgcgcgacgctgctggcgcaacc

SEQ ID NO: 592 - DNA, 834 bp, Homo sapiens
aaaccttagcaagatggcggctccctgggcgtccctgcgcctggtcgcccccatgtggaatgggcgtatcaggggcatccatcgcctgggtgcggcagtggccccagagggcaatcagaagaagaaaaggacaatactccagttcctgaccaactatttctacgatgtggaggctctgagggattacttgctccaaagggagatgtacaaggtgcatgagaaaaatcgatcttacacctggctggagaagcaacatggtccatacggcgcaggtgcctttttcatcctgaagcagggaggcgcagtcaagtatgaccgctaaggtttcgagacaaggagtggatcaggccagataagtatggccatttctctcaggagttctggaatttctgtgaagtgcctgtcgaagctgtggatgccggtgactgtgacatcaactacgagggcctggataacctcctccgcctgaaggagctccagtccttgtcgctgcasgctgctccmacgtggacgactggtgtctcagccgcctctacccactggccgactcgttgcaggagctctcgctggccggttgcccccgcatctccgaacggggcctcgcctgcctccaccacctccagtgagacctcagctcaggctggccacatgcccaggcacctctcccacctaacccagatgcaggagaggaagtggggaggggcaatgttaggcagttctcatatccccctgcatccatcacaaacctagagtatttatggtagatgagcagtcacagtgagtctctggaagaattaaatgactcctggttttcttcaaaaaaaaaaaaaaaaa

SEQ ID NO: 593 - DNA, 1660 bp, Homo sapiens
  misc_feature (2)..(2): n equals a,t,g, or c
  misc_feature (8)..(8): n equals a,t,g, or c
  misc_feature (10)..(11): n equals a,t,g, or c
  misc_feature (1660)..(1660): n equals a,t,g, or c
cntggatncnntaaaacggccccccctttttttttttttttttgactcctgattttattattcaatttctttttttcatttaaagtagtcttccgtggttgggaagcctcacctcccaagaccagagtcagttggagctggttgttgttggaagggagtgggttggggaactggggtgggggcagggagatccccccgctctgctggcggtcctaggtggagaagaactgcacttcacagagtctggggtttggtgggaaggggatgaggcaggagcagcaagctggggagatgggacccacctcagtccccagcttcattttcttctaatgtttccccactggtggcattctctgcagtcttggaggccttcttttttttctttttctgggtttttcgacttgcagaactctggaggagggcctttagctctgcatcctggacctccatctcagacttgtagaggtcaggctcgaagggaccactggttatccgcatggggccattgggcatgagcagaactgtaaatttaaactgggcaacaaattcaccctccttctcatagagaacattaaatggttgcagcagttcatgtttggcgcactccaccacacccatccgagccttcttctcatcttcaaatgctcttaaagtaaacggcatggcatcaaaacgcctttccacctcactgaagaaggcacgtgaagttttcattttcagtccatactgtttagaggggtctcgtttgtaaatagtggttctctgtcctgcatccttggccttgccctctcctgagctgacgagaacatccacagcatatacttcatgtacctcaaattcagctttttcatggtccttcttctgctggtctgtgggattctggataatggttttttctccatcgatgacatgctgcttcaactggtgtgacagcataccttctattggcgtgcagttaaatgagtgggcaactttgttccaggcttctgtcacttgtgtgttctgatttccaggtttgaccaggcgtagggcagcttcagcacaaaggtgagctgccttaataacatctgctttcctccctgttacttgggtcccctgagctacatcaaccacaaaagtgtgagctacattagcgatgaagccatccacatggaccccaaggtcaatttttaccaagtcaccttccttgagaatataatcctggtcgctcttcaaaggggagaagtgacatacacagttatttaccgaaatgctggtgggaaaagcaatacctttcttcatttccttttctttcttgaagattttccctgtttcttccataatcatggcatcacctttctcacacaggctcagtaccgacacacctgagctagatgcttccaccaaggaccgaagtaccctgttggcgatgtcgccccccatcttatacttggtcacgaccaggtcctcagcgatagtttgctcctgttgctcgtcctcgcccgacatcttcctactaccaccactgcagcctcgtttcccctgagccgccgccgcctctgtctcccttcccagccacaggctgtggtcagagtcccctcgatcctcgaggagagggcgagcgaaagcgcgagcaagcaagggagcgggcaggcaggcgagagcgagaagctgcgagcgn

SEQ ID NO: 594 - DNA, 1574 bp, Homo sapiens
  misc_feature (1467)..(1467): n equals a,t,g, or c
  misc_feature (1475)..(1475): n equals a,t,g, or c
  misc_feature (1485)..(1485): n equals a,t,g, or c
  misc_feature (1520)..(1520): n equals a,t,g, or c
  misc_feature (1550)..(1550): n equals a,t,g, or c
  misc_feature (1572)..(1574): n equals a,t,g, or c
gtggactccattttggccattaaaaagcaagatgaacctattgatctcttcatgattgagatcatggagatgaaacataaatctgaaactgatacaagcttaatcagagggcttgttttggaccacggagcacggcatcctgatatgaagaaaagggtggaggatgcatacatcctcacttgtaacgtgtcattagagtatgagaaaacagaagtgaattctggctttttttacaagagtgcagaagagagagaaaaactcgtgaaagctgaaagaaaattcattgaagatagggttaaaaaaataatagaactgaaaaggaaagtctgtggcgattcagataaaggatttgttgttattaatcaaaagggaattgaccccttttccttagatgctctttcaaaagaaggcatagtcgctctgcgcagagctaaaaggagaaatatggagaggctgactcttgcttgtggtggggtagccctgaattcttttgacgacctaagtcctgactgcttgggacatgcaggacttgtatatgagtatacattgggagaagagaagtttacctttattgagaaatgtaacaaccctcgttctgtcacattattgatcaaaggaccaaataagcacacactcactcagatcaaagatgcagtgagggacggcttgagggctgtcaaaaatgctattgatgatggctgtgtggttccaggtgctggtgccgtggaagtggcaatggcagaagccctgattaaacataagcccagtgtaaagggcagggcacagcttggagtccaagcatttgctgatgcattgctcattattcccaaggttcttgctcagaactctggttttgaccttcaggaaacattagttaaaattcaagcagaacattcagaatcaggtcagcttgtgggtgtggacctgaacacaggtgagccaatggtggcagcagaagtaggcgtatgggataactattgtgtaaagaaacagcttcttcactcctgcactgtgattgccaccaacattctcttggttgatgagatcatgcgagctggaatgtcttctctgaaaggttgaattgaagcttcctctgtatctgaatcttgaagactgcaaagtgatcctgaggattacagctgtggaatttttgtccaagcttcaaataattttgaaagaaattttcccatatgaaaaaaggagagaacactggcatctgttgaaatttggaagttctgaaattatagtatttttaaaaattgcactgaagtgtatacacataaagcaggtcttttatccagtgaacaggatgttttgctttagcagcagtgacataaaattccatgttagataagcatatgttacttaccttgttattaaatatttcttgaaaagcaaattttaatggtttaattttatgtggacgtatgttaaattatccaactaccctattggtaagcatttggntttaaaanttttatgctnatataaatgctcaagtatttaaatattgaagcatnccctgtggtataaattctgagtaaatgcantggatcagttggaaaaaaaaannn

SEQ ID NO: 595 - DNA, 1013 bp, Homo sapiens
ttccctttgcaagatttttaattcttttcccttccattcatacagagaactggtcacatagagaactggattcaataaaaggctcattttggattttataaaatcaaaccctaaactctttacagaatcgaagtattaataagtacttataataacaatcaagtcattatcaaacatgtaccagatatatatcagagctcctggtaccaagagcatactatattagtgatcatatactgtaacttgagtagtatctagggatgtgctggtagtatttaacctccagctctctgggggaaaacaggattttgcagcatttgctgaggtgtaaatactctcaccataacaatctcaagatgccaagcagacgtcactggatgcaaaactggaaagagatgcacacaactggctctctcaagctgaggtgaggtagctccagcacaccaactttttctattggacagcgtcttttcatttttattactcaaaaaagtttcatttttttatttagctttctgactctgtgcttgtgccttcaacactttcacaacgattttctgctcctcgataaggaaagcacgcttgatcctgtcacgaacacatttagcacacatggaaccaccataggccctgctgacatgtttctttgttttggacaatctcataagaactttaggtcttacagcacgaacccctcgaagtctgcctgggcacacaccacatgcagattttggtgctttcccaaccttcttggtataaaggtaaacaattctattaccaggggttcgggacagcctagttttgttagaggctgtattgtaggaaagcctacgtcggtatgtcaaacgctggaccattctgagtgctcagagtctaattttgtttggagtggtgtccagaaaagtgccacgagcccagttggagaaacaccgccctacaccagctcaaaggactgcttctgagagctctaggcttcctcagctcctcggatggcagccgattggtaaggaaaa

SEQ ID NO: 596 - DNA, 462 bp, Homo sapiens
  misc_feature (462)..(462): n equals a,t,g, or c
gttgtctgcaggcactcagaatggtccagcgtttgacataccgacgtaggctttcctacaatacagcctctaacaaaactaggctgtcccgaacccctggtaatagaattgtttacctttataccaagaaggttgggaaagcaccaaaatctgcatgtggtgtgtgcccaggcagacttcgaggggttcgtgctgtaagacctaaagttcttatgagattgtccaaaacaaagaaacatgtcagcagggcctatggtggttccatgtgtgctaaatgtgttcgtgacaggatcaagcgtgctttccttatcgaggagcagaaaatcgttgtgaaagtgttgaaggcacaagcacagagtcagaaagctaaataaaaaaatgaaacttttttgagtaataaaaatgaaaagacgctgtaaaaaaaaaaaaaaaagggggccgyytaaaggrtccaasttacgn

SEQ ID NO: 597 - DNA, 1895 bp, Homo sapiens
  misc_feature (1840)..(1840): n equals a,t,g, or c
  misc_feature (1884)..(1884): n equals a,t,g, or c
  misc_feature (1891)..(1891): n equals a,t,g, or c
gttggcgcgcggtgcgcggtgcgtagtctggagctatggtggtggtggcagccgcgccgaacccggccgacgggacccctaaagttctgcttctgtcggggcagcccgcctccgccgccggagccccggccggccaggccctgccgctcatggtgccagcccagagaggggccagcccggaggcagcgagcggggggctgccccaggcgcgcaagcgacagcgcctcacgcacctgagccccgaggagaaggcgctgaggaggaaactgaaaaacagagtagcagctcagactgccagagatcgaaagaaggctcgaatgagtgagctggaacagcaagtggtagatttagaagaagagaaccaaaaacttttgctagaaaatcagcttttacgagagaaaactcatggccttgtagttgagaaccaggagttaagacagcgcttggggatggatgccctggttgctgaagaggaggcggaagccaaggggaatgaagtgaggccagtggccgggtctgctgagtccgcagcactcagactacgtgcacctctgcagcaggtgcaggcccagttgtcacccctccagaacatctccccatggattctggcggtattgactcttcagattcagagtctgatatcctgttgggcattctggacaacttggacccagtcatgttcttcaaatgcccttccccagagcctgccagcctggaggagctcccagaggtctacccagaaggacccagttccttaccagcctccctttctctgtcagtggggacgtcatcagccaagctggaagccattaatgaactaattcgttttgaccacatatataccaagcccctagtcttagagataccctctgagacagagagccaagctaatgtggtagtgaaaatcgaggaagcacctctcagcccctcagagaatgatcaccctgaattcattgtctcagtgaaggaagaacctgtagaagatgacctcgttccggagctgggtatctcaaatctgctttcatccagccactgcccaaagccatcttcctgcctactggatgcttacagtgactgtggatacgggggttccctttccccattcagtgacatgtcctctctgcttggtgtaaaccattcttgggaggacacttttgccaatgaactctttccccagctgattagtgtctaaggaatgatccaatactgttgcccttttccttgactattacactgcctggaggatagcagagaagcctgtctgtacttcattcaaaaagccaaaatagagagtatacagtcctagagaattcctctatttgttcagatctcatagatgacccccaggtattgtcttttgacatccagcagtccaaggtattgagacatattactggaagtaagaaatattactataattgagaactacagcttttaagattgtacttttatcttaaaagggtggtagttttccctaaaatacttattatgtaagggtcattagacaaatgtcttgaagtagacatggaatttatgaatggttctttatcatttctcttccccctttttggcatcctggcttgcctccagttttaggtcctttagtttgcttctgtaagcaacgggaacacctgctgagggggctctttccctcatgtatacttcaagtaagatcaagaatcttttgtgaaattatagaaatttactatgtaaatgcttgatggaattttttcctgctagtgtagcttctgaaaggtgctttctccatttatttaaaactacccatgcaattaaaaggtacaatgcaaaaaaaaaaaaaaaaaactcgagactagctcgngccgaattcggccaagggtcaggaggcaattgcccgccttgganaaaagcncagg

SEQ ID NO: 598 - DNA, 1753 bp, Homo sapiens
cctttttttttttttttcagtgaggcacgacgtggtttactagaagtggccggtttcctggcagctttgtaaatggactctaacctcagtggaatctgggccccggctggatcaggaggcgaccatatggcttttcttgtttcacgtgaagaatctgttgcgctgagagcactggtcaagaggcgaggagagggcaggtcgggggagtccctgtacgggcctctggtctctgtgtccctgcccmacatacacacacacacatgcatacaytcacccaggagcagktagaagacccgggcagccatcctgcgggggctgagagktgacaccaggctgctgaagtcgggctccctgttagcctgcarctccagtgccactgccctatagggatcaagaaccattagcagaggcttcagcccgggtccaccccatcaaggtgccacctycctggtacctgtgcactgcttccagtgagagcagctcgagctctgggggcagcaccaaaggcatctccatgggcacctcagggagttcaggcaccacgggcaatgcaggagcttctggcgcctccacctcaggccaggccctaggaggacatgagagagtagggaaggtggcagctgtgacagtgacaaggggcatacccatcccagcagctgtttccacmamctggccaagggctktgggccctggctyccacggagcctggccgcttaccaccgttcttctggtgggatgaggctgatgcgggacttctcctcttcagstgcctctagggagatctctcaatctcacttggaacttcaatctttctcctttcctcctcagcggctgcctcctcaggcagctctcgcctgagggcttttgggggtggctgggcacaatgggtccagagacccagtagttcagggggtagccagccagagagagttggggttctgaacaactccgcagggcctctgatggtcctctcgggcggctgcaccataggacattcccagcagtgggctctggtttgcagttgttcctggaatttctccggggagatctgagtctccttgtcccagaacagtaaccggcgacgacgkcggcggcgaggaggtggggggactgggggcctcctctctgggctgggtggggctggcagacgcagctcctccgggggggtcacctccatgagtagggccccaggttcccagcctgtcagcctcagctcctcaggacccagtgcctctcctattccttccacctctgcaggagctggaggtgggagccgcgggatttctaacaagatagcttcttcttcctctgcgatcagcaggtccagttctcggcggctgacctctgggagctcccgttcaccctcaatctccagcatccgtatgggctctgcctccaggatcgtgatggcctcaggtggcagcacagtgaccggaatcctctctggctccctgggctctgtaggaacttcaggagggatctcttcaactctctctgggattgcagcctctaagaggtgtcgaatctgagggatatcgaaaggactaggaagtctgggatccacagacatcatcccaaaaaagggatctggagcatcttctagggtctccatcatggccaggtggttaggaagcagcaggctgggtagctcagtctccatatctattcggatctgcagctgggcacggtggagkcgctccaagatgtgctggatgtcctccacgaggtactggcattgttgagaatagacgcg

SEQ ID NO: 599 - DNA, 1356 bp, Homo sapiens
gctggcaggaaccggaacccgcggttataaagtaaaggaacccgagatctgcgcaggggttccctttgccgatttctctcacctcacctttcaaacctaaactcgagcctactgttcaccggcctagcattgctctcgccatggctctcagcgatgctgacgtgcaaaagcagataaagcatatgatggctttcattgaacaagaagccaatgagaaagcagaagaaatagatgcaaaggcagaagaagagttcaacatagagaaaggtcggcttgtgcaaacccaaagactaaagattatggaatattatgagaagaaagagaaacagattgagcagcagaagaaaattcagatgtccaatttgatgaatcaagcgagactcaaagtcctcagagcaagagatgaccttatcacagacctactaaatgaagcaaaacagagactcagcaaggtggtaaaagatacaaccaggtaccaagtgctgctggatggactggttctccagggtttgtaccagttgctggagccccgaatgattgttcgttgcaggaaacaagatttccctctggtaaaggctgcagtgcagaaggcaattcctatgtacaaaattgccaccaaaaacgatgttgatgtccaaattgaccaggagtcctacctgcctgaagacatagctggtggagttgagatctataatggagatcgtaaaataaaggtttccaacaccctggaaagccggctggatctcatagcccagcagatgatgccagaagtccggggagccttgtttggtgcaaatgccaacaggaagtttttggactaagccttcaggaggtggagctcgtcgtcagctctcctgctgtgatgtggaagcttctgatatttgaagaaacacgaatgtctctgtagcttcctcttcactgccccagtattgctctgtatttatcagcgatgcccctctgtcactcatgccttgcctaattgttcacaatggtggaaagcttcatgtaatatgatcaggacccacctccagttcttctgaaagtgtgacagtgtccagccggttctgcagcactaggggagggggcagatggtggttgcatgggcttcctgggtctccactctccgtctggcctaaaggtgatgtatttggtgtttggccctgcagtccccactcttgaggcttaaggcgcatgtggcacaccactccttccagcagtagtcgctttactgttacctgtttaggcctagaagttttccctcatctgtaaatgtgatttaaaatctaagccatgaatatgctttatttattaaaagagttatgcggatttaatgtgatttctagtgtaaggcactac

SEQ ID NO: 600 - DNA, 609 bp, Homo sapiens
  misc_feature (569)..(569): n equals a,t,g, or c
tttttttttagacaatctaatttacaaaatttttccctcccaataaccaaccatacacatcaaagatacctcacgtttcagttcaaaccaaataatatgaattaactttccagttctgtgacttttgaatgtgggtgctctttgctacttctaaacccccatcacttatcaacaggttggattccagcgagggaatcagaggctatttttagattgttcagtactcagctcaccacccataagaccatttctcctctgcgtgtggcctagttcttagatatactgtaatttctttcttccccaggacacttaagaaacagtttcattttcatgacaggcaagggcttcaggaagagtcgttccacagggtccctggaaatgaaacctgaatctgttcgtagctggggtggtctccgtgttaaattcagccactggcacgcccctggcagccacctggggggcaaacatggctgctgggtacaccacagaggaagtgcccaccactagacataaatcacagtgggcgagctctctgtcaacctcctccagaatggcaggatccaggtttnctccaaaccacacgacgtgaggtcgcaagcagcccccgca

SEQ ID NO: 601 - DNA, 1454 bp, Homo sapiens
ttttgtttttattttatattattattatagaaggtggtaccattatcaattatgtgaagggacatgcagacaccccagcttttgagggtgctgggggtaggactgaggcagccccactgggaaccagactgcagcctggcccatggctgttttcccaaggatcagttcctggagggaagggctctggccctgactccgctgtgtcccgagcacacgtgctgaccgcagcccgccgccctgtagttcttggctgggtctggaggtgtctgtggagcaccctgccctcaccacaggagcgtgagccacttctgcagtccacgctgaacatgggaaacaacctgaaaagcaggcaggcctcccggtcagggagcctctgctgtgctggcttcccatgaccacctcctcctgctgaaatattactgcttgaatctggagcagattgcgggtttataaaactgctttttatctgagaacaaacgggtttggaaattagtcgtcttttttccccactcccagagctgctcaartcattccaccggccccctcggcttgggacagggtagtgtaactcccgatcccagggcctagccctgacacaggtggcttcccgtatcccggtgggaaaacgccctgccaccagcgggcttgagctggcctgtgtccctccacygcctgcaccacccacctccagagtgcagtgctgggcaagggcagctcaagagracaggaccaggcgcttggcaagacatcagacacacccaacccaaaggcgtggaccccaggcccggcccgtggtacccagcaggtggcactgcagctccccgctcctgcaggtccagcgtcctcacaggaacaccagggcctgtgctccggagccttccttcagacccttcctccacgtgcccacttgggatgcagaatgcagcggagctaggaccccctccacggcctggacctcggctgcagtaaagttacgtgaggcctgtctctcggggcctggaagtggcagccatcagttgctcttgctgacccctcggagcaagcgccgcacaggtggtggctgagacagctggcgcggggggccccaagctgcgccggcctccagcccacccacagctgttgctgaagtcaggcctccctccccagcactggtatctgagtaacggctaagaacctccttcctctggttttgaaaagcagttcgggttgtccaattctgtaacattcatctccattttttaaaaaggtttctctgacggccccacggcccgagccgcggtgagcgtcgtgttgcatgagcctgggccccgggcttcccgtgcgcctctgccgcaggtgcttctgggcacccatcctctgcgtttcatttgcagtcgactgtacagaaggcactcaccacaataaacctttcctgaaagcagaaaaaaaaaaaaaaaaaaaaaaaaaaaaaaaaa

SEQ ID NO: 602 - DNA, 3022 bp, Homo sapiens
  misc_feature (360)..(360): n equals a,t,g, or c
  misc_feature (387)..(387): n equals a,t,g, or c
  misc_feature (3009)..(3009): n equals a,t,g, or c
  misc_feature (3018)..(3018): n equals a,t,g, or c
gaccgcctccacctccacctcctcctgggccaccgcccccgcctggcctgccttctgatggggaccatcaggttccaactactgcaggaaacaaagcagctcttttagatcaaattagagagggtgctcagctaaaaaaagtggagcagaacagtcggccagtgtcctgctctggacgagatgcactgttagaccagatacgacagggtatccaactaaaatctgtggctgatggccaagagtctacaccaccaacacctgcacccacttcaggaattgtgggtgcattaatggaagtgatgcataaaaggagcaaagccattcattcttcagatgaagatgaagatgaagatgatgaanaagattttgaggatgatgatgagtggnaagactgatctatatattatatatatatatatttttaaggtgaaatactaaacactactttctgtctgtggattctgtaaaattatcatgtaaatgttctaccaatttgctgtatatttttgttgccttttttgcttttttttaatctgtgcaatacctcatttaatctgtaaaggtttgtcgtaatcctctacaaagctactccctgttattgtgtgcaagtttacaccaggatgctcacttgatttgtgaatatttttcattccatcaacaagggagtttaaatactatatgtgagactgacaaaaaccttaatgtaatttacttataatgccagaaggaaaacactattttcataccctactttttctgtacctaaattttcttaaaaaaaaatctagtatagcactacattcttttttaagtgatgcagaccttagtttctttagcccctttattttgaatacaatgctacatatgaatgttgaagctgatacattgcacagttctgtagacatcactacaccgatgtagtttctcaaattttagcaatatgctctacataaaatcactacagagatactagtggggaagacgrttaacacacctsttacagtaatactgcctgttattggtatagcagtggtatttgcagactgggatcataaggagcccttaaatacttgttattgactggggttatttttatgctgtagcaaatgtgacaggctctttttagcaaaatttttgaaaatttttttggtattactctgaaacaaaatttaagttggagtttcagggatttagggagtagttttcattctacatgaactgaggtaatattatggtaactccaatatttggttaaaaaaactatacaaatcagaatagtactaaaatactgtagaattttagcatttttattttgcactttgtgtggattgaggtgttcagaaataccaaccataaaaatgtaatctagttggcaaaggtgtgcgctaaaacacggaaccgaacatgcattgatttggataacttttgagggtttttgtcaaatagcatgtgaagagttacatttttcttaaaagattggtggtcccaatgtcagagttcttggaacagataactgaatgatagattttttttttttaaagataaaactttacaacctgcacatttgttatgcatactaaatggtgtgttaaaattagggtttctttgcctctctacactacactaatctgcctaaaggtggttgtttcatatttataatgctaattatcatacctacctactttaaattttaggtagaaaattatctgatttaaatacaaacatatttttctcacattgagtaatatgcataatgtagttccaaatgtatttcattactatagtcacaatatccaactaaaaattacgctatctagaattgtaccaaccaaaatctcgtattggcagatcttgacaggctggacctgcaagatgtggcttgaattttaaccatttattacataatctctagtgatcatgcatctagttatcataagaaataatttaaaaggttttgttgctgaaagcagtaagtggtgcagtaaaatacttaagttattcaaagaatgttatctttcttgcaagagtaatttaagcacatgggaaagattctagactttttgtttcttgcaacaacagtgccctctgctgctagaaacctttttctacttactatcatttttattgtggcttgagctcagtcaatctggtgcagatgaggctggacaactactaaccaataaaatcaggagtttgtacaaaagttaaatggaacattataattattttaagtaatgttaattgaaaaaatttttttctttttgacaatataaaaaacattttaaatttcctagaaatgtcttcagggtaatgccaatttaagatctctcttaacttgtggccaagaaattctagattttccagctgactttggtataatatatatttatcaggaacttctctcagcagagagtacccattcttcgagttcaaagcacaattttaaacatgtaaaatggatatataatttgccaaaggtaattaatttattctttttttcttaaagaagaaaaagacattggttgttgttacaaaaagtctaaattactgttggttgaaacacagcagctgtggagttcagtccaggcatgaagactaaatctgctttaccaagtaaggtgtaaggttgcatgtttcagtcctctaccatcctgcactgtgagcagcactatacctgtgcgttgtctgaaagccttccgtatattctccagctaaatggtcgtctggtagcctttgcatttaacaaactagcatgaggctttttatatctaaatgctacgtgatagacaatttcagctagccacatattgtatgtatgagattcataaagactttcaatcatttcattttcagacaactgaaattttgtttagtatgtgaattctttttttgaaatgtatagtgaataggatgttgcactggtggcaattcatcatggagcataataaaattaatttgacccaaatagaawaaaaaaaaaaaaamamaagggggggcccggtcccattnccccctatngtaa

SEQ ID NO: 603 - DNA, 1713 bp, Homo sapiens
tcttctcccggtgaaccggatgctctgtcagtctcctcctctgcgtcctcggccgcggcccgggtccctcgcaaagcygctgccatcccggagggcccagccagcgggctcccggaggctggccgggcaggcgtggtgcgcggtaggagctgggcgcgcacggctaccgcgcgtggaggagacactgccctgccgcgatgggggcccggggcgctccttcacgccgtagcaagcggggcggcggctgcggtacctgcccaccgggagctttcccttccttctcctgctgctgctgctctgcatccagctcgggggaggacagaagaaaaaggagaatcttttagctgaaaaagtagagcagctgatggaatggagttccagacgctcaatcttccgaatgaatggtgataaattccgaaaatttataaaggcaccacctcgaaactattccatgattgttatgttcactgctcttcagcctcagcggcagtgttctgtgtgcaggcaagctaatgaagaatatcaaatactggcgaactcctggcgctattcatctgctttttgtaacaagctcttcttcagtatggtggactatgatgaggggacagacgtttttcagcagctcaacatgaactctgctcctacattcatgcattttcctccaaaaggcagacctaagagagctgatacttttgacctccaaagaattggatttgcagctgagcaactagcaaagtggattgctgacagaacggatgttcatattcgggttttcagaccacccaactactctggtaccattgctttggccctgttagtgtcgcttgttggaggtttgctttatttgagaaggaacaacttggagttcatctataacaagactggttgggccatggtgtctctgtgtatagtctttgctatgacttctggccagatgtggaaccatatccgtggacctccatatgctcataagaacccacacaatggacaagtgagctacattcatgggagcagccaggctcagtttgtggcagaatcacacattattctggtactgaatgccgctatcaccatggggatggttcttctaaatgaagcagcaacttcgaaaggcgatgttggaaaaagacggataatttgcctagtgggattgggcctggtggtcttcttcttcagttttctactttcaatatttcgttccaagtaccacggctatccttatagctttttaattaaatgaagccaagtgggatttgcataaagtgaatgtttaccatgaagataaactgttcctgactttatactattttgaattcattcatttcattgtgatcagctagcttattcttgtgtactttttttaaactgtgggttttcctagtaaatttaatttacagaaatcaatggtagcatttagtaatctacaaaggaaatatcaaagtgtttttcaagcctgttatattcagtgtgtgccacaggattgaaataaatgacaatgtaattatgaattcatgttttagagctgtttactcattagtaaaggaccgcaatgttagtaaagaaaacctatgaaatgtatgttaaagattcttagtattgtacagggataaagcaaatgcatgaaaatatgtcatgtactgaaaattaaacttacttcagtttcagttataaaggamgtgcmctgttaaaaaaaaaaaraaaagaaaaaagtat

SEQ ID NO: 604 - DNA, 1171 bp, Homo sapiens
  misc_feature (1133)..(1133): n equals a,t,g, or c
  misc_feature (1139)..(1139): n equals a,t,g, or c
  misc_feature (1160)..(1160): n equals a,t,g, or c
aattcggcacaggtcgactgcccagagtccgcggccggggcgcgggaggagccaagccgccatggcctaccacagcttcctggtggagcccatcagctgccacgcctggaacaaggaccgcacccagattgccatctgccccaacaaccatgaggtgcatatctatgaaaagagcggtgccaaatggaccaaggtgcacgagctcaaggagcacaacgggcaggtgacaggcatcgactgggcccccgagagtaaccgtattgtgacctgcggcacagaccgcaacgcctacgtgtggacgctgaagggccgcacatggaagcccacgctggtcatcctgcggatcaaccgggctgcccgctgcgtgcgctgggcccccaacgagaacaagtttgctgtgggcagcggctctcgtgtgatctccatctgttatttcgagcaggagaatgactggtgggtttgcaagcacatcaagaagcccatccgctccaccgtcctcagcctggactggcaccccaacaatgtgctgctggctgccggctcctgtgacttcaagtgtcggatcttttcagcctacatcaaggaggtggaggaacggccggcacccaccccgtggggctccaagatgccctttggggaactgatgttcgaatccagcagtagctgcggctgggtacatggcgtctgtttctcagccagcgggagccgcgtggcctgggtaagccacgacagcaccgtctgcctggctgatgccgacaagaagatggccgtcgcgactctggcctctgaaacactaccactgctggcgctgaccttcatcacagacaacagcctggtggcagcgggccacgactgcttcccggtgctgttcacctatgacgccgccgcggggatgctgagcttcggcgggcggctggacgttcctaagcagagctcgcarcgtggcttgacggcccgcgarcgcttycagaacctggacaagaaggcgactccgaagggtggmacggcttcgggcgcgggcctaaacttcgctgcacaagaacagcgtcagccagatctcggkgctyaacggccggcaggsccaatgytcgcaattytgaacactggatggatggcggcatgaggaatctggnatgggnaaaaagcttggagtcaagccntggaaggacct

SEQ ID NO: 605 - DNA, 844 bp, Homo sapiens
  misc_feature (1)..(1): n equals a,t,g, or c
  misc_feature (17)..(17): n equals a,t,g, or c
ntggggggccccccccnaaatttttttttttttttttttttttttttttttttttttttttttttttttttgtggcatagaagctatttaatgattaaagtcatttgcagtacggcggcttcctcacctgctgccccgggaagggtgggcgggccacggcttttgattcacgaccaggcagcacccggagagggtgtggctcaragcgggcaccagacaggggactgcgggcccccgacacacccacacccacccacggacagcaggagagccagggcttctgtcaagctgttctttatttcagggagagggcaggggaggggctcagtctttcttggcagcagctttcctcatggcggccagtacgttgctcagctcctcccgcttcctcttggcgcggatgtgcgtccccacccttttcttgataaatttgagggcccgtttgtccttggagaccttcagtaactccatggcgcgccgctcgtacggggcaaagccacacacctcccgaatcatgtcccgcacgaacttggtgtgtttggtcagacgcccgcggcgtcggctgtgcctgggcttgctcacgttcttggtcactttgtggcccttgttgaggcccacggccatagggtagcgtagggccatggctgcggacagcgacggggagaaggggcggaggtgagtaccggctcagttcccgaggcccagagccccgcgtcccggctccttcagcctcgctcgccacaaccaaccatcctccaacctgcacagaggacccgggagtccggatggcggcggataccggcagtgcgggaaaccacttacctgctgctctccagctcgtgcc

SEQ ID NO: 606 - DNA, 1167 bp, Homo sapiens
  misc_feature (7)..(8): n equals a,t,g, or c
  misc_feature (99)..(99): n equals a,t,g, or c
ccccccnnaggtttttttttttttttttttcaggtggaacaccctggagttgagatatttattaacagatgggggtgctgggggtgggctcctgccccnagagggatgcaggtggatgccgggtggggagggctgcagggctggctcctggcctctgtcctggcttcatggtcctgacagctctgggccagcctcaggcgctgggagcgtactgtagcaccagcctgtcaaagtcgttctccttggcctggtactccttgatgaagggatgggacctgtgggcatccttcagctgggacaggtatcggtttgtcacctcagggggcttgcccaggtgctgggacaggacgatgaggttgaccagcgtctcygggtagccactatccttgtctagcgcctcctgcagcaggccctcagcggcctcccagcggccctgggccatgtggcaggccgcctgcccattgagcagcagcagggtgggcgagcacttgtcagccatctcctggaagatgtagtaggcatcctgcagcttctcaccacccgtggccaggctgacccaggcagtggcgagctgggtgagggtggcatcctcgtccaggtcctgcattctcttcagctccttccgggcgaggtccaggcggtccagcttcagcaggatctgcactgtcatggctgtgcactccaggctgtccccctggtgcagcgcacgcagggcggcatccgggttctggtcgtggagatagatggaggcggccatgagcaggaaggtggtgttggtcacgtccacgctcctgctcatctctcggtccagctcggccacgatgctgtccctccgactctcgtgggcgaggtagtcagcaaacatgcgcacggcctggagctcaggggccgaggagggcttgatctcatccaggaccacaccgaacttcctctgcgccaggtacgctctatacaggaagacgtccctctccacgtctctctctgggcttgayagcttcacccgctgcgcctcgtttatgcactgctggtagctgccgatgtagaaggcgttctttacgtcgaacagctcgtctacctccccggagccgccggaggccgggccgggggccggaggcgccatttcgctgtcttctcaccagctcctcttcctgaaagacacgtcagccg

SEQ ID NO: 607 - DNA, 1412 bp, Homo sapiens
  misc_feature (1329)..(1329): n equals a,t,g, or c
  misc_feature (1374)..(1374): n equals a,t,g, or c
agaccttctagcagaagctaaagacctgtttactaaagcagtgaagcactttggggaagaggctggcaaaatacaaccagatgagttctttggcatttttgatcaatttcttcaagctgtgtcagaagccaaacaagaaaacgaaaatatgagaaagaaaaaggaggaagaagaacgtcgagctcgcatggaagctcagctcaaagaacaacgtgaaagggaacgtaaaatgagaaaagctaaagagaatagtgaagaaagcggagagtttgatgaccttgtttcagctttacgctcaggagaagtgtttgacaaagacctttctaaattgaaacggaatcgcaaacgtattaccaaccagatgactgacagcagcagagagagaccaatcacaaaacttaatttctaattttccatgaatacttttttttagaaagctcattagcagccctctaaagtgactagaacgtttcattacactgccttgcaatccaaacagtggcaattttttccttcatctgtgagtgaatgtgtgaacgtgtgtatgtaaatgtatgtgtgtatatattaaaaaatgtatatagatgtctgagtgttgtctggagacctatacgtatggttaaaaagatttatgttaatgtatgtgctccaaaacctttcgtgtatgcattcacattgagtgtggctcattttctttccccgaacgccatgactgttcagaagcacaatactatctcctgaaagagataagagacattccctagattcaaaggcaaaacagaagaaacaaacaaacaaacaaacaaagcttgcaaaatattttatggtttccaagcttgatatcctttaaaattattttcattgatggaactggagttgttggaaaaacatagatttaaaatgatttttgatagctgacattgtgatgttgatgtatcacatcagtaataggaccagctttgaatttctgacattggtgtggggatacagtctgtaaatgtttattgagaacatcttgcacacaatttgaattatgtagaatgtcaatcaagtttttgtatatttaaaagttggacatcaattttttcccctgatttcatcaagttatctctgccaagtgctcttgataatttcttcagatttttggaaaaaaacactatataaatgcaatccatgctttttttaaagaacaacattgccagagtatgcttgttctaacaatatagatatataaaccttaaaaataataaaatatctcacccaagacttaaaggaagaattctctgaagggataaagattactaaaaaaaaaaaaaaaaaaaaaaaaanttaatggggtgcctttttgttatagtttctattttctgttttgtnggacaagctgcattttctgtaaatataggtctggacta

SEQ ID NO: 608 - DNA, 1846 bp, Homo sapiens
  misc_feature (13)..(13): n equals a,t,g, or c
agattacttaggncttattgcttcccttgattaccagttcttcccattcgcagagcacctacattgagcccccgaaggaagaggctcatcttcgggagtgtacctcgccaataaggacstggaaggscaggatgtggtggaagccatcttggcccacctgaatactgttcctcgaacacgcaagcagatcatccaccatctggtacagatgggactggctgacagtgtcaaggacttccaaaggaaaggaacccatattgtactgtggacgggggatcaggagttggagctgcagcggstttttgaggaattccgggactcagatgatgtcctgggtcatatcatgaagaatatcacagccaaacgctcacgggcccgaatagtggataaactcttggctctggggctggtggctgagcggcgggagctgtacaagaaacggcagaaaaagttggcatcctccatcttgccaaatggagcggagtccctgaaagatttttgccaggaagatctggaagaagaggaaaacctgcctgaggaagacagcgaagaggaagaagaagggggctcagaagcagaacaagtccagggtagcttagtcctttcaaatgaaaaccttggtcaaagcctgcatcaggaaggcttttctatccygctcctatggctccagaactgcctgatccgagcagctgatgatcgggaagaggatggctgctcccaggccgttccattggtgccactcacagaggaaaatgaggaagccatggaaaacgaacagtttcagcagctgttgcgcaagctaggggttcggccccctgcctctgggcaggaaaccttctggcgaattccagccaagctgagtcctacccagctycggagggcagcagcttctttgagtcaaccagaggaggaacagaagctgcagccagagctgcagcctaaagtccctggagagcaaggctctgatgaggagcactgtaaagagcaccgagcacaagccctgagggccctcttgctagcccacaagaagaaagcgggcctggcatccccagaggaggaaracgctgttggtaaagagccgctgaaagcagcacccaagaaacgacaattgctggacagcgacgaggaacaggaagaagatgagggcaggaacagagcaccagagttgggagctccaggaatccaaaagaagaaacgataccagattgaggatgatgaggatgactgaagagctaagaagcctaggggtagagatagacacgtttttagatggtgcattcaagtcagagttggaagggtcatacaggacccagaagctcctcttactggacagagcagtagaatcccaggctctttcacggatttaggctgagaaacttcagcagcagtattggacttctctgctgtcagtctttgtttctcccagtttttatcggtatgccccagcagctctctggagatttagttctcttcttctaggaaccatttcttttggttattggagctccttagcaaataagaggagtgagtgaaatagagaaagcaccccggaccccttttattggtctgttcctttggctttctcttggaggtgggtcgcagcaccagatggggagctttatgacatgacaggcgggagttttgtaccacttttagaagataccagatgcctctgtcctcattttgtttcctatgatcatcctctagataccagatagaggcccattcctgcatttgagatagggttggaatatagtactctagatgatgaatgtgtttgctttgtgtttggtattaaacatgtaagattagaagttctcaaaaaaaaaaaaaaaaaaacctcgtg

SEQ ID NO: 609 - DNA, 594 bp, Homo sapiens
ccacgcgtccggtggctcatgccggtaatcccagcactttgggaggccaaggtgggaggatcacttgaggtcaggagtttcagactggcctgggcaacgtaaaaaattaaaaaaatagccaggcatggacatggtagtgcatacctgtggtcccagccactcaagaggctgagacaggatgattgcttgagcccaggaggatgaggctgcagtgagccatgatgacgctactgcactccagcctggatgacagggcaagaccctgtctcaatattttaagtcaagggtttgtagtaatgtattcagtgccacttcttgccatcactttgcaattattgaaatgggaatactgagctcagaaagcaaatatgatgctttcatgggagatggagccacatttgtgttctgggtgggatcactagtgcaggagaacattacattttcttctgaaggcaaaatgcttgtaggttttgcctctactttgtatttacttttaaaattgcacttgttcacctaccagtgtttacgaaatcctgtatttgggatgctttttctataataaaatattataatttgaaaaaaaaaaaaaaaaaa

SEQ ID NO: 610 - DNA, 908 bp, Homo sapiens
  misc_feature (898)..(898): n equals a,t,g, or c
  misc_feature (905)..(905): n equals a,t,g, or c
cggacgcgtgggcggacgcgtgggcgtggtctggcggaactgcggttggcttgtggcgtctccgccgccgccgccctcccttcctcttccccatcttcttctctcggtcccgggagcccccgcccggagagartcgcggttgctgatcgtggtgcttgagtagagccgtggttggtgacagcatgacgagcgaggtgatagaagacgagaagcaattctattccaaggccaagacctactggaaacaaatcccacccacggtgkacggcatgcttggggggtatggccacatctccagcatcgacatcaacagctcccggaagtttctgcagaggtttttgagggaaggcccgaacaagacaggaacgtcctgtgccctggactgtggagctggcattgggaggatcaccaagcggctgctcctgccgctgttcagagaggtggatatggtcgacataacggaggacttcctggttcaagccaagacctacctgggggaggagggcaagagggccacctcaccgatcagcacctggccgagttcctgcggcgctgcaagggcagcctccgccccaacggcatcatcgtcatcaaagacaacatggcccaggagggcgtgattctggacgacgtggacagcagcgtgtgccgggaccttgacgtggtccgcaggatcatctgcagtgcaggcctcagcctcctggccgaggagaggcaggagaacctccccgatgagatctaccatgtctatagctttgccctgagatgarcccggggctggcaggagaaactgaggaaccacagtcctggtggggggagctggcarctgggcaagatccaggcgccacgctgcggttcgtgagtgtcgaggcaccactaaatatagcttgtctgccgncactcantaa

SEQ ID NO: 611 - DNA, 1971 bp, Homo sapiens
ggcacgagcgacttctacactcttacttctatctgcgccattggcatctgaaccaaatgagccaagagttcctgcagcaaagcttgaaagagggtgaggctgccctccactattttgaggagcttccctctgccaatggctcagtgcccattgtctggcaggccaccccccggccctggctggtgatcaccatcatcactgtggacaggcagcctggcttccactacgtcctgcaggttgtgtcccagttccaccggcttcttcagcaatgtggcccccagtgcgaggggcaccaactcttcctgtgcaacgtggagcgtagtgtgagccattttgatgccaagttgctctccaagtatgtccctgtggccaatcgctatgagggcactgaggatgattatggtgatgacccttcgaccaactcgtttgagaaagagaagcaggactatgtctattgcctggagtcatccctgcagacctacaacccagactacgtcctgatggtagaagacgatgctgtaccagaagagcagatcttcccagtcttggagcaccttctgcgggctcgcttctctgagccacatctcagagatgccctttatctcaagctgtatcaccccgagaggctccagcactacatcaatccagagcccatgcggatcctggaatgggttggtgtaggcatgttgctggggccttactaacctggatatacatgaggtttgccagccgcccagggtttagctggcctgtaatgctcttcttctccctgtatagcatgggtctggtggagctggtgggtcggcactatttcctggaactgcggcggctgagtccttccctgtacagtgtggttcctgcctctcagtgttgcaccccagccatgctcttcccggcacctgcggcccgccggaccctcacctacctgtcccaagtgtactgccacaagggctttggcaaggacatggcactgtactcgctgttgagggccaagggagagagggcctatgtagtggagccgaacctcgtgaaacacatcgggctcttctccagtctccggtacaactttcatcccagtctcctctagggtgccaagagatgcctttckgaagttggccacttcttgaagattcaaatatttatctctttatttagacatggttgcctgcaggtatttcactgtttactgttgttagagatataggcactggggcagctgaggaacctcaatatgttaagagccttggctttggtagcctcctggcaggagcagcagtttgccacaggtccggacctctccctccacacagccacactgcctcatgcagtctgacccacccagtgagggtgcatttgaacactgattatattctccatttgtttttaagctctgctttgtgttagagcttgtgactgccaaaaattttgtgcacagtgatatgactgttttaggatcttaagggtagaattttgtgaaaggtgagatcctttggaattgagttctttctcattgggtatgaaaatggatgtatgtttagaatatatgcccaacgaggcaggaccatgtggatagattccatttgtttccttgacctgatgtaataaaaactgataaaarccgtgcagtgcccggcatcttggaggcaggtgatctggcttttctgttacctgggattttcttttcctatatatctgtagtgcactgataattgatattgttagtgagaactttaaggcacgacaagatctggaagagcttgtgaaccatcaaagtcagattgcttatgttgagtagtgatttaacattgaacatttctgtactactctgactctttgaaaattggacatttcagaatgatacaatataggggagctctttacaagtagcatatcatttttcctgactttcctggctgactgcttaccttcatttctttttcttctaggtagcatgatgttatggaaaaaaaa

SEQ ID NO: 612 - DNA, 725 bp, Homo sapiens
  misc_feature (2)..(2): n equals a,t,g, or c
cntttttttttttttttttttttttttttttttttttttttttttwttttttttcaaaggcattcaggctctttaatgtctgaggatggggggaagaagtcaatggtgaggcttctctgggaaattctgcaggccttgtagttctctaagcccctgaaaaagaggacagaagagattgaacaaagactgggtctgggttacgcccccaggcttgctctgacctccctcccttgactccagtttagagggaaagatggtccttcccttctttcgctctcttccttcttcaggtcaccaccctaaacacagagtctggtagtggggtgagctgctctcacctctagcaacatgtggatatgggctttgatattcatggagtccttggtgaggctgttgctgagcctagagaaaagaaacaagaaagggcaaaatgggccccacatgattatgatgacccttccttatcacttcaagatctacttatatcctggatgatttccacctggctcattcctatgtggaaatgccaagccaccatctggttttcactgattcaaagattattaaatgcctactgtatgccaggcaattttaggcactgggagatagcagcaaacacaacaaacaaaactcccggcctgatggacttcaaattcttgtaaagaaagacataacaaaaaaccaatggaataaaagctatgtgtcagatggttctaactacaata

SEQ ID NO: 613 - DNA, 2813 bp, Homo sapiens
  misc_feature (2808)..(2808): n equals a,t,g, or c
cccccgggcggcccggcggctgcgtactggctgtgggatgggaagtgaagccccagcgagcggctgcagcggggccgtgaggagcagccagcgggaggcggcggcgagtcggtgagcagctgggaagagcagaaccggggcggagcacctgcaggcgcgggcggcggccccaccatggcgattcgcaagaaaagcaccaagagccccccagtgctgagccacgaattcgtcctgcagaatcacgcggacatcgtctcctgtgtggcgatggtcttcctgctggggctcatgtttgagataacggcaaaagcttctatcatttttgttactcttcagtacaatgtcaccctcccagcaacagaagaacaagctactgaatcagtgtccctttattactatggcatcaaagatttggctactgttttcttctacatgctagtggcgataattattcatgccgtaattcaagagtatatgttggataaaattaacaggcgaatgcacttctccaaaacaaaacacagcaagtttaatgaatctggtcagcttagtgcgttctacctttttgcctgtgtttggggcacattcattctcatctctgaaaactacatctcagacccaactatcttatggagggcttatccccataacctgatgacatttcaaatgaagtttttctacatatcacagctggcttactggcttcatgcttttcctgaactctacttccagaaaaccaaaaaagaagatattcctcgtcagcttgtctacattggtctttacctcttccacattgctggagcttaccttttgaacttgaatcatctaggacttgttcttctggtgctacattattttgttgaatttcttttccacatttcccgcctgttttattttagcaatgaaaagtatcagaaaggattttctctgtgggcagttctttttgttttgggaagacttctgactttaattctttcagtactgactgttggttttggccttgcaagagcagaaaatcagaagctggatttcagtactggaaacttcaatgtgttagctgttagaatcgctgttctggcatccatttgcgttactcaggcatttatgatgtggaagttcattaattttcagcttcgaaggtggagggaacattctgcttttcaggcaccagctgtgaagaagaaaccaacagtaactaaaggcagatcttctaaaaaaggaacagaaaatggtgtgaatggaacattaacttcaaatgtagcagactctccccggaataaaaaagagaaatcttcataatgaattataaactaattgattaatgtccccaaagaaatctgctttctactatatctttcagcattagagatttttctgttcttgaaaatacagtctgtgctctttgatttttgctattgtacggtttcatgcatttttttaaagggcatttgaggggaggattattgctatgaatgaaaaaaatattttagcttagactaagctacctgccttcaaaatagtttagggaccaccaccatattttattttgtttttatttttgaacatttttctaatgatttggagagaaaactatttacaaaaattccacatatcagtgatacaatttcttgctgtcaccaattttttataatagcagagtggcctgttctaagaaggccatattttttaagttatctttcagggtaacatggaaatactataaagttggatgtcaaactttaatatgttttcagtgttctctaattttttggaatttttgtagactttacacctggaaaaaaagatttgtaaaatcaccggaacaattgtgtgctttattttataggtagtggttattagtattacatccccattttaaaaacaaaaacataataatggttacaacacgtggagttttactaacatacatattaaatcaaagtatattcttaaaagtacttgtgaagtaaaatctttcttgtgcattttcaatacttgtaaactggaaatcagaaaatatttactatgaacaggaaaatctgacatatagccctttttgatatgtttattaataatgattcttaatggggctcataataagtttaatatgcacagcatcttagaaaagtttaacctgcaaacacttttaaaacataatgcctacttgatttatatctataaaaagactgacaggtaattatatttggaaaacatttaatgcactaactttaaagaaattgaaaattcaggtggataaatagtcttacaaaagacaatgtgctttatgttatacctatagctttggtcccatctttaattgagaaacatttatctgtataaaacatatttttggataaatatatatatatatatttgtatcgctacagaaaggctctaaaaagcatttgaggaaaatatttggttcccttttctataatcatcctttaagattcttatagctacatttggtttattcatcatatttacagtatatatattgttcttttcagtgttcacatcttgttccccatttctcacttgtgtcaccagctgtttgtgccatttttagtgtaaaagttgcagacctattagatctgcagtttaagttgccatgctgctaggaaattgtcctttttctttctagctgttaacctacttcctggaaaaagtagtagctctctgtagcattatggagtttcagtggaaccaaatttttgccattaaaaactggcattatactgaactatacattgagaaatcaatcaaaataaaaatttttactttcamaaaaaaaaaaaaaaaaagggnggccc

SEQ ID NO: 614 - DNA, 4207 bp, Homo sapiens
  misc_feature (603)..(603): n equals a,t,g, or c
  misc_feature (606)..(606): n equals a,t,g, or c
gccagcaggacgtggctcagtttgccgatttccgggaagtgctgactacaagggcaacccagctctcagaggaactggcccagctccgggatgcctatcagaagcagaaggagcagctgcggcaacaactagaagcccctccaagccagagggatgggcactttctccaggaaagccggcgactctctgcccagtttgaaaatctcatggcagagagccgccaggacctggaggaggagtatgagcctcagttcctgcggctcctagagaggaaagaagctgggaccaaagctctgcagagaacccaggctgagatccaggaaatgaaggaggctctgagacccctgcaagcagaggcccggcagctccgcctgcaaaacaggaacctggaggaccagatcgcacttgtgaggcaaaaacgagatgaagaggtgcagcagtacagggaacagctggaggaaatggaagaacgccagagcagttaagaaatggggtgcaactccagcaacagaagaacaaagagatggaacagctaaggctcagtcttgctgaagagctctctacttataaggctatgctactacccaagagcctggaacaggntgnatgctcccacttctcaggcaggtggaatggagacacagtctcaaggggctgtttagaaatatatggccaaatctgtaacccggaaacagcaaaaaacttcttagcaaaggatcactaagtaccctttggatgtactcttccaaccagacaagagtgccagaaacttggcaagcaattcatcctgtggaagttgcaaatactggctgacctgcttaaaaagattctagagttggccggaggcagaacatgtcaactctttgctggattctatttcatctgctgttgatactgatctcaatgcaccaaggaaaggaaagatgagcctcctgtcttccagcaacaaccctcacatatgcactgagtaaaggatgaatgtatggacacatctgggagtattttaaagaatgtatcttgccttgtgttgacccaaaccaaaaacatttttgaggggcacatgtggggtcaaaaagatagccaatttccattacatgggtttacaatttccattcttttgtgccacgagtgttagaatttaaatgaatacttttacaaagtctactttttgttcaaggatatgctgacccatatagtttactcttaaaattgtgtcaaggtatttctcactatactctaaaacaactagacttgaaaagaaaccatttgagatttgaatctaatggttaacgctattcagattttcccaaagatcttacctcatgaaagtagttctgggtcagaatgatctactcagttaaaaaacaacaacaacaaaaaactaagcgattgggaaaaaacaggaattttatctggttattgcatctggtgatagaggccttcaaagcctattatttctaacctaagtaaaggccccagtgaaaaacatactggggaaataaaacctctgagaaaaggttcaagcaccttttccaaatttaaatcttgccttaaattctctctaccacactgcctttgacactcttggaagtccatgtagttctctacagacagacttcaaagaaacgttaccttatcaaagactaatctgtgccacctctgattcagtgttttatgtctttcactttccctgggaaggagtaaagttcttttctacagctctgggactattacatttaattctgctcttgatagtcaaagaccatggacaacaactgtcatctgaaggactcttctagaagccagagactggtgtttgatggatgttttatactaaataaaacccatcagcatggggttatgtagaaaagcaatttattccattttaagcacttacacagttagtcatggagagtaacaggcctgctggtgaaacaggtcacccaaaatggagatggcatcaaactagtggtcaaggactaactcctaaaaaaaaaaagcaactcttatcaaggattaatttaatttttaaaacaaatacaagttattgattcactcttctcaacttgacagtctacctgtggtataactgtcaggtaaaaacatacatctttacaacttggtggtcccaagttaaaaaaaaaaaaaaaaaaaccaacaacaaaaaaaaaaacaccatttcacagacaggaaataaacaacatgaaaacagctcaagaaatacactaacgagcaaaaatatatgaatatatggggaaagaggaacgtgttgttttgacttaactgaagaaaccaagaggaaactggtctacgtatgaaaatgtgcatcctggaaagtcaggtgtcaagattttcgagtaggaatctatacgacttgaatctccccctatttcctgaataaaagtgacatctttcagtatttatacttcatggctcagacacctacctcatttggctctattccttactcactctagcctttacttaaatgagtctgaaaaacttggggatatagcataagaagaaaaataatcacacataatattcccctttctgtagctactttagacctgggttactagaaaattcctgaagaaaatttcaacgttaagtctgtggctttgttgaatcaagcccccctattaatatttagaaaacacccacggtttgggctaatagcattatcggtggtacctattatatagagggatagctgaataaagtctgtctcaaaaccagtgttaaatcactctcagggttgagaagaaaaaaggggagtctaaaatcacaacaagtaaagacatatctaggacccttgtccttctggatccacgcttccttcagggtcttcatcattataaatgttctctgccatttgccacacttgcatgatattgtcttctgatacagaacaaatcacccaaggttcattgggattccaggagaaatcagatatcttggcagtatgaccaccatgaataaacaacaactctggtggcccgtcttctgcatcttctggggattgttcctctccaattttacttaaatcccagacattcagtctgcgatcagtaccactggaagctaaaatagtctcattgtgaggtgaccactgaacctggaatatttcatccttatgtgactcaaaggaatgcaacttaagtttcagatttctcagatcccacaaggcaacagtcttgtcagctgatcctgtggcaagaatgaactcactataaggattgaaagaaaggcagttcacttcagcagtgtgagcatcaactgagtggcttggtttggaagtattgtttgaacgagtatcccaaatcataagtttctgatcatcagcaactgacccaaacagagactcatggagtagatgccaggaaacatcttctactactgccgtatgccctgtaaagatggtcttcgcatctaccacttttccctcctttggaacggcactgatgtcccacaggcagatggtatggtcatctgaagcactaagtaagtgcccactgagatttgggttccaagaaagcccatagccttccttctgatgtccacggagacgcaagtctgggttgcactctccagaaggatctggtttagaaggatgttttgtatagtcaaagacaagaacatcactggaaggagtctttgttgcgatgatacaagggttctggggcatataacgggccctgtttacttctccttcatggttgatcttgatttctatttcaatttttccactaactgaaccaaaacctccaaattctcctttctcactgtcgtagtgtgacgcatcaaactgagcatcatcattagggagctgcacactggctataacaagatggttttgttcatccgatgtgtgtgtccccaggacaagtcgatgaatgctgaaatctttcccttctggtctggttacatctggaagccactgggcagttaggctgggccactccagagcatgggtcatcaccaaatcataaagaaaaggggtgttctttttccatattttgtattcctcgttgatcactcgttcttccactgcgtcgtcgaaggctgcttccttgtcggccatggcgggcaggcgagccgggggaatcctggggtcgagcgttgcgggaggggcggggaggctgcaagagctcgctctgtgcgcgcggcctctattgtttcctgcgcccccagcgcgagggctgac

SEQ ID NO: 615 - DNA, 1977 bp, Homo sapiens
  misc_feature (1909)..(1909): n equals a,t,g, or c
  misc_feature (1949)..(1949): n equals a,t,g, or c
  misc_feature (1972)..(1972): n equals a,t,g, or c
accgcccggattcccgggtcgcccacgcgtccgataggattttattttgcactgctgtaacaatttcattatagaccaagggagaaaaagaaaaaaaggataaaaccaccacactgagtaaattactaaagcttttctactttgtaacaggattttccatctgatagatttattgtcatatccccttcaaaacagacaagatgctcaccatattttaaagattatagaggttgccactgaaagaaaaattttacacagtcactgtacatcaaggttgaaaaactgtcctgcatgaaaaatatacttagaaatcatgtgaataaaagaaaaaagaaaacattattgtgtttaaggaaagattaaagtcctcataatgtgccatctaaatgtggatactcattcttcttggagtcgctaagatgtagaaatttcttgcttctgcccttttcactcattatactgtgttttttcccaacagtattcattaaggcaaacaaatccctttctgaagaggtcttaaggaaattgtggacaaagcaaacttttggcattaaaacaggttaacatatacaaagcctttgtaatatacattaagcatatttttcttggactagtgacaagaaaagatgaacatgcttgttaacaatgtcaaaaagtttaaaattcagtgtccaagcaattcctaacaatgcttctgtagctttaagctctaaacagtatagaatttatgcaaatgcattaaagaattcaagcttggcaaattacacccaagcaggttattaaactatatatacagaaagtaaatgataaatacagaattaaaagagtccttctgtttccttatagccgtgaaaattgacaaagtttctgaggacagttctataatattaaacattaggtaaccacagatgttgggaaacctaactacacaaaccgatttaaaatactcaagatgactttgtagtgtttaatacaattcagttcgtagttaagggcacaagacaacatttaacaaaaataatcacatcaattgacctagaaatcaaatgcaaatagatatgaatacaatctccaaaatctgtcttttaagtgaacattaaccatttattcaaagttatacaagaatttgacggattaaagtcttctgtgacataaagccatttcaaatagtttcatgtctcagctgagcaggaggagagggggtgaaagaataagtgagtaggccccgttgggcagctagacagtaaaaacagactcaacagcagccgcccccagcctgctgtcctccctgattgcctgcatgtgttgcattggtagcagcatgctgagggccaattttaatgccatttgcctcattattaatgtcaaagactccttcttgaattttttcataaatttcttttgctgtattaataaatgcctcttctacattggaagcagtcttagcagacgtttccatgaagatgagtccatgttctcgtgcaaaagcttcaccttcttctttttttacttctcttctagattctaaatcactaaacatgggaaagaaagggtcacattactaatcaacatggtacaaacagaagcatttgtggaaagtgtaccatggaattcaaagttgtgatgaccattcttttaattaatttttaacatactaactgtattattcagggtattatgagggttagtatttagaacacactgtctagtttcaaagaactaacaatccaacagaagaaagattctgtgttagagttttagaacgttagaactagccgtaacttaagggagcctctagtctaataccttatatctttgagtacagtgcattcccagagaagaaagccattttgctcaacataatttgaaagagcaggactatactattctcctccattggccagactgnctgagtttctatgaatgtgattaaaatacaactctcagtnactacgggcaattgtttagtttnaacgg

SEQ ID NO: 616 - DNA, 3134 bp, Homo sapiens
  misc_feature (319)..(319): n equals a,t,g, or c
  misc_feature (3108)..(3108): n equals a,t,g, or c
  misc_feature (3117)..(3117): n equals a,t,g, or c
  misc_feature (3132)..(3132): n equals a,t,g, or c
tgggtactgtgctgaatggatacctgtgcttgcggaagctggtggtgcagaggaccaagctgatcgatgagacgcaggacatgctgctggagatgctggagsacatgaccacagstacagaatcagraccraggcsttcatggctgtgtgcattgagacagccaagcgctacagtctggatgactaccggaccccggtgttcatcttcgagaggctctgcagcatcatttatcctgaggagaatgaagtcactgagttctttgtgaccctggagaaggatccccaacaagaagacttcttacagggcaggatgctgggnaaccygtatagcagcaatgagccaggcatcgggccgctgatgagggatataaagaacaagatttgccaggactgtgacttagtggccctcctggaagatgacagtggcatggagcttctagtgaacaataaaatcattagtttggaccttcctgtggctgaagtttacaagaaagtctggtgtaccacgaatgagggagagcccatgaggattgtttatcgtatgcgggggctgctgggcgatgccacagaggagttcattgagtccctggactctactacagatgaagaagaagatgaagaagaagtgtataaaatggctggtgtgatggcccagtgtgggggcctggaatgcatgcttaacagactcgcagggatcagagatttcaagcagggacgccaccttctaacagtgctactgaaattgttcagttactgcgtgaaggtgaaagtcaaccggcagcaactggtcaaactggaaatgaacaccttgaacgtcatgctggggaccctaaacctggcccttgtagctgaacaagaaagcaaggacagtgggggtgcagctgtggctgagcaggtgcttagcatcatggagatcattctagatgagtccaatgctgagcccctgagtgaggacaagggcaacctcctcctgacaggtgacaaggatcaactggtgatgctcttggaccagatcaacagcacctttgttcgctccaaccccagtgtgctccagggcctgcttcgcatcatcccgtacctttcctttggagaggtggagaaaatgcagatcttggtggagcgattcaaaccatactgcaactttgataaatatgatgaagatcacagtggtgatgataaagtcttcctggactgcttctgtaaaatagctgctggcatcaagaacaacagcaatgggcaccagctgaaggatctgattctccagaaggggatcacccagaatgcacttgactacatgaaaaagcacatccctagcgccaagaatttggatgccgacatctggaaaaagtttttgtctcgcccagccttgccatttatcctaaggctgcttcggggcctggccatccagcaccctggcacccaggttctgattggaactgattccatcccgaacctgcataagctggagcaggtgtccagtgatgagggcattgggaccttggcagagaacctgctggaagccctgcgggaacaccctgacgtaaacaagaagattgacgcagcccgcaggagacccgggcagagaagaarcgcatggccatggcaatgaggcagaaggccctgggcaccctgggcatgacgacaaatgaaaagggccaggtcgtgaccaagacagcactcctgaagcagatggaagagctgatcgaggagcctggcctcacgtgctgcatctgcagggagggatacaagttccagcccacaaaggtcctgggcatttataccttcacgaagcgggtagccttggaggagttggagaataagccccggaaacagcagggctacagcaccgtgtcccacttcaacattgtgcactacgactgccatctggctgccgtcaggttggctcgaggccgggaagagtgggagagtgccgccctgcagaatgccaacaccaagtgcaacgggctccttccggtctggggacctcatgtccctgaatcagcttttgccacttgcttggcaagacacaacacttacctccaggaatgtacaggccagcgggagcccacgtatcagctcaacatccacgacatcaaactgctcttcctgcgcttcgccatggagcagtcgttcagcgcagacactggcgggggcggccgggagagcaacatccacctgatcccgtacatcattcacactgtgctttacgtcctgaacacaacccgagcaacttcccgagaagagaagaacctccaaggctttctggaacagcccaaggagaagtgggtggagagtgcctttgaagtggacgggccctactatttcacagtcttggcccttcacatcctgccccctgagcagtggagagccacacgtgtggaaatcttgcggaggctgttggtgacctcgcaggctcgggcagtggctccaggtggagccaccaggctgacagataaggcagtgaaggactattccgcttaccgttcttcccttctcttttgggccctcgtcgatctcatttacaacatgtttaagaaggtgcctaccagtaacacagagggaggctggtcctgctctctcgctgagtacatccgccacaacgacatgcccatctacgaagctgccgacaaagccctgaaaaccttccaggaggagttcatgccagtggagaccttctcagagttcctcgatgtggccggtcttttatcagaaatcaccgatccagagagcttcctgaaggacctgttgaactcagtcccctgaccaccacacagcagctgcggcggcgaagacgaagctggcttgccttccaccctctgttctccctccttgtgcattaagttccctccgcgggatgctgcattgttaccccgccctcccctctctcatttttcttggtgtggcttggggtttttaggcttcctgttttatctcgtgtgtgtggtgcaccagctatgaggttgtctgtaacccaagccatcaaagggcctgtacatacctaggagccatgagttgtcccggccagcttcatacttgagtgtgcacatcttgagaaataaacaagtgacttaacacacattgaaaaaaaaaaaaaaagggcggccgttntaaaggatncaaggtttacttccncg

SEQ ID NO: 617 - DNA, 2552 bp, Homo sapiens
  misc_feature (1897)..(1897): n equals a,t,g, or c
tcgacccacgmgtccgtgccgtctctgcgttcgccatgcgtcccggggcgccagggccactctggcctctgccctggggggccctggcttgggccgtgggcttcgtgagctccatgggctcggggaaccccgcgcccggtggtgtttgctggctccagcagggccaggaggccacctgcagcctggtgctccagactgatgtcacccgggccgagtgctgtgcctccggcaacattgacaccgcctggtccaacctcacccacccggggaacaagatcaacctcctcggcttcttgggccttgtccactgccttccctgcaaagattcgtgcgacggcgtggagtgcggcccgggcaaggcgtgccgcatgctggggggccgcccgcgctgcgagtgcgcgcccgactgctcggggctcccggcgcggttgcaggtctgcggctcagacggcgccacctaccgcgacgagtgcgagctgcgcgccgcgcgctgccgcggccacccggacctgagcgtcatgtaccggggccgctgccgcaagtcctgtgagcacgtggtgtgcccgcggccacagtcgtgcgtcgtggaccagacgggcagcgcccactgcgtggtgtgtcgagcggcgccctgccctgtgccctccagccccggccaggagctttgcggcaacaacaacgtcacctacatctcctcgtgccacatgcgccaggccacctgcttcctgggccgctccatcggcgtgcgccacgcgggcagctgcgcaggcacccctgaggagccgccaggtggtgagtctgcagaagaggaagagaacttcgtgtgagcctgcaggacaggcctgggcctggtgcccgaggccccccatcatcccctgttatttattgccacagcagagtctaatttatatgccacggacactccttagagcccggattcggaccacttggggatcccagaacctccctgacgatatcctggaaggactgaggaagggaggcctgggggccggctggtgggtgggatagacctgcgttccggacactgagcgcctgatttagggcccttctctaggatgccccagcccctaccctaagacctattgccggggaggattccacacttccgctcctttggggataaacctattaattattgctactatcaagagggctgggcattctctgctggtaattcctgaagaggcatgactgcttttctcagccccaagcctctagtctgggtgtgtacggagggtctagcctgggtgtgtacggagggtctagcctgggtgagtacggagggtctagcctgggtgagtacggaggatctagcctgggtgagtacggagagtctagcctgggtgtgtatggaggatctagcctgggtgagtatggagggtctagcctgggtgagtatggagggtctagcctgggtgtgtatggagggtctagcctgggtgagtatggagggtctagcctgggtgtgtatggagggtctagcctgggtgagtatggagggtctagcctgggtgtgtacggagggtctagtctgagtgcgtgtggggacctcagaacactgtgaccttagcccagcaagccaggcccttcatgaaggccaagaaggctgccaccattccctgccagcccaagaactccagcttccccactgcctctgtgtgcccctttgcgtcctgtgaaggccattgagaaatgcccagtgtgccccctgggaaagggcacggcctgtgctcctgacacgggctgtgcttggccacagaaccacccagcgtctcccctgctgctgtccacgtcagttcatgaggcaacgtcgcgtggtctcagacgtggagcagccagcggcagctcagagcagggcactgtgtccggcggagcnaagtccactctgggggagctctggcggggaccacgggccactgctcacccactggccccgaggggggtgtagacgccaagactcacgcatgtgtgacatccggagtcctggagccgggtgtcccagtggcaccactaggtgcctgctgcctccacagtggggttcacacccagggctccttggtcccccacaacctgccccggccaggcctgcagacccagactccagccagacctgcctcacccaccaatgcagccggggctggcgacaccagccaggtgctggtcttgggccagttctcccacgacggctcaccctcccctccatctgcgttgatgctcagaatcgcctacctgtgcctgcgtgtaaaccacagcctcagaccagctatggggagaggacaacacggaggatatccagcttccccggtctggggtgaggagtgtggggagcttgggcatcctcctccagcctcctccagcccccaggcagtgccttacctgtggtgcccagaaaagtgcccctaggttggtgggtctacaggagcctcagccaggcagcccaccccaccctggggccctgcctcaccaaggaaataaagactcaaagaagccaaaaaaaaaaaaaaaaaaaaaaaaaaaaaaagggcggccgc

SEQ ID NO: 618 - DNA, 2110 bp, Homo sapiens
  misc_feature (1160)..(1160): n equals a,t,g, or c
  misc_feature (2059)..(2059): n equals a,t,g, or c
  misc_feature (2091)..(2091): n equals a,t,g, or c
ggtttgataacagtgagagctattaattttagaaaagtcgagttactttgtaatgtagttaaagaacaagggagaatgcgtagtgtaaaaaatactgttgagttagctgctcactgtatttcacaactgatcaatattcgggccaatatggacttaaagggctatgttttgaacacagctagatgacaaattaaatatgaatggtgaaggaaatgtactaattatttattcatataatcttttcttggcattgagttaaagtctaagaagcaggtttcagagattaggatactatcagaatttaaacttaatggaatttaatctctagcatgtcctaatgcagacaacttgcaattccagggtttataaatcataccagggtattaaagcacagtaatcagatgtgtcagtggtaaatatgtgtgaaataatgaatcatatgactgctctgktaagtrtttggttctttattggggtgcatttatacccttttatgattaataagttagtatatatagttatcacagtaattatcttctccaaaatgtttctaaaaataattattgtgatcacttctgttattgcccagcgagagttggggatagattttattcagttaacactgtatgtaattagggttttttttatttcttcttcagttggcagttctgcaagtagtagtgccacaaggagagagtctctatctactagctctgacttgtacaaaagatctagtagcagcctagcacccatagggcaaccattttacaatagtctgggattttcctcctctccaagtccaataggcatgcctctgccaagccaaactccaggacattcacttacgccaccgscatcactttcatcacatggatcctcatccagtttgcatttaggtaaaaaaaaaccaaaaccctttttatttgtatgtatacatgtatgtgtgtttgtgtgtgtgtttataatatatgtaaaatatttaatgttggttaaaacatgccaaattgcttttgcttttagatattagtcttttgaaaaagttctactttcctgaaaattcaaagtgagggtctaatgtacaataaggtaaagacccccctattgtttcttatgttttttttatgaaatataatggtgtgttttttcttgtctgtgctttngatttgtgtgttttagagcatctgaaaagtcaactatataaacataatagtgaaagagaaattcactatcaaaagatttgcacaccataagaaaaacattagttacatagctactgaactaggttagtacactggtttttgctttggtctttctatgcctggccattttaccagataattatttcagtgaatttgaatttagtgtatttgtcacttaaggaagcttataggcttgggccatatacttcttttttggatatgttaaagaaaaaaaatgttttaggcttgttgtacccctgaagttggagcattgagaactttgtttatatttgtatattaaaattkttcccacccccaaattattaaattggtgattaccttttttccctctccaggaagtatttatccatgtagataatacgttttgaagggctttggatatcaggggctgtgtatgaatccctatcttgtcaaagaaattatttttttaaaactttattttgaatttttataattctagttattcagctgaaactgagggattctattgccagcttttatgtaattggaaagatttaaatcagcttgtgttttaaaaagtaatgttgctactgtaagcagatgtactgtaattagtgattatgtttgaccaccccctccaattacatgggtatagctatttaaaaraaaaaaacaaaaacaagcaaaaaaacttactaatacaataaatgtccatgtaacaaaggtatctgttgcagtgttcattttgatttacattattgcacacacactgggctagatttcttttttaaagactckggtcttccaccccaaattctgggccttkgctcatttgggggtatggatackgaacatatacagccattaatgtatccaangggagccctaagatccactttgccgtaccagngtgtagatttacccaacct

SEQ ID NO: 619 - DNA, 885 bp, Homo sapiens
ggcagagtttagtttctaatgggccggtgaatatttcctgtaaaactaagactgtatctttaaggatttttccccctttcttataagaccgcatcttaaaggacttttttccckwccgttgtagagaccttgtacacagacagacggctagtgcagtggtacagcacatgtcacttggggtttatggatttggttgtgaagattcgctgaatcacttgttgaactatgtatggcccaatgtgtttgagacatctcctcatgtaattcaggcagttatgggagccctagagggcctgagagttgctattggaccatgtagaatgttgcaatattgtttacagggtctgtttcacccagcccggaaagtcagagatgtatattggaaaatttacaactccatctacattggttcccaggacgctctcatagcacattacccaagaatctacaacgatgataagaacacctatattcgttatgaacttgactatatcttataattttattgtttattttgtgtttaatgcacagctacttcacaccttaaacttgctttgatttggtgatgtaaacttttaaacattgcagatcagtgtagaactggtcatagaggaagagctagaaatccagtagcatgatttttaaataacctgtctttgtttttgatgttaaacagtaaatgccagtagtgaccaagaacacagtgattatatacactatactggagggatttcatttttaattcatctttatgaagatttagaactcattccttgtgtttaaagggaatgtttaattgagaaataaacatttgtgtacaaaatgctaaaaaaaaaaaaaaaaaaaaactcgaggggggcccgtacccaattcgccgtatagtga

SEQ ID NO: 620 - DNA, 3014 bp, Homo sapiens
ggcacgagcctccgcgaactgtggagtcggcggagggctggaatcagcgtgggctccaggtcgctggcagccgggtggcagaactcttccgaggctccttgggaagaagctacacccgagggagccggatgggcctcgaaaacctggcccgctctggttctgtaccattgcaaggggaaccgtaaactgagcttttctaacgtgggtttctgccaagtacttttccagctgcccccttccccccagcacacaggagagcctctgtgtagccagcgcttgacagtcgttaggtaggttgtactgtgtagggaggagctcaagatcatgatggttgtcacaggagaaagcggttgcatctttgcaaaactatatacctgctgtggtttgtgttttcttttctgctgagtaatgaagttgtaagttcacactggcacattctcagggctgtgcagattatttgcactttatttcataggtgaataagtgctttttagctttctttgtatattgagttgcttttgaattgcttcccatatttttatttcatacaaactgaacaattgtggcccctctattttatttataaaggttcagtgtatctttgcctgcctacatcaatctgcaagggagttgcagaaagcctcatgttcatcgagccgtgagtcacaaccaatttctaagctgttataacaaaaaagtgtttgctttttttcacaagtaactttaaaagtgtagtttagaaagaaaacattttcaataaaaagacactacattaatcctggatgcttgcaaatcctaaaatatattcctcctctagcgttgcacagctctgtgttgtatacacagactagctttaaaatttgtcacataccactttacctttacttttatgtatcattcccccgacttccttactgcaggtgtgggcaagaaaacttttcctttaacacttttcaacagcgggcataaaattctgcagctgaggtcttgaagaatgcagatgggtacagtatgtgttggagctcacagtgtgtattgactaacctagttccttttttgctttttttggtattgtcttgttaaaagtgactcccaggtagcaactctcttttttaagggtgggaacgaaagggacgtaggaagaatagatctagattatttaacagtcttcgatagagtttgaaagctttcttcttcattcaattttgggcaaaatactgcctctgcatttgttcataacaaaaagattagattaataagtagcttttgttggtggaaattaccagctctataagtcacccttggtggttcatggacctctgattagcttgggttttgcagtctcattgccacatgtatatgtggagccaatggccttttggtgctcagctgtttacgtctgactccttgacttctttggtacagtgatggagtcagatctcattaagtgtgattctccatgatataactagcctcaaaaaaatgtgtattccactccagttgtaaatatctttagatcagcttttcattgyatttgatggggagaacacagaaatgatagtctgcaaatcatccaggtgaattgttatactagttattttttggtggttaatgtgataatattgtcttatttaaaaccacaaatgaatttcaggagacgaaaccagacagagggtcaagtttacagatgaccgtgtctgcaagagtcaccttctggactgctgcccccatgacatcctggctgggacgcgcatggatttaggagaatgtaccaaaatccacgacttggccctccgagcagattatgagattgcaagtaaagaaagagacctgttttttgaattagatgtgaaaggggggaccctaccctcagaacatgagggaataatatttacgtggctcacaaagaccagcaatggatcacttggagtcctttattgctgaatgtgatcggagaactgagctcgccaagaagcggctggcagaaacacaggaggaaatcagtgcggaagtttctgcaaaggcagaaaaagtacatgagttaaatgaagaaataggaaaactccttgctaaagccgaacagctaggggctgaaggtaatgtggatgaatcccagaagattcttatggaagtggaaaaagttcgtgcgaagaaaaaagaagctgaggaagaatacagaaattccatgcctgcatccagttttcagcagcaaaagctgcgtgtctgcgaggtctgttcagcctaccttggtctccatgacaatgaccgtcgcctggcagaccacttcggtggcaagttacacttggggttcattcagatccgagagaagcttgatcagttgaggaaaactgtcgctgaaaagcaggagaagagaaatcaggatcgcttgaggaggagagaggagagggaacgggaggagcgtctgagcaggaggtcgggatcaagaaccagagatcgcaggaggtcacgctcccgggatcggcgtcggaggcggtcaagatctacctcccgagagcgacggaaattgtcccggtcccggtcccgagatagacatcggcgccaccgcagccgttcccggagccacagccggggacatcgtcgggcttcccgggaccgaagtgcgaaatacaagttctccagagagcgggcatccagagaggagtcctgggagagcgggcggagcgagcgagggcccccggactggaggcttgagagctccaacgggaagatggcttcacggaggtcagaagagaaggaggccggcgagatctgaacccgtctcccgggtgctgtaaatagtctgataaacgttcacacagtctaaaattaccctttatatttgctgaatacaactcatcttttgtagtttaaaatttctattgttttggagctagctgtgagtttctagaagtgtacagagttgctcctgtgttcccgggtcatgttgagtaggaataaataaatctgatgctgcctcctgaaaaaaaaaaaaaaaaaaaactcgacctgcaggc

SEQ ID NO: 621 - DNA, 957 bp, Homo sapiens
  misc_feature (953)..(953): n equals a,t,g, or c
  misc_feature (957)..(957): n equals a,t,g, or c
agcggccgcaggagctgtggcggttttcctaatcctgcgaatatgggtagtgcttcgttccatggacgttacgccccgggagtctctcagtatcttggtagtggctgggtccggtgggcataccactgagatcctgaggctgcttgggagcttgtccaatgcctactcacctagacattatgtcattgctgacactgatgaaatgagtgccaataaaataaattcttttgaactagatcgagctgatagagaccctagtaacatgtataccaaatactacattcaccgaattccaagaagccgggaggttcagcagtcctggccctccaccgttttcaccaccttgcactccatgtggctctcctttcccctaattcacagggtgaagccagatttggtgttgtgtaacggaccaggaacatgtgttcctatctgtgtatctgcccttctccttgggatactaggaataaagaaagtgatcattgtctacgttgaaagcatctgccgtgtagaaacgttatccatgtccggaaagattctgtttcatctctcagattacttcattgttcagtggccggctctgaaagaaaagtatcccaaatcggtgtaccttgggcgaattgtttgacaaatggcaactgacttctttagaattttgcagttaacagtagtatgtactcaaattggggggaaaaaaaccctacatgtttcttgtaaaggcgtctgacagtcctgagaattattgatggtaaggaataaaaaatgtacagatgactcagtgaagaaactgaggcttctcttatgaaacaaacattgataaacgtaactactaaatgtttatgcctctgtaaaccaaatttcttttctagataaaaatatgtattactacctgcaaaaaaaaaaaaaaaaaaaaaaaaaaaaaaaaaaaaaaaaaaaaaaaaaaaaaaaaaaanaaan

SEQ ID NO: 622 - DNA, 1614 bp, Homo sapiens
  misc_feature (68)..(68): n equals a,t,g, or c
  misc_feature (232)..(232): n equals a,t,g, or c
  misc_feature (1506)..(1506): n equals a,t,g, or c
  misc_feature (1563)..(1563): n equals a,t,g, or c
  misc_feature (1567)..(1567): n equals a,t,g, or c
aattcccgggtcgacccacgcgtccgctgcaacatcttctcctacgactactcgggatacggcgtcantcgggcaagccctccgagaagaacctctacgccgacatcgacgccgcgtggcaggcgctgcgcacccggtatggcgtgagtcccgagaacattatcctctatggtcagagcattgggactgatccccacggtagacttggcctcgaggtatgaatgcgcaggtnaattctccattcccctctgatgtctggtttgcgtgtggcttttccggataccaggaaaacatactgctttgatgctttccccagcattgacaagatatctaaagtcacctctcctgtgttggtcattcatggtacagaggatgaggtcatcgatttctcccatggcctagcgatgtacgagcgctgtccccgagccgtggagcccctttggkttgaaggggctgggcataatgacatagagctttatgcacaatacctagaaagactaaaacagttcatatctcacgaacttcctaattcctgaagacaacaacttgatcttacctcatttactgtgaacagaagagtcctctgttttgcacatgctttaactgggtagctgtaaaggcttgataaccatgaagaagtgcccaacctttagggtgttctaatcaaagagctgatgaaatctcagtcttttgtatctagaggtggttctgctaattcacacaacacgttaaactgaacagtcgtgattcccagcttcattaccttgcaggaatgggaatgagagctgaatgtagggacaattttctagtgctgtataaagtagcctcgcatctgtttctcaaccttatccatcatttctgacattcatgcaggacttgccctgttgccaccaatgttctcggtatttcacatgcagctctctttctgccactggatacatgggttcaatccatttgtgaagctgtgatagtgtaactggaaagctagtgtggtgaaaattcctttattattttttgttaacatgctgatctttcccggacaaatgaactgaagggtaatttactggaactctcgtgtacagcttcatcaactgtaaccatataaatataactggaatattcttaaacaaaaagaaactaggggtttttttaagtgtaaatttattactagccaacagagttttactattttgattgtctggttggtttaacaaagagcctagctgactttccttctgtaaagtcctccttgtaggcttttttaaagtactgtacatatttgcaatcacattgtgcatagattcttaatggtagatatgatttcttttgtcaggctacaacaatgaactgcagattccttgtttgtaatgtaaatgattgaatacattttgttaatatgtttttattcctatgttttgctattaaaaattttataacatttccaagacaaaaattccaagtttatgctttgaagaatttatgtaattaaaatttcactaaactaanctttttagtttaggaatwatttgggttttgacactggaagttgcgccaaagctaaangaantactgttcatggtgtaggtgatggctgtatttcataactagcggtaa

SEQ ID NO: 623 - DNA, 620 bp, Homo sapiens
  misc_feature (607)..(607): n equals a,t,g, or c
  misc_feature (617)..(617): n equals a,t,g, or c
gctgctaaataatgtagcttattgaaataactgtcgctgaataaggagcaatgagaaacaaaactaatttttggagcagatggtctctggaattgcatatcctgctagtgattttctcatctttccttttctaacctaatgagaatgtcccagattcaattacctggatgtcaaagtcctagagccagaaatatattctctcatccctcttagcattctcttgctccctcattcactagggcaaatgtctaaatgaagaaaagtctctctcaacacctcgttcatgcaatcagcattagaatttgtaaggaaggaaggggggtggcatgaaaatttccattcttggggtatatgactgtcctgtttcccccaggccactttttttttttttttcttttgaramagggtyttgctcttgcccaggcaggagtacagtagtgcaatcacagctgactgcagccttgacctccagggctcagggatcctcctgcctcagtctcccaactaagtgggactacaggcacgtgccaccatactcagcttttttttggttgttttagacaagagtctcgctttgttgcccaggctggtcttgaattcctggctnaagcaaattnttc

SEQ ID NO: 624 - DNA, 3387 bp, Homo sapiens
  misc_feature (3360)..(3360): n equals a,t,g, or c
  misc_feature (3366)..(3366): n equals a,t,g, or c
  misc_feature (3370)..(3370): n equals a,t,g, or c
  misc_feature (3378)..(3378): n equals a,t,g, or c
aggctgattatttactgtctagaatggatgttaccagctgcatctcttaccgaaattttgcaagttgtatgggagactcccgtttgttgaataaggttgatgcttatattcaggagcatttgttacaaatttctgaagaggaggagtttcttaagcttccaaggctaaagttggaggtaatgcttgaagataatgtttgcttgcccagcaatggcaaattatatacaaaggtaatcaactgggtgcagcgtakcatctgggagaatggagacagtctggwwgwgctgatggaagaggttcaaaccttgtactactcagctgatcacaagctgcttgatgggaacctactagatggacaggctgaggtgtttggcagtgatgatgaccacattcagtttgtgcagaaaaagccaccacgtgagaatggccataagcagataagtagcagttcaactggatgtctctcttctccaaatgctacagtacaaagccctaagcatgagtggaaaatcgttgcttcagaaaagacttcaaataacacttacttgtgcctggctgtgctggatggtatattctgtgtcatttttcttcatgggagaaacagcccacagagctcaccaacaagtactccaaaactaagtaagagtttaagctttgagatgcaacaagatgagctaatcgaaaagcccatgtctcctatgcagtacgcacgatctggtctgggaacagcagagatgaatggcaaactcatagctgcaggtggctataacagagaggaatgtcttcgaacagtcgaatgctataatccacatacagatcactggtcctttcttgctcccatgagaacaccaagagcccgatttcaaatggctgtactcatgggccagctctatgtggtaggtggatcaaatggccactcagatgacctgagttgtggagagatgtatgattcaaacatagatgactggattcctgttccagaattgagaactaaccgttgtaatgcaggagtgtgtgctctgaatggaaagttatacatcgttggtggctctgatccatatggtcaaaaaggactgaaaaattgtgatgtatttgatcctgtaacaaagttgtggacaagctgtgcccctcttaacattcggagacaccagtctgcagtctgtgagcttggtggttatttgtacataatcggaggtgcagaatcttggaattgtctgaacacagtagaacgatacaatcctgaaaataatacctggactttaattgcacccatgaatgtggctaggcgaggagctggagtggctgttcttaatggaaaactgtttgtatgtggtggctttgatggttctcatgccatcagttgtgtggaaatgtatgatccaactagaaatgaatggaagatgatgggaaatatgacttcaccaaggagcaatgctgggattgcaactgtagggaacaccatttatgcagtgggaggattcgatggcaatgaatttctgaatacggtggaagtctataaccttgagtcaaatgaatggagcccctatacaaagattttccagttttaacaaatttaagaccctctcaaactaacaggcttagtgatgtaattatggttagyagaggtacacttgtgaataaagagggtgggtgggtatagatgttgctaacagcaacacaaagcttttgcatattgcatactattaaacatgctgtacatactttttgggtttatttggaaaggaatgcaaagatgaaggtctgttttgtgtacttttaagactttggttattttactttttggaaaagaataaaccaagaattgattgggcacatcatttcaagaagtcccctctcctccacatttgttttgccaatttgcacattaaatgactcttccctcaaatgtgtactatggggtaaaaggggtagggtttaaagatgtagacagttgggttttttaagggccctttttcaataactggaacactctataacaaaggatacttatttaaatagatgacattgactatttttgtttttattaaaaggaagcttacatgcctaccaatatttaatcttttatgattgcctttttataactttttatattctcagcagagtgctttaccaattgaagtaaaatgtggcaggctggagttattgaagcagagtggcagtcttcagtttgcagagtaggggtctgtcttttaaactctgagtgcaaacttcagagttcttgccttggctgcagtttttttccttcaagaatgcagtactaacatttatttgagtggagttactgaacagtaacatagctgtgatttttggtatttgaaacactggttttaaatattttgacttgttgagggtatgttttatatagcaagacattatatagcagtaaaaaatggtgttttatcttctatataattcctgtttttattattaacaaaacagtcctaaatagcagccctcaattgtgaaaaaatttactttaaactacattaggttgtgaatgcaggttttatcagaactatgtttttgttcagtttatctgttcatatggataaatattggttgggatgacttggtgtctaatgtgtagtgctacacacctaacttatggggccaaaatagcatgtcctaatgcttgctgctgatttaaacacattaaaggtactttgcaggaaatccttgcaccatgggattaatatccaattgctgcttgtacactcattcattactaaaagttttgagaaatttttttttccagtaatgagcttaagaaatttgtggaaaataactcacctggcatcttacatctgaaataaggaatgatataaggtttttttttctcacagaagatgaagcacacaggaacctaatgggccaactgggatgaggtgactattctgagatgactattcagtggctaacttgggttaggaagaaaataattaggtattttctccaaatgttcactggtactctgccactttatttctctcatctgttacacaragaaccaccaggaaagcaaatcagtttggttggtaactctgtaattcctaactatcactggtttggttctggactaaaactacattgacagattgaatttgcctaatatgatgactgtttttaatatggatctgtatgtgttctattcagcacaaggaaataaaattttagttgaggattcagcactaaaatccttgagatcacttctcatttcataagtgacatgcttaatgcaaataatatatgggaatactttgggtcaaagtttcctgcattaccttggatgcaaaagaagtagttggtgcccaaaagtatctttttttaagaactgtgganctaggntgcntgaacatnagaagttcc

SEQ ID NO: 625 - DNA, 1313 bp, Homo sapiens
  misc_feature (1228)..(1228): n equals a,t,g, or c
  misc_feature (1230)..(1230): n equals a,t,g, or c
  misc_feature (1262)..(1262): n equals a,t,g, or c
  misc_feature (1306)..(1306): n equals a,t,g, or c
ttcagaaagaattatacaaggttggaccggtcaggctgctatgctggctcgttggtgggcaaaatccctggtaaaaggaggtctgcgccggagggttctggtcagtgtctcttatgcaatggaggtttctcatcaataatctatctcattttccatttatggtacttctaggaggagtgagagagagctattagagattgtramgaagaatttcgatctccgccctggggtcattgtcaggtaaagatggtaaagcctgttgctagtcaagtattgagggtgttgggtgtgtgtgtatatacttaaggctgaggaggtgaaggtgtgaaggaagactcctcaaatgggaatatattttaattcctggaacagttttgaactgctgccttagtgaagacttagttatttgagaaatttaaaattacggtgctccatggcttaggctaaccactctagagaatgttccagatttgatatttgagctttgtgctcttctacttaagggtgttaagaaaatagagataaagtgggttgctcaaggtttgttgcaatgtaaaaaccatggtagggtgtgggcggcgggaccttggtaagtattgtgtgatctcaggtgagctttttgacaattgaaatttctcagaataatgacaagttttcgtatttgttgagccagggacggaaaaacaactatagttactaataaggactgtgcaaggagtttggacaccagggaagtaacacttttgccacaaatttttttcctagcatatcccagagaactcatttgccagagctcttgaaaatgagtcttgctgattgttttgctttattttaatttaatgctacatattaagttacggacttgtatattccagggatctggatctgaagaagccaatttatcagaggactgcagcctatggccactttggtagggacagcttcccatgggaagtgcccaaaaagcttaaatattgaaagtgttagccttttttccccagacttgttggcgtaggctacagagaagccttcaagctctgagggaaagggccctccttcctaaattttcctgtcctctttcagctcctgaccagttgcagtcactctagtcaatgacatgaattttagcttttgtgggggactgtaagttgggcttgctattctgtccctaggtgktttggtcaccattataatgaatttagtgagcataggtgatccatgtaactgncnagaaacaacactgtaggtaaataatgctttgnaaattgaacccttgggccctaatcaccccaaccgcttccaaagncataatt

SEQ ID NO: 626 - DNA, 3787 bp, Homo sapiens
gctgggtttgggtgcagacgttgttgcttgggcgcttctccgctgcgtgtaggtgaagggggcttcctgaccgaggcccagcagtgagaaactttcacaatctgtaatagatggtgtgactgttctaggaggtcaattccatgattatggcttgttaacaacaccccagctgcactacatggtgtattgtcgaaacacgggtggccgatatggaaaggcaactatagaaggttactaccagaaactctctaaggcttttgtggaactcaccaaacagggaatggaaattaagtccaatgaaagatgctgttcttttgatggagatgcagacagaattgtttattactaccatgatgcagatggccactttcatctcatagatggagacaagatagcaacgttaattagcagtttccttaaagagctcctggtggagattggagaaagtttgaatattggtgttgtacaaactgcatatgcaaatggaagttcaacacggtatcttgaagaagttatgaaggtacctgtctattgcactaagactggtgtaaaacatttgcaccacaaggctcaagagtttgacattggagtttattttgaagcaaatgggcatggcactgcactgtttagtacagctgttgaaatgaagataaaacaatcagcagaacaactggaagataagaaaagaaaagctgctaagatgcttgaaaacattattgacttgtttaaccaggcagctggtgatgctatttctgacatgctggtgattgaagcaatcttggctctgaagggcttgactgtacaacagtgggatgctctctatacagatcttccaaacagacaacttaaagttcaggttgcagacaggagagttattagcactaccgatgctgaaagacaagcagttacacccccaggattacaggaggcaatcaatgacctggtgaagaagtacaagctttctcgagcttttgtccggccctctggtacagaagatgtcgtccgagtatatgcagaagcagactcacaagaaagtgcagatcaccttgcacatgaagtgagcttggcagtatttcagctggctggaggaattggagaaaggccccaaccaggtttctgaagataattttcatattcctgagaaactggactttttacaagtctttacaaaactgtcaataataatggcagtactaagagatttataatcataatgtttacaatgcagcctactggattgtctctagatctgtttttcttaaacactaacagaataattctttataaataggtaagccttacacttgttaaagaaatttacctctaatttcagtctcactaatgtaaaatactgggacttaagtatacaattcagtcactaactgtacagttttatgtggggaacaattcatgcaggctactggaaaattaaatcttattaccaactccttgtgatatctttgccatcaccatcacatgagcaagatgatgttttgcagcattccccattgctgatacaaatggagagggcagagaagactttatacaaccagtttttccattgcagagtcttaagaaagattattagatgacttacctatatgactaatgccatcaggaactcagaggtatgaatagggggttgtccatccctcttccatactgaggtggagatgctcatgcaatacttttaaggatgcatggtccagccttcagttattcttcactgctcttggtgaaggtatgtgggagaaaaactaattataatacgtttcccagcctctgatggagaaggaacaccattctgataccagaacatggttaataaggaaaagagaaaaatccccaaccaatcttaattgaaccaagtctgaaaccaatggaaaaaaaaaatgggtagtgtatattttgcaggtttaagacaactcaggacaataaaaacaatggactttacatgtgtatatatatagctctcttaggcaccataatcagtatgagccaacaatatttaaacttgattcaggccacattcagacatttgctcttatatacaaatatttaaattaaatacaatctgaaatgtgttctgttacatacaaaaaaggaaaaactatacaacgcagagcagtgtgtgtgttttaaataattacatttacatgtaagctaaatggaaccagcaatggtgctcaagtttttatcatcccttccagaaaatctttttctaccatctcttctattttttgcctggctttgctggaacatggtttgtggttctccagtttcatgtccttattagggaaggcatttgagtagaggataggactccctgagtgtcctccacatcggcttgtgactttgctgttgaagacttgactgagcacattgaagaacggcaggagctgctccatactgcgcacggtgcagatggtgagcagcaagtgccctggctcccaacccaatgttctccctgagttgtcttcctctggatttttctgcagaaaacaaaaagtgaactggtattaatacaacagacaatgtggtatgttagaaaaattaaaaatatataaactttggcaattggtcaagaaatgaatacaaatgacattaagtttctaactcctgacctgatcaaaacccttggtgcttctgagaccttttactgccatttattagttttacatggagcagtctaacattgtagtaatagttcccaactagaatgcgcagataagcttagttaacagaaatagctttgaacaggaatagagtcaaacataaaagttttatgttgtgctttgtatttactcaaaaagctcccaggtttctgaaccctcactactgtaaccaaggactaggtcacaaaattactacagaaaaaaggaacaaagtgctttatacatttcataatatatccccttttattataattagttaattcccttttatctaaatggcctaaatttgccatgatggtagcagtgtccaaagtgaataattactgtcagtactgcatcacagagaaaggaagggatccctcaggagacactgctgtctccttctgggttgtgctaaacaacatagggaggaaagctggacctggagtcaaaggaattgagttagtgtgctggctctgccatacttacggcacccttgggcaggatatacaaaggttcctcacttataaaatgggacagtctaaaactaccttttagtagagaagtcaaatgagaaggtatgtgaaaactctgtcaactaaatataaagactaataatttgggtattaagaggctagtttgagaagccacctgaattacacaaacacagctacagacatcattctgtctagagaaagataagagagaacaggttggttgaacttgggcagaatcacagatacaattccacactaaagaatgaaaataagcaatgaactagacagaaggaagaaatcatgaagacttaggaagcagaattacaatctgtcatattaacaaatggagtttgccttctaagatcagatgttgctcagaaactttcattgtttacctaataatttaatatcactagtttcctagtgggtcaagcagatgcaaaatccagcttattttcttctatgtgctctcaagcttattgcttattttaaagtaaaatcctgaaaaaggaaaatattaggttggtgcaaacgtaattgcggtttttgcattgttgaaatttgccgttttatattggagtacattcttaaataaatgtggttatgttatacaaaaaaaaaaaaaaaaaactcgag

SEQ ID NO: 627 - DNA, 622 bp, Homo sapiens
  misc_feature (583)..(583): n equals a,t,g, or c
gccccgcccgggcatagcaccatgcctgcttgtcgcctaggcccgctagccgccgccctcctcctcagcctgctgctgttcggcttcaccctagtctcaggcacaggagcagagaagactggcgtgtgccccgagctccaggctgaccagaactgcacgcaagagtgcgtctcggacagcgaatgcgccgacaacctcaagtgctgcagcgcgggctgtgccaccttctgctctctgcccaatgataaggagggttcctgcccccaggtgaacattaactttccccagctcggcctctgtcgggaccagtgccaggtggacagccagtgtcctggccagatgaaatgctgccgcaatggctgtgggaaggtgtcctgtgtcactcccaatttctgagctccagccaccaccaggctgagcagtgaggagagaaagtttctgcctggccctgcatctggttccagcccacctgccctcccctttttcgggactctgtattccctcttgggctgaccacagcttctccctttcccaaccaataaagtaaccactttcagcaaaaaaaaaaaaaaagggcggccgntttaraggatccyagggttttccaaggttaagcgggcat

SEQ ID NO: 628 - DNA, 1004 bp, Homo sapiens
  misc_feature (806)..(806): n equals a,t,g, or c
  misc_feature (814)..(814): n equals a,t,g, or c
  misc_feature (835)..(835): n equals a,t,g, or c
  misc_feature (866)..(866): n equals a,t,g, or c
  misc_feature (883)..(883): n equals a,t,g, or c
  misc_feature (973)..(973): n equals a,t,g, or c
ccgctctagaactagtggatcccccgggctgcaggaattcggcacgagtgagcatcggctcacacctgcaccccgcccgggcatagcaccatgcctgcttgtcgcctaggcccgctagccgccgccctcctcctcagcctgctgctgttcggcttcaccctagtctcaggcacaggagcagagaagactggcgtgtgccccgagctccaggctgaccagaactgcacgcaagagtgcgtctcggacagcgaatgcgccgacaacctcaagtgctgcagcgcgggctgtgccaccttctgctctctgcccaatgataaggagggttcctgcccccaggtgaacattaactttccccagctcggcctctgtcgggaccagtgccaggtggacagccagtgtcctggccagatgaaatgctgccgcaatggctgtgggaaggtgtcctgtgtcactcccaatttctgagctccagccaccaccaggctgagcagtgaggagagaaagtttctgcctggccctgcatctggttccagcccacctgccctcccctttttcgggactctgtattccctcttgggctgaccacagcttctccctttcccaaccaataaagtaaccactttcagcaaaaaaaaaaaaaaaaaaaaaactcgagggggggcccgtacccaattcgccctatagtgagtcgtattacaattcactggccgtcgttttacaacgtcgtgactgggaaaaccctggcgttacccaacttaatcgccttgcagcacatccccctttcgccagctggcgtaatagcgaanaggcccgnaccgatcgcctttccaacagntgcgcaacctgaatggcgaatggcaaattgnaagcgttaatattttgntaaaattcgcgttaaatttttggtaaatcaagctcattttttaaccaataggccgaaatcggcaaaatcccttataaatcaaaaagaatngacccgagataggggttgaatggtggttcca

SEQ ID NO: 629 - DNA, 509 bp, Homo sapiens
  misc_feature (112)..(112): n equals a,t,g, or c
  misc_feature (402)..(402): n equals a,t,g, or c
  misc_feature (413)..(413): n equals a,t,g, or c
  misc_feature (429)..(429): n equals a,t,g, or c
gagaaaatctcccaaatttaacacagaaaaaggtattccaactaacagttttaaagaaattattacaaataaaatattccatcaataatatacttatttgattttatagtanctgtttattttaaatattgattttgtttctcagctaaagcttaatgttaaatcttgraaaaaaatttgtttcttacagggctgatcccttatccaacatggttctaaccttcagtactaaagaagatgcagtttcctttgcagaaaaaaatggatggagctatgacattgaagagaggaaggttccaaaacccaagtccaagtcttatggtgcaaacttttcttggaacaaaagaacaagagttccaccaaataggttgggcactgaactatatctctgcttgactgttnaataaagtccnctgtgcagtatttatngtccatgtttaataaatactctcttaatctcctaataattggacctttaaactaccaaaaaaaaaaaaaaacttcccaaa

SEQ ID NO: 630 - DNA, 2660 bp, Homo sapiens
  misc_feature (2634)..(2634): n equals a,t,g, or c
  misc_feature (2637)..(2637): n equals a,t,g, or c
aggcttttgcaaaaagctatttaggtgmcactatagaaggtacgcctgcaggtaccggtccggaattcccgggtcgacccacgcgtccgcccacgcgtccgcccacgcgtccgcggacgcgtgggttaggccctaatataaaaagcattgtcaccatgttgatgctgatgctattgatgatgtttgctgtccactgtacctgggtcacaagcaatgcctactctagtccaagtgtagtcctggcctcatacaatcatgatggcaccaggaatatcttagatgattttagagaagcttacttttggctaaggcaaaatacagatgaacatgcacgagtaatgtcttggtgggattatggctatcagatagctggaatggctaatagaactacgttggtggataataacacctggaataacagccacatagcactggtgggaaaagctatgtcttctaatgaaacagcagcctataaaatcatgaggactctagatgtagattatgttttggttatttttggaggggttattggctattctggtgatgatatcaacaaatttctctggatggttaggatagctgaaggagaacatcccaaagacattcgggaaagtgactattttaccccacagggagaattccgtgtagacaaagcaggatcccctactttgktgaattgccttatgtataaaatgtcatactacagatttggagaaatgcagctggattttcgtacacccccaggttttgaccgaacacgtaatgctgagattggaaataaggacattaaattcaaacatttggaagaagcctttacatcagaacactggcttgttaggatatataaagtaaaagcacctgataacagggagacattagatcacaaacctcgagtcaccaacattttcccaaaacagaagtatttgtcaaagaagactaccaaaaggaagcgtggctacattaaaaataagctggtttttaagaaaggcaagaaaatatctaagaagactgtttaaatgcactgttctggttcctaacttgaagcagttgtccttgtgagaaccggtctttgcctttagctcatgtcgtgtttcacagcaaagagggtacagaaccatcactggtccaggttaatgtacaaaattttctggcaatgcctgattaaaaaaataaaattggcttgttgagaacagctgttttcgatttctaatgtgaagcaagacagagcactgctgtaaatgtctagcagcagattttttttttattggtacatattatccttcaaatctgagaatttggactaactgcaccaaagaaccctctaatttggtccctggcacatgcatacttgtcaatgtttttattcttttacaagacctgcattttatttgaattacccgaatagcaatatgtaaaatacaagtgacaaaatgtgatgagagcttcttgaaccggtaaactagtacaggtctgagaaagacatattagaagaatcattatacttccttgaattatatttattttcatgtttctctaatgcaaagaatgtttcatcaaatgtatattttctgttgcttactgtttgctctgagaagaagctgctgtttcaaagatggacctctgagtagctaattgattcaagtagtttttttatgttgacacattattactgctgttagcagtcgttttcaccaggtacttacagagcagatttcatacatcattcattcaagggctaaatttatattttttggaaatcatggcaactacacaggatgttgcttaccaggacggagttttggtatcttagtactgaagttagcactatgtttacatgcaaaagattaaggaaaaaacccttaaagtggacaggtatccaaagttcattttctgtgactcatcaaagtgacaaaagacttgtaacaactttgcctggacttttttcattttacaacagttcatccattcacaatgattttgttctctgctccatattttttaatcccttaagcatttgatgaaacactctttagtgctatatgcattttcttacttttgttaaaaatgtgacaattgtcaaaaaatgcactaaaatgtaaatggagattgaacaagttcactttccagcttataggcaactttatacagacttgaacattttctccagttgtttagtaaaagtgaaagagaaagggtttttcctgccacaggatataacttttttttatataacaagcataacacaccactgcttttggtggaaaagtgcagaatagtatgtaccttttatgaagaaaaatgtaatttacaatattcagtgagaatgttactgctgattttcttttccaaggtgtagaatattctttgatttatagaattcatttttgacccagatgatggttcctttacagaacaataaaatggctgaacattttcacaaatagagtgtaacgaagtctggatttctgataccttgtcatttgggggattttattttactttgttgctttaaaattcaatgcagagaagttgttgactgtaggggaaataaagttaattcaaatttaaaaaaaaaaaaaaaaaaaaaaaaaaaaaaaaaagggcggccgctctagaggatccctcgaggggccncangttacgcgtgcatgcgacgtcat

SEQ ID NO: 631 - DNA, 1329 bp, Homo sapiens
  misc_feature (11)..(11): n equals a,t,g, or c
  misc_feature (31)..(31): n equals a,t,g, or c
taaaacgggcnccctttttttttttttttcntttgtgcaacactttattgggaaagatttacacacggtgacctgtcataggccaagcgatgagaagagggcgccaggagygctggggtcccgaggtggctcagatggaagccatgggacggccgtccccaggcccgcgcacccgcacctcagtttcccctttgtgaaatgggaagcttatgcttccttccaagtctgcaatattggtgcgatgagctaaaagtggagcgaaagacacaaggaagaggcttcccactcccaggacctgcccccaagctccgaccccacattgtggatgcaaagaaagggaatttgcccaaaacccactgcccaggggccccttccgttttggggaagtgcagtgctctctggatacccagaagctggagcaggggccagtgactcttgtctggacaatactttgattttgtaggagtggaggtggcctctgggcagagggcagggaggacacccccgggtctgcttcagttgcaggcagggtatttagctggggaagaggaaattctctccaggaccctctccaaggtaaggactctttctggggaggagacagcagcctggttcacagaattcccgggaccagctggcagagggagcgtcgtgacagcttactcctcccggagcttctccggggcaaggctggtgggctgggatgctgccttccgccggctggggctgcccccacctaaagccagccccagccccagggctgccagggccaggaagtggatacagaagtagatggaggcccagtaccgaagggtgtcggccaaggagagcagcacgaagcccatgcacatgtagtcataggcgcgcatcttcaggaaccagtgcacccagtcccaggccttctggccccctgggctcagccgcccccgcagggctgactccagccggccctcggcagccaggcacagcgggatggtcaggaagctcaggtagtagcccgggtggaggccgtgccagtaggcgctcagcagcatggtccaggcgctccgcaggacataggaacgggcaggtgcgctcttgtagatatactgcgccagccaccactgcaccgtcatgttccagtaccgcatgccatcgcgcacccgcacgcagaaatctgtgctgtagcagtcgatgttgcggatggtctcatagtcatactccaaggaagccgccttctccggactgctggggggtgggcattggagggtggggccgcctccggcccgggctttggcggccacggggtaggccccaaagccggcggcaatgcagccgcactcggcggcc

SEQ ID NO: 632 - DNA, 1797 bp, Homo sapiens
ctagaggcaatgattcttaaagtctccgctggctatctaggactcttattaaatatcctgttactttaaaaaggccatccaaatatattttcttgaaagaaacatttatttatgatctttattggtgaaataatttcaaacaaatccagaacaggttctcacactttgagcctttagtgcaaaaacactatgccatgcgggaaataaaatgcttatccagtggagcgctcccctgatgcattgaaatattaggatactcaagcagaagacgacttatgtgacagaaatctgctcataaatctgcttgaaaaagggcatgataaacctcatattaaggtttctcacaacataaatatgcttaagcaacttaattccaacttaatttcaaaacaccccaggaatcaactatccctttaaataaaaaaaataatcaatttatattcttcttaaaagaactccaacaatttaaaataagttccaattccatatatatatatatatatatatatatatatatatatacacacacacacacacacacacatttataacttaggtgctcttttgcgctatatactttaattcatgcaaaagtgatagaggactggacttgaggctctacagaggcctttctgagaaagctgtgtagctccttactctggcgaagaacaagggggtgtacatcttgtcaatctcaaaagcactgactgcagtctcaccagttgatttgtaagtaatgtgacaagaatgatgtatccagatgagtttgttgaacctctggtgaccactggaacatagctgtagccccacatgaaaactctgatctgcttcttgtacagggacacgacgaaaatatctgtatttatagtcaagtggtttttcttcttttttcttagttattacagcaaatactttggtctgattgtctgtgtcttgtgacaagcgatagtgacccagtagaattgcatcagtcctggtattcctagttcttaaacgtggaacaatggactgaggctcttcaggggttgtcaacatcatcacatggccatcaggaaagaatcttatgtacctgtaatattccacttggtgccaggctctatagaaaccatcaagagactgttccccttgacgaatatatgtggttttactgatatacacgccatcaaaccgaacacgaggccgttctaaaaacatctctctccaggacgtgtacggaacaagtttaatacagcttctgccccaaactttcaagcaggccagacgccatatttcagggtctctggcacagatgtagaatcctctgcacaccagcgacaactgctccaatgatctgaggtccaagtcactagacaccacccatcggaagatgtacatcaggacctccattggcagcactgatatgtgaatctgactgctctcaagctcaggctgacacagtttaagcacagactcctgaaatgtgagttgctgctggaagtaggacaagagatctgccattttgctgtcatcatcattatcttcaatgtagctgtttccaacgccatcaccatctggagaccgggtataagtaatcttgaactctatatcaggtacaagttgcatagccctacgataaaacttgatggcttcatagagagctccattttgttcttcttctactgcttttaggaagagttctcgagccttttcttcttttgcctgttcttgttttcctttggtatctgccgatgttttctggagagagccgcaaaatggccctcagtatttttatctagtactcaatgtaggaattgcact

SEQ ID NO: 633 - DNA, 2185 bp, Homo sapiens
  misc_feature (1204)..(1204): n equals a,t,g, or c
  misc_feature (2133)..(2133): n equals a,t,g, or c
atgcatgatgagggaattgggtwcgggccccccctcgagtttttttttttttttttttaagagtcgaagcatagcttgtttaatttttatacatttttttcttttttctttttttttgtcttttattgaatcttttatggaatcccccttttttcattttcattttttttttgcatagggaacaaataaacaaaataatgacagccagagtcactttctgtaaatggtacttaggtaggcgcgtccgcgaaaaccaaaatgactgcgtaatatacaaggttatgattggagtatgatgtgaggggcggggtggggtggggggagagccggcgggtctgcccaggtgtccccttgtccccctcctgtcctcgctgtcaagaggagaagtaggaggaggaggggagggtgggggacctgctggaaccttctccggattgggttcatgagcatttttgtgggtgtgtatgtgtgtgttatccagtgtgcggtaagcagaaagctagaaggagagtaaactatcctggtgatatcagtaaaatacaaaaaggaaacaacaacaaaaaaatctcaaagggaaaaggaaaggaaaagcaacaccacccaaagagtaaaggggagaaaaaagaaagaaaaaaaaaacccaaaggaaaatgttttgttttgtccctccctcctcccagctgcccccccaccccccactgtatgccytgccccatcctgtccccctggagcccttgcttgttctttctctgtgtgagaatgctcrgggctgggtgggcaggaagctgggggcacaggctgggaccccaggacttgagggggctttggttttgggggggcctggctgggacccaagatgagaggatggggtgtggatgcagttgaggggccggggcagcctgtgtcccctttttggagggctctcttccagccaggagatgtgcgtggaaggctggggggtggtggcttgggggtgcatgacttcccctccggggcccatattcctattggatccccttcctccttcctgtctcaggtgtgagcaaagccttggggagggggctgccatggacgggggggtggggcaggagaatcccaaagccacaccagcagacatgtgaggcactgcttgggaaaagtctgttttggtatcactggcaacaagtcctgctggtactgctttgggtccgcctcctcaccttgncctgccgggaggtcaagggtggtggactgaccccacactctgtaccattgagcaatggatgggcagcggtgtcattttgaaggtgagactctcaggaagtgtctgacgtggcagaaatggggcaagatgggaggatgcggaggaagctggattgagagatgtatgtcccagcgccctccaaagagaaagtaaaatccggggtctcagagagagaatccagaccaagatacaaggtagccactatatattctgtattatgwgaaacaaattccaaaattatatatatatatatatatatatatatatatatatatatatatatatgtatagtatagccctacactggaggtcaaagtaccattggggaggccagagtgggtaggggggctgcttgctgtctcttctggagggctggacagttgctcctggctccagaacctgtcttgcaagggacagtggggtgcagccaagtctgtctgtgcctggaatgctgctgtctctcaaggtcctggggcagggaaggtggaattgtctgctgcctggggacctgcagggggacccaggtctggcccctaagcggctytcccaaccgagtcccctttggcattcctttgggatctgattgtccagcccagggtggggccctggggtcagaacctgggttccagacctgggcatgaaggactccagatcctcctctccccagtcaaatagggctgggtcttcctactcctccatgccccatctccacccgggtcattgycaggtgcccccacggaatggggacaattygcatayatttgggaggcctccctattctttcccacagcatgggcataccccagaatcagactggactgcgggggggggcctggcatacgtgtggtgtccatagcagcgctggacgatggacacatcaagagccggangaacaagatttgagaagatgtcagtttcatacatgttataaaaacaaaaaca

SEQ ID NO: 634 - DNA, 2757 bp, Homo sapiens
  misc_feature (92)..(92): n equals a,t,g, or c
ggcgagaaggaccccaagagcggcttcgacataaaagtaccacgccgcgccgtgggaccctccagcactcagctttacatggtgagaaccanccttagagtccctcattgcagacaaaagtggttccaagaaaaccttgagaagtagccttgaggggcccaccatattggacatagaaaaatttcatcgagagtcattcttctacactcacttgataaatttcagtgaaagcttgcagcagtgctgtgacctttcgcagctgtggttccgagagttcttcctggagctgaccatgggcaggaggatccagttccccattgagatgtcgatgccctggatcctgacggaccacatcctggagaccaaggaggcatcgatgatggagtacgtgctctactccctggacctgtacaatgacagcgcccactacgcgctcaccaggttcaacaagcagttcctgtacgacgaaattgaggccgaggtgaatctatgttttgaccaatttgtttacaagctagcagaccagatatttgcctattataaggttatggcaggaagtttgcttcttgataaacggttacgatcagaatgcaagaatcagggagccacgatccacctcccgccgtctaaccgctacgagacgctgctgaagcagaggcatgtgcagctcctcggcagatcaatagacctcaatcgtctgatcacccagcgcgtctcagcagccatgtataagtccctagaactggcgattggacgatttgaaagtgaagatttgacctccatagttgagctggatggcctgttggaaatcaaccgcatgacccacaagctgctgagccggtacctgacgctggacggcttcgacgccatgttccgggaggccaaccacaacgtgtcagcgccctacgggaggatcaccctgcacgtcttctgggagctcaactatgacttcctgcccaactactgctacaacggctctaccaaccggtttgttcggacagtgttaccattttctcaggaatttcaaagagataagcagcctaatgcacagcctcagtatctgcatggatccaaggctttgaacttggcctactccagcatttacggcagctaccggaacttcgtgggacctccacactttcaagtcatctgccggcttctcggctaccagggtatcgccgtggtcatggaggagctgctgaaggtcgtcaagagcctgctgcaaggcacaatcctgcagtacgtgaagacgctgatggaggtgatgcccaagatctgccgcctgccccggcacgagtacggctctcctggtatcctggagttcttccaccaccagctgaaggacatcgtggagtacgcagagctgaagacggtgtgcttccagaacctgcgggaggtggggaacgccatcctcttctgcctgctcatcgagcagagcctgtctttagaagaagtgtgtgacctgctgcacgcggctcctttccagaacatcttgccgcgagtccatgtgaaagagggggagagacttgatgccaaaatgaaaagactagaatcaaagtacgccccgctgcatcttgtcccactgattgaaagactggggacccctcagcaaattgccatcgcaagagagggggacctgctgacaaaggagcgcctctgctgcggcctgtccatgtttgaggtcatcctgacacggatccggagctttctggatgaccccatctggcgcgggcctctgcccagcaatggggtcatgcatgtggacgagtgtgtggagtttcacagactgtggagtgccatgcagtttgtctactgcattcccgtggggacacacgagttcacagtcgagcagtgctttggtgatgggctacactgggctggctgtatgatcatcgtacttcttgggcagcagcggcgttttgctgtgctggatttctgctaccatctacttaaagtccagaaacatgatggcaaagatgagattattaaaaatgtgcctttgaagaagatggtggagagaattcgcaagttccagattctcaatgatgagatcatcaccatcctggataagtacctgaagtcaggcgacggggagggcacgccagtggagcatgtgcgctgcttccagccgcccatccaccagtccctcgccagcagctgagggcacgcgctgcactccgtaactcaacatggcatgcctttctctccgtaaactatttagtgagatttttagggactatttttcagtatctctgtacctgttaaagggggtgcttttcgatctaaaaacttaattttataaaattgacttatttttctagactaaaattgtatatgcttttggtaattaggaactcttgagaatattggctgctgattgttgccatcacgttcctacaaaattgtttttctatgggatgttctggcagctgtgtcataaaatgctgctgggttcattcattcattccataagaaacttaataccagcaaatgcattaaatcccttgccagttaccattaactgtaactatttagcttttgtttagggatctttctgatggtcttttatgagcaatcttagttctaagtcattgttcccatcccttttttgtgtgtttcagaaaatagtgaacttgattcccctgcttccactaaatccagttgtgacaaaatctaacgtgacatcagatcgaaaggttatagaaataaaactaatgagatctaaaaaaaaaaaaaaaaaaaaaaaaaaaaaaaaaa

SEQ ID NO: 635 - DNA, 1941 bp, Homo sapiens
  misc_feature (483)..(483): n equals a,t,g, or c
  misc_feature (609)..(609): n equals a,t,g, or c
ttttttttttttcaactcatgaaaagctcattgctgttgggtgtaatagatgcagtttatctaatctacatttttattgactgtcatctaccaaaatattgacttaaatcctgtagctatttgatttcggactttaaattgatctggtgttccttgcggggcttcgattgcatctaaatagatgtgagagttgaaagacccataaggggcttctctcgctttacgatgtcttattattttttttttccttcctctggttgatgaaatgccagggtgaaagggatagccaaatggactaaagcacaagtgccactctagttattcrgcagagtgcccartaaaggtccacsacaataccaycacacatccrctcggggatgaacaagggctgactgattgataagctcttgaaaattcttaagctcactgcatcccttcaggtctccaaggaatgctaagtctcctccctgccaygagagacangaagtgaacttagtgttgggagacrgaagctggatggccytcgggggctgacccgcagggacttyrggatatagcagagagagcttggcatgacttattactccaggctgtagaawcctggaaaanagctaccmtgcagcccaygcctggtcractggaggaccaccttagtggaagggggacaatcaggcctctggcctgccatgtgcacaagcataacaattgcwtttgtttaamstgcagatggaatatttgatccatttcarccaggcayttgcatcttggyrtgctgtcttaattgccaaagtttgttttaagtctttaacttttatgatcctctagtaaaatgaatgyttcctttagcaccaatttttattagtttttagacmaaagaaagctaaacrcyattttatatttamtaatgyttcytgtatgayttttataccagataagctaaattttacctttatattagtgtgttattaatgttaaacttaattttaataaaaccttgtagacatatttatccaatttttyatgtttraccataaggtaagattttatagactctttttaaccttttataatttttgttaaagagcaggttgatgctttaagaaaaacctgtggcattttttactttaatgtccagttcacagaaaaactggatgatacctttttaactttagctaatatgtttacacacagaattttctttataattaacrttttaaaacttgcttaaactttyaaaacaataatttttttaaccttttaatgtaggtaaaaatccacattcttatgcccctttataatctttttaccaaaggtatgttttacttttcttatctgcttcttgtgctaacagggctattgctaccagggactttggacatgggggccagcgtttggaaacctcatctagttgttttgagagmtaggccactggccttggccagggccctacagtctgggttaaaactcyaactgccaytttttytstttctgacacatagagygtaaagagttttgtcaggtcaggtagcctcagggctggggccgacatgagtttttctttttaactmatgaaaagctckttgctgttggttgtaatagatgtagtttatctaatctacatttttrttgactgtcatctacyaaaatattgacttaaatcctgtaactatttgatttcaagctttaaattgatctggtattccttgyggggctccaattgcatytaaatagatgtgagagttgaaagacctataaggggcttctcttgctttacgatgtcttattattattattattattttttccttcctctggttgatgaaatgccagggtgaaagggatagccaaatggactaaagcacaagtgccactctagttattcagcagagtgcctagtaaaggtccaccacaatactgccacacatccactcagctcgtgcc

SEQ ID NO: 636 - DNA, 904 bp, Homo sapiens
  misc_feature (748)..(748): n equals a,t,g, or c
  misc_feature (859)..(859): n equals a,t,g, or c
  misc_feature (869)..(869): n equals a,t,g, or c
gagagagagagagaaatcgagagcatgggtatgatcgagatttccgtgataggggtgagttgaggattcgagagtatccagaaagaggagatacatggcgggaaaagcgagattatgttcctgacagaatggactgggaaagagaacggttgtcagacagatggtacccatctgatgtggatagacattcccccatggcggaacatatgccctcctcacatcattcctcagawatkatggggtccgatgcaagcttagactctkaccaaggccttggaggggtaatkgttctyagtcagaggcagcatgaaatcattttgaaagctgcacaagaactgaaaatgctttcgggaacagaaagaacagcttcaaaagatgaaagacttcgggtctgagccacagatggctgaccatctaccacctcaggratcaagattgcagaatacatcttcaagacctgggaatgtatccggtatgggagaatgtgtgctcagaaaatgaaatggtttctactttgtatgtttctatgttgtttgattttttttagaagttgaataaataacaaatttcctctataaaatgtaaattttggaaacttaaaagtttatggtaattgaactttgaacaccttaaaagcatgttcaaaagtgtggtagagatgctccttttccccagattttgataagtacaccaagtacacctgaactacatagcttctgttcacaaaatggtagaatttttctaatantttttatgttaaaatagtcccaaagtgctgggattacaggcatgagccactgcacctggcctaaaatgtaactttctaaaataaaaatattgattcactttaaaaatactnaagatatagnagtgaacaaagatacagcagtgtaatttttttcta

SEQ ID NO: 637 - DNA, 2512 bp, Homo sapiens
tgcaggaattcggcacgaggagcaggcgaagccgcggaggacggggtgaagatggcggccttctccgagatgggtgtaatgcctgagattgcacaagctgtggaagagatggattggctcctcccaactgatatccaggctgaatctatcccattgatcttaggaggaggtgatgtacttatggctgcagaaacaggaagtggcaaaactggtgcttttagtattccagttatccagatagtttatgaaactctgaaagaccaacaggaaggcaaaaaaggaaaaacaacaattaaaactggtgcttcagtgctgaacaaatggcagatgaacccatatgacagaggatctgcttttgcaattgggtcagatggtctttgttgtcaaagcagagaagtaaaggaatggcatgggtgtagagctactaaaggattaatgaaagggaaacactactatgaagtatcctgtcatgaccaagggttatgcagggtcgggtggtctaccatgcaggcctctttggacctaggtactgacaagtttggatttggctttggtggaacaggaaagaaatcccataacaaacaatttgataattatggagaggaattcactatgcatgataccattggatgttacctggatatagataagggacatgtcaagttctycaaaaatggaaaagatcttggtctggcatttgaaataccaccacatatgaaaaaccaagccctctttcctgcctgtgttttgaagaatgctgaactgaaatttaacttcggtgaagaggaatttaagtttccaccaaaagatggctttgttgctctttccaaggcaccggatggttacattgtcaaatcacagcactcaggtaatgcacaggtgacacaaacaaagtttctccccaatgctccgaaagctctcattgttgaaccttcccgggagttagctgaacaaactttgaayaacatcaagcagtttaagaaatacattgataatcctaaattaagggagcttctgataattggaggtgttgcagcccgggatcagctctctgttttggaaaatggagtagatatagttgtaggtactccgggaagactagatgacttggtgtcaactggaaagctgaacttatctcaagttagattcctggtcctggatgaagctgatgggcttctttctcaaggttattctgattttataaataggatgcacaatcagattcctcaggttacctctgatggaaaaagacttcaggtgattgtttgctctgccactttgcattctttcgatgtaaagaaactgtccgagaagataatgcattttcctacatgggttgacttaaaaggagaagactctgttccagatactgtacaccatgttgttgtcccagtaaatcccaaaactgacagactctgggaaaggcttggaaagagccacattagaactgatgatgtacatgcaaaagataacacaagacctggtgctaatagtccagagatgtggtctgaagctattaaaatcctgaaaggggagtatgctgtccgggcaatcaaggaacataagatggatcaagcaattatcttctgtagaaccaaaattgactgtgataacttggagcagtactttatacaacaaggaggaggacctgataaaaaaggacaccagttctcatgtgtttgtcttcatggtgacagaaagcctcatgagagaaagcaaaacttggaaagatttaagaaaggagatgtaagattcttgatttgcacagatgtagctgctagaggaattgatatccacggtgttccttatgttataaatgtcactctgcccgatgaaaagcaaaactacgtacatcgaattggcagagtaggaagagctgaaaggatgggtctggcaatttccctggtggcaacagaaaaagaaaaggtttggtaccatgtatgtagcagccgtggaaaagggtgttataacacaagactcaaggaagatggaggctgtaccatatggtacaacgagatgcagttactatctgagatagaagaacacctgaactgtaccatttctcaggttgagccggatataaaggtaccagtggatgaatttgatgggaaagttacctacggtcagaaaagggctgctggtggtggaagctataaaggccatgtggatattttggcacctactgttcaagagttggctgcccttgaaaaggaggcgcagacatctttcctgcatcttggctaccttcctaaccagctgttcagaaccttctgatttttacatttactgaataagatttgagtaatgaaagtctgtagtcttaaaactctaaaacagttgtactgcttccaagcagcagtatttatagtaacgtaagctattaatgctaactcttgcatgtcaagaaacattagtcttaggaattcttcaaaaaatggcatcccaatgaaaataaatttgatgactataaaaaaaaaaaaaaaaaaaaaaaaaaaaaaaaaaaaaaaaaatt

SEQ ID NO: 638 - DNA, 458 bp, Homo sapiens
  misc_feature (371)..(371): n equals a,t,g, or c
  misc_feature (402)..(402): n equals a,t,g, or c
  misc_feature (442)..(442): n equals a,t,g, or c
  misc_feature (456)..(456): n equals a,t,g, or c
gggtcgacccacgcgtccggcagccgtcgtttgagtcgttgctgccgctgccccctcccggatcaggagccagtgtataccgcccgcccaccgccttggtgccgctagaggaaacgagaaggaggccgcctgcggtttgtcgccgcagctcgccccctgyccgggagagccgagccccggcccagtcggtcgcctgccacccctcgtagccgttacccgcgggccgccacagccgccggccgggragaggcgcgcgccatggcctctggagctgattcgaaaggtgatgacttatcaacagccattcttaaacagaagaaccgtcccaatcggttattgttgatgaagccatcaatgaggacaacagtgtngtgtctttgttcccagcccaagatggatganctgcaatgtttccgaagtgaacaaggtggtgctgaaaagnaagaagaggagggnaa

SEQ ID NO: 639 - DNA, 3776 bp, Homo sapiens
cggacgcgtgggagcgaagcgtctgcgaccgtcgtttgagtcgtcgctgccgctgccgctgccactgccactgccacctcgcggatcaggagccagcgttgttcgcccgacgcctcgctgccggtgggaggaagcgagagggaagccgcttgcgggtttgtcgccgctgctcgcccaccgcctggaagagccgagccccggcccagtcggtcgcttgccaccgctcgtagccgttacccgcgggccgccacagccgccggccgggagaggcgcgcgccatggcttctggagccgattcaaaaggtgatgacctatcaacagccattctcaaacagaagaaccgtcccaatcggttaattgttgatgaagccatcaatgaggacaacagtgtggtgtccttgtcccagcccaagatggatgaattgcagttgttccgaggtgacacagtgttgctgaaaggaaagaagagacgagaagctgtttgcatcgtcctttctgatgatacttgttctgatgagaagattcggatgaatagagttgttcggaataaccttcgtgtacgcctaggggatgtcatcagcatccagccatgccctgatgtgaagtacggcaaacgtatccatgtgctgcccattgatgacacagtggaaggcattactggtaatctcttcgaggtataccttaagccgtacttcctggaagcgtatcgacccatccggaaaggagacatttttcttgtccgtggtgggatgcgtgctgtggagttcaaagtggtggaaacagatcctagcccttattgcattgttgctccagacacagtgatccactgcgaaggggagcctatcaaacgagaggatgaggaagagtccttgaatgaagtagggtatgatgacattggtggctgcaggaagcagctagctcagataaaggagatggtggaactgcccctgagacatcctgccctctttaaggcaattggtgtgaagcctcctagaggaatcctgctttacggacctcctggaacaggaaagaccctgattgctcgagctgtagcaaatgagactggagccttcttcttcttgatcaatggtcctgagatcatgagcaaattggctggtgagtctgagagcaaccttcgtaaagcctttgaggaggctgagaagaatgctcctgccatcatcttcattgatgagctagatgccatcgctcccaaaagagagaaaactcatggcgaggtggagcggcgcattgtatcacagttgttgaccctcatggatggcctaaagcagagggcacatgtgattgttatggcagcaaccaacagacccaacagcattgacccagctctacggcgatttggtcgctttgacagggaggtagatattggaattcctgatgctacaggacgcttagagattcttcagatccataccaagaacatgaagctggcagatgatgtggacctggaacaggtagccaatgagactcacgggcatgtgggtgctgacttagcagccctgtgctcagaggctgctctgcaagccatccgcaagaagatggatctcattgacctagaggatgagaccattgatgccgaggtcatgaactctctagcagttactatggatgacttccggtgggccttgagccagagtaacccatcagcactgcgggaaaccgtggtagaggtgccacaggtaacctgggaagacatcgggggcctagaggatgtcaaacgtgagctacaggagctggtccagtatcctgtggagcacccagacaaattcctgaagtttggcatgacaccttccaagggagttctgttctatggacctcctggctgtgggaaaactttgttggccaaagccattgctaatgaatgccaggccaacttcatctccatcaagggtcctgagctgctcaccatgtggtttggggagtctgaggccaatgtcagagaaatctttgacaaggcccgccaagctgccccctgtgtgctattctttgatgagctggattcgattgccaaggctcgtggaggtaacattggagatggtggtggggctgctgaccgagtcatcaaccagatcctgacagaaatggatggcatgtccacaaaaaaaaatgtgttcatcattggcgctaccaaccggcctgacatcattgatcctgccatcctcagacctggccgtcttgatcagctcatctacatcccacttcctgatgagaagtcccgtgttgccatcctcaaggctaacctgcgcaagtccccagttgccaaggatgtggacttggagttcctggctaaaatgactaatggcttctctggagctgacctgacagagatttgccagcgtgcttgcaagctggccatccgtgaatccatcgagagtgagattaggcgagaacgagagaggcagacaaacccatcagccatggaggtagaagaggatgatccagtgcctgagatccgtcgagatcactttgaagaagccatgcgctttgcgcgccgttctgtcagtgacaatgacattcggaagtatgagatgtttgcccagacccttcagcagagtcggggctttggcagcttcagattcccttcagggaaccagggtggagctggccccagtcagggcagtggaggcggcacaggtggcagtgtatacacagaagacaatgatgatgacctgtatggctaagtggtggtggccagcgtgcagtgagctggcctgcctggaccttgttccctgggggtgggggcgcttgcccaggagagggaccaggggtgcgcccacagcctgctccattctccagtctgaacagttcagctacagtctgactctggacagggggtttctgttgcaaaaatacaaaacaaaagcgataaaataaaagcgattttcatttggtaggcggagagtgaattaccaacagggaattgggccttgggcctatgccatttctgttgtagtttggggcagtgcaggggacctgtgtggggtgtgaaccaaggcactactgccacctgccacagtaaagcatctgcacttgactcaatgctgcccgagccctcccttccccctatccaacctgggtaggtgggtaggggccacagttgctggatgtttatatagagagtaggttgatttattttacatgcttttgagttaatgttggaaaactaatcacaagcagtttctaaaccaaaaaatgacatgttgtaaaaggacaataaacgttgggtcaaaatggagcctgagtcctgggccctgtgcctgcttcttttcctgggaacagccttgggctacccaccactcccaaggcattcttccaaatgtgaaatcctggaagtaagattgcaccttcttcctctcctgatcaacatcggtatgatgtctcctgttgcctcaccctttgtctgcagtatcactggataggactggtggaaagggagcagcctgacagagctccaaatgtggagaatatggcatccctccacctatatttgatgtggacggtaaggctaggcctgcaggatcccttatcctgaccaaagactgtgttggggtgccatttgaaaatcgcagggttgcaaaagaatacaatcttacttgcaggtggatattctctatactctcttttaatgcatctaaaaatcccaaacatcccctggttggtgatcacttacagttgtgtccacctttattttatgtactttgattaaaaaaaaaaaactttttgttaatataaaaaaaaaaaaaaaaaaaaaaaaaaaa

SEQ ID NO: 640 - DNA, 1487 bp, Homo sapiens
ggacccacgcggcggcggaagatggctgcggccgaggtggcggacactcagctgatgcttggagtcgggctgatcgaaaaggacacaaatggagaagttctgtgggtgtggtgttatccttccacgacagccacattaaggaacctgctgctgagaaaatgctgccttacagatgaaaacaaacttctccatccctttgtctttggtcagtacagaagaacatggttttatatcacaacaattgaagttycagattcttccattttgaaaaaggtgactcatttttctattgtcctgaccgccaaagattttaacccagagaagtatgctgccttcactaggatattgtgtagaatgtacctgaaacatgggagcccagttaaaatgatggagagttatattgcagttctcacaaaggggatatgccagagtgaagaaaacggctctttccttagtaaggattttgatgcccgaaaggcctacctggctggctccatcaaagacattgtatctcagtttggaatggaaactgttatcttacacacagcactgatgctaaagaaaagaattgtggtgtatcaccccaagatagaagcggtccaggagttcaccaggactctgcctgccctggtgtggcaccgacaggactggaccatccttcactcttacgtgcacctcaacgccgatgagctggaagccctgcagatgtgcacaggttacgtcgctggatttgtagacttggaggtgagcaacagaccagacctctatgatgtgtttgtgaatctggcagagagtgagattaccattgctccccttgcaaaagaggccatggcaatgggcaaactgcacaaagaaatgggtcagctaattgttcagtctgcagaagatccagagaaatcagagagccacgttatacaggatattgctctaaaaacaagagaaatctttaccaacctagcaccattttcagaagtttcggctgatggagaaaagagagtccttaatttggaggcgctaaagcaaaaacgatttccaccagcaacagaaaacttcctttatcatctagcagcagccgaacaaatgctgaaaatctgactgtgtgacagaacgtatcactgatgactgatagaaagccctctttcactctgattacccactyactacatgaagtcctgaaaataacagagaaactgttatatctttttaatgatttatttgcaagtattgagatttgacctgaaaamcaatgaaacacatgaacacacttccgattttctcctcgctgattagcttcctgcctgctgtcagtgctggacgaagtgctataactactttatgtaacattacagaacagctagaggtcctggggaagaactttaattcctcctgaggaactctactttctgagccaaactgctaattttctgcggaactgtctaraagatcmyycaagagaccctgcagttgcactttcwmgwaaaagttaa

SEQ ID NO: 641 - DNA, 2132 bp, Homo sapiens
  misc_feature (1051)..(1051): n equals a,t,g, or c
  misc_feature (2018)..(2018): n equals a,t,g, or c
  misc_feature (2044)..(2044): n equals a,t,g, or c
tggggaagatggcggtggctggggcggtgtccggggagccgctggtgcactggtgcacccagcagttgcggaagactttcggcctggatgtcagcgaggagatcattcagtacgttttgtcaattgagagtgctgaagagatacgagaatatgttactgatctcctccagggaaatgaaggcaaaaaaggtcaattcatagaagaacttataaccaaatggcaaaagaatgatcaggagttgatttcggatcctttgcagcagtgcttcaaaaaagatgaaattttagatgggcagaaatcaggcgaccatctaaagcggggtaggaagaaagggagaaacagacaggaagttcctgcatttactgaacctgacacgactgcagaggttaaaacaccttttgatttggccaaggcacaagagaacagcaactccgtaaagaagaagacaaagtttgtcaatttatacacaagagagggacaggacaggcttgcagtcctgctccctggtcgtcacccttgtgattgcctgggccagaagcacaagctcatcaataactgtctgatctgtgggcgcattgtctgtgaacaagaaggctcaggcccttgcttattctgtggcactctggtgtgtactcatgaggaacaagatattttacagcgtgactcaaacaagagccagaaactgctaaagaaactcatgtcaggagtggagaattctggaaaggtggacatctctaccaaggaccttcttcctcatcaagaattgcgaattaagtctggtctggagaaggctatcaagcataaagacaaactgttagagtttgacagaactagtattcgaaggacccaagtcattgatgatgagtcagattactttgccagtgattctaaccaatggttgtccaaacttgagcgggaaaccttgcagaagcgagaggaggagctgagagaacttcgacacgcctctcgactttctaagaaggtcaccattgactttgcaggaaggaagatcctggaagaagaaaattcactagcagagtatcatagcanactagatgagacaatacaggccattgccaatggaaccttgaaccagccrctgaccaaattggatagatcttctgaagagcctttgggagttctggtaaatcccaacatgtaccagtcccctccccagtgggttgaccacacaggtgcagcctcacagaagaaggctttccgttcttcaggatttggactagagttcaactcatttcagcaccagttgcgaatccaggatcaagaatttcaggaaggctttgatggtggctggtgcctctctgtacatcagccctgggsttctctgcttgtcagagggattaaaagggtggagggcagatcctggtacaccccccacagaggacgactttggatagcagccacagctaaaaaaccctcccctcaagaagtctcagaactccaggctacatatcgtcttcttcgtgggaaagatgtggaatttcctaatgactatccgtcaggttgtcttctgggctgtgtggacctaattgactgcttgtcccagaagcaatttaaggagcagtttccagacatcagtcaagaatctgattctccatttgttttcatctgcaaaaatcctcaggaaatggttgtgaagtttcctattaaaggaaatccaaaaatctggaaattggattccaagatccatcaaggagcaaagaaggggttaatgaagcagaataaagctgtctgacccaggagaaaaggaactatacagcatagtggagttttgtgtactaaaattgctatctactggtcctttggaattgaagtagtagaaacctaaaggcttggcgtcaggcttgaatatctcagaacttaaactcttaccaaaatctgtatatttttcttaaggagtgggattcctactttatgtaatggggtcgaaatctttgaacacattatttataaaaacctgtttaaaaggtcgacggtatcgataagcttggatatcganttcggcacgagcccacctctacctcnggggggaccggcctggacgctggtggccccgggacccagcagagctgggggaagggtcagccccccaaagaaatgggggtgcatgctg

SEQ ID NO: 642 - DNA, 1139 bp, Homo sapiens
ggggggaggggaagaggcttcagggcagaaggctcaatcscttttattgaccccaactgggtgatgaaaggtgatcaatgatgatcgatggaaatgacagcctgaggcttggggctgagagggcatccagacagcagtggtcagcccatccttgtgcctcctttaaccctggctgcctttctgtctcagaccatctgtctgtccccagtactaaccatcaaaccctgtgtagggctagatatctcaatgtagkccctgtacttagtcccaaaggctagttgggctagagggaaacaaattcttctggaccacggttcacaatgaagaactggaaaaagacagacaggctcaaaccatagggccaagaatccttgtctcaggcctttgggtgaaggtaggggtagggggtgcaggctggatcctcatgtaaggtataaagaagcagttggtccagagcccgggcctcaggtctccagtttgaagcctttcatgtctctctccttcctcacaggtgccctttggggaagtaagcatggtccgggactggttgggcattgtggggcctgtgctgacccctccccaagagcatcctaaacgaccagtgctgggactggagtgcccacagtcagaaggaccaagacaaagcatgggacatgaaattaagagtgaacttcttatgggaggctgcagctggatcagaggaaaaatccagtgtgacagagtgcaagtcagaagacctggcttttcatcccagctttgaaacttggaactttttgattgacaaattaataaacctctctatgcctcaggctcctcatctgtaaaacagggatgcctaccttatggggttggtgtgaggattaactgagatcacacttgaaagtgccttgcatgggcttggcatgtgggtgctcattacatagtcttcttgttttcttgcctctgggttgaggattcacagcactgcactacaagggtagcccctctccattctggataccttgctaggagagagtctgggcttccacctgcggccagggtgaagggaaaattcttgccatgtcagagatggatcaatgactatgaaaaaactagcctgtgattttttttcactctaagcattaagagctcctaaagcc

SEQ ID NO: 643 - DNA, 1781 bp, Homo sapiens
ggcacgmgccgcgcctcccggcgctccctccccgactcctaagtccttcggccgccaccatgtccgcctcggctgtcttcattctggacgttaagggcaagccattgatcagccgcaactacaagggcgatgtggccatgagcaagattgagcacttcatgcctttgctggtacagcgggaggaggaaggcgccctggccccgctgctgagccacggccaggtccacttcctatggatcaaacacagcaacctctacttggtggccaccacatcgaagaatgccaatgcctccctggtgtactccttcctgtataagacaatagaggtattctgcgaatacttcaaggagctggaggaggagagcatccgggacaactttgtcatcgtctacgagttgctggacgagctcatggactttggcttcccgcagascaccgacagcaagatcctgcaggagtacatcactcagcagagcaacaagctggagacgggcaagtcacgggtgccacccactgtcaccaacgctgtgtcctggcgctccgagggtatcaagtataagaagaacgaggtcttcattgatgtcatagagtctgtcaacctgctggtcaatgccaacggcagcgtccttctgagcgaaatcgtcggtaccatcaagctcaaggtgtttctgtcaggaatgccagagctgcggctgggcctcaatgaccgcgtgctcttcgagctcactggccgcagcaagaacaaatcagtagagctggaggatgtaaaattccaccagtgcgtgcggctctctcgctttgacaacgaccgcaccatctccttcatcccgcctgatggtgactttgagctcatgtcataccgcctcagcacccaggtcaagccactgatctggattgagtctgtcattgagaagttctcccacagccgcgtggagatcatggtcaaggccaaggggcagtttaagaaacagtcagtggccaacggtgtggagatatctgtgcctgtacccagcgatgccgactcccccagattcaagaccagtgtgggcagcgccaagtatgtgccggagagaaacgtcgtgatttggagtattaagtctttcccggggggcaaggagtacttgatgcgagcccactttggcctccccagtgtggaaaaggaagaggtggagggccggccccccatcggggtcaagtttgagatcccctacttcaccgtctctgggatccaggtccgatacatgaagatcattgagaaaagtggttaccaggccctgccctgggttcgctacatcacccagagtggcgattaccaacttcgtaccagctagaagggagaagagatgggggcttgaacacggggcttccttacagccccggatgcagattttagagggagggcaggtgcgggctgtgtgtgtctgtgtgagggcaggtcctggacttggcagtttcttgctcccagcacccgccccttcctcacctcttccttattccataggctgggagagaaactctctctgcttccctcgcccttggagctttccccatccccctgattttatatgaagaaatagaagaggggcttgaagtccccctcgcgagtgccttcttgcaattacctgccttagcgggtgttgcgggtccctccttcacagccgctgagcccagaggtcccgctggcccctcctctgaattttaggatgtcattaaaaagatgaatctaaaaaaaaaaaaaaaaaaaaaaaaaaaaaaaaaaaaaaaaaaaaaaaaaaaaaagg

SEQ ID NO: 644 - DNA, 2248 bp, Homo sapiens
  misc_feature (27)..(27): n equals a,t,g, or c
  misc_feature (2243)..(2243): n equals a,t,g, or c
ctcccctcwttaatgggaacaamcgcnggagctccaccgcggtggcggccgctctagaactagtggatcccccgggctgcaggaattcggcacgagcaacatggctgcgcccgcactagggctggtgtgtggacgttgccctgagctgggtctcgtcctcttgctgctgctgctctcgctgctgtgtggagcggcagggagccaggaggccgggaccggtgcgggcgcggggtcccttgcgggttcttgcggctgcggcacgccccagcggcctggcgcccatggcagttcggcagccgctcaccgatactcgcgggaggctaacgctccgggccccgtacccggagagcggcaactcgcgcactcaaagatggtccccatccctgctggagtatttacaatgggcacagatgatcctcagataaagcaggatggggaagcacctgcgaggagagttactattgatgccttttacatggatgcctatgaagtcagtaatactgaatttgagaagtttgtgaactcaactggctatttgacagaggctgagaagtttggcgactcctttgtctttgaaggcatgttgagtgagcaagtgaagaccaatattcaacaggcagttgcagctgctccctggtggttacctgtgaaaggcgctaactggagacacccagaagggcctgactctactattctgcacaggccggatcatccagttctccatgtgtcctggaatgatgcggttgcctactgcacttgggcagggaagcggctgcccacggaagctgagtgggaatacagctgtcgaggaggcctgcataatagacttttcccctggggcaacaaactgcagcccaaaggccagcattatgccaacatttggcagggcgagtttccggtgaccaacactggtgaggatggcttccaaggaactgcgcctgttgatgccttccctcccaatggttatggcttatacaacatagtggggaacgcatgggaatggacttcagactggtggactgttcatcattctgttgaagaaacgcttaacccaaaaggtcccccttctgggaaagaccgagtgaagaaaggtggatcctacatgtgccataggtcttattgktacaggtatcgctgtgctgctcggagccagaacacacctgatagctctgcttcgaatctgggattccgctgtgcagccgaccgcctgcccactatggactgacaaccaaggaaagtcttccccagtccaaggagcagtcgtgtctgacctacattgggcttttctcagaactttgaacgatcccatgcaaagaattcccaccctgaggtgggttacatacctgcccaatggccaaaggaaccgccttgtgagaccaaattgctgacctgggtcagtgcatgtgctttatggtgtggtgcatctttggagatcatcgccatattttacttttgagagtctttaaagaggaaggggagtggagggaaccctgagctaggcttcaggaggcccgcgtcctacgcaggctctgccacaggggttagaccccaggtccgacgcttgaccttcctgggcctcaagtgccctcccctatcaaatgaagggatggacagcatgacctctgggtgtctctccaactcaccagttctaaaaagggtatcagattctattgtgacttcatagtgagaatttatgatagattattttttagctattttttccatgtgtgaaccttgagtgatactaatcatgtaaagtaagagttctcttatgtattattttcggaagaggggtgtggtgactcctttatattcgtactgcactttgtttttccaaggaaatcagtgtcttttacgttgttatgatgaatcccacatggggccggtgatggtatgctgcagttcagccgttgaacacataggaatgtctgtggggtgactctactgtgctttatcttttaacattaagtgcctttggttcagaggggcagtcataagctctgtttccccctctccccaaagccttcagcgaacgtgaaatgtgcgctaaacggggaaacctgtttaattctagatatagggaaaaaggaacgaggaccttgaatgagctatattcagggtatccggtattttgtaatagggaataggaaaccttgttggctgtggaatatccgatgctttgaatcatgcactgtgttgaataaacgtatctgctaaatcaaaaaaaaaaaaaaaggcggccntttta

SEQ ID NO: 645 - DNA, 810 bp, Homo sapiens
  misc_feature (33)..(33): n equals a,t,g, or c
ccacgcgtccggacatgggtatggtggcagcancccccagtattgagaggactaggaccctgggacccctgccgaacgaaatctgtccaggcagctcctctccctgaccaagtgggggcgctcgtgtggctggcagggagcccgggtccaagcctgagggctcagggcaagcggcctgattgggctgtctctggtcttcagaatcgaccacggaaatttgacacctccgggcttggaagcagctctctcctccttccccgctgcttataaacctcagccctgaggctccagctcactctaccccatctccttgccgggtcagccctgacaaaggtcagctagccccttgaggacatcagctttggcctcagggtcctaatggcagcagaaccactgacagagctagaggagtccattgagaccgtggtcaccaccttcttcacctttgcaaggcaggagggccggaaggatagcctcagcgtcaacgagttcaaagagctggttacccagcagttgccccatctgctcaaggatgtgggctctcttgatgagaagatgaagagcttggatgtgaatcaggactcggagctcaagttcaatgagtactggagattgattggggagctggccaaggaaatcaggaagaagaaagacctgaagatcaggaagaagtaaagccgcctggctgagatggggtgggcagggcagagctgatcagggccgagcagaaccgcactcttcccaaataaagcttcctccttgaaamaaaaaaaaaaaaaagtcgaccggccgcgaatttagtagtagtag

SEQ ID NO: 646 - DNA, 1580 bp, Homo sapiens
  misc_feature (951)..(951): n equals a,t,g, or c
  misc_feature (954)..(954): n equals a,t,g, or c
tgcgccaccttgttggaaaggccatcggtcggggccttttcggctattaccgccagctggcgaaagggggatgtgctgcaagcgattaagttgggtaacgccagggttttcccagtcacgacgttgtaaaccgacggccagtgaattgaatttaggtgmcactatagaagagctatgacgtcgcatgcacgcgtacgtaagcttggatcctctagacggccgccctttttttttttgattttctgaccataatttattgactccaatgcccaggccacaccaccctttgttataggaggcttctgcctagactttggccgggccatccctcatgcctgtgtggggcccctgcaggagaggggccggggcaggtggtcttccaggcccccttcctggcattctgttaccagacctcaacctggcttggagggcccaggtttccttgttaggccctgccccgcaccaggcaacgctaacacaggatgggaggcttaggctaaggcacatttacagtagaggggccaggaaatccgaggctcacgttccaacgctgcagtgcccaccatgtgagatttccaggaccgtcggtgcagccactgagccgtcccttctacaagccagaggtgttccctgcccgctgaggacggaaggagactcatggggccagaccgcaggccctgactgcacactcccgttttggcaggaaactaaaattggggagggacccccaagtctcatatgcacacaccctgctgcccctcctttgtcccgttcttccttccatggcaggggctacgtgggcaccgggcgcttgtcctggaagaagcgcttgagcgtgcagacctgcagcacagccaccagcagcagcaccgccacgttgacagctgaccagaagttgacccgctccaagttgccctcttgcaggttgcggtcacgtgcctcgaaggcccncantagcgtgagcatctggaatgtgcgctccagccgggtccgcatggtctcaatggactccttgatgtcctccattttaacatccagcatctcctcgggctccacagcctctgcccatccttcgacctcctcgtcatcctggaggctgtcaaagatcagttcaaagaacaccagcttctcggagatggtgctgaaggagttgtcaaagcacagcttgtagtccccggcctccgttggctccaccgtgtgtaccccatcagccttgcgggactcgctgaccaacagcacgccctgagggctctccagcgtgaagtccacgtccagtccagcacctccgatcacctggtattcggtctcgaggcttgcgttggccggcgcggactggtagaaacactgcttcctccccgccggcaacaggaacgtgaactcaccgtcctggattggcgggggccccgcccctcccacctccactggtggcattagtagccacaaggccagggctagggccgcgccggccgccatcatccgggtcaccctctggtctgcaaaggggtcgcggctcctttaagcgctagccctgccccggtgctactcggcggagctcattggcagtggcttctgtatgttgc

SEQ ID NO: 647 - DNA, 585 bp, Homo sapiens
  misc_feature (574)..(574): n equals a,t,g, or c
gactggaaagcgggcagtgagcgcacgcaattaatgtgagttagctcctcattaggcaccccaggctttacactttatgcttccggctcgtatgttgtgtggaattgtgagcggatacaatttcaccaggaamcagtatgmccatgattacgcmaagctcgaaattaaccctcactaaagggaacaaaagctggagctccacgcggtggcggccgctctagaactagtggatcccccgggctgcaggaattcggcacgagagccagagcagttcagttcctacctgacatccccagacgtgggcttctccagctatgagcttgtggccacaccccacaacacctctaaaggcttccagcgtcctgtgtacctgttccacaaggcccgatcccccagccactaagtggccccctaaacagaaagtgtgaagaggctgccctcgctgctcataaggacctgggggaagaggaaagtgtcccaaggtctttcctttctgactccaaaaatagtttcctttcttggaaaaaaaaaaaaaaaaaaaaaaaacyygggggggggcccsgtacccaatttnccccaaagggg

SEQ ID NO: 648 - DNA, 717 bp, Homo sapiens
  misc_feature (699)..(699): n equals a,t,g, or c
aattcccgggtcgacccacgcgtccgcccacgcgtccggcggacaacatggcggccttcatgctgggctcgctgctgcggacgttcaagcagatggttccttcatcagcttcaggccaagttcgaagtcactatgtagactggagaatgtggcgcgatgtgaagagacgaaaaatggcctatgaatacgcagatgagaggctacgtattaattcactcaggaagaataccattttgccaaaaattcttcaggatgtggctgatgaagaaattgctgccctcccccgggatagctgtcctgttagaatcagaaatcggtgtgttatgacgtcccgtccgcgtggtgtgaagcggcgctggaggcttagtcgtatagtcttccgtcacttagctgaccatgggcaactttctgggatccagcgagcgacatggtaaatgagctccagaacctattgagcttgcagggaagccaagcttgcagttccagcaagcaaagattttttttaatagaccaaaccctaatctctacaggggcccagtacagttgtttggcctacctgatgctatctctaaactacttttaaaatgaagacatttgggtgtttcatgtcagtgaattatcttttctcttggacttaacaaacatactgttcccatacatagtacaaagagtagcataataaatattttctgtgaatgntttaaaaaaaaaaaaaaa

SEQ ID NO: 649 - DNA, 3839 bp, Homo sapiens
  misc_feature (3813)..(3814): n equals a,t,g, or c
  misc_feature (3820)..(3820): n equals a,t,g, or c
ttttttttttttttttttttttatagtcaatgaaaakagtwtattmttttattgktttttgttyatacatgttaagtttcaactttcaataataaaattcaataaatttgattccttaatcataaaaactkgctttacacattakttacatrttgtcaaagtccatacaaaacatcacaaggatttgattgactctatgcatggtaccatcacacagaaggaggagggagctaatccagtaacawacattcaaagattaaattgyagatatgcacagtgtatttggcactgttsattaatattataacaccttcctctcaaagacaggcattcttaagcgttagtcacratataccagaatttgctattcayattaaaaccaccttttaaactttataacagtaaccrattattatagttttaagaaacaaaacrcaatgagaactgggaatggaattcaaatcctccaacttcttgctatgctccaagctgccatccataaaacaggtttaattyggtaatttttccattgtgggragtgtcaacaagaaacaatttaaagacartattttccaatacaaataaagacayayacttttgtttaaaatkamcagttcttcttgggagtgcaaagggagccttgatgatgtacaacttgtgatgcttttggcaggaattacagaacaaccaatgccattcaagttgtggagattgtactagcaggtgaactcataaagagaaggttctggaatgactacatctgaaatcagaatcctagtagtttgtagtttgcctcttcctagaacttcaagagactcaaatcataggctacagatgtactttcaagtatatacttatgaatggaaggagaaaataaaagcacgaaaatgcaaatattaaacctttactggcttgggctatattccagtaggtaatttatttgactaacttaactttaacaacgattaaatcccttcattttaatcaggtccattaaatttcattcattaaagctatacatactccagaatgtttataagacatttatacctatcatgtttacaaaaggcataaattcagtcttcagctgcactacaaatgcctcaatataatataatcacagtataaggaatcagaaattctctggttagatatgctgtagcttcacacaaaactctcagtaataaattaaaacaaaaaaaaaaagtcgtacaacgtataatggattatgcagtgcaaagtaatgtcactggaccaaaattttagtttaatcatttttatttcaagtgtatttaaaaaatcataaatggggtttcataatccaaagttgaaacatttattcttcatagcttcagaatttaacaaccaattgtagaccatgctttccaaatccagtcttctttgctatttttcaaaacttctgagatctagtattaaactgctccattctaaatgtatagttttagataagtattgtacacttgttgataagggttttctgaaagcagtctatcaaatataaagaatggtttctatctaagaatcagcagtgagggaagaaatattaaacacctatcaagaaatcaattattcattttaaaaataacagaaccagtgctgctctctgtcataaaagagaacatgtaaaatttatttttatagrctttggtaayattwtattcccccacagaggccttcaatcctacttaaagatattttacacacrgtaaccatcaggatttactgagtaaaaatctcaggtattaaccatgcccctaaaatgtgctrttccaaagaggaacaggttacttttgaggaaaaaagctgccttggtaacttccctcaaatgtttattttaaataaaaatrgttgatggaartattttttaaamsaactttggrtataatatggcatactgcccatcaaacaaaaaaggaaataaaactttctttccatttataatragttttccacctttactatcaagattacaacttattgaccttttatgcttgcttggtttttttgactgcctaatccaatgtttaaatttttaagtctgcatttcaatgtagtaggagttatttttcaaataatcttcagaacccagaatacagagcaactctcagaataccagagcaacactctcaagtcatacttttgaacccagaataccagaataccagacttcagaacccagaataccagagcaacactctcaagtcatacttttgactacaattaagagatgaaaatggacggatatctgaagataggtattccctctgctctgaaggtgagcaagattttaacatgtgagcaacacagaactccactcctctggagctcctttcaactcagaatgcttcagttcagtaagtcaatatattattcttaaaaattaaagtttggtcactaagaaggactgaacaaaaattattcccctcccgccaaacacaaccagaacagttctaatcaggccctcttctccccacaaaaatagggaagtagctgggctgaagactttaagtgtgacatttcagttcctaaaacatcactgctatttgctcaaagttgtaggtctatgtatttccttctccaayacgtccccatttataagtttatttccayacatacaaacgtgcacatgtgtgcacgtgcacacgcacacacacacactcactctcaagtaagacacttttttgtgtttgttgataaattatgaggattatgaactaggtgtgtacagggtttcataggtgctttgtaaacatcagagtcacttggttcctttcctccacaagcctcaaatcaaattatgcaaccaatgaccactactttcccagacgctgttcacaggctgcatattgacgaagggcagagaaaaagtcctcataactgatgtttagrtgggaaggcaaagagacaatctcagtcaatctgatgtgccagggaagaaagcctmrtgtgctgtccacaggaccgaacttcaatactaaatcaggatcaggacaaccatttgaactaagtaaactggctaacgtatctacatccaaatctgtgggtctcytttgcttctgggctactaactggcaaaagtcctgagcagctcttacaatatctgcttttccatcttccggcagacagcaccttcactgccaaatggcaatttaaaacttgatcatctttgtcattactatttgcaaattctggtgagtattttgaacaatctaggcccagaagttcttgctgttgttttaaaatttcatccatcaatctggaattatttcttttgaaaataccttggtggtcgtagacgctaatgtaggagatgcccacggccatacaccacaccacgaggctcgcgatgtccgagaagctgggttcctgctccacctcggtgatcaccaggcccatatgcacaggcagcttctccaaggaacgaccgtccgcgcgccagcgcatccggtggtgtgcggctgccaggcacgaccccccgcgcgggtgccggtggtgacggcggttcctgccgactgccgggggcttgcggagcgtgaagccgagcggcgctaggaccgcggcagaggcggcgcggcagcagcgccgccagatccagttccaggtgccgaaccgaacgcggagccaggaggtgagcgtgcggtgcagacagagcagcgcgtgcagcacccgccacaccagctcgtacagccccgtcatactcttgtggccctcggacaccccggacgcgtgggtcgacccgggaattccggaccggtacctgcaggcgtaccttctatagtgtcacstaaaytnntgcttnatcttcccccccccccccg

SEQ ID NO: 650 - DNA, 1024 bp, Homo sapiens
ggcacgagcccacccagcctgcccccaggtggacatcccagccacctagaccttcctgtgagtgacccagccccttccactctcagactggcctattggtgtgggccccgtgaggcagtcataacacagggatgaaacctggctctgscacttcccaaggtgggtgacttcacttctctgagcctcagtttcctcttctgagcatgggcctgaatgagacgtgtgtaaagtaccaagcacagtggtgagccaatggaagacacgcagytagccaccagcagtcatcaccaaagatgcctctgatttgtgactctgaaaattcttgcaaagctgagaaggtgaaattcctctggctatattgttgaccaaaggccctcctctgtaagagtgaattgcacgctcacttgaaactatcttgagggactaaggtgtacaatcctggtgcttatgcagtttggggctctaggtagacacgagctggctttgaaattgtagattcctacactccccctttctrgagttctgggtctaagtgaattgactcctatttctgttgtgaatgttgtagtttcccttcccattctcttggtggccctggaagcttctaggcacagtgtgccaccctgattattcccacyactccrtccaacttttctctctctgtggtgtctgcaccacaagctgcctaccctccaggtgcctcaatggtccggccaccagttgtgcctcggcgccccccggcccacatcagcagtgtcaggcaggcctccacccaggtgccacgcasggtgcctcatacccagagagtagccaacattggtactcagaccacaggacccagtggggtaggatgctgtacaccaggccggccgctcctgccgtgcaaatgttcctcagcagcacatagcacctatcgggtccaggagccggctgtgcacatcccaggacaggagcccstgaccgcgtccatgctggctgcggcgcccctgcatggagcaaaagcagatgattgggggagcgtctt

SEQ ID NO: 651 - DNA, 611 bp, Homo sapiens
  misc_feature (447)..(447): n equals a,t,g, or c
  misc_feature (501)..(501): n equals a,t,g, or c
  misc_feature (560)..(560): n equals a,t,g, or c
  misc_feature (606)..(606): n equals a,t,g, or c
gatgacattcacaatgttgtgcaacgattactaccatctattctttcccaatccctagtaacttctaatctactttctgtctctaccaatttacctcttctaggtatttaatgtaagtggaataataaaatatttgtatttttgtgtctgactactttcatttagtataatattttcggggttcatctgtgttgcagtatgtaccagaatttcattcctttttaatgctcagtaatactctattcaggtggacattttgcaccttttggctaaactggatactgcagtgaacattggcatacaattattggtttaagtccctatttgcaattcatctgggtatgttccttggaatggaattgctgggttggttttgtaattcgctgtggttagcttcttcaggaactgccatattggttttcacagaacctgcaataatttacattnctaccmacaatgkacmcatgtcaatttctctamctccttgsccacacttgctantttctttcttttctatccaacttaaatgggggccctttgggttggaattctctaaccgnaatggtattaagcatcttttcatgggctaattggccattggaagcnttata

SEQ ID NO: 652 - DNA, 4152 bp, Homo sapiens
  misc_feature (2)..(2): n equals a,t,g, or c
gngatacgccagctctaatacgactcactatagggaaagctggtacgcctgcaggtaccggtccggaattcccgggtcgacccacgcgtccgaaccttgctaaccttataatgaatgaaattgtggacaatggaacagctgttaaatttgatgatatagctggtcaagacttggcaaaacaagcattgcaagaaattgttattcttccttctctgaggcctgagttgttcacagggcttagagctcctgccagagggctgttactctttggtccacctgggaatgggaagacaatgctggctaaagcagtagctgcagaatcgaatgcaaccttctttaatataagtgctgcaagtttaacttcaaaatacgtgggagaaggagagaaattggtgagggctctttttgctgtggctcgagaacttcaaccttctataatttttatagatgaagttgatagccttttgtgtgaaagaagagaaggggagcacgatgctagtagacgcctaaaaactgaatttctaatagaatttgatggtgtacagtctgctggagatgacagagtacttgtaatgggtgcaactaataggccacaagagcttgatgaggctgttctcaggcgtttcatcaaacgggtatatgtgtctttaccaaatgaggagacaagactacttttgcttaaaaatctgktatgtaaacaaggaagtccattgacccaaaaagaactagcacaacttgctagaatgactgatggatactcaggaagtgacctaacagctttggcaaaagatgcagcactgggtcctatccgagaactaaaaccagaacaggtgaagaatatgtctgccagtgagatgagaaatattcgattatctgacttcactgaatccttgaaaaaaataaaacgcagcgtcagccctcaaactttagaagcgtacatacgttggaacaaggactttggagataccactgtttaaggaaatacctttgtaaacctgcagaacattttacttaaaagaggaaacacaagatcttcaatgaacgtcatcggctacagaaacagcctaagtttacaggactttttagagtcttacatatttgtgcaccaaacttgaagatgaaccagaaaacagacttaaacaaaatatacaatgcaaatgtaattttttgttgtttaaggccttgccttgatggtcacagttatcccaatggacactaagttagagcacaacaaaacctgattctggtcttctttaccaatataatcataatgtaaataataatttgtatattgtgttgcagatgaaagtattccaggaacagtgaatggtagaagacacaagaacatttgtttgtttgtcttctgatgttttttcttaaaatagtaatttctcctacttttcttttctactgttgtcttaactacaggtgattggaatgccaaacactcttaagtttattttcttttttcgttttataaattcagtgtgccaaatgaaacttttttcctaagtaactgtaataggaaaaagtttattttgagagtttcttcttcataaatctacagacattaaacaattgttgtgttctttttaccttttatttttctattaccttgctaccaaacagtttagatagcaatataatagcaaaaaagcaaatatggtaaaatagagaaggtttgaaggtttgagttactctgkcatataacatgtagatcagtcttcatgtgacctgcagwatttttttttctaatgkatttgtcagaaatctgttgtagactgttaacttcttcctgatggaatttattttctgcaagaattattctgatatttaagagagccaattttaactgctgtgaaaatgtttccagtgcaagagaagggaaatactaggaactaagacatttctaatttattgcttattactttcttaattttacaggataattataagcaagtggaactaccatcttttattcttaataattattaatcccttcaatgaaactttaaaaaaactgaatttttatacatggcatacatttttctagttccttctgcttgctttattaactcaaaagttctagttctagtctgttgatctgccttttgttctcccaaaatgtacagtaattccatttgtttgtataaatatgcctggattttcattataaaaatggaattactgtacattttgggagtagagactcatatcatggccttttaaatattgtaataaaggcaaatagatatttgcccttagtttactggttaaaagtttgtttacagaacttttctctggtgcttaaatgatgctatgtaaaatgtcatgagtggaaagaatatttgtagtagtaacaagaatttttcatttaggaaagatttcttaggttttgaaagaatacattaaaataaaaaacttgcccctactaggtaagaactttataatgaagacatacattcttcttaattttactcttgctcttgttaaagatttgtttgaatatagaagatgcatgatttctggggttttttttttttttgagacagagtttcgctcttgttgcccaggctggagtgcaatggcgcaatctcgactcaccacaacctccgcctcccaggttcaagcaattctcctgcctcagcctcccgagtagctgggattacaggcatgcgccactaccccagctaattttgtatttttagtagagatggggtttctccatgttggtcaggctggtcttgaactcctgacctcaggtgatccgcctgcctcggcctcccaaagtgctgggattacaggcataagccactgcgcccagccagaagatgcatgatttcttaggatcatatgctgtttgtagccataaggtaaatcatgtctcttccaatcatgactttggaactccctgaataataaaaatgagagttgagataaataggggaaaaaaaatttttttcaagccagagctatgcatatgttaggtgatgggtagtatccctttaaggtctcaaacattacaacatcaattatgaaatactgataacgaaaggtagtaatgaaatatatatgatgaaaagaattgagaagttctaaattaagacatttcagttaagctcataaaatttcattgttttcatttaaaaggagattaacgttattgatacttggataactggctaatcatattaaaggactatgtggttccagctcaacttttaatatattgtctcctttaaaactatcatggttataattctattgggaaagacttttagataacaaagatttcaaatgttaaaagagataaaagtcaggttaatactatcttaaacactgagtcagaaaatcattactgtatagaagttgctttcctgatcaagtctgaacttcagctagtgctagagaactattttctatgacttaactctaaccaagttttattttaagctgtttctttgatagaagggccatgaaaatagagtaatgatatagtaggagataagggattggtttggtctttttcaataaagatagaagttgctgaagttttctgaattaataatgacttagattgtgaccttttagattcggtgttgagctctgtgttgtattacttcctaaaagataatgcttaaacattaagcattagtgtgctcttcatgttaatatggcagagttttgtaaactaaattaaaacttactgatatattggactttgagccaagggaaagaatgagtactatctttccagatatcttaagggtaaaagcttattctaagacagtctgtccattgagaatattagatttctgacttgcaaatatgtttgtactccagaagaattagaggaaaagcagatactagaattctaatttaattacatatacagccgtctttgtttatagtgtagaattctttatattttgtacaaaaactaattcttttggtaaaatgaaccatttacagttcggttttggactctgagtcaaaggattttcctttaaatgcttgtctcaattttagtctggtcttttgtacttttcttcagaagaaatgaattaaagggtacagttgcataaagtgggtttttatcctaatgtattggaaataaatgataaactttaaaaaaaaaaaaaaaaaaaaaaa

SEQ ID NO: 653 - DNA, 2044 bp, Homo sapiens
  misc_feature (94)..(94): n equals a,t,g, or c
atttctatggctcccatttgtaatacaaggaaatgtcagcttctagttttgtaacgtcttgcccaagagctgcgaccgttaacttgtggagttnggacggcgtcaagtcaattggttgcccgacctttattctgccttgtcccatagatttagaaagaggctgacacatctggtaactagtttacggtcatctgcctctaagcgacatttagggtaagcgacatttttcagaaaccaaggccctccctctcgtctcactagtgggaagggtggaaagaacaggacagaaagctcttcctcttgtgtgaggcagttgctgtggaagccccataggcaggaggcccccgggcagcacatcctgtctgcttgtgtctgctgcagagttctgtccttgcattggtgcgcctcaggccaggctgcactgctgggacctgggccatgtctccccaccccaccgccctcctgggcctagtgctctgcctggcccagaccatccacacgcaggaggaagatctgcccagaccctccatctcggctgagccaggcaccgtgatccccctggggagccatgtgactttcgtgtgccggggcccggttggggttcaaacattccgcctggagagggagagtagatccacatacaatgatactgaagatgtgtctcaagctagtccatctgagtcagaggccagattccgcattgactcagtaagtgaaggaaatgccgggccttatcgctgcatctattataagccccctaaatggtctgagcagagtgactacctggagctgctggtgaaagaaacctctggaggcccggactccccggacacagagcccggctcctcagctggacccacgcagaggccgtcggacaacagtcacaatgagcatgcacctgcttcccaaggcctgaaagctgagcatctgtatattctcatcggggtctcagtggtcttcctcttctgtctcctcctcctggtcctcttctgcctccatcgccagaatcagataaagcaggggccccccagaagcaaggacgaggagcagaagccacagcagaggcctgacctggctgttgatgttctagagaggacagcagacaaggccacagtcaatggacttcctgagaaggacagagagacggacacctcggccctggctgcagggagttcccaggaggtgacgtatgctcagctggaccactgggccctcacacagaggacagcccgggctgtgtccccacagtccacaaagcccatggccgagtccatcacgtatgcagccgttgccagacactgaccccatacccacctggcctctgcacctgagggtagaaagtcactctaggaaaagcctgaagcagccatttggaaggcttcctgttggattcctcttcatctagaaagccagccaggcagctgtcctggagacaagagctggagactggaggtttctaaccagcatccagaaggttcgttagccaggtggtcccttctacaatcgagcagctccttggacagactgtttctcagttatttccagagacccagctacagttccctggctgtttctagagacccagctttattcacctgactgtttccagagacccagctaaagtcacctgcctgttctaaaggcccagctacagccaatcagccgatttcctgagcagtgatgccacctccaagcttgtcctaggtgtctgctgtgaacctccagtgaccccagagactttgctgtaattatctgccctgctgaccctaaagaccttcctagaagtcaagagctagccttgagactgtgctatacacacacagctgagagccaagcccagttctctgggttgtgctttactccacgcatcaataaataattttgaaggcctcacatytggcagccccaggcctggtcctgggtgcataggtctctcggacccactctctgccttcacagttgttcaaagctgagtgagggaaacaggacctacgaaaaaaaaaaaaaaaaaaatcgagggggggcccgtacccaatcgcctgta

SEQ ID NO: 654 - DNA, 3277 bp, Homo sapiens
tcacaggttgtgaagacatmcaatgycaccacaacaacagtcacaaccacggyaagcaacaacarcactgcacccacaaatgccacatatcctatgcctactgccaaagaacactatccagtatcatccccatcttccccatcaccaccagcccagccaggaggggtttctagaaacagccctttggattgtggatcagcatctccaaataaagtggcatcttcctccgaacaggaagcaggtagtccaccagtagtagaaacaacaaacactagacctccaaacagcagcagttcttctgggagttcatcagctcattctaatcagcaacaacctccgggatctgtttctcaggaaccaagaccacctcttcagcagtctcaggttcctcccccggaagttagaatgactgttcctcctttagcaacaagttctgctccagtggcggtgccttctactgccccagtgacttaccctatgcctcagacaccaatgggatgcccccagcctactcctaaaatggaaacccctgctattagaccaccccctcatggcacaactgcccctcacaagaattcagcttcagtgcaaaattcatctgttgcagtcctyagtgtcaatcacattaaaagacctcacagtgttccctcttctgtccagctaccttcgaccttaagtacacaaagtgcttgtcagaattcagtacatccagcaaataagcctattgctcccaatttcagtgcccccttaccatttgggccctttagcacattgtttgaaaacagccctacttctgctcatgccttctggggaggatctgttgtttcatctcagtcaacaccagaatctatgctatcaggaaaatcctcatatttgccaaattcagatcctttacatcagtctgatacttccaaagctccaggttttagaccaccattacagagacctgctccaagtccctcaggtattgtcaatatggactcgccatatggttctgtaacaccttcttcaacacatttgggaaactttgcttcaaacatttcaggaggtcagatgtacggacctggggcaccccttggaggagcacccgcagctgctaactttaacagacaacatttttccccgcttagtttgttgactccgtgttcatcagcatcaaatgattcttctgcacagtcagtatcctcgggagttcgtgcaccatctcctgccccatcatcagtaccgttagggtcagaaaagcccagcaatgtgtctcaggacaggaaagttccagtccctattgggactgaacgttctgcacgtatcaggcaaactggaacgtcagctccatctgttattgggagcaatttgtctacatcagtaggacatagtggcatctggtcctttgaagggattggtggcaatcaagacaaagtagactggtgtaaccctgggatgggaaatcctatgatccacagaccgatgtctgacccaggagtattttcacaacatcaagcaatggagcgagatagtacaggaattgtaactccttctggtacattccatcagcatgttcctgcaggctacatggactttcctaaagttgggggtatgcctttttctgtgtatgggaatgcaatgattcctccagtagcacctatccctgatggtgctggaggacccatatttaatggccctcatgctgcagacccttcttggaactcactgataaagatggtttccagctccacggaaaataatggccctcaaacggtgtggactggaccctgggcacctcacatgaacagtgtgcatatgaaccagcttggctgatgaggatcagcttgttagcctgcagattccttttcatttggaggaaatcacaagtggccgaaaaaaaaaattatgctcccaaatcattctactgatgtgcttgactgaagtgtgtaggctttttgcagaagatcttactaactgacctattttctgtgaacatttgtgactgcccattccccatcatcatccgttttaccttagttagcatttttcttatcatttttctttttttctttccctcttcccctttggacataactttctgttgaagctgttctttggctggttggttttagtactgtaaactgcttctgagcaaacacggaaatttagcaaaattatgtaaacttgatcctgaagttttagaatggcaaataaatgtacaattgtttacataacagaaaaggctaagcagaaagtaaatttcaatatgtcagtatagaggctctactttatgtagacttaaattaatgtgagatatgtaccttcatattcagaaatctggatgtttccttcatacattaaactattaataagcataacttttctactggtgtaatttaagtataaagtaaaataatgggcattatcattggatgtttccccacattggcttttaaaatacccatcttgctttctttttggtttatttgtagcaaggcacatatagaagaagaaatttctggcttttccatgttgttttattaccttttctcacttttaaaactaatacagacttatctcctcactcctttttctctccttacctttaccactaataccagtaaaattatctttctgatagtgaaaaggttctgtcaagattttcactgtaatggctgctacagagatggaccatcttcatcatcaccagtggtttcttctaattataaaatgtttaaactttctgagaatttaaaaagccaccactgttcccagtcagcatatacaagctcttaatattctgtttattaaataattcaatgtactattttatattggatgatattgattcttaacattggcttttcagtcatcaacagtcaacataaaaatttcaattttcagtaatttagtggaaaatatcttatttcttttttcaattttaaaggcttcctgcttttttacccttgtatattatcagtgaaaaggatcaacagttaatttgagccaagtaataaaagaaattctgcatttgtcacgaagacaatttatggtagacagataaatacacagattacagtgtaaagtctccatttaacctgtttataaaagatacaaggccacactaaactactcagtgggatttatatattccatccacttgaaacaataaacagtaatgtatccaagaagattatgtgtcctaccctgtctcatggaaaaattaattatatggttgaaatgtaaaagaaagtaagcataaaaatcgagtaatgtataaaaaaaaaaaaaaaaa

SEQ ID NO: 655 - DNA, 3058 bp, Homo sapiens
  misc_feature (871)..(871): n equals a,t,g, or c
caggcttctaatggtgatgcttctactttaggggaggagacaaaaagtgcttctaatgtgccatcagggaagagcactgatgaagaagaggaggcacagaccccacaggctcctcggacactgggtccatcacctcctgccccatcatccactccaacaccaacagcccctattgccactctgaaccagcctccaccacttcttcgtscaacactgcctgctgccccggctcttcaccggcagcctcctccactccagcagcaggctcggttcatccagccccggccaactttaaatcagcctccaccacctcttattcgccctgctaattccatgccaccccgtctaaacccaagaccggtgttgtccacggttggtggtcaacagccaccatcacttattggaattcagacagattcacagtcctcactgcactaaaaattaaattggacacagctgcagtaacttttcaccccatcattataccagtgctcatctgactgatgaaaaagaggaaagaataatcatttctagatactgaggctgcgaactagttctgtggcagtggactagcataagtggatgtctaagaaatttttcagttcactagactaaaatgttttacaacaaaaagcctccagttagcctcctttctagagtatatgttcagcaatgtgatctcataaaaggaaaaacaaaagatttaagtattctatataccaagtttttgttttgtttttactgtatttattttattgaggttctttatattcctgcctcttcatagtcaaggctcttagtacaggaatattgacttaggaattgtgaaaactccttaagtttcttaagttaaggatgtttggcttttttnctttaattttttaaaaaccattttcctatgttaggagtgcaagaatagccagcatttccgattttgacatatgttcattttatgcatatttaagaaattatagctgcatatcccttctttcaaaaaatgttgcttttttttttaaaggaattttaatatattcctttaaaagaaagcaatttaatcaattgcaaagcaattatataaaaccmcaaagaatgtactgaacctactaaccctttaacatacagtttagggtcctagcgcagagtccttgtttaaaggtcattgactcatcatctgtcagtaatgagaggattggaagaataattttgcatacaaatgaggacttaatttgttgaaatataatctctttaagttccttgaaaatggagttggttttttttgtttctaaatgctatctgcttttaactagtagttgcctacatctggggacttcagagaagaattatattttgttagttaagtagacacagtggttatggaagcatttctttacagtaccctttacgtgtttggtttctgaacttaaaattgccctcatacttaataatatggtctgcatttaatatgaaaggtgttttattgataaatctattgtactatttggatacatttgtgtattccttgcagccaacctgtattcgtgggattggtgtagggttaaatcatcaacattatttcataaaataagaatttgttctgtgttatctaaagatgtatcagtatattgtcacagttgtgctgttaactaaaaatgctgagacccctttttatagaaaaacaaaaagacatcaagtcttcttaattcaacccataatcattaagtacttaacaaagaatattttacaagtgatagtatttcaacaatgtgtaattaatatttttgatacagtgatttcatattggaatcattatttgtgcaaagggacagacagatcacttagattgctatactagtggacataggctaaatgtttgcacattcacattcttatcacgtgtagaatacttcacaaaatagtcaacatctaaggccctaatttatgttttgaaagatcatgtgttcccaaagtattccctattgttggctccacagccttaaagtgctatagatttaaattcattgattagttttaatttttaattttagactgtgtatttccataaataccctacgtactggcatatttgaaactctttttccaggttaggtccttttctttctcattgaatcatcttaaatagttcttggccctgaatttagctgatttaaaattcttaatattcaagaatttatacttattttttccttaaaagccacaggggacagttaaatatcttaaaatatctaaaacattttttaaagcacttagattgtcttacgtatgtgcatactatacctttacagcgtttattgtcttgtctcttgtcagtagaccttcagtacacagtatgtgggatatgtcagtcaagttggtcagcaccagcatctgtccagctgttcagtatattgtgattcattaaaaaatctcttctatcccagacatgggccaaggtgctgtatctgagggatgtgctgtaatttgatttacatgcattagagcacacagtagaaaaacgttagcttcattagtaatatgacacatgtatatagtgagatgtctttattgtgtgctttgcatattttgtaaatattttgcacgtcattatttttcttttttgtttaagcagtgtttggcctggaagagtgatatgcttgctgcttaatcaaaggattaaagatttaaagatgtctatgtcttctatttttatataatttcatgttctatgaggaatttagtacctcttcactgtgaaattcgaaataatgatttttataaaagcaaaactagaaatcttttaatgacaattttcattaatttcagggttatcatttttgagaaatctacaccaaagtggttttttaaaattacataactaaaaataaaccacactgtggatacatcttataaaactaatggaaacaatgtttttctatatgatttaattctagtgtaatatggatgaggtaagagtaagttatgatcaaactttttatgttcttaataagcttgcaattgagtaaaatagaatataaaataaaggtgaaataatataaaraaa

SEQ ID NO: 656 - DNA, 934 bp, Homo sapiens
gcggccgccctttttttttttttttttttttttttttttttttttttttttctgaagaagcatttattagcatgcagggcccatgctagaggctccttatttccagggcaaggccagcgagacagagcccattgctcaggacgcagcccagattgcaaagagaggacagcccatggtagcggaagaaattctggcggagagcactgtacttggggtccttctctcgcagctggcggtagggatcgggaccctggtggctgcctggtacctccccacccaggcctcgctccttctccacggtttgcagggcccacatggcagctgtggtgcggggttccagccagcgggcgttgacagtggccagcgtaaggctcaggaacagcaggtaaagctggctggcctcccagaatgtgagctgagcccaagcatgctgtgaagccaagatgcagaggttgatgaaggcacagcccatggagatgtggaagtagaaggggaagagtttgctctgcactagtccgaaggtatgtcggggaaggcttcggaaaagcaggaagcctgagacgaaggtcacccacatttgcatgccccaggcacctgacaagaccagtagatggaccatcttaatcaggcctcctaggttcccgccttcctccatcttgcagtcctgggaaggaggcaccgggtggctcagaactttacctttgcctcatgcgtggccttcagaccctgtgagcccgctcggggacagggttacggccaatccagcagagattcgttaggaaccgggacctcaatccgcagcacccggattccgagaacagaggcgtcggggccaaatgggctgaatctggtacctcactcccacgcccccgggtggacagcgaccctcctcggccgcgtcccctcgtgggtttcccccaaccaatactctgcc

SEQ ID NO: 657 - DNA, 460 bp, Homo sapiens
  misc_feature (450)..(450): n equals a,t,g, or c
gggggaattacaaaacctaaaatttccgccgttaaaccggcctcagcagcgcgaggtgctgcggcgctgcgtagaagtatcaatcagccggttgcttttgtgagaagaattccttggactgcggcgtcgagtcagctgaaagaacactttgcacagttcggccatgtcagaaggtgcattttaccttttgacaaggagactggctttcacagaggtttgggttgggttcagttttcttcagaagaaggacttcggaatgcactacaacaggaaaatcatattatagatggagtaaaggtccaggttcacactagaaggccaaaacttccgcaaacatctgatgatgaaaagaaagatttttgagactgcagcctattaataaagttaacataactgaraaaaaaaaaaaaaaaaaaaaaaaaaaaaaaaaaaaaaaaaaaaaaaaaaaanaaaaaaaaaa

SEQ ID NO: 658 - DNA, 1613 bp, Homo sapiens
  misc_feature (1588)..(1588): n equals a,t,g, or c
atgatacgccakctygaaattamccctcactaaagggaacaaaagctggagctccaccgcggtggcggccgctctagaactagtggatcccccggkytgcaggaattcggcacgagccacagtcgaaaaatcccaaggcccaaacctgcaccactgactgctgaaatacagcaaaagattttgcatttgccaacatcttgggactggagaaatgttcatggtatcaattttgtcagtcctgttcgaaaccaagcatcctgtggcagctgctactcatttgcttctatgggtatgctagaagcgagaatccgtatactaaccaacaattctcagaccccaatcctaagccctcaggaggttgtgtcttgtagccagtatgctcaaggctgtgaaggcggcttcccataccttattgcaggaaagtacgcccaagattttgggctggtggaagaagcttgcttcccctacacaggcactgattctccatgcaaaatgaaggaagactgctttcgttattactcctctgagtaccactatgtaggaggtttctatggaggctgcaatgaagccctgatgaagcttgagttggtccatcatgggcccatggcagttgcttttgaagtatatgatgacttcctccactacaaaaaggggatctaccaccacactggtctaagagaccctttcaacccctttgagctgactaatcatgctgttctgcttgtgggctatggcactgactcagcctctgggatggattactggattgttaaaaacagctggggcaccggctggggtgagaatggctacttccggatccgcagaggaactgatgagtgtgcaattgagagcatagcagtggcagccacaccaattcctaaattgtagggtatgccttccagtatttcataatgatctgcatcagttgtaaaggggaattggtatattcacagactgtagactttcagcagcaatctcagaagcttacaaatagatttccatgaagatatttgtcttcagaattaaaactgcccttaattttaatatacctttcaatcggccactggccatttttttctaagtattcaattaagtgggaattttctggaagatggtcagctatgaagtaatagagtttgcttaatcatttgtaattcaaacatgctatattttttaaaatcaatgtgaaaacatagacttatttttaaattgtaccaatcacaagaaaataatggcaataattatcaaaacttttaaaatagatgctcatatttttaaaataaagttttaaaaataactgcaaaaaaaaaaaaaaaaaactcgagggggggcccggtacccaattcgccctatagtgagtcgtattacaattcactggccgtcgttttacaacgtcgtgactgggaaaaccctggcgttacccaacttaatcgccttgcagcacatccccctttcgccagctggcgtaatagcgaagaggcccgcaccgatcgccttyccaacagttgcgcagcctgratggcaatggcaaattggaagcgttaatattttggtaaaattcgcggtaaattttggtaaatcagctcantttttaaccatagggccgaaatcgg

SEQ ID NO: 659 - DNA, 1613 bp, Homo sapiens
  misc_feature (11)..(11): n equals a,t,g, or c
  misc_feature (29)..(29): n equals a,t,g, or c
  misc_feature (127)..(127): n equals a,t,g, or c
  misc_feature (791)..(791): n equals a,t,g, or c
aaatttttttngccagcctaaggggggancaattaaggaaacccaaagcccaaacccccggccatccatcacaaaggcaaccttgggagagtaattattttggggtgcccttaacaactgtcgtgantccagagaagccgatccccattttttattgaaagatgtattgagtaacattgaagccacaggactgagcacggaaggcatctaccgggtcagcgggaacaagtctgagatggagagtctgcagagacagtttgatcaagaccacaacctggacctggcagagaaagactttacggtgaataccgtggctggtgccatgaagagctttttctcagaactgcctgaccccctggtcccgtataacatgcagatcgacttggtggaagcacacaaaatcaacgaccgggagcagaagttgcatgcccttaaggaggtattaaagaaatttccaaaggaaaaccacgaagtcttcaagtatgtcatctctcacctaaacaaggtcagccacaacaacaaggtgaatctcatgaccagcgagaacctctccatctgcttctggcccaccttgatgagacctgatttcagcactatggacgccctcacagccacgcgcacctaccagacaatcattgaactctttatccagcagtgccccttcttcttctacaatcggcccatcaccgagccccccggcgccaggcccagctccccctctgccgtggcttccaccgtccccttcctcacttccacgcctgtcacaagtcagccgtcgcccccacagtcgnctccacccaccccccagtccccaatgcagccactgcttccctcccagcttcaagccgaacacacgctgtgagccaccaagacctggggcgacaggagaaccggtcctctctctgacggggtggcatttggccttgaacaaaaccaagtccactggggacagaggcaggggcaagtggctctccccattaccttctcaagacctcagtgggagcaccagccaatggtaccatcggctgggctgccaggtaccctgggcctggcgctgcagacctgagctggcttggacccatttgaggactgaactaggcaggcaatggctccagtgccctccctctgttccctggaccaccaccccacgtagctgctcacaccagcctccgggtgcctccctctgcttgtacagagcccatggtcgggacagtgccctggcctttgccggggaggaggatgctctgagattcagggtggggctggcaacccctgaagagaacacttcctgttggtctgtctcttcccaccttccatctgcacacacccccaaggtaagggtacagcccggctggcggcctccttgggaacgtgtaggccacggctctgccaccactaggtacctgctgagggcgctggctctgcagatcagaacaacggaggatagctttgtgcctggacccagagagtgtgggactccccgcttcatccccaccgtcccactccacagccttcccgaaacattccctggcaaacaaaggaacactaggagaaaaaatggaaaaacccttccagtaattaaaaaggaagaaaccacagaaagaaaaaaaaaa

SEQ ID NO: 660 - DNA, 1032 bp, Homo sapiens
  misc_feature (804)..(804): n equals a,t,g, or c
  misc_feature (905)..(905): n equals a,t,g, or c
  misc_feature (928)..(928): n equals a,t,g, or c
  misc_feature (933)..(933): n equals a,t,g, or c
  misc_feature (1007)..(1007): n equals a,t,g, or c
gctgcgagaagacgacagaaggggctctcccctcgtccaccgctgccgcctccttcttctgccgctcctggtgctgcttgtgtgctcgtttggtgcggacctggtacctcttttgtgaagcggcagctgaggagactccggcgctcgccatggccgacgaaaagcccaaggaaggagtcaagactgagaacaacgatcatattaatttgaaggtggcggggcaggatggttctgtggtgcagtttaagattaagaggcatacaccacttagtaaactaatgaaagcctattgtgaacgacagggattgtcaatgaggcagatcagattccgatttgacgggcaaccaatcaatgaaacagacacacctgcacagttggaaatggaggatgaagatacaattgatgtgttccaacagcagacgggaggtgtctactgaaaagggaacctgcttctttactccagaactctgttctttaaagaccaagattacattctcaattagaaaactgcaatttggttccaccacatcctgactactaccgtatagttttctctattctttcatttcccccttccccattcctttattgtacataaagtaactggtatatgtgcacaagcatattgcattttttttttttttaactaaacagccaatggtatgttttgattgacatcaagtggagacgggatggggaaaaatactgattctgtgaaaataccccctttctccattagtggcatgctcattcagctcttatctttatattccagtaagttattttgctctcactgttttaacnaaaaaaaaaaaaaswcttaawacagccggagctatcattaggaggtaatacatgcatgcggcgttcagcggactgaaacctggtacgataacttggatcgnttttggggtggagtggggggagnatggngtggaggctacctgggcgggggggtgcgggtgcaccacctctcttcttgtgcagagggctcaaccaagaggccnggtagtgcaagagttgaaagccgta

SEQ ID NO: 661 - DNA, 1206 bp, Homo sapiens
  misc_feature (48)..(48): n equals a,t,g, or c
ggggccccaccggggcacgacgcgctttagaactagtgccccgggctncggagggccctcctggacccgggagcggaccctggtggcggtgaagcccgatggcgtgcaacggcggctcgttggggacgtgatccagcgctttgagaggcggggcttcacgctggtggggatgaagatgctgcaggcaccagagagcgtccttgccgagcactaccaggacctgcggaggaagcccttctaccctgccctcatccgctacatgagctctgggcctgtggtggccatggtctgggaagggtacaatgtcgtccgcgcctcgagggccatgattggacacaccgactcggctgaggctgccccaggaaccataaggggtgacttcagcgtccacatcagcaggaatgtcatccacgccagcgactccgtggagggggcccagcgggagatccagctgtggttccagagcagtgagctggtgagctgggcagaygggggccagcacagcagcatccacccagcctgaggctcaagctgcccttaccaccccatcccccacgcaggaccaactacctccgtcagcaagaacccaagcccacatccaaacctgcctgtcccaaaccacttacttccctgttcacctctgccccaccccagcccagaggagtttgagccaccaacttcagtgcctttctgtaccccaagccagcacaagattggaccaatcctttttgcaccaaagtgccggacaacctttgtggtgggggggggtcttcacattatcataacctctcctctaaaggggaggcattaaaattcactgtgcccagcaaaaaaaaaaaaaaaaaaaaaaaaaaaaaaaaaaaaaaaaaaaaaaaagaaaaaaaaaaaagaagaaaagagaagataaaaataaatgaggttagagggaaggagatgagaagaagaacgtagaaaagaagagagagtcgaagataagaggtcagtaaaggacatgaaggataacatggggtaggggtggagttgataagacgggattgtcagacgtggagtatgtgatgaaaaagagttgatgtggagaaaaagttagatggagggtagtgttgagtggaacgggcttgctgcccatgagaatgggggagacagaagcatgtatggtcggcgcacgtcaatgtgacgaggagtgtcatgggaatttgtgacaggtgt

SEQ ID NO: 662 - DNA, 1617 bp, Homo sapiens
tcgacccacgcgwaccctgaaccctacggtcccgacccgcgggcgaggccgggtacctgggctgggatccggagcaagcgggcgagggcagcgccctaagcaggcccggagcgatggcagccttgatgaccccgggaaccggggccccacccgcgcctggtgacttctccggggaagggagccagggacttcccgacccttcgccagagcccaagcagctcccggagctgatccgcatgaagcgagacggaggccgcctgagcgaagcggacatcaggggcttcgtggccgctgtggtgaatgggagcgcgcagggcgcacagatcggggccatgctgatggccatccgacttcggggcatggatctggaggagacctcggtgctgacccaggccctggctcagtcgggacagcagctggagtggccagaggcctggcgccagcagcttgtggacaagcattccacagggggtgtgggtgacaaggtcagcctggtcctcgcacctgccctggcggcatgtggctgcaaggtgccaatgatcagcggacgtggtctggggcacacaggaggcaccttggataagctggagtctattcctggattcaatgtcatccagagcccagagcagatgcaagtgctgctggaccaggcgggctgctgtatcgtgggtcagagtgagcagctggttcctgcggacggaatcctatatgcagccagagatgtgacagccaccgtggacagcctgccactcatcacagcctccattctcagtaagaaactcgtggaggggctgtccgctctggtggtggacgttaagttcggaggggccgccgtcttccccaaccaggagcaggcccgggagctggcaaagacgctggttggcgtgggagccagcctagggcttcgggtcgcggcagcgctgaccgccatggacaagcccctgggtcgctgcgtgggccacgccctggaggtggaggaggcgctgctctgcatggacggcgcaggcccgccagacttaagggacctggtcaccacgctcgggggcgccctgctctggctcagcggacacgcggggactcaggcycagggcgctgcccgggtggccgcggcgctggacgacggctcggcccttggccgcttcgagcggatgctggcggcgcagggcgtggatcccggtctggcccgagccctgtgctcgggaagtcccgcagaacgccggcagctgctgcctcgcgcccgggagcaggaggagctgctggcgcccgcagatggcaccgtggagctggtccgggcgctgccgctggcgctggtgctgcacgagctcggggccgggcgcagccgcgctggggagccgctccgcctgggggtgggcgcagagctgctggtcgacgtgggtcagaggctgcgccgtgggaccccctggctccgcgtgcaccgggacggccccgcgctcagcggcccgcagagccgcgccctgcaggaggcgctcgtactctccgaccgcgcgccattcgccgccccctcgcccttcgcagagctcgttctgccgccgcagcaataaagctcctttgccgcgaaaaaaaaaaaaaaaaaaaaaaaaaaaaaaaaaaaaaagg

SEQ ID NO: 663 - DNA, 356 bp, Homo sapiens
gacggctgcgagaagacgacagaagggggcattgcgcgcgacccggcggcgggacaggcttgctgcttcctcctcctcggcctcaccattccagaccaaaattgaaaaaatggttgacctcacccaggtaatggatgatgaagtattcatggcttttgcatcctatgcaacaattattctttcaaaaatgatgcttatgagtactgcaactgcattctatagattgacaagaaagagcccacctgaatgaccttgaaaatattattccatttcttggaattggcctcctgtattccttgagtggtcccgacccctctacagccatcctgcacttcagactatttgtcggagcacgg

SEQ ID NO: 664 - DNA, 974 bp, Homo sapiens
gcctgcgtccggcccgcgcggccacagtccctgcattgcgcgcgacccggcggcgggacaggcttgctgcttcctcctcctcggcctcaccattccagaccaaaattgaaaaaatggttgacctcacccaggtaatggatgatgaagtattcatggcttttgcatcctatgcaacaattattctttcaaaaatgatgcttatgagtactgcaactgcattctatagattgacaagaaaggtttttgccaatccagaagactgtgtagcatttggcaaaggagaaaatgccaagaagtatcttcgaacagatgacagagtagaacgtgtacgcagagcccacctgaatgaccttgaaaatattattccatttcttggaattggcctcctgtattccttgagtggtcccgacccctctacagccatcctgcacttcagactatttgtcggagcacggatctaccacaccattgcatatttgacaccccttccccagccaaatagagctttgagtttttttgttggatatggagttactctttccatggcttacaggttgctgaaaagtaaattgtacctgtaaagaaaatcatacaactcagcatccagttggctttttaagaattctgtacttccaatttataatgaatactttcttagattttaggtaggaggggagcagaggaattatgaactggggtaaacccattttgaatattagcattgccaatatcctgtattcttgttttacatttggattagaaatttaacatagtaattcttaagtcttttgtctgatttttaaagtactttcttataaatttggatcatgttatgatttgtaacattcacacaacacctcacttttgaatctataaaagaattgcacgtatgagaaacctatatttcaatactgctgaaacagacatgaaataaagaatttaaagaatgaaaaaaaaaaaaaagggcggccgct

SEQ ID NO: 665 - DNA, 529 bp, Homo sapiens
  misc_feature (38)..(38): n equals a,t,g, or c
  misc_feature (485)..(485): n equals a,t,g, or c
  misc_feature (527)..(527): n equals a,t,g, or c
tgatgttcctactagtcctgactgcttacacaaagtcntagtattatgttccaggcattttccaaggaaaacagttttacaatccaatacatcctggacaccagtgataagttgagtactgagctctttcaggacaaaagtgaagaggcttcccttgaccttgtgtttgagctggtaaaccagctacagtaccatactcaccargagaacggaattgaaatttgcatggactttytgcaaggcacttgtrtttatggcagggattgtttgaagcaccacackgtcttgccatatcattggcagatcaaraggacaactactcaaaagtggcagagtgtatycamtgattcycaggagcacttggaaagattttactgtaayccakaraatgatagaatgagaatgaagtatggaggacaagaattttgggcagatttgaatgccatgaacgtgtatgaaacaactgaatttgaccaactacgaangctgtccacaccaccctctagcaatgtcaactttatttaccnca

SEQ ID NO: 666 - DNA, 4091 bp, Homo sapiens
  misc_feature (3408)..(3408): n equals a,t,g, or c
  misc_feature (4051)..(4051): n equals a,t,g, or c
  misc_feature (4062)..(4062): n equals a,t,g, or c
aacaaggccgaacttttcacccararctgtkcagatctagacaaatggctkcacgscctggagagtcagattcagtctgatgactatggcaaagacctgaccagtgtcaatatcctgctgaaaaagcaacaratgctggagaatcaratggaagtgcggaagaaggagatcgaagagctccaaagccaagcccaggccctgagtcaggaagggaagagcaccgacgaggtagacagcaagcgcctcaccgtgcagaccaagttcatggagttgctggagcccttgaacgagaggaagcataacctgctggcctccaaagagatccatcagttcaacagggatgtggaggacgagatcttgtgggttggagagaggatgcctttggcaacttccacggatcatggccacaacctccagactgtgcagctgttaataaagaaaaatcagaccctccagaaagaaatccaggggcaccagcctcgcattgacgacatctttgagaggagccaaaacatcgtcactgacagcagcagcctcagcgctgaggccatcagacagaggcttgccgacctgaagcagctgtggggtctcctcattgaggagacagagaaacgccacaggcggctggaggaggcgcacagggcccagcagtactactttgacgctgctgaggccgaagcctggatgagcgagcaggagctgtacatgatgtcagaggagaaggccaaggatgagcagagtgctgtctccatgttgaagaagcaccagatcttagaacaagctgtggaggactatgcagagaccgtgcatcagctctccaagaccagccgggccctggtggccgacagccatcctgaaagtgagcgcattagcatgcggcagtccaaagtggataaactgtacgctggtctgaaagaccttgctgaagagagaagaggcaagctggatgagagacacaggttattccagctcaaccgggaggtggacgacctggagcagtggatcgctgagagggaggtggtcgcagggtcccatgaactgggacaggactatgagcatgtcacgatgttacaagaacgattccgggagtttgcccgagacaccgggaacattgggcaggagcgcgtggacacggtcaatcacctggcagatgagctcatcaactctggacattcagatgccgccaccatcgctgaatggaaggatggcctcaatgaagcctgggccgacctcctggagctcattgacacaagaacacagattcttgccgcttcctatgaactgcacaagttttaccacgatgccaaggagatctttgggcgtatacaggacaaacacaagaaactccctgaggagcttgggagagatcagaacacagtggagaccttacagagaatgcacactacatttgagcatgacatccaggctctgggcacacaggtgaggcagctgcaggaggatgcagcccgcctccaggcggcctatgcgggtgacaaggccgacgatatccagaagcgcgagaacgaggtcctggaagcctggaagtccctcctggacgcctgtgagagccgcagggtgcggctggtggacacaggggacaagttccgcttcttcagcatggtgcgcgacctcatgctctggatggaggatgtcatccggcagatcgaggcccaggagaagccaagggatgtatcatctgttgaactcttaatgaataatcatcaaggcatcaaagctgaaattgatgcacgtaatgacagtttcacaacctgcattgaacttgggaaatccctgttggcgagaaaacactatgcatctgaggagatcaaggaaaaattactgcagttgacggaaaagaggaaagaaatgatcgacaagtgggaagaccgatgggaatggttaagactgattctggaggtccatcagttctcaagagacgccagtgtggccgaggcctggctgcttggacaggagccgtacctatccagccgagagataggccagagcgtggacgaggtggagaagctcatcaagcgccacgaggcatttgaaaagtctgcagcaacctgggatgagaggttctctgccctggaaaggctgactacattggagttactggaagtgcgcagacagcaagaggaagaggagaggaagaggcggccgcttctcccgagccgagcacgaaggtttcagaggaagccgagtcccagcagcagtgggatacttcaaaaggagaacaagtttcccaaaacggtttgccagctgaacagggatctccacgggttagttaccgctctcaaacctaccaaaactacaaaaactttaatagcagacggacagccagtgaccagccatggtctggactgtgaagttcactaccatttgtcaagaatcaccctttccaaatcctctgggttttgactttttggcttccacttcacccaaaatgttaaaatttttacttaattcatagccttccttggtttcatatttgtttgcatttaattcatgtttgagtctcttaactgatggatgcccacttgccttaaagcagcatacttattttttgtttatttattgtgagctttttactttattaagattttacagcgaaacccttacatgagtaattgaaatgaaattaaatgagattacagcataatgaagaagaaaactagaatctaacaggtatgacacattcagttattctaacagggcacagtactgtgctatatgtagccgcctttacagatgttattaacctatagtagtttactattaactaggaagactggtgtatgaggagggagacattctgtaataagattaaaacctaaagtcagctgtgtaacattccatgaaagatgcattcatttattgaagatgacaaaaaagggagtcagatatattctggaagctattttaattttaggcacacaatctcatacattttgagacccttgggtcatttattactttttacaaactagttcctctctttttttctgccaagtcctgaattgaaaactgtaggcttccttgcacagatgttgcagccagcctcaggagtaaagtgcccgctgactgctgccgccacctctgtctcgctccctgtcagtgctgctggcacgtgggacgcggcaggtgacagccgttctcagcatgttttagaagcttgcctcacagacttccatgcctctccattcagccgatgacttcagggtgtcaaactgttttaatttttcaaacaaatggaacagaagccattgtggttcatcctgattacttgaacgttgcacttggtggaccgtgcctgggagcgctcgcatgccccctggcttcagaagtcatgtcagtgtctctgtagacaaactccactgtacatcttggattaatcytctgattcantgttcattttctcaagactttttgtggaattctctgataaaggaagcttttaggatggtatctatcaggccaccagcaggaattgaaaatgttttcacaaaaatccttttccttagaaataaaagctggtgacagagatggtttccttgtaccgataaaaacaaaaccaaatccatattatacatcaaaaccttgtgagacattcacttgctcttttgccatatttagatgtgttagtggaatcagaaacctgttttgatatgtgttctccatgagttaagtctgatttgtctttttatttcatgatgcatgtctttttttttcttttgtcaggataacgtcatatagcatcttgtttgtttttccttatctctatgtacatatctatctacttctgactgtagatgggtatatagatagatgccaagcttcttatgttctgggggtagtatgcatcattattgggtctctgccttaaaacacatcaaaattcattttagacaaaaaaacttctgcyttgkctttggtcattagggagctctaatgkgtgtttgtggctccaagttacattttgtggtttccattgatctatatgtatatatgtgatggttttccataatataataaggggtggtggtggttnaaattttgggnatccatcagggacctgacaccccaatttt

SEQ ID NO: 667 - DNA, 2536 bp, Homo sapiens
agcaaatgtccatgaatatgagagaattgaaaataatacaataaaggattttgtacatcccttatcagtggagaagcctggaagatttagctagccctgaatgtgcaattgactgtatgattttaatgaaggttcctatccccacccccaggatgaaaacaccgttcttcatctttaacctggcagaaactgctcacatgccttcaaaagtgaaagctcaactctacgctcaagcatatgacctttataaggagattgtctatttacaaaaggagcacccagtgaattggcacaagaactatgccatcgcctgtgagcggatgctgcgtcttcaggcaagagatgcagatcctgaagtgctgttatcggaaaccatcagacatttccgtctgtactctcagaaagcaccgaatgacccacagcaagctgatattttaggtgctctaaagcacctaagaaaagaactgcaaagtctgagaaataggaaaaatgtctgagacagcaaaatatgaaaaacctgctcatcgttcagcttccaaaattctgaagtctggaagtttttccttcaagaaaagaaactgcataaaaaatttaaaactaagtcatctcccagatataagtatcatggtccagcagtactgtttaatggggtattcagtgactaaggtctgctatttatgcaaaattctgtttatcccgtgttaccaaattaccatttcagtgagaagcttttgaaaagtcttctgacttccagtctttcaccagatgactgcactggattagattctagaagagaatgaaccattttcatataactaaatattggtcatgaactgtgtaagggccatgcttattgggatcagttttaaagttaaattcttttgatattaataccagaccaaagacattttctgtttcctggaaaaaaaaaatgaatcatgttaggctttaggtgagagtacattttttacaaagtagctatagttgttacatagtcttacacttcaagctaaacaccaaatgggtgatattttgaaaaaagtttgtgttttactgtcttagatcgttcttggaaatcactaaaaaaaaaaaaagttaatttgatgtttgcttatttcagttgcagaaactggcgagtaaaaaagattttgcatttacttaattaattttatatttatgttttatttctatttggactcagagatctagacccaataattagtaggctcctgctgccaaaatgcaaaggggaaaaaaaggcagggattgggggggatggggaagtggcccaataaattcatttctgttacaagcatcttttatacatattactaaagagaacatagtaagaaatgcaaataatagttctttattttattatgacagttaattaatagcaacctgttttaatgaataaagtcactcagagtccttcagcacttcctaagtagaggccagaatctgtagggcttcttttccccccaattgtatagctcctagactccaagcactatataggcccctgtatagaaatgctcactaatgaagagggagggctagaagcttgtctgcattcaaagatcactggtgagtcattcagcaagaaaaggccccttaccaggaatagtcacagttccgtggcattgtactagcaaaagggtctgatcaaaggtctcctgtggagcttgcatggttccctttcatactacgaccataattaaaaccactaattctcttttaaaatgctgcaggatgccatgtaggcatctgtctggagtgtcctttgtgatgtcataagctgttaaggaccagtgccgagggcttttgagtgaaatgccagtcatgaaggtgcttcaagacaagggtgcctctaaaagcttgacagggccttgactgcacaattcgagctgaatttgccccttgtcagctgccagtaaataaatctcaaagggggaaaagctgaagtttcattacctgatccatggggctttgttggttttggcatcacacaggggaagctcttgcccctccattctctggatttgaagatgtccattggagcctgcagtgcctggacagggttcagagcggaaccttttgaagagtgtcaatagttgtaacagttcagctgttaggaagacaaataaatggaggagctcattaatccgcttttggctctcagtgccttttgcccttttatcacagccttattaggctcctactcatcttgaaccagaaaaaaatgaattgaagttgttgagtactaattggcaaagacttttaatcatgggccaagaactttcactgacttgaaagtaacttctccacagggaaggaccaaaaacctggtttaccttaaaacaaaaacctgttggagttcagcgtggtgtaaaaatgtaaggaagcattgataaattgtctaagtttatccatttgaaagaaattgtgtaagattatgatattctcttttctttaaaaaaaaaagtacaataaaattcaaacattccttaggaaaaaaaaaaaaaaaaaaaaaaaa

SEQ ID NO: 668 - DNA, 2991 bp, Homo sapiens
agccgcgcgccgtgcccgccgaccccacaggaaggcctggacgacggcccggacttcctctcagaagaggaccgcggacttaaagcaataaatgtagatcttcaaagtgatgctgctctgcaggtggacatttctgatgctcttagtgagcgggataaagtaaaattcactgttcacacaaagagttcattgccaaattttaaacaaaacgagttttcagttgttcggcaacatgaggaatttatctggcttcatgattcctttgttgaaaatgaagactatgcaggttatatcattccaccagcaccaccaagacctgattttgatgcttcaagggaaaaactacagaagcttggtgaaggagaagggtcaatgacgaaggaagaattcacaaagatgaaacaggaactggaagctgaatatttggcaatattcaagaagacagttgcgatgcatgaagtgttcctgtgtcgtgtggcagcacatcctattttgagaagagatttaaatttccatgtcttcttggaatataatcaagatttgagtgtgcgaggaaaaaataaaaaagagaaacttgaagacttctttaaaaacatggttaaatcagcagatggagtaatcgtttcaggagtaaaggatgtagatgatttctttgagcacgaacgaacatttcttttggaatatcataaccgagttaaggatgcatctgctaaatctgatagaatgacaagatcccacaaaagtgctgcagatgattacaatagaattggttcttcattatatgctttaggaactcaggattctacagatatatgcaagttttttctcaaagtttcagaactgttcgataaaacaagaaaaatagaagcacgagtgtctgctgatgaagacctcaaactttctgatcttttaaaatattacttaagagaatctcaagctgctaaggatctcctgtatcgaaggtctaggtcactagtggattatgaaaatgctaataaagcactggataaagcaagagcaaaaaataaagatgttctacaggccgaaacttcccaacaattatgttgtcagaaatttgaaaaaatatctgagtctgcaaaacaagaacttatagattttaagacaagaagagttgctgcattcagaaaaaatttagtggaactggcagagttagaactgaagcatgcaaagggtaatctacagttgctgcagaactgcctggcagtgttaaatggagacacataagccacactccgccttcctgttaaaaagggctgccttccttcaaattttatttttgttttcttaatgatgttaagcatttatgctcactggaaacaaacaaaaagcagctgaaaaagtgcatcaactcctctttttctgagaaacatggagcagcgcacgcccaggcgatgccagtctgtgtgccgtgatgccgcactgtgttccccatgacagtggtccatcatcgtgcactcgtcatactcagaagtccaaagttcattcttctttaaagtagcctctataactctgtttattttataaatagtattccttatggctgccactcttatttacctttaaataatttctgaaatttaaccttttcagaatgcattgttgaaacaagataaagattgccttttttgaattttttaaattttgtttttaaaagcatataccaccttagttcattcatgtatcctggtaaagcatcttaatcagacttatttttaattactgaatatttcttagacgttttgggacagattttatgtaatctttataagtatgatttctgaagaaaagcaaatgcattagtatgtttgccttaaacttgtagactaaaccaagtattgtaaaataaacagcgataacagtgatagtttttaactctatggtcattgtatcactctggaaaatgtggagtagctgtaataaatctactcctgtattatgctttacagtgcaggtcttagtttttcttttttctcatttcttttgaaatggcatctcgaacaaagtccaccaatccctttacaaaagaatgaactgctcctctgtgtgtacttcatagaaggtggaatcggacagaggcaggttagtgacagttattcctgaaatacaggagcagagtacagtctgttgtggtttcccggattccgcgcctagctcagccaattaagcatgagacataggccattgagccacttagtagttatgcgagtggatagattggtatgtagagggaaagaggtctgctgtaaagaacaacacttgtttgtctgtggggaaagaaaagcagaatacttgagatgaaagttggcatacaaataggatactatcgccagtagttatattacaaacattatcggcctttctagtgtgaatgaacattagacacattattgtcattcctagtttaaagttaaggttgcgtggttggatttttccactatctttttctaatttttctaccatttggagaccgtaggcatttgggcctgtcaccccttggatgggttcctagtttgtttacattttcctgaaccctcctgagcgcccgttcttggtctaatccccagtcgtgatgattccacacttcctcagccgcatgttgtcttgcctcattcatgagctggtcagcgtttcgtctctttaactgacatgttccccagtgctgtttgaactgttgagtttccgttgctggctgagtgcgttttgtccttcacgtaaccttcgctggtaaaaataagcccatgtgatgtccaccagtggatgaatgctggaccgagagccctagcttctggatccaggtctaggcccttcatctgctgctctgtggcccagggcaggtttgcttgacctctgcctcagttctcgactctaaaggacatactgacctacctcacaggggtgttgtgaggattaataaatgttggtactctgctttggaaaaaaaaaaaaaaaaaaaaaaaaaaaaaaaaaaaa

SEQ ID NO: 669 - DNA, 1238 bp, Homo sapiens
gttggacaccacgcacagagacacggcaggccccgtgttggccgggggtaggggtgggggcagaaccagccgagggacaccacgcacagagacacggcaggccccgtgttggccgggggtgggggtgagggcagaaccagccgagggacgctgagtcagaccgcttgcccactgctctggtgcagggacctggctgcaggtgctggagaccatcggtgtgctggcggtcattgccaatgggatggtcattgccttcacatctgagttcatcccccgagtggtctacaagtaccgctatagcccatgcctgaaagaaggcaactctactgtcgactgcctcaagggctacgtcaaccacagcctgtccgtcttccacaccaaggacttccaggaccctgatgggattgagggctcagaaaacgtgactctgtgcagatacagggactaccgcaatccccccgattacaacttctccgagcagttctggttcctcctggccatccgcctggccttcgtcatcctctttgagcacgtggccttgtgcatcaagctcatcgccgcctggttcgtgcccgacatccctcagtcggtgaagaacaaggttctggaggtgaagtaccagaggctgcgtgagaagatgtggcatggaaggcagaggctgggtggggtgggggcaggctctcggcccccaatgcctgcccatcccaccccagcatccatcttcagtgccaggagcacagacgtgtagggccagagcccgtccagaggccaccaggagctgagacagtgccaccaccagcacctcccacaagcccaccgctgtgcgtgttgaggggtgctgtgagaaggctgtgcccatgtggggccgcaggaatcccctgtatgttcagggctgtgagctgccaccctattccgcctgctccgtctttgtgggggctctcaggcttggcacagccctgacttgaactctgggtgaccctgggcacccacagaactgggagtgagggctcctcaggcagccacaaggcaggaaaactggcgcaaatttcctgggcctccctctgacttctgggcgccagatcctgccgtgcccccatcctggctgttgggggtgtcctgagcccacctcgctggcctgttcccttcagccaacccgtttctgcagtaaaattaagcctgtcaaaaaaaaaaaaaaaaaaaaaaaaaaaaaaaaaaaaaaaaaaaaaaaaaaaaaaaaa

SEQ ID NO: 670 - DNA, 1611 bp, Homo sapiens
  misc_feature (1601)..(1601): n equals a,t,g, or c
gtgccgaaattcggcacgagggcggcctcagcgccggcccgaagaccaggccgccgtccccagcgagaggcatgcagcgctgaggagcggcgacccagcacggcggcgccatgaacctcctgccgtgtaaccctcacggcaacgggctgctctacgccggcttcaaccaggaccacggatgctttgcgtgtgggatggaaaatggattccgagtctataacactgatccactaaaagaaaaagagaaacaagaatttctagaaggaggagttggccatgttgaaatgttatttcgctgcaactatttagctttagttggtggtggaaaaaagccgaaataccctcccaacaaagtaatgatctgggatgacctgaagaagaagactgttattgaaatagaattttctacagaagtcaaggcagtcaagctgcggcgagatagaattgtggtggttttggactccatgattaaggtgttcacattcacacacaatccccatcagttgcacgtcttcgaaacctgctataaccccaaaggcctctgtgtcctttgtcccaatagtaacaactccctcctggcctttccgggcacgcacacgggccatgtgcagcttgtggacctggccagcacggagaagccacccgtggacattcctgcacacgagggtgtcctgagctgcattgcactcaacctgcagggaacaagaattgcaactgcatccgagaaagggacgcttataagaatatttgatacttcatcagggcatttaatccaggaactgcgaagaggatctcaagcagccaatatttactgcatcaacttcaatcaggatgcgtccctcatctgcgtatccagcgaccacggcacagtgcatatttttgcagctgaagatccaaaaaggaataaacagtccagtttggcctcagccagtttccttccaaaatacttcagttccaagtggagtttctccaagtttcaggttccctcaggctctccgtgcatttgtgcctttggaacagagccaaacgccgtcattgcaatttgtgcagacggcagctactacaaattcctgttcaaccccaagggggagtgcatccgagatgtctacgcgcagtttctagagatgaccgatgacaagctgtgactccagctgggggcgccacagcacccaccacctgccgccttcagactctcggggctggtgccagtgccccaggggcctcctgggccacgggctggaggggctgcccagggaccttggtctcgaagccatacgtggttgtctgctttcctaaggactcccatttccagtattaaagagagaatcatcatcaaggcaccgtaggtaactcagtggctgtgaccagctcgactggcggccactggctgttcccatgagttcagctgtgacgttagcttcagtggctccgcgcatcctcacactgacgggggctccatacggacctggggactgggctgagagggtggacgagttcaggtttgtttttgcagcarattccgtcsttcttactgaagtcttgmagcgggggarttraacaagtkttcaratgtaagttcttaacatgattaaggcagattnaattacaaca

SEQ ID NO: 671 - DNA, 1716 bp, Homo sapiens
  misc_feature (1697)..(1697): n equals a,t,g, or c
ctgccccctcctcgggggcaaaggctttgtgaccaagcagacgacgaagcatgtccaccaccactacatccaccaccatgccgtccccaagaccaaggaggagatcgaggcggaggccacgcagcgggtgcactgcttctgccctgggggcagcgagtattactgctactcgaaatgcaaaagccactccaaggctccggaaaccatgcccagcgagcagtttggcggcagcagaggcagtaccttgcccaaacgcaatgggaaaggcacggagccgggcctggccctgcccgccagggaaggaggggcccccggcggagctggggccctgcagcttccccgggaggaaggagacaggtcgcaggatgtctggcagtggatgctggagagtgagcggcagagcaagcccaagccccatagtgcccaaagcacaaaaaaggcctaccccttggagtctgcccgctcgtctccaggcgaacgagccagccgkcaccatctgtgggggggcaacagcgggcacccccgcaccaccccccgtgcccacctgttcacccaggaccctgcgatgcctcccctgaccccacccaacacgctggctcagctggaggaggmctgtcgcaggctagctgaggtgtcgaagcccccaaagcagcggtgctgtgtggccagtcagcagagggacaggaatcattcggccactgttcagacgggagccacamccttctccaatccaagcctggctccagaagatcacaaagagccaaagaaactggcaggtgtccacgcgctccaggccagtgagttggttgtcacttactttttctgtggggaagaaattccataccggaggatgctgaaggctcagagcttgaccctgggccactttaaagagcagctcagcaaaaagggaaattataggtattacttcaaaaaagcaagcgatgagtttgcctgtggagcggtgtttgaggagatctgggaggatgagacggtgctcccgatgtatgaaggccggattctgggcaaagtggagcggatcgattgagccctggggtctggctttggtgaactgttggagcccgaagctcttgtgaactgtcttggctgtgagcaactgcgacaaaacattttgaaggaaaattaaaccaatgaagaagacaaagtctaaggaagaatcggccagtgggccttcgggagggcggggggaggttgattttcatgattcatgagctgggtactgactgagataagaaaagcctgaactatttattaaaaacatgaccactcttggctattgaagatgctgcctgtatttgagagactgccatacataatatatgacttcctagggatctgaaatccataaactaagagaaactgtgtatagcttacctgaacaggaatccttactgatatttatagaacagttgatttcccccatccccagtttatggatatgctgctttaaacttggaagggggagacaggaagttttaattgttctgactaaacttaggagttgagctaggagtgcgttcatggtttcttcactaacagaggaattatgctttgcactacgtccctccaagtgaagacagactgttttagacagactttttaaaatggtgccctaccattgacacatgcagaaattggtgcgttttgtttttttttttcctatgctgctctgttttgtnttaaaggtcttgagggttg

SEQ ID NO: 672 - DNA, 1052 bp, Homo sapiens
  misc_feature (911)..(911): n equals a,t,g, or c
  misc_feature (942)..(942): n equals a,t,g, or c
  misc_feature (951)..(951): n equals a,t,g, or c
  misc_feature (985)..(985): n equals a,t,g, or c
  misc_feature (1030)..(1030): n equals a,t,g, or c
  misc_feature (1045)..(1045): n equals a,t,g, or c
gaatgctctcccagctcacccctgcccccgctgcctgaggatgaggaggtgggatgggtagtgggtcccagcccagcagcctggtgccagggcagtgggtggataggctcaaaggatcctgcccctaagctagtgggatagacagacacaggtccctcacgtgaatcctggatcaggytaggcacacagatgtgcactcttaggttggggtgtggatcagagtccctagggaagacatacgtaaccacytggcctgggagacagggaacagggttaccctggacagttagatgtggacctccaagatcaggggttcccaagagccgaggggctagacaagggtccttagtacagacagaagtggccaccaggccttgaggagcaggggctgggcaggaatggatgggagtctataagccatctgacccagcggggtagacaaggtccccaggacagacatataggacccttcagacatataggactgtcagaaatggacagagcttcctaggtggcacagacgtgaccccctagacaggattccctgaggcaggcagacgcgaytccytgggctgacaggtgtagatggagtctctgggctggatargagaagacaggggtccctkgggcargcacacttgaccccctggctggttgargtgtctgcccttcatamatgcctcctgtctgagtcccttagcgarcccctcatgccatttgttgctgggaaaggcaggagggatgaatgtggattcccagcccctctgctttgactctcttgggcctggcatggggcccttgtgtccccagggctcagaggtaaccaacagcaagagtcgtgatgtgtacaagctgccgscacccacacccccggggccaccggagatgcctgcagatcccgcatccatctncactgcacctgagatcagggcacccctgacnataaccctnttagcccgacccttaaccttcacactcatctatngcaacatgcacgcttgaaacgcattccccaaagtgacgtccccanctggttgccctctanggccttt

SEQ ID NO: 673 - DNA, 770 bp, Homo sapiens
gacccacgcgtccgcggacgcgtggcggctgttaagacctgcaataatccagaatggctactctgatctatgttgataaggaaaatggagaaccaggcacccgtgtggttgctaaggatgggctgaagctggggtctggaccttcaatcaaagccttagatgggagatctcaagtttcaacaccacgttttggcaaaacgttcgatgccccaccagccttacctaaagctactagaaaggctttgggaactgtcaacagagctacagaaaagtctgtaaagaccaagggacccctcaaacaaaaacagccaagcttttctgccaaaaagatgactgagaagactgttaaagcaaaaagctctgttcctgcctcagatgatgcctatccagaaatagaaaaattctttcccttcaatcctctagactttgagagttttgacctgcctgaagagcaccagattgcgcacctccccttgagtggagtgcctctcatgatccttgacgaggagagagagcttgaaaagctgtttcagctgggccccccttcacctgtgaagatgccctctccaccatgggaatccaatctgttgcagtctccttcaagcattctgtcgaccctggatgttgaattgccacctgtttgctgtgacatagatatttaaatttcttagtgcttcagagtttgtgtgtatttgtattaataaagcattctttaacagaaaaaaaaaaaaaaaaawaaattttaaagtggggtcaaaattcccccttta

SEQ ID NO: 674 - DNA, 1753 bp, Homo sapiens
  misc_feature (1706)..(1706): n equals a,t,g, or c
  misc_feature (1724)..(1724): n equals a,t,g, or c
gttgggacctccggctgcaggtccgcctgggccagagcgcgagcgcaagcagcgggttagtggtcgcgcgcccgacctccgcagtcccagccgagccgcgacccttccggccgtccccaccccacctcgccgccatgcgcctccgccgcctagcgctgttcccgggtgtggcgctgcttcttgccgcggcccgcctcgccgctgcctccgacgtgctagaactcacggacgacaacttcgagagtcgcatctccgacacgggctctgcgggcctcatgctcgtcgagttcttcgcyccctggtgtggacactgcaagagacttgcacctgagtatgaagctgcagctaccagattaaaaggaatagtcccattagcaaaggttgattgcactgccaacactaacacctgtaataaatatggagtcagtggatatccaaccctgaagatatttagagatggtgaagaagcaggtgcttatgatggacctaggactgctgatggaattgtcagccacttgaagaagcaggcaggaccagcttcagtgcctctcaggactgaggaagaatttaagaaattcattagtgataaagatgcctctatagtaggttttttcgatgattcattcagtgaggctcactccgagttcctaaaagcagccagcaacttgagggataactaccgatttgcacatacgaatgttgagtctctggtgaacgagtatgatgataatggagagggtatcatcttatttcgtccttcacatctcactaacaagtttgaggacaagactgtggcatatacagagcaaaaaatgaccagtggcaaaattaaaaagtttatccaggaaaacatttttggtatctgccctcacatgacagaagacaataaagatttgatacagggcaaggacttacttattgcttactatgatgtggactatgaaaagaacgctaaaggttccaactactggagaaacagggtaatgatggtggcaaagaaattcctggatgctgggcacaaactcaactttgctgtagctagccgcaaaacctttagccatgaactttctgattttggcttggagagcactgctggagagattcctgttgttgctatcagaactgctaaaggagagaagtttgtcatgcaggaggagttctcgcgtgatgggaaggctctggagaggttcctgcaggattactttgatggcaatctgaagagatacctgaagtctgaacctatcccagagagcaatgatgggcctgtgaaggtagtggtagcagagaattttgatgaaatagtgaataatgaaaataaagatgtgctgattgaattttatgccccttggtgtggtcattgtaagaacctggagcccaagtataaagaacttggcgagaagctcagcaaagacccaaatatcgtcatagccaagatggatgccacagccaatgatgtgccttctccatatgaagtcagaggttttcctaccatatacttctctccagccaacaagaagctaaatccaaagaaatatgaaggtggccgtgaattaagtgattttattagctatctacaaagagaagctacaaacccccctgtaattcaagaagaaaaacccaagaagaagaagaaggcacaggaggatctctaaagcagtagccaaaccactttgtaaaaggactcttccattsmgaacgtcatagcntctttctaatagggggtnaccctaaaattcaaattcaattggcccgt

SEQ ID NO: 675 - DNA, 2701 bp, Homo sapiens
aatgtagatacatattccctttacttttggaatcatagaccaacttccatttgtgacaatgactataatgtttgaaaactgattttcacaagtgtcttgtacaaataagctactgcagcagtttatagagatagttgggtgtgacaagtgccctgagtacacaaatttataatggctgagtggtcattccacactgtcactgcattacagaaaaaaactggatgcttgtcttgcatacaaatatgtagtgcattaaaaacactgagacctttttttcattttttttttattacatttggacctttaagaaacatataccatcagatataccactattcagtaaaaatctattctagtttttgggaagcttatgtgtcacaaactatcttgcttctagtctccaagactttactaagtttatcaaaaaggtgggctctggtctatgggatcctgagccttgaggtttggatgttctgattattgtaaaacaatttcaagtggattaacttaattcccagctgtttttcttctggaatgggctaatcagtttgaattatctagtccattacaagaatattaaattccttgagctttgtgatctattctgtctttggaaaacctggtaaaaaagtaattttttttctatacaataaggatggatttaccagaacatacccagtattaatcataacaaaaagcagtatagataatgtatatgtgctgtgttcactttaataaccacttcataagtaactactctaactatggggactatttctggatcagtaagatccaagtgtagttagttacacactacactcagcttaacacaactcttggtatctgacattgattaaaagtaaaaaagggtaagtgaacaaatacatactcatacatgatcacgtttttaagaagctaccctttgcagaagtaaacaagagaggagactttcaggaagctactgatggggactgggaaggtttaaagctatggctttggtaagcaccccagtgagctgtaggaaggcattgtaagagtagattctgcagcatcaaaggataattctctaaaagaggtgggtgttttctcaattaatctaaattctgcaggctttcagcagttgagggctagaaacaagatccaaagaaaagagccatcttcacaacacttaagaaaggtgactgcactgagccattaggctcatgatgctaaatggtccaaaagcctttggtggtgtgatatggacaagaaaaaaaattaatacacaaaccacgtaacaccattaaaaccaaaaaacattttttcattaaaaaaagtatttagaacacacaaaacaaggcaacacttattcttttttctcatcttctggtatgggatctgttggtggctcctccactgttgcactgttgctctccgagccagtgttactatcactggttccttcctctgccatactgtcgaccccctcctgcccactctccttgtcctcaggagtagacgtgccttcttcaccattctgttggctctctgttgtttcttcaaggtgtgtctcctctgtctccatcggaatgttctcgtcgtctttcttctcctcgcctttgttagctgcttgttcttcctcaggaacgatgctgctctgactgcgctcagcttgctctgcggcctccttctccctttcctcctgccttttgcgggcctgttcctctgcctgtgcaatctcagctgcaattttctccatatccacttctactttcagaccgcacaaccttttaagttcattgttaaatgaatctgtgctttccaggaatttcctcttcttctcctggtgtcgttcctctatttgaagaagttcagcttctagttttcgctgatgaaccattaaggactggacctgccgtttgaggacctgcattctagctgttgtgacaactgaccgaacgtctggcaccacactctcactaagaatttcactgatgaggcggtggtttctctggaaacgggcggtggctgtatgcttcattgaaaagccatcatcataatcatctggatcttcagcaggctgaatgctcatgtacggttctcctttctccatgcgagattgtctctgtcgactttcttcctctaaagcagcttctgcacgactttttgcatttatgtaagcaaggtacgcgggggaattatgataggccttcatagattcattgtactctatcttttctgcttcgtattcgtttaaatattcttgtttttcttcatcagtgagatctcgccacatgccaccaataatcttgccaatctcccacaactttaggtcagggttggaagcctttacttggtcccagacctttctgctgtacctcatgtagggcatcagcggcttatctggtggctttgggggttttggaatcgtgataccagaggatgccgtgacccggctgttggtgcccgggttccctcccagcctgtagttgttgtaggcgagatgactgtatggattgtatcccacaaaccctggtgtgctgggcatttgtgttgcaggagctggggtgggaggtggggcataagatggtctttttgacattttggaagattaagttctcagttccttaagaatgaatctgagacaccgcgggcagaaaaagcgcccgcagctccggcttcgcttccctttgtcccgcgctcgccccgcctcgcgtccgga

SEQ ID NO: 676 - DNA, 1484 bp, Homo sapiens
ggtaccggtccggaattcccggggctaagataaaggatgatcttgaagaccttatagttattgggatgagagcaaaacattggtgacatttttctgaaatattcaaaagatttggtaaaaacctaccctccctttgtaaacttctttgaaatgagcaaggaaacaattattaaatgtgaaaaacagaaaccaagatttcatgcttttctcaagataaaccaagcaaaaccagaatgtggacggcagagccttgttgaacttcttatccgaccagtacagaggttacccagtgttgcattacttttaaatgatcttaagaagcatacagctgatgaaaatccagacaaaagcactttagaaaaagctattggatcactgaaggaagtaatgacgcatattaatgaggataagagaaaaacagaagctcaaaagcaaatttttgatgttgyttatgaagtagatggatgcccagctaatcttttatcttctcaccgaagcttagtacagcgggttgaaacaatttctctaggtgagcacccctgtgacagaggagaacaagtaactctcttcctcttcaatgattgcctagagatagcaagaaaacggcacaaggttattggcacttttaggagtcctcatggccaaacccgacccccagcttctcttaagcatattcacctaatgcctctttctcagattaagaaggtattggacataagagagacagaagattgccataatgcttttgccttgcttgtgaggccaccaacagagcaggcaaatgtgctactcagtttccagatgacatcagatgaacttccaaaagaaaactggctaaagatgctgtgtcgacatgtagctaacaccatttgtaaagcagatgctgagaatcttatttatactgctgatccagaatcctttgaagtaaatacaaaagatatggacagtacattgagtagagcatcaagagcaataaaaaagacttcaaaaaaggttacaagagcattctctttctccaaaactccaaaaagagctcttcgaagggctcttatgacatcccacggctcagtggagggaagaagtccttccagcaatgataagcatgtaatgagtcgtctttctagcacatcatcattagcaggtatcccttctccctcccttgtcagccttccttccttctttgaaaggagaagtcatacgttaagtagatctacaactcatttgatatgaagcgttaccaaaatcttaaattatagaaatgtatagacacctcatactcaaataagaaactgacttaaatggtacttgtaattagcacttggtgaaagctggaaggaagataaataacactaaactatgctatttgatttttcttcttgraagagtaaggtttacctgttacattttcaagttaattcatgtaaaaaatgatagtgattttgatgtaatttatctcttgtttgaatctgtcattcaaaggccag

SEQ ID NO: 677 - DNA, 1808 bp, Homo sapiens
  misc_feature (1563)..(1563): n equals a,t,g, or c
ggcacgagctggagagggggcttacgacagtcgctcatgcagtgccagggctctaagacacggccgcgctctgatgtgttgttttttaaggacttccaccagtkgagtcaaaatctgctgctgtggttagcgagtgccaagaaccggaggcagaaggctcatgtcaccgatccaaaggcagacccccgggctctcctagagtgtcggagggaactaatgcaactggaaaaggagctggtagaacgtcaacctcaagtggacatgttacaggagatttcaaacagccttctcattaagggacatggagaagactgtattgaagctgaagaaaaggtgcatgttattgagaagaaactcaaacagttacgggagcaagtgtcccaagatttaatggccttgcagggaacccagaacccagcctcacccctgcccagcttcgacgaggtagactcgggggaccagcctcctgcaacatccgtgccagctccccgagcaaagttcagagcagtgagaactacagaaggcgaggaggagacagagagcagggtccccggcagcaggaaggctggggaattccccatgtacagtatttatgtttctttttagatgtgtaccttcccaagcacttatttatgcagtgacctggtcacctggggtgggggtgatttgaggaaatgacatgaggaaaagaaacctattcctgccctggggaccaccctgggactctaaccaagccttcctggagggacccatgcgcccctgagccccattccattcatacagacacacacgtacgcacactgcatgtccaaggccctaaacattgcccgttgacataaactttccagggccccagcctgatggggctgccctcagtcctctagatcaagatgctgactattagggggcagtgattgccatctggggacctgtcaggctttgtcatttcccagtttgttggtggtgcctttagtggttccctaatttgggaacactgatggggccttggacagggctttctctcaggtaggagaaatgggcccatgatctcctcacagtcgcccccagtccttggccctgcttccctgtgtctcatgcactggcacatatggtcaccttggagggcagacctaggagcccctctgaccactgaatccgtctccacaccccttctgccaagggaagccccttcaggaaggaccccccaaagctgaggggctgaatgtagccttttcaacagagaaggctcccacttgagagcagcctctacctgaccccctggaccacagagagccactctgaccctcagccccctcgcttcttcagctaaaactccaaaggtttggtttcagatggggtttgttttgttctgtttggttttggttttgtttggggtgggtgggtcattgcggtcttagattatgtttctcttgctaccaaacagtcatgtattaactctctttggatgatgaagtttaaagagtcaataaatagaaacaccagatgactgcattggtggccacagtggcctcctgtcagcaacctcagggctcagtctccctngccacatgggccttccgacgtccacacacttgggaagaagggaggccttggagacccagaagagtgctggacggcgaggttgccacgatttgctgtgttacctgggcaggtggctgggctgcagtttcctcatcaggaaaataaaggggttgtaccagttcagtgctttgtaaccagggttacatggtagaatcccttgcagatgacatgtaaatgcrgaaacatgattcgtaacttatttactt

SEQ ID NO: 678 - DNA, 4243 bp, Homo sapiens
  misc_feature (401)..(401): n equals a,t,g, or c
  misc_feature (430)..(430): n equals a,t,g, or c
  misc_feature (475)..(475): n equals a,t,g, or c
  misc_feature (497)..(497): n equals a,t,g, or c
  misc_feature (4142)..(4142): n equals a,t,g, or c
  misc_feature (4220)..(4220): n equals a,t,g, or c
gcagtgccagaaggtcttccacttgcagtcacgatctcactggcttattcagtcaaaaaaatgatgaaagataataacttagtaaggcatctggatgcttgtgaaaccatgggaaatgctacagctatttgttcagataaaacaggaactttgacaatgaacagaatgacagtcgttcaagcttacataaatgaaaaacattataaaaaggttcctgaaccagaagctattccaccaaatattttgtcctatcttgtaacaggratttctgtgrattgtgcttatacatcaaaaatattgccaccagagaaaragggtggrttacctcgtcacgttggtaataaaactgaatgtgccttggtgggacttcttttggatttaaaacgggattatcaggatgntagaaatgaaataccagaagaagcactgnacaagtctacaccttcaattctggtaggaagtccatgagtactgncctgaaaaattcagatggaagntatcgaatattcagcaagggtgcatctgagataattctgaaaaagtgkttcaaaatcttgagtgctaatggtgaggcaaaagtattcagaccaagggaccgkgatgatattgtaaaaactgtgattgaaccgatggcatcagaaggcttgagaaccatatgtcttgcattcagagattttccagcaggagaaccagaaccagagtgggataatgaaaatgatattgtcaccggccttacatgcattgctgttgtggggattgaagatcctgtgagacctgaggtgccagatgcaattaaaaagtgtcagagggctggaattactgtgcggatggtcactggtgataatattaatactgctcgggccattgctaccaaatgtggtattttacatcctggggaagattttctgtgcctagaaggtaaagattttaacagaagaatacgaaatgaaaaaggagagattgagcaagagaggatagacaagatttggccaaaacttcgagtacttgcaagatcatctcctactgataagcatacactggttaaaggtataattgacagcactgtctcagaccaacgccaggttgtagctgtaactggtgatggtacaaatgatggcccagcactaaagaaagcagatgttggatttgcaatgggtattgctggaactgatgtagctaaagaagcatccgatattattctcacagatgacaactttacaagcattgttaaagcagttatgtggggacgaaatgtctatgacagcatctcaaaattccttcagttccaacttactgttaatgtagtagcagtgattgttgcttttacgggcgcctgcattactcaagactcaccgcttaaggctgtgcagatgctgtgggtaaacctcataatggatacactcgcttccctggctctggcaacggaaccacccactgagtctctcttgcttcggaaaccttatggtagaaataagcctctcatctcacgtacaatgatgaagaatattttgggtcatgcattctatcaacttgtagtagtctttacactcttatttgctggagaaaagttttttgacattgatagtggaagaaatgctcctttgcatgctcctccttcagaacattatactattgtttttaatacctttgtgctgatgcaacttttcaacgaaataaatgcccggaaaattcatggtgaaagaaatgtattcgaaggaatctttaacaatgccatcttctgcacaattgttttaggcacttttgtggtacagataataattgtgcagtttggtggaaaacctttcagttgttcagaactttcaatagaacagtggctatggtcaatattcctaggaatgggaacattactctggggccagcttatttcaacaattccaactagccgtttaaaattcctcaaagaagctggtcatggaacacaaaaggaagaaatacctgaggaggaattagcagaggatgttgaagagattgatcacgctgaaagggagttgcggcgtggccaaatcttgtggtttagaggtctgaacagaatccaaacacagattcgagtggtgaatgcatttcgtagttctttatatgaagggttagaaaaaccggaatcaagaagttcgattcacaactttatgacacatcctgagtttaggatagaagattcagagcctcatatcccccttattgatgacactgatgccgaagatgatgctcctacaaaacgtaactccagtcctccaccctctcccaacaaaaataacaatgctgttgacagtggaattcaccttacaatagaaatgaacaagtctgctacctcttcatccccaggaagcccactacatagtttggaaacatcactctgattgtaagctgaatgttaacacactagctgcattgtaaagaaacaaattgaaactgggtcttttcacatattgtgatggacaagctagtattcttgtctttggacttcaacagaagacacacttgtacgaatgtagatttatttttttaaaaaaaaaaaagcaaagctttctgccagactgagggtgctttttggggggtgggagaaatgaactgacagataaacagtaactcagcgtaagtgacctgtggatcatcagtagtacccaagcatggtcctgaacagtgtattagcagagctttagtttatctcagtcctggatgggagagagagggaggagtaaaactgggcaagacaaagagccctggatcgttgaattgatagtttaatttctgctgttggctgttaataatttggattatttatgtttataaatgatacagatctgtttacaaggtttgtagatactttttttgttcctgttcatagatgggaagcttccttataactgatgcagagaaaaattagtccttcaaatactgctgtattttcaggaaaaaaaaaaaaaggggtgtttctattgaaactgtactaaatttttgcctacaatttaccttgttaaatattgtagataaattgctaatactaatagccaaatagataacactaatgctttgtttaaaaaaacgaaaaaaacaaaacaaaacaaaaaaacatgagcagtggtgttctaatgaagttatgacatctgtcctaattagtttcttaaatacatttactacttaatggttttgaagcaactgtttaatttttaaaatttttgaaaacttgctaataaccttttgttcagaatttagtagattgtttaatgcaggacatcaactacataatgaaagatgcttgaaatgcttttgttatttcaggcaaatcaaattaaatcagactatcaaactacaagagaaccttagtcttttttgtttttgtctaaacatgttagtttagtgatgtcttggtgaactgtgagtgaactgtattgatttttctaatctttagagaccttcacacagcatgagggctgttggcattttgaaaaaggttaataagtagaagcatacatgttttccttttgtttttgaaacttgtttgtaaacataaataaatatgcccttttattaaataaattcatggcaatgtttttttaaaagacatttcagcttctttactcagttctgcatatacagtgcatcagtctgttctctttgaccacaattggaatacatttcaagatggtaacagccccatgaagtaccgctttaattccttgctggtaatctaatagaatcagattaagaaaattaacacaattttaccatttgacatactcttcattgaatttagtttgtctaaaatagtctcacaggtaaaaaacataacaacaatgaccaccattgtctttgatacatttattttaattcttaagtggccaaataacagattaggtaaaatgagattacatgaaaaggttctaaaatgatatatttagatgcaataattaaccatatgctagaatgcccacctctaagccaattggattctttagctctctttttctttccttcatctaccttcttctcttttttgcctctgtctttaccctttagaaactggcatgtgttagggcccagatttcaccagatacacaatcctcaggctgacataaagtttacgaggactgctactataactgagagtgctgaccaagcaaagnaacatttrgttgatggkgcttgawatttttggkgggtggggggaacyttttctcaccatcaaactttggggaaccccnggagggcttaggaaaaaatgggc

SEQ ID NO: 679 - DNA, 752 bp, Homo sapiens
  misc_feature (649)..(649): n equals a,t,g, or c
  misc_feature (668)..(668): n equals a,t,g, or c
  misc_feature (681)..(681): n equals a,t,g, or c
  misc_feature (707)..(707): n equals a,t,g, or c
gaattcctgaattttggttaactgtttttaagaatgttgacttgctcagtgatatggttcaggaacacgatgaacctattctgaagcacttgaaagatattaaagtgaagttctcagatgctggccagcctatgagttttgtcttagaatttcactttgaacccaatgaatattttacaaatgaagtgctgacaaagacatacaggatgaggtcagaaccagatgattctgatcccttttcttttgatggaccagaaattatgggttgtacagggtgccagatagattggaaaaaaggaaagaatgtcactttgaaaactattaagaagaagcagaaacacaagggacgtgggacagttcgtactgtgactaaaacagtttccaatgactctttctttaacttttttgcccctcctgaagttcctgagagtggagatctggatgatgatgctgaagctatccttgctgcagacttcgaaattggtcactttttacgtgagcgtataatcccaagatcagtgttatattttactggagaagctattgaagatgatgatgatgattatgatgaagaaggtgaagaagcggatgaggaaggggaagaagaaggagatgaggaaaatgatccagactatgacccaaagaaggntcaaaacccagcagagtgncaagcagcagtgnaagcagggatgtctaccttctgcttncctgggaaaggatgaatttacatcatttgacaagcctattttcaa

SEQ ID NO: 680 - DNA, 2990 bp, Homo sapiens
  misc_feature (2866)..(2866): n equals a,t,g, or c
  misc_feature (2950)..(2950): n equals a,t,g, or c
  misc_feature (2975)..(2975): n equals a,t,g, or c
gggcttcatccacccttggggctgtctgtggccaggaagggagtgggggaggactccaggatccggagtccagcagcacactgggsttgttcgcacgsattgacaagcctggttccccagctggccctgcaccatagagcagccgcacgtgttggagagagcagctgatgggcgtcccaggtgtgcagttggggtaggctggccacyctttcctcccggtgccagtgcgtartgtgcagcacaatagtgaaggtcatagtttttccacctgagaatttttggtttattattttkaagatgatgatgatgattatgatgaagaaggtgaagaagcggatgaggaaggggaagaagaaggagatgaggaaaatgatccagactatgacccaaagaaggatcaaaacccagcagagtgcaagcagcagtgaagcaggatggtctaccttctgcttccctggaaaggatgaatttacatcatttgacaagcctattttcaagttatttgttgtttgtttgcttgtttttgtttttgcagctaaaataaaaatttcaaatacaattttagttcttacaagataatgtcttaattttgtaccaattcaggtagaagtagaggcctaccttgaattaagggttatactcagtttttaacacattgttgaagaaaaggtaccagctttggaacgagatgctatactaataagcaagtgtaaaaaaaaaaaaaaaagaggaagaaaatcttaagtgattgatgctgttttcttttaaaaaaaaaaaaataaaattcattttctttgggttagagctagagagaaggccccaagcttctatggtttcttctaattcttattgcttaaagtatgagtatgtcacttacccgtgcttctgtttactgtgtaattaaaatgggtagtactgtttacctaactacctcatggatgtgttaaggcatattgagttaaatctcatataatgtttctcaatcttgttaaaagctcaaaattttgggcctatttgtaatgccagtgtgacactaagcattttgttcacaccacgctttgataactaaactggaaaacaaaggtgttaagtacctctgttctggatctgggcagtcagcactctttttagatctttgtgtggctcctatttttatagaagtggagggatgcactatttcacaaggtccaagatttgttttcagatatttttgatgactgtattgtaaatactacagggatagcactatagtattgtagtcatgagacttaaagtggaaataagactatttttgacaaaagatgccattaaatttcagactgtagagccacatttacaatacctcaggctaattactgttaattttggggttgaacttttttttgacagtgagggtggattattggattgtcattagaggaaggtctagatttcctgctcttaataaaattacattgaattgatttttagaggtaatgaaaacttcctttctgagaagttagtgttaaggtcttggaatgtgaacacattgtttgtagtgctatccattcctctcctgagattttaacttactactggaaatccttaaccaattataatagctttttttctttattttcaaaatgatttcctttgctttgattagacactatgtgctttttttttttaaccatagttcatcgaaatgcagctttttctgaacttcaaagatagaatcccatttttaatgaactgaagtagcaaaatcatctttttcattctttaggaaatagctattgccaaagtgaaggtgtagataatacctagtcttgttacataaaggggatgtggtttgcagaagaattttctttataaaattgaagttttaagggacgtcagtgtttatgccatttttccagttccaaaatgattccattccattctagaaatttgaagtatgtaacctgaaatccttaataaaatttggatttaattttataaaatgtactggtgatattttgggtgtttttttttaaatgaatgtatatactttttttttgaagagtggagagtagtgatgtctagagggagctattttgtgctgaggccactatgttctgtaaatatataattttaagagcaacctcacaatccctgctaagtggagtttattatttgaagactaaaatggaattccatagttcctgataggttatattctgrgttattattctgagttatctacaaacatttttgagatttgtctttacactctgattgtagtttccagcagcccaygcacactgccaagtaagtctcattttttcctgttagaaatggtgaaatatcatataatcacttataaagaaaactgatatgaaaaaattttagagttgtttgctttatggtcactcaagtagggtaagtgttccacaaattccacaagttgatagtttaacatggatgtctgaaagccacatatataatttcttaggattcttaaattagtaaatctagcttactgaagcagtattagcatcactattttagattgcaaaaataccttaattgtgtggaactggcttgtagagtggtacttaagaaaaatgggattctacctctatttctgttttagcacacttaatcaggaaaggatatattaactttcataaaaatatttttgttgtgtgaataggttaatgatatggtaaggcccctaaaataactgaattaattgtttattgtaattgtaggccattcccattattaaaaataaagacaaaacttgaagtaactgaaaatcttatcgtgctatgtagaaatattgaactaatattcaaatatttgaatgctttggtttcagggattggtttaaaattggagtccnttttttatggggttagtcttacaaaaatttaagcctttatatttttgactttaaatcaaaaccaaatgttattttaaatgtacnggaatwggattgggtaggtgcmggnaggartgtwaggttc

SEQ ID NO: 681 - DNA, 3853 bp, Homo sapiens
accgggtcccggcctgagtcgcggccacccgcaggtctgagctgtgggctgaggcagcgcaccgctgccgcagggtgcgcgatgccttgaacctgggaaactatgtgaagcaacactctggattttgaaagacatcttttcatcatgggacagcaaatttcggatcagacacagttggttattaacaagttaccagaaaaagtagcaaaacatgttacgttggttcgagagagtggctccttaacttatgaagaatttctygggagagtagctgagcttaatgatgtaacggctaaagtggcttctggccaggaaaaacatcttctctttgaggtacaacctgggtctgattcctctgctttttggaaagtggttgtacgggtggtctgtaccaagattaacaaaagcagtggcattgtggaggcatcacggatcatgaatttataccagtttattcaactttataaagatatcacaatcaagcagcagagtattggcacagagctccacctctgaagaacctgatgaaaactcatcctctgtaacatcttgtcaggctagtctttggatgggaagggtgaagcagctgaccgatgaggaggagtgttgtatctgtatggatgggcgggctgacctcatcctgccttgtgctcacagcttttgtcagaagtgtattgataaatggagtgatcgacacaggaattgccctatttgtcgcctacagatgactggagcaaatgaatcttgggtggtatcagatgcacccactgaagatgatatggctaactatattcttaacatggctgatgaggcaggccagccccacaggccatgaccttgaagtgaaagtcttctgttgctattgtgggctcaaatatttggtcatgggggaagaatgtagggttgtggcactggcacagacacaggaaaatccattttccccactcttttatttttgctattctgatcatttgtcccccttttaaaaataaacttcccatgtcttccatttgtggtactaaaatttgctactgttttagaccatattttcctattatttatctgttcaaatttgtattattacaactaatagctcttgaattctttgctaaaggtaacagcaacacttccagaggcttctaaaacactactgttttgcagggcaggagtattctggaatccttttacttagatataaaataaacctcgaatattaaaaagttgtagccatctgagagaggaaagtttaagtgactgaaaatgtagaatacttcaacgtgcatgttactacttaaaactagtctttctgctggaatctaaggagtatatatatatatgcccccttgtggttaattattgctcctttaataatttttacttgaaatgatccacaattatttcataactttagcagtgtgttttggaactactgtacttaaaggtttgtttgtttgtttttgccatactgtataatttgggtgaggtctacaaaattgggtgtgactttcctttgcaaatggatttctcctggggaattttcttggctgttctggaaatgctttcccacagctgggtaactgktctaaatggctttgataatgctcacacatcttggagtttcagaaggaaattattctgcatcacaaatactaaattttatatttctaaattactataggtcatttaatattggtttatggtgcttttatttccttaacttgaaaacatctttctgagatttcagagtcctcaaatttcttagattaagagacaagaggccagtgcagtggttcacacctgtaatcccagcactttgggaggccgaggtgggtggatcatttgaggttaggagtttgagaccagcctggccaacatggcgaaatcctctctctactaaaatacaaaaattagctgggcatggtggcaggtgcctgtaatctcarctactcgggaggctgargcagaattgcttgaacccaggaggtggaggttgcagtgagccgagatcacaccactgcactccagcctgggagacagaacgagactcctaatcaaaaaaaaaacacaagaaaatagagtgaggcttttttaccgtatatacataaaatacttatgaaaattagaagataatttggcattcctactgtttcactgtacttccattgaaatactctttccattaaaatattctgaaacaatatagtaataatggaattgtgatcttcagttgcacctcaaccattttttttgcttatgaactaaaatttctaacattaacatttcggcatgtaataaaacaagggcctatctcctttaaaatttaacattccatgtaacttttctgacttatcattcataagttgcaaatattactattttcctaaaccagggtacacaatttaagttgccacttattgatgacagaatttctrgatagtaggattttaataggcgagcaaataaaattcaaatcaatttcaaggaaaaacatctggccaggggtagcttgatttcgcccccaaaaatactgaagactaatccattgacattcataatgggacagctaagtaccaaatagctaactactccctatggaggtttatgcaagcagagtaccaggggttccatcatatcaacctggcaatgcacttggtggttgtgtgaccttgagaaagtctcttactcttgtttatgtgttcttactttagaaactgagactttatttgtggttttcacactatttcagcagcaaaaactttttcaaggaaaatcttacagaacctttaaacacgtgtgcatacacacataccctataccccactatataaaagtcatattattataaatttccttattatataaactttatatactataaatgtgattaagtcaatgaataaaaacattaatgcattggtgatatccagcatgtttgaatttggtgagtaacacacatatagtgggagtcgttttttttaaaaaaattttttaattaaattcaagtcaaatttgcagaaccctgtatctcctccatagattcttagtattccatggaacatattttgaaaaccttgggatagatgatccactgaaatcttttccagctctaagattttaaattgtccttttagattagacttgctgagtttaattcagattacctaattttaaaatgtttctgaaaagtgaacagagttaccttacagagttttggatctttccagggatagccaatgattttatcccccagaatccttcacctttcaaggagttatttaacaatgagcccagtgactcaatagggcccaaacctttttattttacaatatgagctccaagacacttactgatctactgtgaatataaaatgttattagccttatcaaataaataaatgagcacagctctttgttcgctctattgaactgggtgataattatttagatgtgaatgttaggtcagttctactgtaataactaatcgtaaaagttgtaaatttgtttaatggatgaaatgtacactttttgtattctgtacagctttgtcttttttaaatatgaagtacttaaatgtacttactatgataggaaatataatgtgtgccttctaggatttgtgaagtggtttcatgaactctaaggaatttgttttccctatcctaactcagtaacagagggtttactccgattatgtatagaaccttagtttgagaaaatgaattttactatgtactgaatttagaggttgagaataataggatctgtgttattcttagtacccactgataaattgtgcaataaataatctttcgcaagtgattttagcaaaaaaaaaaaaaaaaaaaaaaactcga

SEQ ID NO: 682 - DNA, 1449 bp, Homo sapiens
atgatataccaaggtaataaatgctgtttatgacttctttaaatttacatagtactgtagcatattaataccctgtgaactgcaaaaaaccaaatacatttacagtagtattggtcaccaaaatagaggggaaactttacaattgtgagaatgtgtaaatgttctcattaaggcagtattgacccagacaaccatttagtattcatctatcccctcaatgcctcataattctggaatgcctgttgtgaaacatgtcagtgcacagtgtctcctaaattctcacacgtgcttgattttctgattcatctggtgaactgggagtaggaagttggtcatagacaatatgccctccttctcttgtctgaccaaagcttgaagcaatcacatctactgccaggttagctgtagtcttcgcctcttcctctgaggtggccaactgaggattgacttcaacaagatccagtgctgatagcaaccctgtattgtgtatttcctcagcaatatacatgccttctcgataggttagtcccccgacaacaggagttcctgtggctggagccagtgtagggtcaaatgcatcaatatcaaaactcaaatggattggtctttgtctcttgccaatcagcagatcaaatgttcgttccatgaccttctggataccaagtcgatcaatatctctcatggaaaaatactggatatcatagtyctttaaaataaaatgttcaggagggtccacgtctctcagaccaatatacacaatacttgcargagagatacaaggtttgatcccaggaaaaccctgggagttgtggtaccttatcctgtagttctctgaggagaaatgaaactggctgtccatggagatttcctgatgaagtggtaaggggtgtgttgatgtcagcatgggcatcaacccagacaacacaaaggtctgggcagtgtcgggcatggccactaatggtaccgattgccaggctgtggtctcctcccagtgtgacacagctgtagccatctgacacagctctgctaaccacctcagccagttcctggttggcaagacccactgagcgtggattcactatcaggttgttgtagagatcatctttggggactggagtaaaactcaaatctccaaagtcttttaggtggcagcccaaactggagagccttttcatcaagccagcttctcttatggcagcgggaccatgctccactccttttcttttctgcccttgtgagaacggggctcctatcacagccacggagtggacggatttcttcaggatggaatgcactcgcgtctggaggagacgcgagaggctgccccttagggacatgatccgcagcactgagaatctccaaggcagaggtccgcgcggttggaagccgggagtgagcgccaccgcccgccgctgctcttacctacccgcgccagcgtccgctcgtgcc

SEQ ID NO: 683 - DNA, 770 bp, Homo sapiens
  misc_feature (595)..(595): n equals a,t,g, or c
gcttgtgggccaagtcattgtaggacacaccctctcctgggcattgctgaggtcacccagtgagcctaggctcccccctcctcccatccccagcctgggggaaccttcagcgtctctcctccctgtaggccccggctcagcttcccaggaacttttgttggtctgcctcagccacctccctgacgctgtcccactgtgtggatgtggtgaaggggcttctggattttaagaagaggagaggtcactcaattgggggagcccctgagcagcgataccagatcatccctgtgtgtgtggctgcccgacttcctacccgggctcaggatgtgctggatgcccacctctctgaggtcaatgctgttcgttttggccccaacagcagcctcctggccactggaggggctgaccgcctgatccacctctggaatgttgtgggaagtcgcctggaggccaaccagaccctggagggagctggtggcagcatcaccagtgtggactttracccctcgggctaccaggttttagcagcaacttacaaccaggctgcccagctctggtaaggtgggggaggcacagtccaaggtgaaggcctgantggggaggctgcctggaggtcagaggtcatacctcaggactagggggcctgttaatggggtcttggccaaactcttgatccgtacctgggggccggggtacaggagacactgtttgggacacaaggataaggtgacagttgcccaatttcaagttaacgaggcaccaggcattga

SEQ ID NO: 684 - DNA, 910 bp, Homo sapiens
  misc_feature (48)..(48): n equals a,t,g, or c
  misc_feature (278)..(278): n equals a,t,g, or c
ggcagaggtcaggttctgtgtatgtctccgcgtcttccgcggagcggntgtgcagggcctgcagcattgaactagatgtcgtccccgcagccccagaagatgggcagggctgtggcgaccgcggcgatccccctggggacctccgtagcgtcttggtcacgaccgtgctcaacctcgagccgctggacgaggatctcttcagaggaaggcattactgggtaccggccaagaggctgtttggtggtcagatcgtgggccaggccctggtggctgcagcnaagtctgtgagtgaagacgtccacgtgcactccctgcactgctactttgttcgggcagagmagmtgccmtcatgtgttctgcgtagatccccagctgagaagagtttgtggacctttacagtatgtgatttgtattaagaaaaccatggggtttcccccttgcattttgtaaatatgaaagttatccctgtaatggtaaatacactttttcatactgtcccgtgtctcttactcctcatccctgaggagtattgattggcccccctcttctcggcccccagtcactgctataaagtatttgaatacttaccttgggctcagccaggttcttatctttatgctagttgggagtaaatatgtgctttgtttctttaatttgtttgtaagtaccagccttttgatattgtaatccttccagcctagtgaaatacctggctgttttcttttgtgtgggtgggggcattacttgaactctgaatctcttcatcctgtgatggaagaattcaatgagtctttgccagtaaagtatctagtgcagggcttggcataatctagttttccataaatattattagtttttgatgattaacttatgggaataattaaaatttgcatgatacagagaaaaaaaa

SEQ ID NO: 685 - DNA, 865 bp, Homo sapiens
  misc_feature (581)..(581): n equals a,t,g, or c
  misc_feature (609)..(609): n equals a,t,g, or c
  misc_feature (790)..(790): n equals a,t,g, or c
  misc_feature (824)..(824): n equals a,t,g, or c
  misc_feature (837)..(837): n equals a,t,g, or c
  misc_feature (847)..(847): n equals a,t,g, or c
gatgctccctttttctttcttctttctctccatctgtcttctgtggtaatctggtctctctgtctcttttcctgacactttttcttttcccctgagttgcttctgttttccatctacttcttttactttcttgatctctggttctttgacatctgtgttctcctctctcgctctttttctgcctgtatctgtccatctgatgcctctcttttcctggctccatctctgtatttccctgtctttctcttgcccttctttctctgtggcccgggcccagttctgaaccagctggaggagttgctgagcgacatgaaggcggacgtgacccgcctgcmagcmacgctgtcccgaatacccccmatcgmagccsgccttcagatgtcsgagcgcagcatyctcagccggctggcmagcaagggcacggagcctcaccccacaccggcctacccgccgggtccctacgctacacctccggggtacggggcggccttcagcgccgcacccgtaggggccctggccgccgcaggcgccaattacagccagatgcctgcagggtccttcatcacagccgcaccaacggnccttcagtgcttgggaaagaaggagaangaaatggtgggggcattggtgtcagacgggctggatcggaaggagccccgagccggggaggtgatctgtatagacgactgactggatcccaggcctgcccttcacccaagccccgtccccgagggccgacccccagcttcaagcgcttggggcctggttgccaggccttcacctttcccanccccttgggccattaattgggctagggaaccccnttggccctttttnttgcaagttnctctttttcaagaaaggg

SEQ ID NO: 686 - DNA, 1215 bp, Homo sapiens
  misc_feature (8)..(8): n equals a,t,g, or c
  misc_feature (37)..(37): n equals a,t,g, or c
  misc_feature (71)..(71): n equals a,t,g, or c
gtctggancagcccagcagcggctgacccatctgccntgcggggaagggagtcgccaggcggccgtcatgncggtgtcggagagccagctcaagaaaatggtgtccaagccacagtcagacttgttggggcttattcaggtcatgattgtggtatttggagatgaacctccagtcttctctcgtcctatttcggcatcctatccgccataccaggcaacggggccaccaaatacttcctacatgccaggcatgccaggtggaatctctccatacccatccggataccctcccaatcccagtggttacccaggctgtccttacccacctggtggtccatatcctgccacaacaagttctcagtacccttctcagcctcctgtgaccactgttggtcccagtagggatggcacaatcagcgaggacaccatccgagcctctctcatctctgcggtcagtgacaaactgagatggcggatgaaggaggaaatggatcgtgcccaggcagagctcaatgccttgaaacgaacagaagaagacctgaaaaagggtcaccagaaactggaagagatggttacccgtttagatcaagaagtagccgaggttgataaaaacatagaacttttgaaaaagaaggatgaagaactcagttctgctctggaaaaaatggaaaatcagtctgaaaacaatgatatcgatgaagttatcattcccacagctcccttatacaaacagatcctgaatctgtatgcagaagaaaacgctattgaagacactatcttttacttgggagaagccttgagaaggggcgtgatagacctggatgtcttcctgaagcatgtacgtcttctgtcccgtaaacagttccagctgagggcactaatgcaaaaagcaagaaagactgccggtctcagtgacctctactgacttctctgataccagctggaggttgagctcttcttaaagtattcttctcttccttttatcagtaggtgcccagaataagttattgcagtttatcattcaagtgtaaaatattttgaatcaataatatattttctgttttcttttggtaaagactggcttttattaatgcactttctatcctctgtaaactttttgtgctgaatgttgggactgctaaataaaatttgttgcataaaaaaaaaaaaaaaaaaaaaaaaaaaaaaaaaaaaaaaaaaaaaaaaaaaactcga

SEQ ID NO: 687 - DNA, 872 bp, Homo sapiens
  misc_feature (241)..(241): n equals a,t,g, or c
  misc_feature (799)..(799): n equals a,t,g, or c
  misc_feature (821)..(821): n equals a,t,g, or c
agcccacctacagtgagtggtcttaccaaaaatccagtatccttgccatccttgccaaatcccactaaaccaaacaacgttccttctgtgcccagtcctagtattcaaagaaccctactgccagtgctgcaccattgggaacaacacttgctgtgcagctgttccaacacacactctatttacaagccacaaggacttctttacccacagtggcccatcagactctatagtccatcaactnaatcgaggtcctatacagatggaaaattccaatttctgcatttagtacttcgtctgctgcagaacagaacagcaataccaccccaagaattgaaaaccagacaaacaaaacaatagatgcttctgtcagtaagaaagcagctgatagcacatcacagtgattcaagtggtgtcattgatctcacaatggatgatgaagagagtggagcttcacaagaccccaaaaaactaaatcacactcctgtatyaaccatgagttcttytcagcctgkgtcacgaccattgcaacccatacaaccagcaccgmctcttcaaccatctggggtgccaacaagtggaccatctcagaccaccatacacttactacctacagctccaactaccgtgaatgtaacacatcgtccagtaactcaaaatgtacagtatggatkagtcaaatctaaggkcttcgaaccttatgttaggggttgaggtcttggtgtgaggaaggaagactttaaaattaaagacttgtaaagtccgtgtggctttttcttactttggattcatttaatcctgnacttcatgtaagctcgcatggntagagagatttaggcctactcctaattgagtggagaatggcgtcactactg

SEQ ID NO: 688 - DNA, 816 bp, Homo sapiens
  misc_feature (684)..(684): n equals a,t,g, or c
  misc_feature (727)..(727): n equals a,t,g, or c
  misc_feature (749)..(749): n equals a,t,g, or c
  misc_feature (770)..(770): n equals a,t,g, or c
  misc_feature (781)..(781): n equals a,t,g, or c
gcagggctgtgcgctctggggcacctcatgcagacgggagtagggaggctgttttttgcgcgtgcatatggcggtggcgggtggggggaagggggagatcctgctgcactggccgcccaagttggggggcgagctcggtggtgacgcgcggccctcacgtgacccagagctgcagagcgacgcagccttcggtgcagtcgtcactcgcgtctggctaccagctccccgctgccctgagctcggcgggctggcattcggcccggggaaaagcggagcaggtctgcgaggctaagtgtctccgcggcgcacctcgcggcgagaatccggaggagaaggagactgcaaggataggcccaggaaaacgaagagatggagcagcctatgcagaatggagaggaagaccgccctttgggaggaggtgaaggccaccagcctgcaggaaatcgacggggacaggytcgccgacttgcccctaattttcgatgggccatacccaataggcagatcaatgatgggatgggtggagatggagatgatatggraatattcatggaggagatgagagaawtcagaagaaaayttagggagctgcagttgaggaattgtctgcgtatccttatgggggagctctctaatcaccatgaccatcatgatgaattttgcttatgccttgactcctgccantatcatgagattaatactgtgattccccgctggtttctttttncttgcattttcctaatatgccnttactgatcccgtttgcttgngaaccctatgntattttccatgtgtcaagtgggtcttgggttgcca

SEQ ID NO: 689 - DNA, 578 bp, Homo sapiens
  misc_feature (569)..(569): n equals a,t,g, or c
gagcactataacttattwgtacaatcaacatgtgagcatctttattaagtaaacagagcactataacatgtgagacagtatggaatatgacgtgatgggctggaaaatacttgtttggcaacattgataagcaacccttacgtgatcaccagaaacttactgttggacaggactgagcccggttccagatcaaatcaaacttttctgcaggaataactgcgtagactgtatcttttgctgcaaaatattgctgccaaatctgttttatttcttctgcagttttttcttttaccatctcaatgttaaagattgaactgagagtcttgtccttagtgaatcctctgttcacagactgtttccccaaggcatctgtcttctgttccacacatttgataaaatcaccttgcctggaatgccccactggctgcttccgaaattcactgcgtttctccaggcgggactcaaaagcagctgggtctgacctgcgcagcagctggatsttgtcgcggtagcggtcgtagaaagggttggcctggagctcggcctcggccccgaccccgctgccgtcngctgccccc

SEQ ID NO: 690 - DNA, 1653 bp, Homo sapiens
  misc_feature (1613)..(1613): n equals a,t,g, or c
aagctttgtggtttggtctcagggaagtagcaggcgccggttgagagaactacggccctgtcggaaggtaacctccggtgcaaacgaccatcggcggcaggcgagcggtacgcttggcgtccgggccttcctgggcccgtctgaggaaacttgctgctcgaggccaggctgcctaggacctgtcccttttttctatactggctcccacatccgggttttttctccgggacggcccttcggatgcttgggccaatgggaatcgccatttagggtgctccgcccaccgggtcgcgtagagcatcctggaagtcgtagtaaatctctcgagagttctctccgcacgcgggctggagaagcgggtcctacgcacgctttgttgtcgcgctttgcctccgtccttccccctactcccgccttacctgacttccttttcggaggaagatccttgagcagccgacgttgggacaaaggatttggagaaacccagggctaaagtcacgtttttcctcctttaagacttacctcaacacttcactccatggcagttcccgagacccgccctaaccacactatttatatcaacaacctcaatgagaagatcaagaaggatgagctaaaaaagtccctgtacgccatcttctcccagtttggccagatcctggatatcctggtatcacggagcctgaagatgaggggccaggcctttgtcatcttcaaggaggtcagcagcgccaccaacgccctgcgctccatgcagggtttccctttctatgacaaacctatgcgtatccagtatgccaagaccgactcagatatcattgccaagatgaaaggcaccttcgtggagcgggaccgcaagcgggagaagaggaagcccaagagccaggagaccccggccaccaagaaggctgtgcaaggcgggggagccacccccgtggtgggggctgtccaggggcctgtcccgggcatgccgccgatgactcaggcgccccgcattatgcaccacatgccgggccagccgccctacatgccgccccctggtatgatccccccgccaggccttgcacctggccagatcccaccaggggccatgcccccgcagcagcttatgccaggacagatgccccctgcccagcctctttctgagaatccaccgaatcacatcttgttcctcaccaacctgccagaggagaccaacgagctcatgctgtccatgcttttcaatcagttccctggcttcaaggaggtccgtctggtacccgggcggcatgacatcgccttcgtggagtttgacaatgaggtacaggcaggggcagctcgcgatgccctgcagggctttaagatcacgcagaacaacgccatgaagatctcctttgccaagaagtagcaccttttccccccatgcctgccccttcccctgttctggggccacccctttcccccttggctcagccccctgaaggtaagtccccccttgggggccttcttggagccgtgtgtgagtgagtggtcgccacacagcattgtacccagagtctgtccccagacattgcacctggcgctgttaggccggaattaaagtggctttttgaggtttggtttttcacgccgantgggctacaaggccgggtggggcggggctcgtgccgaatt

SEQ ID NO: 691 - DNA, 1520 bp, Homo sapiens
gagccctgcctgcgcccgcccccgaagcggcgcgggacgcctggcgccgtccgcgatccgcaggctgcccgcttaggcttaggcccggcccgctggcaaagccgagccgcagcattttatttcgttcgtggtttccgcacaggctggagtttcgtgggttgggtcgtacttgggacctcggcgaagaggacccgtttatttttttttctttccaaaatggcagcctccagtcgcgcacaagtgttatctctgtaccgggcgatgctgagagagagcaagcgtttcagcgcctacaattacagaacatatgctgtcaggaggataagagatgccttcagagaaaataaaaatgtaaaggatcctgtagaaattcaaaccctagtgaataaagccaagagagaccttggagtaattcgtcgacaggtccacattggccaactgtattcaactgacaagctgatcattgagaatcgagacatgcccaggacctagcaagccggggaccagccaccagtggcggccagggaccaccttcagcatccactctctgtttgagmtgggggctcccaaaaccagcttacaatagccttttgcgctgcctgtcctgtgggagctgataaaccaagtcacatttgcattctgttgcaggcttagtgaaaaaggactgctgtctttccttggttcaagtgttagaatggagagctggagttcgttcagaatagtgctgtgtgttaccacgtctcccctgcaccccattcctaccttgtagctcatgaccattgtgtatagcatttctacactttgtttcttggtccttggcaataaaaagaatgatctccctgagcctttgaccccagataaacccctcccaattaatgcattttcatttcctactgatacaaggcctggagagggctgttgggggccctcagggagggttcaactctgagacgagaactgccttggtgaaggcaagttcaagcaccacttgagactgggggcagcatggagtagggcagggctacgggggtacacggtgcaccctgcaacttatacctgagcccagtacaacaaaggtgacgggtgtgtaggtacacacccagagatggagcactgcagatcagcaacctcagccccacctgggaatttgctggaaatgcaggctcaagcccctccccacacctggtgaatgagagagccccagcctgacccaagcccagggcgactcccataccctgaagcctggggcatgctgggcagcaccgtgcccaaatctggctggtgracagaagcacctggagagttggagasctttttaaaaagacatctctcagcacttccctctctgcagattctgactcagtaagtgaggggtgaggcacagtcatttttctctattctgaagctctcccactgttttcaatgtttaaccaactggggacccctgctctttaagtatattacaggtaataaagatattgtttgtatgcttttaaaaaaaaaaaaaaaaaaaaaaaaaa

SEQ ID NO: 692 - DNA, 360 bp, Homo sapiens
  misc_feature (219)..(219): n equals a,t,g, or c
  misc_feature (357)..(357): n equals a,t,g, or c
gggcggggcccgcgccgggcgccataatggacgaggactacttcgggagcgcggccgagtggggcgacgaggcggacggtggccagcaggaggatgattatggagagggagaagatgatgcagaggtccagcaagaatgcctacataaattctctacccgggattatataatggagccctccatctttaacactctgaagaggtattttcaagcagganggtctccggagaatgttatccaactcttatctgagaactacacggcggtggcccagaccgtgaacctgctggctgagtggctcattcagacaagtgtcgaacccgtgcaggtccaggaaacggtggaaaatcacttgnaga

SEQ ID NO: 693 - DNA, 810 bp, Homo sapiens
ttttttttttttttttttttttttttttcactggycattgagcagtttattaccatcaacctgtccccagytttccagcacaacagccagcccacactytaracacgccttcactccagtccattytggcacctagcctmagtcttmaccctcctccctcctccacacactcyttcccccagccctccaaggcagcaccaggcctgagggccacacctcagctgggggaggggagggaagacagtgagacaracaraasctgggraaagaggagccagggttggccccaagcttctgtagccaccactccaggaaggagggaaagggggmagggctgaggctggggctggggttgccaggtgatgacagttcacgtggttcaggcaggaggctcttctccaggaggtgcagggaagccactcaggtctcggccaatgatctcactcacttcctccagcgtgataccctggatagggacactgtctcggaagccgctgctgtagccacccctggatttctcctgctccggagccccctccccagggccatagcctggccctaccttattgtatccctcagcaggtaggggatgcacatcactctgggaagggaaggggccttcaagcggtggggatgcaggaagaggaggcggccgaaagggggctggcggagagaatggcagccccagggggaaagaggagacataaaagtagacctggactggccgggaaaccctcttgttgctgtactcggggacagtcagggtcagcgtcacctcgttgctctgcagtcggttcactgtggcctccc

SEQ ID NO: 694 - DNA, 3714 bp, Homo sapiens
  misc_feature (20)..(20): n equals a,t,g, or c
tttttttttttttttttttntttttttttttttttttttttttttttttttttttttttttttttttttttttttttttttgggagttattaattctttattaggattcaggtttcaaacaaggtagaaggcagtggcaagaggggttcaggtagggggatgatgagggaacaccagacttggctagttgggccactgccagaagccaaatgggaaccctgggctggaaggggtgtggagaggggtggacaaggggccagcctagaggagcagacggggtcagcggatggtgtatcggacatagggaacctcgacatcctcgccgctctcgtcgttacagcacagctcaagcaccagcgcccgcacgtggcggcccagctttcgcttcgacacacggctcacaatctctgtcatcggctgatccaaccgttccttgagcttggcagctggcatgaagaaggaatagagcatggacacgccctgggacagcatggtgatctctaatttgtgctctgtcttaaaatagtcgaggaactgtttgagggtcatctcctcaccattaggctgcagcccttgtacctcaaagcgatcccacaatgtccactcttggttatagtactggtgacgtggtgcggcaaggggttcagagaaaccaaagaaaggcagggccaagttgaggaaaccattcttgtaggagtcaagctgtcggtgcccctgcacaaccttgtacagctccagacacacaaggccaaccacggctgctgtggtcgtggcaatggctgggatgatcttccctgcaatcagcttgctcttgtgccggtctgcagaaggaatgtcatagttttctgcccggaggttggatgcagccacgatgaaatccatatgaaagttgctgtcatcatccttctcaaagtcaatggggtacatcttgaatccagggagcttgtctgggctgggcagagtggctttgagctcctctagacgactgtcatcaacagaggcattggcgctctgcagctcctggtcagaaacatggatcttgacgccagacttgggggtgaattcggggacctgcacagactgcaggaatgtggccacagcagctcggtcctgagagcctgtcagcccgtaggtctgggcaaacaggttggcagcagccatcacatagtccagatgcaggggattgttgacatcaaaggtgagcgggtgtggacagcgtttgggcccagaccagaacggcgctcctgagcttgtgagctggtcaggagggaagttgtgcagcagctgccggatgttgttcgagtactgggtgtgccagtggtggcaggcccaggtcacgcagtcagcccaggtctgtggtcgctgcagcaccaggctgcgctgcacagcctccagcacctccaagggctgagtgcctgccagccgcagtgttcgctccacaaacttggggtctgtgaggtactggttgacattttctgctggctgcttgaagaggccttcaaactcatcccgagcccactgcagggtgtgctcgatggcattagggaagttcttcagggtacagatggggatggacttctcaggtgggtcctggctggaactgtacgactctgtcaggaaggggatcaccacctgcacattgcctttggtgcccagtgtgcctgactccagcagtggcttccggtagtagacacagcggcggtccatgtacatgcgggcatccacgttgtccagggcattggccacgccatctaggttttggaaaaaatcgtcatcatagatgcgctccgtgtcaggacccacacggttctggtggcttgtcacccggatatgtggattcatttggcgcacagctgcagcagccgtgtcagactttaacttcgtgacatcccagggccggaaaagaaactgtcgattcagatttgacttctcaatggtgtccatgtctgtaacgatgatttctccaccctccccgcagcccagcccaatcatggcaaagttcttgagcagctcacagccaatggcccccgcacccaccaggaaatacttctgcttgcccagcttctcttgcaggtctgagccaaacacagccacttgcccgtcataacggttctggcgctggaggcacttgtcctctgtgaggacctctttgtcctcagggagacactcaagggcatcaaagtatagccactgcatgatgggcatgaacttcccggagcaggccttcatgacttcctgggcagccaggcccccaatgaaggcgtttatgggtgccagatccccagcagccacatatgccagcttccggatgaggtcctcgtccaggttattttgctgcactgctggcagggctcgagcattcacagcctgtgctaaggctaccagttctgctgcatcctcctcattgcggggccgaggtggccggccatgctgagcacagaactggtgcagggcctggaagccaatgtgcagctgggcagggcgagaaaacttggcgaagtccgtcaccacaaagtcaggttctgccagtgaggccaccaaggatttaaagctaatcttcttaggtactttgacctgactgacgatgcctccacggatgtagtcggagaagttggaggtgtcacagatgctaaaggtataaggacccaggactttgatctccatgggctgatttccgttgagttcaaccatgccctgtacttctgaaaaggagacaaagtccccgctctcaaacccgtgtcgggcctcatccaggcaggtaaccacaccggggttgtccttggtaaccatagaaaccatagcactgagtggctgctccccattggaatctgtgaggatcatttcctctccaaagtcacagaagagctgcccaaacaggccccgcgtgtctgccaccaccagcttgatgccacggttgtgacagaactcacccactcgcagctggtcctccaggggggtgttggtgagcaccaccacctggaaaccactaaggaagtcctcaacgaggggtccagtgtaggcagtgacaggcacatagctgttgagctcagcgaggcggggctgtgatacctcggcccggtttttaccgatgtcctcctcccgcaggtagaactgggaggaaagatcagcccactgggcagtgccctggtcatgtagggtaacagccttgaccccaccaaggatgatgttcttagcgatctccacgcccaggccccgcaggcctgataccaggacactggatgtctggagccgcttcattgcctcatggcccaacacatacagctgccgggagtaaaggccctcgtctatgtctgcttcactgccgttcttggccattccgttggttggcaccgagggcacttcggacaacacggactgggcaggggagcagttagaacccggctttggatcaggcccggacacgcgacgtttcttggacagcggcgagctggacatcaatgccggttccccgggtcgcgccgccgccaactcctcaaggagccgaagccaagcccggccgccaccctcctccttctcctcctccccgccgcctgggccgcctagaatcgccgctgccgccttctcctcccccggccgttgtggttgtggttgtccctgccacctccttacagccgagccgccgacacaagatggcggacgctgagcctggggccggaacaaaacctaggttctagatcgcgatctagaactagc

SEQ ID NO: 695 - DNA, 1091 bp, Homo sapiens
  misc_feature (2)..(2): n equals a,t,g, or c
  misc_feature (613)..(613): n equals a,t,g, or c
tnggaattccgtgtgtgtgtgtgtgtgtgtgtgtataatcattgataaagacaaactaattttttgatctaaattctaagttaatttcgtcacttgttatgtgtgtcttatttttattttgtcagaccacagataatttgtttcttactccttgactaccttcttctttttagatggccaaatgtgatgcttgtaagcgacagggtaaactcagtgagtccttgaaatggcgaggggaaatgaaacatttctgtaacctgctttgtatcttgatgttctgtaatcagcaaagtgtatgtgacccgccttcacaaaataatgcaggtaaaattaaccttaggtactgaatggagtctttggtcaatactaggaactactgttcttttacagatcaggaactgtgtaaacagttgtcattaatttcatgaaacctcagtttccttgtattctgtatcaataacatttagctttttttgttgaacaccttatttcactgtcgtccgtgtgaagagaccaccaaacaggctttgtgtgagcaacaaggctgtttatttcacctgggtgcaggcggtctgagtctgaaaagagtcagtgaagggagatggggtggggnccgttttataagatttgggtaggtaaaggaaaaaggggggttgttctctggcgagcaggagtgggggtcacaaagtgctcagtgggggagctttttgagccaggatgagccaggaaaaggaatttcacaaggtaatgtcatcagttaaggcaggaacaggccattttcacttcttttgtgktggaatgtcatcagttaaggcaggaacyggccatctggatgtgtacmtgcaggtcasaggggatatgatggcttagcttgggctcagaggcctgacaccttagattaaagctgagtaaaaatgagtttttgattaaatagatttctttgagaatattgaatcaaataaactctgtaagaacttaaatttatgggaaaggataacagttaatggtttgtaattgagtataattggcttccttaaaaaatcctttgagactacttataacaaaagacataaagtcaaaatcacaggcct

SEQ ID NO: 696 - DNA, 2731 bp, Homo sapiens
gatgtctccgctagtacaagctgggcgttcgtatctagcatacgccactgaaggaatactacaccctcatggacatcgcctacatctacccctggcggcggaacgggcctctccccctcaagtaccgtgtccagccagcctgcaagcggctcaccctagccacggtgcccaccccctccgagggcaccaacaccagcggggcgtccgagtgtgagtcagtcagcgacaaggctcccagccctgccaccctgccagccacctcctcctccctgcccagcccagccaccccatcccatggctctcccagttcccatgggcctccagccacccaccctacctcccccactcccccttcgacagccagtggggccaccacagctgccaacgggggtagcttgaactgcctgcagacaccatcctccaccagcagggggcgcaagatgactgtcaacggcgctcccgtgccccccttaacttgaggccagggaccctctcccttcttccagccaagcctctccactccttccactttttctgggcccttttttccacctcttctactttccccagctcttcccaccttgggggtggggggcgggttttataaataaatatatatatatatgtacataggaaaaaccaaatatacatacttattttctatggaccaaccagattaatttaaatgccacaggaaacaaactttatgtgtgtgtgtatgtgtggaaaatggtgttcattttttttggggggggtcttgtgtaatttgctgtttttgggggtgcctggagatgaactggatgggccactggagtctcaataaagctctgcaccatcctcgctgtttcccaaggcaggtggtgtgttgggggccccttcagacccaaagctttaggcatgattccaactggctgcatataggagtcagttagaattgtttctttctctccccgtttctctccccatcttggctgctgtcctgcctctgaccagtggccgccccccrcgttgttgaatgtccagaaattgctaagaacagtgccttttacaaatgcagtttatccctggttctgaggagcaagtgcagggtggaggtggcacctgcatcacctcctcctcttgcagtggaaactttgtgcaaagaatagatagttctgcctctttttttttttttttcctgtgtgtgtggcctttgcatcatttatcttgtggaaaagaagattcaggccctgagaggtctcagctcttggaggagggctaaggctttagcattgtgaagcgctgcacccccaccaaccttaccctcaccggggaaccctcactagcaggactggtggtggagtctcacctggggcctagagtggaagtgggggtgggttaacctcacacaagcacagatcccagactttgccagagcaaacagccttccaattgcccctccacccccagctgaggcccggtcacctggtcaggacagagcaactgcatctaaaagcacaagaagacagaaacctgtaagctctgaccccacccccaccccttgagaggtcagcggaccacctccttagggacagaccctggcaggtcgctgcccaccgagatttcctcaagtgtgcatagatctgagaggagtcgggagtcgagactcgagattccatcatagcgtaggtgtgtggggttgggagccccctgatgggcttgtctgtgtttgcaccttgtcctgtgtctgaggtcctgtgactgtaccctcctttgccctgggacatctgtatctcttggctttgtaataaatgctgcatactttctggagcctgtagttctttggggtggagggaagaagggaagggtgcctctcatctctgggtttagcctggcttggggaccccatacagaatgaatctgaactgccctctcctgtggctggtcaggtgcccccagcccacagagaggttaaaatctggagcaggaggcagcacatgggcctcatagcagtgactgcaggactaccagtctggttgggcaggcttgtttttgccatcttccccatcagcaaacattgaaccagggcccactcccgcctgccccagactggagacttttaggttataaggaataattcttccttcatgagccagcagtgggtaccagagtctcttgggctcagcacctgtttcctttcccacagaagggggtgcctgtcagaggcctggagccaaggccacctgtggctggacagcagcagccccctcagagtggggagcccacttctgccttctgcacgcgctcactcctgtgggtgccatcgcagtacgggggcctctgagtggccttgcaggtacagagtgccaccatgcgggtctcttgggccttgaacttgagtggagataggccagtgcgttggaagaagtgggagccgtcacagaagggctgcttcttgctgcggccacacacacaccacctgtaggttttccctgccaccagctccaccttgatgggggtcttcagggccaccacggacctggctggggttctagggaaccactgggccagccaggaggagatgtcccgccgcgggttcaggtcccgggcaccacgcgccgccggccgcaggatcgcccccgcgccgcgcatggtcgcctcccgcgccgcgcccgcccgctggctccgcccccgccgggtcacctccccgccccctcggtccccggcccgccaggccccggaagacgccgcc

SEQ ID NO: 697 - DNA, 2657 bp, Homo sapiens
ttttttttttttttttttactctcagatattttatttttcttagtctgacattaggttatgagaagtacaaaagatccacaagtacaaaaaaatctgtatagctttgcggtagttgaaaaaaatgcaagagaacaaaaaaattttttgagtaatattcatctctgcagatctgagtgacagtccgcttgaaacaccgctgtaaaagtggtaaaaaatgatttcattgtgattatgttaaaatttttgatgtctcttttacttgtttaggaaatctgtcttctgacatttatactggatagttcttttcctgtattttgctgaagctcaattccctgcctcttcagggcttcaatgatgacacttttgtttttatagtcagctagtgatgttttgtccaaaggaagattctgacaacagcttcagcagaaagaaaatctggatataggtttatagttattgtcctttccaaagtaaaaaaaaaaaaaaaraaagttgaaaaatattgatgactttttcttagtgttaatttctcttcctgcaaggatttaatttgaggataaattacctttgatgcagtttttttcccaaagtatttttaaaacactttcttgaaaagatgaattcttytacctatccctaggattctgagtaaagatgacatattggaataggagaagtccaggtttatctttgtactttcttacctaatatcctgttggacacagagaattgagatctccatggatattcagtaactctaggaatggctgaaattaaaaaaacaaaaccaaaaactcactttatttaatcatagataataaacacagtgccagaaggttatagacacaaaggccaaatgaacaatgaaaagccacatcagaggctgcctgacggcttaagactttttttttctctgcttaataagaaataagttatcattgtcatcatcttcccagcacctctcctttttcttctgcttgcccctcttgccttccttgggagacttgtcttctcttgacgtgtggtaatgtgatgaacggtgaaagggcttagaaggcttctgggttttaaaactgccaggagaagagtaggttttggggcccctgggaaaatcctcatccacttcacgatgtctgtcagccttcctgtgcttctcccagtttctattcttgttcttcatttctttttgtgtttctttattttcttgaggccacctgttgcttttccatgaggcacggcccttccttatatcatggtgggggttctcatttgctgcttttatataaggtagcttggatggctctgggataaccccatttttcttgagtacttttattttttgttttagtctcttttctctctcctgaatttcatatttgtcatcatagtagcagatgaatggagatactggagacgggtcatacacttctctttctggacattcgtgtccataatggcctttttgcgcgcagtgatagcaatatgctaaggctgatggtcttgaaggggtcttcggctttttgggtggtccaggtttggtcgttaggtgatactgcctccagatttctgtgcaagcatctgtatagtggcctagcatatgacatcggtcacactgtttatcccaggaatgtctgaaaagacatgagtggtccaacatcttaggcacaggacagtattcgcaaaggggggctggacaggaatacaggagatgtcctctcctggagcacaggaagcagcgacgaacttttcgtggtaaggggcagttttttgataaatgaccacgtttgtcacaatttctacagataatgtttttgttggctgaatagtaccgctgggtccatcttccaggtgttcggttattagctatctgggcctcaatgtctttgtcactgatggaccagtttataccatcttctccttcagtaacagagttttcacatcccacaaggttgagaaggatatcatcatctttatcatctacttcacatcccagtagcatccagctttccacattatcaccttctgaaatggtgctctcttcctcttcacttgaactgacctctataatcatgacctctcggattacacctgatctctcttcagatttaggcttctcaatatcactcttgcatttcttatcaaccagctcattagattgaagagaagaagaaagaccatgggcattttcttgtgcttgaactctaacattctttcctttacatctataaatactgtcttcatcagacaaagtgatgacctctgacccatctgacagctggatgacctcactatctgaaaggacgattagcttcttctgatttggtttactactcgaagattccgaattcccagagttcttttcttcatgctcttcctccctgatgacatcatcaagatcttgggcataatgaatttggctatagagttgaaattccacctcactatcaacactcagttcactagatgactcatctcgataaagatcatcttcgtatgcttctatagtctcatagccaccaaacatcataaaaagtcagtaaccttgaagtgccgcagctgcgaacaggaagcaccaaccgggaaccaaaacgcgtagagggacggggaggggcgaggacaaatgaggtaaggaggccgcgtccgcgcagacccgggc

SEQ ID NO: 698 - DNA, 2953 bp, Homo sapiens
  misc_feature (9)..(9): n equals a,t,g, or c
tgatacccnattctaatacgactcactatagggaaagctggtacgcctgcaggtaccggtccggaattcccgggtcgacccacgcgtccgcccacgcgtccgcccacgcgtccgcggcgcgcggagacgcagcagcggcagcggcagcatgtcggccggcggagcgtcagtcccgccgcccccgaaccccgccgtgtccttcccgccgccccgggtcaccctgcccgccggccccgacatcctgcggacctactcgggcgccttcgtctgcctggagattctgttcgggggtcttgtctggattttggttgcctcctccaatgttcctctacctctactacaaggatgggtcatgtttgtgtccgtgacagcgtttttcttttcgctcctctttctgggcatgttcctctctggcatggtggctcaaattgatgctaactggaacttcctggattttgcctaccattttacagtatttgtcttctattttggagcctttttattggaagcagcagccacatccctgcatgatttgcattgcaatacaaccataaccgggcagccactcctgagtgataaccagtataacataaacgtagcagcctcaatttttgcctttatgacgacagcttgttatggttgcagtttgggtctggctttacgaagatggcgaccgtaacactccttagaaactggcagtcgtatgttagtttcacttgtctactttatatgtctgatcaatttggataccattttgtccagatgcaaaaacattccaaaagtaatgtgtttagtagagagagactctaagctcaagttctggtttatttcatggatggaatgttaattttattatgatattaaagaaatggccttttattttacatctctcccctttttccctttccccctttattttcctccttttctttctgaaagtttccttttatgtccataaaatacaaatatattgttcataaaaaattagtatcccttttgtttggttgctgagtcacctgaaccttaattttaattggtaattacagcccctaaaaaaaacacatttcaaataggcttcccactaaactctatattttagtgtaaaccaggaattggcacactttttttagaatgggccagatggtaaatatttatgcttcacggtccatacagtctctgtcacaactattcagttctgctagtatagcgtgaaagcagctatacacaatacagaaatgaatgagtgtggttatgttctaataaaacttatttataaaaacaaggggaggctgggtttagcctgtgggccatagtttgtcaaccactggtgtaaaaccttagttatatatgatctgcattttcttgaactgatcattgaaaacttataaacctaacagaaaagccacataatatttagtgtcattatgcaataatcacattgcctttgtgttaatagtcaaatacttacctttggagaatacttacctttggaggaatgtataaaatttctcaggcagagtcctggatataggaaaaagtaatttatgaagtaaacttcagttgcttaatcaaactaatgatagtctaacaactgagcaagatcctcatctgagagtgcttaaaatgggatccccagagaccattaaccaatactggaactggtatctagctactgatgtcttactttgagtttatttatgcttcagaatacagttgtttgccctgtgcatgaatatacccatatttgtgtgtggatatgtgaagcttttccaaatagagctctcagaagaattaagtttttacttctaattattttgcattactttgagttaaatttgaatagagtattaaatataaagttgtagattcttatgtgtttttgtattagcccagacatctgtaatgtttttgcactggtgacagacaaaatctgttttaaaatcatatccagcacaaaaactatttctggctgaatagcacagaaaagtattttaacctacctgtagagatcctcgtcatggaaaggtgccaaactgttttgaatggaaggacaagtaagagtgaggccacagttcccaccacacgagggcttttgtattgttctactttttcagccctttactttctggctgaagcatccccttggagtgccatgtataagttgggctattagagttcatggaacatagaacaaccatgaatgagtggcatgatccgtgcttaatgatcaagtgttacttatctaataatcctctagaaagaaccctgttagatcttggtttgtgataaaaatataaagacagaagacatgaggaaaaacaaaaggtttgaggaaatcaggcatatgactttatacttaacatcagatcttttctataatatcctactactttggttttcctagctccataccacacacctaaacctgtattatgaattacatattacaaagtcataaatgtgccatatggatatacagtacattctagttggaatcgtttactctgctagaatttaggtgtgagattttttgtttcccaggtatagcaggcttatgtttggtggcattaaattggtttctttaaaatgctttggtggcacttttgtaaacagattgcttctagattgttacaaaccaagcctaagacacatctgtgaatacttagatttgtagcttaatcacattctagacttgtgagttgaatgacaaagcagttgaacaaaaattatggcatttaagaatttaacatgtcttagctgtaaaaatgagaaagtgttggttggttttaaaatctggtaactccatgatgaaaagaaatttattttatacgtgttatgtctctaataaagtattcatttgataaaaaaaaaaaaaaaaagggcggccgctctagaggatccaagcttacgtacgcgtgcatgcgacgtcatagctcttctatagtgtcaccta

SEQ ID NO: 699 - DNA, 787 bp, Homo sapiens
  misc_feature (653)..(654): n equals a,t,g, or c
  misc_feature (668)..(668): n equals a,t,g, or c
  misc_feature (687)..(687): n equals a,t,g, or c
  misc_feature (710)..(710): n equals a,t,g, or c
  misc_feature (736)..(736): n equals a,t,g, or c
  misc_feature (742)..(742): n equals a,t,g, or c
  misc_feature (760)..(760): n equals a,t,g, or c
  misc_feature (769)..(769): n equals a,t,g, or c
ggccggggcgcacgaygggcgcggaggtccggccgggcgcgcgcgcccccgccacacgcacgccgggcgtgccagtttataaagggagagagcaagcagcgagtcttgaagctctgtttggtgctttggatccatttccatcggtccttacagccgctcgtcagactccagcagccaagatggtgaagcagatcgagagcaagactgcttttcaggaagccttggacgctgcaggtgataaacttgtagtagttgacttctcagccacgtggtgtgggccttgcaaaatgatcaagcctttctttcattccctctctgaaaagtattccaacgtgatattccttgaagtagatgtggatgactgtcaggatgttgcttcagagtgtgaagtcaaatgcatgccaacattccagttttttaagaagggacaaaaggtgggtgaattttctggagccaataaggaaaagcttgaagccaccattaatgaattagtctaatcatgttttctgaaaayataaccagccattggctatttaaaacttgtaatttttttaatttacaaaaatataaaatatgaagacataaacccagttgccatctgcgtgacaataaaacattaatgctaacactttttaaaaaaaaaaaaaaaaaanncgrgsggcccggtntaaaggatccaagyttacnwccgygcatgcgacgcatagttntctatagggggacctaattaattccnggccgngtttacacgtgggatggnaaacctggngtaccaactaatcgcttg

SEQ ID NO: 700 - DNA, 1218 bp, Homo sapiens
  misc_feature (1200)..(1200): n equals a,t,g, or c
  misc_feature (1214)..(1214): n equals a,t,g, or c
ttttttttttttttttttttwtcttgtacaccagtctgtaatttttaattagaattagctaaaagacattgtacctttcgcgtgtatgactgagcataacagtgcttaacagtgtctttattaagtgaatgcctgaaagtattcaacattaaattcaatttatttcacattaatgtttgcaaatacatcatcaattcttacatatttcaaatcaacttcaagtacagaaggcttcctctcaaataagtctcctgaggtgacataaagactgaaagaagcctatgacttgagtccaagtctcttaaccaacaatcaccatatcgtcactggtgaactcatacgtggggacttcaaggttgagaggagcaggacccaatctgatcctgccagatgcatcatagtgtgacccatggcaagggcagtaataaccaccaaaatctcctgcatttgcaatgggtacacagccaagatgagtgcaaacacctatcaggataacccattcaggtttctttactcgatctagatcatgctgtgggtccctcaactgtgataattcaactgcagcttcctgctcaatttccttctgggttctatgacgcacaaacaggggtttgcctctccatttgaaagccatgttcttgccttctggaatatcggataacttgatttcgattttcgccagggccaacacatcagcagaagcactcatgctggaaacgaactgggtgacggcattcttggcagcatatgcgacacccacagtagttactccagttaccaaataggagaaacctttcctagcctcgctgctttctcttgaagacttcgtactatctaaaacttcaaggcggcggtattcagagaagtcaggcaccttgatgtctgtgtgggaataacaaacagaagcagggacattgaggcccacggaggcgaccaaaggccggcgcacggcctggccgctcagcgactcccggctgaggaagggccgcttcaggtccaacacaggctgctccggggtggcgggcaccgtggcctgcaccaagggccgcagcgcgcccgccaccccgcgggacgtggccgacaggacgggcgcgaacgggcccgagcgggctgctaccgacaacatggcgacagccgctccaaccgccaagccggtcacagggacgaccttcccggacgcgtgggtcgacccgggaattnccgaccgtgactgncagg

SEQ ID NO: 701 - DNA, 1191 bp, Homo sapiens
aaacaccaaatcaaccataggtccaagaacaattgtctctggacggcagctatgcgactcaccgtgctgtgtgctgtgtgcctgctgcctggcagcctggccctgccgctgcctcaggaggcgggaggcatgagtgagctacagtgggaacaggctcaggactatctcaagagattttatctctatgactcagaaacaaaaaatgccaacagtttagaagccaaactcaaggagatgcaaaaattctttggcctacctataactggaatgttaaactcccgcgtcatagaaataatgcagaagcccagatgtggagtgccagatgttgcagaatactcactatttccaaatagcccaaaatggacttccaaagtggtcacctacaggatcgtatcatatactcgagacttaccgcatattacagtggatcgattagtgtcaaaggctttaaacatgtggggcaaagagatccccctgcatttcaggaaagttgtatggggaactgctgacatcatgattggctttgcgcgaggagctcatggggactcctacccatttgatgggccaggaaacacgctggctcatgcctttgcgcctgggacaggtctcggaggagatgctcacttcgatgaggatgaacgctggacggatggtagcagtctagggattaacttcctgtatgctgcaactcatgaacttggccattctttgggtatgggacattcctctgatcctaatgcagtgatgtatccaacctatggaaatggagatccccaaaattttaaactttcccaggatgatattaaaggcattcagaaactatatggaaagagaagtaattcaagaaagaaatagaaacttcaggcagaacatccattcattcattcattggattgtatatcattgttgcacaatcagaattgataagcactgttcctccactccatttagcaattatgtcacccttttttattgcagttggtttttgaatgtctttcactccttttaaggataaactcctttatggtgtgactgtgtcttattcatctatacttgcagtgggtagatgtcaataaatgttacatacacaaataaataaaatgtttattccatggtaaatttaaaaaaaaaaaaaaaaaaaaaaaaaaaaaaaaaaaaaaaaaaaaaaaaaaaaaaaaaaaaaaaaaaata

SEQ ID NO: 702 - DNA, 2952 bp, Homo sapiens
tcaagcttatcgataccgtcgacctcgagttttttttttttttttggttcaaattaatggttttatttccatctgtaacactagcagaggagtccaaagcagactgatatccatggatatagtttaaatgtaacaaagaaagagttgaactatgtacattgaaaaaaggaaagacattttttcataccaacctttccctagttcgcagtttctgaatagtagaaacaaaacacatttttaaatctttctatcaatttaatttaggacgaagtaacacaacttttataattaaccactgaagttgtctttaaggacaaaacttaaattttaaaatgggtgttaccatattttatgagtggactgactccaaggttgccttgctccaagtctgggcatcgtgacattgccgtgatgcccagaagaaagttaatggcaatgatgtccagtcagagggcagacatgctacacatcacaatgatgagagctgcggattctgccctcttcaactccaagtagaaaattattattttcattcaaactaactggaagtgagccaaacagttaaaaagtcagaatgaagaataaaacaattttcttttcacatagaggagggacactccttcagccccgtctaaagtgaattctgtgctgagtccctgctccttcagaagggtaaactgaaggtcagttattgctaacaaagccagaagtggcccctttcccgccctgaagatgtttcacacgaaaaggccgtttgtttggcgtgaggccctctgaggaaggacgacagtggaagaggaggcatgccggcactgtaaggcctctctcgttagccacccccaggccctgtgctgtcaggggcagcttgggccactttgctgcccctgagagaacctgaggctcccgcgtacctgtggagcgaaggagaggttgtcatctgggcccctgtttcaccagtcaaaacctatggagcagtcagaagcccgaagcatccaagcccagtggccaggaagcttctgaaataaacggcactgggttgggaaggatgagaaagccaagacaggtgggccaggttctccgaacatggggcaacagtgacctgggcaaaagcctggaactgagcggctgataaggccacaattactgccaccacctctcagtatctacacgggggcagacgttaggcagtgggaactgaggactggagggcgtgtggcaaacacgggatggattttatcagaaaagagaggacacccaaacacgtgcctgccctatttatcttgcatgtcctgtgccaggtgaaggacgctggagcatgggtaaggttcctgagaacaactggtgggcagaaacgggctgggatgggcactgctccacaggcaacattaagcctctgagggggacactaatagtgctacatcttgtgggctgctgaaaagtaggtaacgaatggcctttattgcactttttcgttcttaggaaacaggggagtgccctgcagagtttctcttgatttgcagaaatcactgcagatcaatgataaggtgcaggcagaatcacgggtgacctctgactctcaagggaagaagtccagtgattggtctttccagggcctcaaggggccactcttcaacctgggatcctcgagctgggtgaaccgggtctggcttggtcaatgtgtggcaggcagattggtcgaccggcagacacttgggacaaaaggtggtgtgcccgggaaagctggggcaaactttccaaacagggaaaatttcttggcaaatgtgcagattctgcaaccagactggaaccacgattcccaatgcgcctgactccctttctcccactctagaactggaccaccccagaggaacagagatggcctgggagggccctgggtccagcgccatagcatcaaactggagataacaaaaggaaggggttggaaacaaaagagcagtttacatatcagatgttggtttcgaaacagtctttttgatctcaggaaaatggaggcagataccactggagaacctggctgtctgtctgtccatccgtctctcctggggggctctgaatacttcatatataaatggggtggtaccgtttgtggttgatctttttcctacaagttgggcaagtattagcattcttcagggaatcacggaggcactggctacagaagacatggccgcattctgtggaaacgatgagacgtccattctgcacgatctctgagtatccgtccatgcagatgggacaactgacagtacctgagggcctgaggcctgtagcgccctcatccctggcgtttctgggagtatgggtagtcacatatacgtctctgtccctggacaactcctcatcgtcactgctcaccacacagctgtcagcatggtcctggggcagcctcctagcattcctccttggtcttcttctttcgtcaacaatcacaacagagtcattgtgagtcagatcaaccaccacaggctctaaagattcacaagtgaggtccacaatttcatctccagcagtttccacgagttctatgggttctgcttccaaggagatctcgggggtggaggttgcttcccgagttcgcttctgagcttgtctagaatttattgctccaccacgacgctttcttgtactcattgtgctctttggtgcctttcctttcctacagaaaaggaagtgatctataccaaggtttgcagggaagtcaaatgttctcaacctttcatgccctctggttactcatctggcttgcaaaataatttggatccggacagatttccagtattttcaagtccgctgctttcccgcaaagctcggcctaacctggagctagttaggtccgcaggcgccaccgccggcgcactccggagaagaagctccttcttcagccgcccaggagagctcctcgagaaagatgccgccgcctcaacagcaacc

SEQ ID NO: 703 - DNA, 1356 bp, Homo sapiens
  misc_feature (197)..(197): n equals a,t,g, or c
  misc_feature (205)..(205): n equals a,t,g, or c
ctctcgtcctcctccctccagggcccgtgctttgtctgcacgcactcgcgcctgggggctcctagctgcggtggagtgtgtggagctgaccttcctggcccccagctcctctcctgtgctaagctccgggatgtttgtgggggtggcgtmagcccagggagcgaacccctgcaggactcccgaggagacctttgagncgggcggnctcgacgtgcagggcacggcgggctctctggatgaggaggaggaagaggaggagcgattccacactgtgctggagcagctgggggtggccccggtcctgggcgagcagcgggctgtgaggacgctctgggccaggctgcagcgcgagcgccccgagctgctgggctctttcgaggatgttctgatacgcgcgtcggcctgcctggaggaggcggcccgggagcgcgacggcctggagcaggcgctgcggaggcgcgagagcgagcacgagagggaggtgcgcgctctgtacgaggagacggagcagcttcgggagcagagccggcgcccgccgagtcagaacttcgcccgcggggagcggagaagccgtctggagctggagctgcagatccgcgagcaggacctggaacgcgcgggcctgcggcaggggagttagagcagcagctgcacgcccaggctgcggagcacctggaggcacaggcccagaactcccagctgtggcgggcgcacgaggcgctgcgaacgcagctggagggggcgcaggagcagatccgcaggctggagagcgaagcacgaggccgccaggagcaaacccaacgagacgtggtcgccgtctccaggaacatgcagaaagagaaagtcagcctgctacggcaactggagctgctcagggagctgaatacacggctgcgggatgacagggacgcctgcctgggcccacctgctgctgctgctgttgctgggctcggccccccagacgcggctctggccaccttcccagtgcccggtgaccagccccgagtgactcacggaccatgagctagaagctgcccttgcaggaggcttgtcatgggtcgggggtgcccactcaggatgcaggctctccccagggggccccaggctcgcctgactgaagacatgaaggacctagcctaggagtggtcagggtcccgggagtggccagggtcccgtgtgtgccctctgccagtcttcgctctgtccccgttcaatcaaccccatctcagttcagcagaaaaccccctcgtcaaataaaacccactgactgcaaaaaaaaaaaaaaaaaaaaaaaaaaaaaaaaaaaaaaaaaaaaaaaaaaaaaaaaaaaaaaaaaaaaaaaaaaaaaaaaaaaac

SEQ ID NO: 704 - DNA, 1615 bp, Homo sapiens
  misc_feature (629)..(629): n equals a,t,g, or c
  misc_feature (1610)..(1610): n equals a,t,g, or c
  misc_feature (1613)..(1613): n equals a,t,g, or c
gtttctgggaacaacctgaccatcagtgggctgagcccacccagatccagctgcaaatggaacaagccctggccggagagacmcagcccggggagaagcggcgccgcatggctgcacgtgtcccaactgcaaggatggggagaagaggtctggagagcagggcaagaagaagcacgtgtgccacatccccgactgtggcaagacgttccgtaagacgtccttgctgcgtgcccatgtgcgcctgcacactggcgagcggccctttgtctgcaactggttcttctgtgggaagaggttcacacggagtgacgagctccaacggcatgctcgcacccacacaggggacaaacgcttcgagtgcgcccagtgtcagaagcgcttcatgaggagtgaccacctcaccaagcattacaagacccacctggtcacgaagaacttgtaaggccaactgcggcgggaggccctgaagatgcagtcccccacctgtgtcctccctgggcccctggtggaaaggagccctgtggctgccttgggcctgccctcagccccactcctgttctgcaactgtccccacaggaaggggctctgttccctgtattgtcctccttctgaagccccttggctctgcnttggcccttcccctcaccacgagctcccggcctgcccagactgtggacactggccgtgcccaatgagacgttctaaaccaggacgcgtgggaacccttatttccaaaggaaaaacatgcatttcactccgtcgaggagcaaagtgagcccctaccccccaccccgatccccgctcccaacactgccggagtcgcgtcatgccatgccccctctcctgcacctccctggccctgccggccactgtggacgccctggggcttggcacccacctctggagaaactcggggccacctccactccatgtgcccagccccgccacaacctctcctccagcacattccagctctatttaaaaagtaaagacacccaccgactcctgatccccctctttttctatggagaacgttgccttatactctacttcagatgatgaacactgtgtactgtgtgtgctttaaagaagttttatttaattgctcccttcttcctttccttgttattcacctccctgatgcctgctttcagttgagggttgggggcaatgatgagcatatgaattttttctcactctagcaattcccttttctaaatgacacagcatttaaactcaaatctggattcagataacagcacctgcacatcctgcacctcctccctctcccttcacctcacccctgcccggcccaagctctacttgtgtacagtgtatattgtataatagacaattgtgtctactacatgtttaaaaacacattgcttgttatttttgaggcttttaaattaaacaaaaatccaactttatttttagttgtaactgcttgaggtatgttttatgaattaagtgacagatttgttatcctttattaacgtactttgttggtcagcactgggctgacaaaaattttttcttgctaataaatttagttgcctgaggcaaaatcttcaaaaaaaaaaaaaaaaaaaaaaaaaaaaaaatgcaanggntt

SEQ ID NO: 705 - DNA, 992 bp, Homo sapiens
atgcgactcgagaacgctagagggcgccgcttccgggagcccgcamgcgkcktccgggtgctcgcgcgccgacctggacgcagagaagccagagactttcgcttccggctgccgcaggcgcttcgctggtgcaggtaagctccgcacactctcggccggtcccgagtccgactccctcaagggtgacgcgagctctgccctttaaccggaaacgtctccctgctcaccccacccccgcgcagacgcagtgctgagcacacagctaccggacaaagagtgacgcccggagctggagttatggcggctacggagccgatcttggcggccactgggagtcccgcggcggtgccaccggagaaactggaaggagccggttcgagctcagcccctgagcgtaactgtgtgggctcctcgctgccagaggcctcaccgcctgcccctgagccttccagtcccaacgccgcggtccctgaagccatccctacgccccgagctgcggcctccgcggccctggagctgcctctcgggcccgcacccgtgagcgtagcgcctcaggccgaagctgaagcgcgctccacaccaggccccgccggctctagactcggtcccgagacgttccgccagcgtttccggcagttccgctaccaggatgcggcgggtccccgggaggctttccggcagctgcgggagctgtcccgccagtggctgcggcctgacatccgcaccaaggagcagatcgtggagatgctggtgcaagagcagctgctcgccatcctgcccgaggcggctcgggcccggcggatccgccgccgcacggatgtgcgcatcactggctgagcggtggagctgcgggcggccagggccgggcgctctgtgcggactggggccatgatcgggcccgggggcctgagcctgggaccccaccccgtgttaatgaaaaatgagttttggcagcgaaaaaaaaaaaaaaaaaaaaaaaaaaaaaaaaaaaa

SEQ ID NO: 706 - DNA, 1191 bp, Homo sapiens
gggctgacaggtatgaaaggttacagaaaatatgctccatagccctggttggcaaatacaccaagctcagagactgctacgcctctgtgttcaaagccctggaacactcagccctggccatcaaccacaagttgaatctgatgtacatagactccattgatctggagaagatcactgaaaccgaggaccctgtgaaatttcatgaagcttggcagaagctatgcaaagctgatggtattcttgtgcctggaggctttggaatcagaggaacattgggaaaactccaggcgatttcttgggcaaggacaaagaagattccttttctgggagtttgtcttgggatgcaactagcagtgatagagtttgcaagaaactgccttaacttgaaagatgctgattccacagagtttaggccaaatgccccagttcctctggtgattgatatgcccgagcacaaccctggcaatttgggaggaacaatgagactgggaataagaagaactgktttcaaaactgaaaattcaatattaaggaaactttatggtgatgktccttttatagaagaaagacacagacatcggttcgaggtaaaccctaacctgatcaaacaatttgagcagaatgacttaagttttgtaggtcaggatgttgatggagacaggatggaaatcattgaactggcaaatcatccttattttgttggtgtccagttccatcctgagttttcttctaggccgatgaagccttcccctccgtatctggggctgttacttgcagcaactgggaacctgaatgcctacttgcaacagggttgcaaactgtcttccagtgatagatacagtgatgccagtgatgacagcttttcagagccaaggatagctgagttggaaataagctgaaatgaatacatgactgggaataatggggactgcctgtgaggcctctgaaataattgaaggcaagatgaaggaactatctgaagaaatcactacactcttagagaatccctctgttctccagcaaacatgggatgtaaagcctcacagggaatctgataatacatacttctgtcaaccagaaccagaggggtagttttcttttccctccagaggcagcctttggtacttaaaatatctgtagctgattaaatttttcccaacaacctcaaaaaaaaaaaaaaaaaaaaaaaaa

SEQ ID NO: 707 - DNA, 2050 bp, Homo sapiens
  misc_feature (2031)..(2031): n equals a,t,g, or c
  misc_feature (2050)..(2050): n equals a,t,g, or c
ggcgctcaccgcctcaggagtccagcctttcctgccaaggtggctggctgagcctaactgtgtcagaaggaatgtcaccgaagacctggttcctatcgaggacatccctgacgtccatcctgacctgcagaagcagctgcgggcacacggcatctcgtcctactttccagtccaggcagctgtgattcctgccctcctggagagcgcagcctgtgggtttctggtgggcagaggtggctaccggcctagcgacctctgtgtttctgccccaacaggcagtgggaagacactggccttcgtcatccctgtggtgcaggccctgctttcgagagtggtctgccacatccgtgccctggttgtgctgcccaccaaggagctggcccggcaggtgagcaaagttttcaacatctacacagatgccacacctctgagagtctccctggttacgggacagaagtctctggycaaggagcaggagagcctcgtccagaaaacgtaggttgtgtcagggtgcgggtttttcagggggtccctgctcagccctgcaggtggcctgaggcaccgtgggagcagaggaggggccaccatctttaaccacctgttcccgtgaagaggaggagctcccaccggcccccttcccatgtggggtggagtcggggctgtggggtgaggcagcgtcttgctatccggaagcccttragaaagcttccttctctcgagctgctctctggtctgtagagctgatgggtaccgctgcttggctgacatcgtggtagccacccccggccgcctggtggaccacatcgaccagaccccaggattcagcctccagcagctccgcttcctgattatcgacgaggctgaccggatgattgacagcatgcatcagtcctggctgccgcgggtggtggcgrccgccttccagagcgaggaccccgcggacccctgtgccctgctccagcgaaggcaggcccaggctgtgacagccgccagcacctgctgtccccagatgcccctgcagaagctgctcttctcagctactctgacccagaaccctgaaaagctgcagcagctgggcctccaccagccccggcttttctccacagggctagcacacaggggcctggaagatacagatggggacggggattcggggaagtatgcctttcctgttgggctcacgcaccactacgtgccctgcagcctcagctctaagccgctggtcgtcctgcacctggtcctggagatgggcttctcgagggttctctgcttcactaactcccgagagaactcccacaggctcttcctgctggtgcaagcttttgggggtgtggacgtggctgagttctcctcgcgctacgggcctggccagaggaggatgatcctgaagcagtttgaacaggggaagatccagctgctcatcagcacggacgccaccgcgcgaggcatcgacgtgcagggtgtggagctggtggtgaactacgacgccccccagtacctgagaacctacgtgcaccgggttgggaggacagctcgcgctgggaaaactggacaggccttcacactgctcctgaaagtgcaggagaggagattcctccgaatgctaactgaagctggggcacctgagttgcagcggcacgagctctccagcaagctgctgcagccgctggttcctcggtacgaggaggccctgtcccagctggaggagtctgtcaaggaagagcgcaagcagagggcggcctaggctggggctcagagggccggagggactgaacgctcaccaccctgaccctccttccagagcagtgctgatcactggatcctgtatgtgaggaaaggaatcccccagtggacacagccttcctccccaagcacgtggtctctgcgccaggcagcccgggcgtcagagctcaagcacctgccccgactggagacttcagggcttgtcactttcagagtgtggaggtcaggatggctgcgggcaatgaagccttagtaaaacggtgaaaagtactcccagaaaaaaaaaantgaactataataaaaggan

SEQ ID NO: 708 - DNA, 2007 bp, Homo sapiens
  misc_feature (10)..(10): n equals a,t,g, or c
  misc_feature (22)..(22): n equals a,t,g, or c
  misc_feature (870)..(870): n equals a,t,g, or c
  misc_feature (875)..(875): n equals a,t,g, or c
acttctggancccccttccaanccatttaatttactacttctccatttctgggattcccaggcttcccatgggaactcatgtttgttttggtggtatgccataattggttgtgccagcttctcttgtattcctcatgtacgtgctttcattcatcttttgccaagtggagaaaaaataatggcttttggtcttttggcttttttattgtcttaatatgtgtatccacaattctggtatcaactaagtaagaaaaacccaacttaattttgtgcatgatattcataccttcctttactttcctaggatatgtcgttattgatccagctcaactttatgtatatgagaaacttggacagtctggacaatagaataaatgaagtcaataaaaccattcttttaacaaacttaataccataccttcagagtgttattttcctttttgtcataaggtgtctggaaatgaagtatggaaatgaaatcatgaataaagacccagttttcagaatctctccacgaagtagagraactcataccaatccagaagagcmtgaagaagatgttcaagctgaaagagtccaagcagcaaatgcactcactactccaracttggaggaggaaccagtcataactgcaagctgtttacacaaggaatattatgagacaaagaaagttgcttttcaacaacaaagaagaaagcagccatcagaratgtttcgttttgtgttaaaaagtgaagttttgggattactaggacacaatggagctggyaaaagtacttccattaaaatgataactgggtgcacarwgccaactgcaggagtggtggtgttacaaggcaacagagcatcagtaaggcaacagcgtgmcancagcntcaagttcttgggtctgccctcaggagaactcactgtgtcccaaacttacaatgaaagagcatttggagttgtatgcagccgtgaaaggactgggcaaagatgctgctcttagtatttcatgattggtggaagctctcaagctccaggagcaacttaaggctcccgtgaaaactctatcagagggaataaagagaaagctatgcttcgtgctgagcatactggggaacccatcagtggtgcttctagacgagctgttcaccgggatggaccctgaggggcagcagcaaatgtggcagatacttcaggctaccattaaaaaccaggagaggggcgccctcttgaccacccattacatgtcagaggctaagtctctgtgtgaccgtgtggccatcatggtgtcaggaacgctaaggtgtattggttccattcaacagctgaaaagtttggtaaagattatttactagaaataaaaatgaaagaacctactcaggtggaagctctccacacagagattttgaagcttttcccacaggctgcttggcaggaaagatattcctctttaatggcatgtaagttacctgtggaggatgtccaccctctgtctcaggcctttttcaaattaaaggcagtgaaacagaccttsaacctggaggaatacagccwctctcargctaccttggagcaggtgttcttagaactctgtaaagagcaggcgctgggaaatgttgatgataaaattgatataacagttcgatggaaacttctcccacgggaagattcttaaaacgaagaacctcctaacattcaattttaagtcctactgcattattagtttccataattctacaagaatgtttccttttacttcagttaacaaaagaaaatattcaatagtttaaacatgcaacaatgattaaagttttcatttttaaaaattttaggatgaaggaaacaaggaaatatagggaaaagtagcagacaaaattaacaaactcagacatgttattcatccccaacatgggtctattttgtgcttaaaaataattttaaaatcataaaatattaggtttgtttttggttattatcaataaagttaacactgagcacattttacaaaaaaaaaaaaaaaaa

SEQ ID NO: 709 - DNA, 2123 bp, Homo sapiens
  misc_feature (934)..(934): n equals a,t,g, or c
ctgacttgggagcttggctttgtgatgataattttccagatgatgaatctcgtcacgttgatcttggaggtggattgaaacctcctggatattatgtgcagaggtcatgtggactgttcacagcaccatttccacaggatagtgatgagcttgaaaggatcacgaaactgtttcatttccttggaattttcttggccaaatgcattcaagacaatagacttgtggacttacctatttctaaacctttttttaaacttatgtgtatgggtgacattaaaagcaatatgagtaaactgatttatgagtcacgaggtgatagagacttacactgtactgaaagtcagtctgaagcttctacagaagaaggtcatgattcactctcggtaggaagctttgaagaggattcaaaatcagaatttattcttgatccccctaaaccaaaacccccagcttggtttaatggaattttgacttgggaagactttgaattagtaaacccacacagagccagatttttaaaagaaattaaagaccttgctatcaagaggcgccaaattttaagcaacaaaggtctttctgaagatgagaagaacacaaaattacaggaactagtgctgaagaatccatcaggttctgggcctccacttagcatagaggatttaggtttaaatttccagttttgcccttcctcaagaatatatggttttacagctgtggatctcaagccaagtggtgaagatgagatgataacaatggataatgcagaagaatatgtggatttgatgtttgacttttgtatgcatacgggtattcagaaacaaatggaagcctttagagatgggtttaataaagtttttccaatggagaaattaagttccttcagccatgaagaagtccaaatgattctttgtggaaaccagtcaccatcctgggncagcagaggatattatcaattacactgaacctaagctgggttatacacgtgacagccctggtttcctgaggtttgtgagggttttatgtggcatgtcttctgatgaaaggaaagcattcttgcagtttaccactggttgttcaactctacccccaggtggactggctaacctgcatcccaggctcacggttgtacgcaaggttgatgctactgatgcaagctatccatcagtcaatacatgtgtgcattaccttaagttgcctgaatattcttccgaggagatcatgagagagcgcctgctagctgctacaatggagaaaggctttcatctcaattgagctttgaagtgcaatgggagacatcagagactttaaaaatactagtgaagcctcttgtgtttgtgtgcagagaagtatatgatccaccatgctaatgacacttgcctttttttccaccattaaggctttaagaacatgtggaataagttttttagctgctaatgacaaaacaaatcctgtaactacccagccagcaagtatatagcacagaacactgtgttactttacaagggcttatgtgactggaataaggtggtcccacttgactgttccaaagagcagcttctcagatcttcagtgttcactggtaaatttctaacagtgtatttgtgtaaagtttgtcatttcatactccatacactacagttgctgtcactgatccctgttttgctggcttttaagctacttggtcaaaaatcctgcttccttaaaacatagagaattaatgagcatctcaagctttttcttttcctttttaatgatgcctgcactatcaagagtattctagtgttctctctttgtttggcatataatcatgcaccaaactttttatttctttaaggtgggagtatatttttatttcctaaatgccatactatgaagatcaaagtcttaagtgtgtttgcagctcaaaaataaagatgtattaaggggggaaaacctggtctaagtgcaaggcacacttacagcgagttttactttcggttgtattttctttgtatattataaacatttatttaacttgttgccgtttgaagtaaaaaatttccaaaatgtatgctcaacaataatcattaaaatgtttgcagcgtaaaaaaaaaaaaaaaaaaaaaaaaaaaaaaaaaaaaaaa

SEQ ID NO: 710 - DNA, 3743 bp, Homo sapiens
gagtccgtcgtgctcaggggcgggcggaacgggctgacggacgcggctatgggccagtgtgagcggcgagtgggacgtgcgtggcgtgcgtgcgttgacctgggaagcactggacctgtgaggcgtgcgaactggtggcagtgagagacttcggcggacatggctcccagcgtgccagcggcagaacccgagtatcctaaaggcatccgggccgtgctgctggggcctcccggggccggtaaagggacccaggcacccagattggctgaaaacttctgtgtctgccatttagctactggggacatgctgagggccatggtggcttctggctcagagctaggaaaaaagctgaaggcaactatggatgctgggaaactggtgagtgatgaaatggtagtggagctcattgagaagaatttggagacccccttgtgcaaaaatggttttcttctggatggcttccctcggactgtgaggcaggcagaaatgctcgatgacctcatggagaagaggaaagagaagcttgattctgtgattgaattcagcatcccagactctctgctgatccgaagaatcacaggaaggctgattcaccccaagagtggccgttcctaccacgaggagttcaaccctccaaaagagcccatgaaagatgacatcaccggggaacccttgatccgtcgatcagatgataatgaaaaggccttgaaaatccgcctgcaagcctaccacactcaaaccaccccactcatagagtactacaggaaacgggggatccactccgccatcgatgcatcccagacccccgatgtcgtgttcgcaagcatcctagcagccttctccaaagccacatcctagtatcagaaggccaggcgagactgcaacactgctcatcaccccgcggcgtgatccctgctcttaggtgctgggcagaggggaagggtggtcagggtgaggatggtgagggagggctggtgaggggctcagaggaatacttggaacaacagcagtgttattgtagtgtggcagtttcttttatacataggtgagagtttttaaagtgtaagggaaaaattaattttttaaaaaacaccatgcttggagggtgggggtagaaatagacacaatattatttctaaggaatcgggttttcatttactctggactggtgaaaatattttttaaagccagtgctctaagacctcagcttttatctcagaaccccatgggttccagaccaagagtacaggaaatcaaattgttgtcctgtctgtctatagcttggaacagggagctttgattactgactccggttccacacactgtaagatcaaaaaaccatctccacatttgaaagagatgtaaggtgtattcatagggatggtggctcaacaaatcaagcaaactggaatcaaggggagggggaagggaatgaaatggaaagggaggctgattcccttcccctgacttaccactaatttactaggctacctactytcatgagtaacctctcacagctacccagcacatgccacaatcctatgctcttgccttcttttatctgcactgtgtgaagggactcttttaaataaatgagcaagtgtcctaagctatgtcatccaaagattgtcctttccattctcaaatcctgtgactgggatcactcaacagcactgtgatgtattattttcaatgaggtgcctttcttaactgaccaaatgctgccttgtttggcccctaaatcaataaaatatgttaaaatttgtatcccctgttgtggcattttttttagataatctaagctagaaaaatgacattgaattctggacctggctggaaggaaaagaagccctttcttgtcrctggcagctgtgtggtagggaggtccaagtatgtgcatatgagataagcctgcaacctcttgaccttcagctcctatgcaggcttctcttgagcccagagacaaggcagcttggtctagtggagatagcactgtgcttggagttcaggggacctaggacaaatcccagccagttagttattcactgtgctcctgtttcctcagctgaaaaaggaagttggttatgccaccttcttggccttaatggcattaaatgaaatttataggaagaaggtttttgctcagtacctggcatgcaacagacattggataaatgttagttggatccagatatacacagaaagatatctgcttcctgccaggctggataactgttgaatggacacttgtccatagtctagaaagccagtgcttctaatccttaagccagatctttgactaccttttcagttgcttctttaacactctttgttgcttctctgtgtgtcctagtttaaattcatttcctctccagcaaaagtgagcttaaataatttctccaaactaaagctctcatgtttttggaagggctgcctttgcaagtgaggtttctgagaaatgactgttgttcccaaaacaagagggagctgggctggaagcaccactattcttctttaggcatcttgttacagagagaggcagggtcttcactgacatattaaatcctgttccctgaaccagcccctccctcttctgctccacttcctcacctgtgcagagtcattttcaggtgttagccttactgatttgcactgatctgtttgttccctgagctttttaaataccctgtgaaaattttctttcctcccttggtcatcatgcatctaattgtggggaaatgtttgtcaaaccaacctgcaaagcagcatggtgtagttgagaagaataaacagagaagactgggtgaagctattgtttgtttgcttctttgggcctgggtttcctcatctaatctgcaaaccaagaatgcagactagtcctaccactcccggaagactgacgttgtgccaggtattatgcaaaggcttcatgtaaccctcgacttcacgtaaccctcacacagcaccctgtggagtcagaactgtccttcacttttataggtgaggaaaccagactcagagaggtgaagtggcattcctgaggtcatgcataagaggcagtcaggactgaaacacagtctctaacacttatccgtccccttgatcttgttgctgaagtgatttaattacttgcgtactctgcacacaggaagggctgctctgaataagagctcttttccatggacactcagcgctgccggaactgattttgaagaagtcactgccggctctgagggcctagggtatgtgtcttaggatctcctgtgtgcacaaagtgtcactgacagaacacagcaggatggagagcagcctcctcagaagcctcacaagtctttcctcagatgaagacagagcaacgagtcagaagacagatttcaacagcgacttcaccatgcgaccttggacaagttatctcacctcatcagtagaataggaatgatccctacccctcaaaggtgctgatgacactagtgaccaagatactcatgtgggttggactgcccaggacacagcagatgcttagtaaacacagatggaattcagagggaaaatgtaggcattgaagaaagttgtcttactgaccatccggaaccaggctaaggatcccctagaaatcatagacctctgaaattatatgcagaattctttatgtgttttcataattaataatagtctaacatattaaattcttagctgtgtgagaaaaaaaaaaaaaaaaaaaaaaaaaaaaaaaaaaaaaaaaa

SEQ ID NO: 711 - DNA, 1590 bp, Homo sapiens
  misc_feature (1564)..(1564): n equals a,t,g, or c
  misc_feature (1578)..(1579): n equals a,t,g, or c
gcccgggtccacacggcggggtcgcccgtccatctccggctcgcccgcggggcccatcgtcgacgttagcggccgttctccgagccgactgacccatccttggcgctgccgccgcgcgcttgttctcctccctcgccccgccttcatcctccccgttcacggaaacgacagctgcggctgcggggctggcgccctccctccacctaccacgtctgccctcgccgctctagccctgcgccccagcccggccgcggcacctccgcctcgccgccgctaggtcggccggctccgcccggctgccgcctaggatgaatatcatggacttcaacgtgaagaagctggcggccgacgcaggcaccttcctcagtcgcgccgtgcagttcacagaagaaaagcttggccaggctgagaagacagaattggatgctcacttagagaacctccttagcaaagctgaatgtaccaaaatatggacagaaaaaataatgaaacaaactgaagtgttattgcagccaaatccaaatgccaggatagaagaatttgtttatgagaaactggatagaaaagctccaagtcgtataaacaacccagaacttttgggacaatatatgattgatgcagggactgagtttggcccaggaacagcttatggtaatgcccttattaaatgtggagaaacccaaaaaagaattggaacagcagacagagaactgattcaaacgtcagccttaaattttcttactcctttaagaaactttatagaaggagattacaaaacaattgctaaagaaaggaaactattgcaaaataagagactggatttggatgctgcaaaaacgagactaaaaaaggcaaaagctgcagaaactagaaattcatctgaacaggaattaagaataactcaaagtgaatttgatcgtcaagcagagattaccagacttctgctagagggaatcagcagtacacatgcccatcaccttcgctgtctgaatgactttgtagaagcccagatgacttactatgcacagtgttaccagtatatgttggacctccagaaacaactgggaaggtgatcactgtgttcagtgttgttggaatggattcagactggctaatgggggaaaggggaaaccagaagggcaaggtgccaattacctacttagaactgctcaattaagtaggtggactatggaaaggttgcccatcatgacattgtatttatatacaattaactctaaataaagcaggttaagtatcttccatgttaatgtgttaagagactgaaaataccagccatcagaaactggcctttctgccaataaagttgcatggtaaatatttcattacagaatttatgttagagctttcatgccaagaatgttttcttacaaaattctctttttattgaggtttcactaataagcagcttctacttttgagcctcaacttaaagcagaactgttttctactggatttttcattaacagcaagctttttcttttatgtaaaataaatctattgtgaattgaaaaaaaaaaaaaaaaaatccgggggggggccccgncccctttgggcccnngggggggggtt

SEQ ID NO: 712 - DNA, 931 bp, Homo sapiens
gcaataactgtgatcaagagttattgcatttatcttcttcaggattgaagccattttgaagragataaatgcaataactgtgatcaagagttaaataaaaagccccaggacgaaacaaaggagagcacttcatgccctgtggtacaaaaaagagcagctctacttaatgcaattcttcattcagcatatagcgagacatttcttctgcctcatttgaaagacatcccagcacagcatatcacgctgtttcttaagtatttgtatttcctgtacctgaagtgtagcgaaaatgctactatgactcttcctggaatacacccacctaccttgaaccagattatggattggatatgtctacttctggatgcraattttactgttgttgtaatgatgccagaagcaaagaggctactgataaatctttacaagcttgtaaaatctcagatatctgtttattctgagctcaacaagattgaagtaagttttcgggagctacagaaattaaatcaagaaaagaataatagaggattatattcaattgaagtgctggagctcttctgatattatcaattctccttcatagacattttataaagctcttttatgtgaactcttgcttcatccaggcaagaacggtgttttgtttgcgaccatctcagtgtcaagagaaacgtgtcagtgagtacctggaccatcacttaactgatgctccggggtaggactgcaggtttcacatgaacctgttctaggctgtggacattggtgtggagaggttctgcaattttttaaaaatatgtaactgggttgattttaagtaaaattatttgtgtattgataaaagtctaatttcttatcatgtgttttgaattttttcttttaataaaaaatgaccattgaagcagtgaaaaaaaaaaaaaaaagggcggccgct

SEQ ID NO: 713 - DNA, 1036 bp, Homo sapiens
  misc_feature (957)..(957): n equals a,t,g, or c
  misc_feature (989)..(989): n equals a,t,g, or c
gcggccgccaccaccacctcagctgccctcgcgggcagcacggcgcggcaaaagcgcacgtcgcctagcgatggcgcgkggcggggacacgggctgtaccggccctcggagattccgcttccggggccgccgccatcgctctcccgggcttagaaggcccggctactgacgcgcagtgccagaccttasccctcacggtccttaagtctcggtcgccctcgcctcgcagcctgccacccgcgctcagctgcccgcctcctcagccagccatgctggagcatctgagctcgctgcccacgcagatggattacaagggccagaagctagctgaacagatgtttcagggaattattcttttttctgcaatagttggatttatctacgggtacgtggctgaacagttcgggtggactgtctatatagttatggccggatttgctttttcatgtttgctgacacttcctccatggcccatctatcgccggcatcctctcaagtggttacctgttcaagaatcaagcacagacgacaagaaaccaggggaaagaaaaattaagaggcatgctaaaaataattgaggttttcatgattcagcacctgcttttgtttctgtgagatgagctaaattgctttcataccccagataagagctaaaaccacctaatgctcttatggcacagctgtgtatagatttagttctctttatacttcatttctagcccagttgggttttgatttatataagtagtttagaccttctcttcataatcttgctctgagatggggaacagaacacacaagtatgaagtttctttcaggtgtaaataatgaaaaataaatgcctcataaatgatagtacaatgtaactatcaaagttttataattcattatgagttaaccattttaatgtttccaattaaacctcatagtgcaaaaaaaaaaaaaaaaaaaaaaaanaaaaagcggccgctcgaattgtcgaccggccnccaattccggaccggtacctgcaggcgtaccttctatagtctcacct

SEQ ID NO: 714 - DNA, 2114 bp, Homo sapiens
  misc_feature (1)..(1): n equals a,t,g, or c
  misc_feature (15)..(15): n equals a,t,g, or c
  misc_feature (1240)..(1240): n equals a,t,g, or c
  misc_feature (2053)..(2053): n equals a,t,g, or c
naggtctggaaaccnccctgaattyatttcattaaasgatsagaaacccagggtccgagagcaaagggacttgacggtggccgyaagtgcttcaaaggcagagctgggattggaacccaggtgtcatctcgatgggaatgtccagcagtgatgtccaagtgggaagtgaagacccgaaggctcaagggacacaggtggctgacagtggtcaaaggctagggggcaggattcaggcagaggagctctagggggtgtttgccaccctgtgtgaactcccgagactctaccaggggggccgaaaggagtaccccagaagggcccaaggggtcctcggggttgacctgactctctggagtcctggatgggtcagtggctgtgggtgtttggggagggcggttcctgctgccaggctggggcagcagaccctcaagacatagttacaaagcctttggtgtcactcagtgtctggcttgccctggggcccagaagggctggtcagtcctgcctctggcaggcaatctggtaggcccatgattcaaggaacagtgacattcagtggtccagtccactccctcagaggaggcgggtccagagggtgaaacaggctgtgttgatgacagactccaggtggtggtaggtggagaccagttgggcaggggggctctcgctgtcctggggctgtactgggaagggctctcggaaaaccactgtcagagacgtctttcctaagtgggagtccagaaacactagcacaaagcagtcagtgaacttctgattcagcacaaccaggtactgagttcccaagtctgggctttggaaatggcgacagctctgggggaagcggcttaggagaactttgatcaggctctggtaccaggagaccgtcatggataggaagcagtccagctgggggtcgatgtccccaatggatttggcatggactgcttctaggagttcctccagctctgccagggccaggcgcccccctagccgcagtcgatcaggccccggtggctccagcaagaagaggcgcttccaaagggtgtcccgacggcagtgccctccagccagccgcaccagctgagccagccgtgctcgtgccatgcccacctctgcagccagtggtgggaacagaggagccggtccaggcgctagaataagccctgaggcctccccagggctgccagctgaactcccaggagcctctggctcagggggcagtctgggtggcttccggaancggcgcatgtcagcagtgagcctggggaagagctctcgctggctggtgagcaccacgaagaactgtagccgcagaacgtgccgctcagcctctccttgctcctcaaagggtgcagcacagtgacagacaagcagagacacatcaaagtcatcctggtgtcgaagtccctcagagtccaggtaggagccagaactgtgccatgccgacaccagggcatactcgttgtgttctgggccccctggccgggccattcgcaatggcttcatgtggtaagagctggcgtgatcagccacgtagttgtatagctggtgggcagcaatgagtggtgtggggagctccaatgtcccttggtaaatgtgattgcggccaaagtggggtccgtcagggtggtgggccaggaagtgtcgcagaaaggtggtgaggtggtagccgtgccgcagcaccagatgggcacctagcacgtgctgatgcacgaggcgcagatggaagtcatagctgaacgagtgcacgtgcatcaggtcccgcaccttgtcacactcctctgtgaacagcatggacagctgtgagttgacagcctgccccattgggattcgggaacattccagggcaaactgtttgacacagaagtaacagccctggaatgccagttccatgaggatgatgcccccaggcagtgcccgctgcaggtggtaggtggttaccggagagctagtgctcttggggctcccatcagtcttggttttagggcaggagaaggagcctcgaccctctgttccaaggatagcyatggccgtggccggctggtgctgcggncgggtgaggggggccgcagtggtaccagcacaaaacctatgctctgcagatactgcacaat

SEQ ID NO: 715 - DNA, 590 bp, Homo sapiens
  misc_feature (565)..(565): n equals a,t,g, or c
gcctactactactaaattcgcggmcgcgtstaggcgagagctgcgaaaggcgagagctgcgaagggccaggtgtcgggcgctgtttctcgttttcatcatatagacaaaacagccctgctgcaaagatggtcaacgtacctaaaacccgaagaaccttctgtaagaagtgtggcaagcatcagcctcacaaagtgacacagtataagaagggcaaggattctttgtatgcccagggaaggaggcgctatgatcggaagcagagtggctatggtgggcagacaaagccaattttccggaagaaggctaagaccacaaagaagattgtgctaaggctggaatgtgttgagcctaactgcagatccaagaggatgctggccattaagagatgcaagcattttgaactgggaggagataagaagagaaagggccaagtgatccagttctaaactttgggatatttttcttcaattttgaagagaaaatggtgaagccatagaaaagttacccgagggaaaataaatacagtgatattcttacgcaaaaaaaaaaaaaaaaaaaaaaacnaaaaagcggccgctcgaattaagcc

SEQ ID NO: 716 - DNA, 2180 bp, Homo sapiens
  misc_feature (1017)..(1017): n equals a,t,g, or c
  misc_feature (1649)..(1649): n equals a,t,g, or c
  misc_feature (2151)..(2151): n equals a,t,g, or c
gctggcgcgccgggcggctccgcgtaatcctccggcatccgccccggcgggccgcccccgcccgcggcagccccccgagcagtggcccggcatcggcgccttcccggcgggcaagagtgagccatggagctacgtgtggggaacaagtaccgcctgggacggaagatcgggagcgggtccttcggagatatctacctgggtgccaacatcgcctctggtgaggaagtcgccatcaagctggagtgtgtgaagacaaagcacccccagctgcacatcgagagcaagttctacaagatgatgcagggtggcgtggggatcccgtccatcaagtggtgcggagctgagggcgactacaacgtgatggtcatggagctgctggggcctagcctcgaggacctgttcaacttctgttcccgcaaattcagcctcaagacggtgctgctcttggccgaccagatgatcagccgcatcgagtatatccactccaagaacttcatccaccgggacgtcaagcccgacaacttcctcatggggctggggaagaagggcaacctggtctacatcatcgacttcggcctggccaagaagtaccgggacgcccgcacccaccagcacattccctaccgggaaaacaagaacctgaccggcacggcccgctacgcttccatcaacacgcacctgggcattgagcaaagccgtcgagatgacctggagagcctgggctacgtgctcatgtacttcaacctgggctccctgccctggcagggctcaaagcagccaccaagcgccagaagtatgaacggatcagcgagaagaagatgtcaacgcccatcgaggtcctctgcaaaggctatccctccgaattctcaacatacctcaacttctgccgctccctgcggtttgacgacaagcccgactactcttacctacgtcagctcttccgcaacctcttccaccggcagggcttctcctatgactacgtctttgactggaacatgctgaaattcggkgcwkccncgakccaggctcagccccgtgacagccccatgacagcgaagggacctttctgtccccgcccctgtccctgtgctgggcccacgtactcacccacgtactggtaaggatcctctgaggtctggcttttccaaaatttgccacttgaccagtgagcgcaagaggctgagcctcagctgtgctttttgtccctttcaggtgcccggctcccctgggcacccagagccccccagataggccggtggaggaggtggaggagctgtccccccaaaactactggcctgtggtctggactccagggccccatttctgatgtcgccaggtgtgcctgagcccatcggggccaggcctgaggaagtgtttcttgggaggatgggatgaccccctgttcccaagagatggcagcacagtggaggccatggtggaaaaggccctgccatggggtccttgagggccaggacagcctgagggagggatggtggccactgcccacaaggggcctggtgggaacgggtcccaggacagactcatagctagaccccgttggcggcctctgtgttgaaccagaactcattaaacacctcctcttgcttcatcctggtgtgcctctttcatggcagggccctcagccaccntgctagatggttaggaccaaggctctgttctcctggaagccaaggtcggcacattggtcttgggcttctcttctctctgggtttcttgttcactaaggagtaacacagaggtcaggcagagaatgggggtctcgcaggctagggacctcagggagaggcctctgttgcccttttcagcaaggctggaaatgggatatgggcaggggacgtcttctctgacttcaccctagaccttctggctccaaatggggcccatggccttgagcacctgggaccagctctttccaccacagggcattgggcactgggcactttcttatcgagatagtcactcccacgtctggttcgtgatgggcttggccctccagctcagcacaactgcaagaatggattttgtattctctagacggacactgtccaagatggtagccattggccacatgcgacacatttttaatgaattaaaattaatcaagactggaaatttcggccaggctggttngctccatgcctttttatccccagcacttt

SEQ ID NO: 717 - DNA, 5169 bp, Homo sapiens
ttttttttttttttttttttttttttttttttctaatatcaaaatagagcaatttattcaagacactgaatatgatctgttgattctctcttgaaacaaatgagctacaacacacaaggtgatttttttttttttcttcaaagagcgtgagggtgagtacaggtggcggggggaatgaaaaggcggtcgctgtcatctgaacagaatcggaaaaatgccaatagagaacatgtctggctgtacgtctgacacagacaataaaaactgcacaagccagaatgcaaaacttcagtgagtggcggaaggaacatttctgcatttgacaagaaacataagctttttttttttytttttttaaatggcggaacaaaaggttaaaaaacagaaaagcaacaagaacaaagcagacccttacatttgacaaagtgcacttcacttggctccatgatctatttcttagaaagactaaacaaaagtcaagtcctacggtgtcgcgaggggtcagagggtttcaccctgtaacgtccggcccttttggtcccccttggggcagcatccctttcccaggtgtgtgctggacctgactctcggtcactgtgaacccgaccaaacactctaggaaggtctgtcatgctatgtctgctttcaaggtcacgtttggtcactaagacttaggcattcctcaccatgttttaagagctgtaaacaacgttgaacaataacattccacaggccatttcttgattacagggatgactctaccaacatgccagcagcagagagggtgagtagtggtgtgcaaatgctggaggctctgaaaacggctgtccatggtgttgtcccgctgagaacggggatggatatgaagggtgctagctgcatctcgcgcttggttttgcttgcggccgcaggctggggaagccagggatggagcctggggtccgaggcctcccagcccaggtttctacctaacaattccgacatggttcacattcatcaagactaaagccatccctcgggagagaccctggctaccgacattcatgtgaagattgtctagtgaattgcttgcgacacatcccaccatcgccatcccacagttgttactggtttgtcaagcataagccatgccctaacgacaggctggcctttgacagcagatgttctacagagatgagtgcatttttatttgggtggggtagagatggtgtcttttggaccccaacaaactgtactctaaacttcacagagtccttgggacgggaaatcatcacctcatccagggacactggctatcttcaaagatgggtgcggcgactccacatcactgtgaccttctttgctaagtgtttcggaaacagaacacgaataaaatactcatctcagaaccagagcactttttggtcttctgggacatgaataattcacatacccaagtggaggccaatcaatgatctgagaatgatcaacgcaccctggcttttgcaggtggtcctggcacgttccaagttccacagaagccctgacccttccccgatggctgggttttggctccgcagatgaatgccaccttcacaataacaccgtctcactgctggaacacacaccagattgcaccctacccrctgctggtgacccagcagcccccacgggctgggccatcttcctcagcccttctgcccacaggaaaaccaatgggagaagaggcccttgtcctttggccttttcccccttgctaatgacaaaaataagtccgtgtcgggttatgacagcaagcagatggaggtcaccagattcactgaaatgaagctcttctaggaacacaaagccttgtttaattttttaaaaacagcaaaaagattatttaaaaaagatctttctcctagtcttctgtgagacaaagaaattataaagatggcagaaattattagcgacgttctacctctataattcacgttcaggactgaaaatcttccttctgcattcatttctgtcagcgttagactaagtgacatgcgggcgcctctatgtcagctctgcaaggactcgccaagcctgctcttggagaaatgaccatcggtcgttatacggttgtgggaaagatgtagccaacacgcctaatccagccgagcagtcggtttcgacggcttctgcagtaccttatggttctgccaatgctcccttgaggccagagggcgcgcggctcttcgctgctttcctgctggctgccaaggtgcatacacaccaaaagatgcgaggttcttcttccagccggcatggcggggacctccctcactggctgcagagcaatctcgctgctgaccccgaagactgacccttgtccagccagagttttcctgaccacctttcctgaggctgaggggaaagccaggggctccctcaggccctgcctgtggcttcttcggttctttttaaaacatgaatcacacaaagctctctatgtctgatggccattttaagattttaaaattgttttaacataaaaatattatttttttttccaaaaatactccaggctctttctcttataagtcatttttttttctcctgtaaaaagcccccctgccctgccttcttacataaagcacttactacgcgccaaagtgcccttgagacctaagatctgaagcaactatgagaaaggtacagagggagagagagagagaaagagagcacgccagtgagaaagcgagcgcgagcgcgagcgcaaggggaggagagggtgggagagggcggaagggggaaagctgtccgtgggagattgtgtcttcatgtccacggggctgcatctcttgatggtgcactgaaaaagcagagctcaccagacagagtggaaaggcagggggaggggcagggagcaacagaaggaagagacaacaagcccaagacagcttccatctcagacggaaggcccccagaagatagaattccagccgactgaaaaaccacccaatgaacaaagaagattctagaaaatagaaagtgttgggattacaaagttgcgcgtttcatcggtacaaactggtctttgaacctcctttgtgagagcaatygtagtgtccaaattgttagggaaaacaaaaaaaaaaaaatcccaaggaggagggtttttcccccttccctgtttggtttatcacagcattttgctttttttttggcacagctttttacgtttctttccattcagccatcacagagcctgttccgggtggaaaccaatccacacgcctcgagctggtgacttcctccttcccaggctgaatgtcctcagtggaaaccattctatccccgtttgatatgatttgcttctgtttttgcttgccttttaaaaacttcttgatgaagattacgaaaacatatagactcctgcggccagagacgagttggtttcagagtacactctaacgcaagtcaagttcctacagttttggagaatagagctgcaaccctacacattcacggctggtcattagaattcttttcttttttcgataatattttgtggttacttccgcagatccaaaacacacacagagccgtcggacgcgctggcacccactttgtctcctcgggcgttccagcacacctcgaagatgccgccagtgcctcggtagctgtggacaagatttccactctgagtattccagatatggacgcacttgtcgaaggatccactggccaagtacttcccatcagggctgaaagctacgctatagacaggctcctgatgcttcgtgagcgtgtgggtgcagacgcctcgttctatgtcccacagtcgcaccgtagaatcaaacgaagcacttgccaacatgatgttggagtttgggttgctggtggcgggcccagtggggctccacttgatggtgtagatctctttattgtgagcctgaagatcatggatgcacacctcctgtttcatgctccagatcttcaatgtcatgtcatccgagcaggatgccagcaacattccagacggatcccatttgatggcgttgacctcgtttgtgtgtccctggaaggttttgactgggcggtcacagccgagcctgcacacatggatacacatgtctgtgctacaggaggcaaaggtcgtgttgttctgccagtccacatcaagggcaggggctgaatgaaaaggaaactgctgtttggcttctcctgtgtgggcatcccaaattattgttgttttgtctacaccagcactcaaaatgtaattcccctttcggttccatttcaaggcaaagatggggcctttatgttggcctaaggtgctggccaggttaccatcttccgtccatattcttgcaaaaccgtcatatgaacccgtagccaagagtgttccattggtattccagtccagtgaggtgacgtctttgttactcgggacgtcatggcccccctctcgtatacagtgcctcaacacgagctgggtggagcccccgttgctattctcattcaggttccatatccttgcagttgagtctccrgatccggaggctagcaaatcactgacaggattccaggcacaaatgaacacctcagactcatggccccgaaggactgtggctttgctggatggaatctcaacctctccatctatttccattggcttcgcgtgattattgactgaatgtgctctgttctcttccccattcaccgtggcctctctgttcttcgatggattttggtgggaaacgccggctgaggtcgtggtggctgctgtcgctgctgccgtggccgcagccgccgccgccgccgcactggcttgctgctgagcgagcttctctcggaatgcctgctgccgcgtctgcaccacgtcgggcatcacggcgtctatcagtgacagggactctatggggcggccgtcgaacactgtgccatcctcgttgatactgatctcggcctctacatactgcaggcccttctggagaatggagatgagggcggccggtggcactagcgtcccattgatgttggactggctgatgtggctctcaatccsaaacgtgaaagccgagtgggaaaaaccacaagtcaggaaccctgtacagaaaccgcacaaggtatgaggcgttttcctgaggggcttttgttggctctgtaagtcaacttttgattccttaaagcagtctgtttatatttgaatga

SEQ ID NO: 718 - DNA, 4702 bp, Homo sapiens
cctccccccctttttttttttttttttttttttttttttttaacaatttattgagttttatttatctacaaaaatatagcaatacagtgaacttcaccaaatcctaaatattcagtacctgaactggctacaacaccgtgtgcacacccagttcctgcagaatctcttgcagatatgggagagtcagccagtgaaaagatccatttcttgggaatccttgtcaacaagaccagttcagaaatccaggatatatagaagcctactgtaatttaaaaacagtaacaaaaaccccaacaaaacccaaatcaacaaagaccaagataaaggtgtgataaacattaattgtaatggttttcctttacatgcaatacatgcattttaaaatcactaagaaacacgaaattttgtagagcaaagtttgtgtttcacgtaagtgcaaatgaatatatattttattttttatactattaaattatatatattttttccatacaaaagcacacagtgttaatctataaaatgacatccaagtggatgatgattgtttttgcatgtccccctgcttagatttttttaaaatatatagtcaaaaattaacatccttctttaaaaatacagaaggaaaaaagggcaatwaaaaaaatacaacttggctttacggactggtgaagcatttttcctgatcaagaggcaaagttccagtgacagctgccacagggccctttagtcctccagcggtaacgactccactgtcactctgaaacaagtcttgctgatctacttatttaagaagcagcccaggatctttcagtgtcatttcataggtttcaatgactagactggttttcaagatgttgcgcttttgtttaagtattcagaaattttcaagtatgcttgtcctattatcgtttccttacttttgtctgtttctactaaaggtgcccaaatagccataaacacaaacatcccattcttcactgcaattttttaaacaaaaacaaaagccaaaaattaaactgtattctaggctacagtttttgatatgtatgctgttttatgtaaaaagaaatggaatctgaaaagatagaactataaacaggtgactttataaaaatgtcctaagagaattttatgagttacaaagaaagctgttcattttaccatgtgatagaattcactaagatgtatgtaatgttatgggtctgtcagtgttatgtgtagagtgcacctgtgatcttggtagctgaaatcaaaagcagcttaaattgacaaactttagcacacttgactgttaaaacacaggcagcttttcaaatataattgattctaaacagatgtatacaagtcacagttcaaatcttacaaattaaaagtccatctggagaattttttgactatgaggatttaaaataatatacaaatgtaaataaatgtgctcttaatagaaatcaaaatgtacagactcttcacaggtgaactaatagctgttttaaatgtcttttttctgcactaaatatatatctcatttaattaatggagccacagcaaaatactactataatttcaaagcacagcctgtaaactaatacatcttatgatgtaaaaatattgcacagtttggtactccaagagtaagctctacacttctcaagcagaatggtcaaactcttggcaggaaacacaatattacaagaaccagacaatttaaagtatggcgtttttagggttatattcgaggaatgctattcaacagatgtcctattattgtgaagaagatgaggaatgcctatcacatattattatagtaactgaatagcaaggtgcctatcccagcttatctaaagcatggggacaaaaagccaccgaacagttttgcagccccaggactaggaatatatttaaatgtatctgcctttgcagaaaacaacaacaaaaattctacatctaagcggctgtgtagatgtttaagagataaacaatttatacagtttcaatcctctgaaggcttactttttaaaaaacattacatttgtgaaaagtttaaaacatactacttaacagtggaataaagtgaaaccaaaacatgttcaacttaaaaaggcaacaggaacctcaaagcaaattaacatggcataaatctatctttgaaagtactcgaaattatatatagctccaaaacttctaatatggtatgccaaacatttggttaaagatatgttccatcattattttcaagaagtatgttaatacacattaagtaaaccctgaaagctcagcttggccttaatttttaggctttacaaatcatatgctgaggtcttcatgcgccgatcagtacacacacagatctggaaacttcatctcatagactgggacagattggtattgggcatgcccagaagtaatggtcagtgttcctgatggactgggaggaggacgtatggtgagttccaatatttgggcaagtctatcatgaagcaaatttgctttggattcacactgtgctgctatttcttcaaaaggtgctttctgaaatttctctatcacaagacgcctcttttccttttcctgttcttccattccactggtatcaattgctttcttcaatgcttcaaaagtgatttcttcagtgttactaaccacatcatcagaaggaacattgttggataaaatatccacctgaatggatacggtgtccacaatgctttttcttctagaaagtcgatctycayctgttacttgtggtacatacggaactgacaatctctcaacactatatccacttccacctagcgactctgcaatcttgttggtcagaaagtacaaatctttttcatgcttctctaaagattttggaagcatgcacttatctctgaagatatgctctggtagaaaataaggggcttccatagttcgaatttcaataaccttgctaacatgctggcaaaatgcagggacagctatcatctgacttacaaagttgaggtatgctgcaaccagtgccatgattccacaacgatggaacattggcaaattatcctcattgataattgcactgtcctgtaaagcaatggccagtcgaatgagatcaataactacttcttcattagccagttcaatagttataagagcaagagaagtataaagtagttcatagtttttctgaacgttgtcttcctctttacaacccaaatatatgtgccgatacagctgttgcccattctttttcatgaaacttgtgtcttgtctgcaaattttttctctttttatctttaggtcagctacatccggtattattctgatccctcgaagctttgccctattgtcatgacgatccatgagattatgcattacttccaagaccaactgtctcagttcgtagtcctccatgagagatggtgataacaaaggatccaggaaagaccctggcagtgcagtaacaatcgtcttcgctttatatccagaggtcaccataagcaaagatctcagcaacattatctgaattctcctggttcccaaatcccctagttgactgatatccaaagtatgggtagatgttccaaagacaggtactttccccataatgaacatcatgatttctgacctctgataatctggtaggttacttccaaaaaatcctattgtttggatgatagcattctgcacaatcttctcatcattgtctttggaacttgtatttaagtygacactgcctacagatcccccctgtaaatcatttgcttcgaattcaacgctgagacgcagatgtttcaaaagggtattgaagacttccagcactgtcggacctatggaacctttagcagcaatggcaacagcctctaacagaacctgaataatacctgctcgaacccggggagcatcttttttacgagcatcaaggtgtcctagaatctcctggatcacatggtgagaatactgagcctgaatggaatacattataattttaaagcagtgaactgcaaattcattgggatcccacagtttgtgatgatctaaatgcgcaaaaactggtctaacagcattattcatattcccaaaagttgctcgacccagcagttctctgaaacagtttwcagmcagcacagcaggattctcttctttgtcagttgcagaaggagaagaaggagggcctatgcgactgtcaacttcttctatcttttgcatgttaaacaggagggatggamcaatcttatccatatgctgaggttcccaaatggtggcccgaagttcatcgttgactgttttgcgaaccacaccttgaatacctctaattccagcaattcgtatctctgttcgtatttctggatcactatgacaggaatggcacatggcactgaatcgagacacaaaaaagtcataacgtctgtgataggatggtgtgtcttcttcaatatttgcaaatttgacaaaagaatttgttccaagaacttgaagctttggttcccccgattccagcagctttgccaccatatgaagaaagctttctacaaatggcttaatgctttgagaatggcaagccatgagaagttggtccagtgcctccatagcaatcaaaacatacccagaacgatgtctgacaacatccctgctcaacctttctgccaggtaagaaccaattcgatccagtttctctggagcagatactgcataaaatgtcaatttctccatatcagttttcaca

SEQ ID NO: 719 - DNA, 505 bp, Homo sapiens
ggccaagctgggagggaagaagaaagggaggggaggggagaatcgaggacggacggcctagccaggccaagaatgcaattgccccggtggtgggagctgggagacccctgtgcttggacgggacagggtcgggggacacgcaggatgagccccgcgaccactggcacattcttgctgacagtgtacagtattttctccaaggtacactccgatcggaatgtatacccatcagcaggtgtcctctttgttcatgttttggaaagagaatattttaagggggaatttccaccttacccaaaacctggcgagattagtaatgatcccataacatttaatacaaatttaatgggttacccagaccgacctggatggcttcgatatatccaaaggacaccatatagtgatggagtcctatatgggtccccaacagctgaaaatktggggrgccamcaatcattgrgaaaytgcctacaamaggsgccctttgagactgcaaggcataatt

SEQ ID NO: 720 - DNA, 2873 bp, Homo sapiens
  misc_feature (10)..(10): n equals a,t,g, or c
  misc_feature (27)..(27): n equals a,t,g, or c
  misc_feature (67)..(67): n equals a,t,g, or c
  misc_feature (2029)..(2029): n equals a,t,g, or c
gacccaaatnaaaaaccgggaaaattnaaaagccgggtgccgggtccagaccttttttggttagaanccccccccattwaaaaaaaatactgtttgtttaaagcatgcataaaaatttatgtattgaaatatacttaaaaattcaagatgcttcccatttgtgtaatatttacctggaggactcgtacttaggtgtcttaacgtgaattgagtctccaaggtctccatgtgaaacaagcaaaaagagaattatctgtaatgttgtaatttgtacctaagttttttaatgagtgaaatttgcattataaactttttccattcataaatacataagtgaaccaaaggtttttgtcctttccttcactgatttgctttaaaaaaaataaaagataatgatttattgcagaattatgattctattttctcaatatgttaacttggaaaaaaattttagccttatcttaatctgtcccaacagcaatgtgacggatttttgcagattcaaaatctgcaatggttatttacaagtcaatctactgaattccttttttaaataatcttttgaaactaagaaaatgtgtcaaattgtgtgcattcattctgtaggtaaaattcttaaggattgccatgtcagtccttcagttgtacagtgaactgttgtacactggttcaatgaaaggaagttaaaagtaccttttacatattgtaaaagtggatacagttgatttgtgagtaggcactctttaatccattacctggcactagcaacattagaattttaaaataaaataattgggaaagaaggtgggtcatgtattaatcagtgaacagagatttacctaaccaacagacttggattgtcttttgacataatcaaaatgcaacacatgcactttgtgtgtctcctcttaattgaagggagggctgagggatgttttctcttcttgtcttgtgtataattctctattgcttaggatattaaagtagagcactcaagtgtgggtttctgtgttattgaggatttgtttggaattcaaattacagttatgtactggatgctacagacttataacagcatagtgaatggtaagactagtgcaaaacagttatttctgaaaattaaagaccattattgctaccaaatcaatgtgactatttcatatgcattttgcctttgttaattttaaacaaacaaagtatcattagtgatcagctagctaccttctactttccatttttcaagtggattgttctcttaatttgtatataacctgttgtctaaattttatgtacagtcttttataataaaccattctcctatatgaaattttggatactgttaaaatataactcatgtggacttcaatgcagacttcacatttttctgacctttactcctacggtaaatcaagacaaaccatttgaattttaacattggttatttatttgtgtaatggccttacatgtggatattaacagtgtaaacaataccacatataaccatcaagataccttgattataatttataggactagaatgacagattcaggtggtttattaattacatttaaaaagttttctgaaaaaacttttgcaataaaaaaaaataaattgcccatcaataagtttgatatcttttaaaatgatttttggttatctgcacatgaagcaaacaaagtgtattccacaaaattctttaggcacagtctggtaagatagctgccagaaagaacagaaagagttgtcatttatctcttgtgagtacaatttctgaaagctgaatgagggcatctctttctggggatggtcgaagtttactgatctctcttattgcttcatggcagtactgctgggcgaggtaggttgtttgttgcacaccatcactctgtagtacatactgtcgagctctgtctacatctccaggcaaactgaaccgtcgcatgatcatagcattcatttctgggaactgctgacaggcaaacaggacaggaccagtggctaacccgagcttcagatcagctgatgttngtttgcccatctggtcagaacacgaggtgaagtccaatacatcatctattagctgaaaagctattcctacattttttycgtactgataggcgatctcatgcaccactgggtcgggacatcctagaacagagactgctttacaactgttggctatcaggctggcggtcttcttgaatgtcttctcaaggtagtgtgcaaatctttcattctcattttcttttgacccgagctgaagaaattcaccacgcaccaaatcttcaataacttgggttaaaatagatataacagttgtatttccaattcgtgccagagctatagatgctgcagaaagaattaaatctccagcaagaacagccttcttttcaccccagatcttattaactgtgtgttttcctcttcgagaacttgcatcgtcaataacgtcatcgtgaaccagactagcagtgtggatcatttctgcaattaaggctatggcgcgctggctggcttgcacatgtctaattaacagaaagcaatgctttttaacagacgccgcctagaaccttctcagcaatcagcttgtgaaaactggacatcggatcgggagttgttatgatgaatattgcatgctcgggccattagcgccacaataattggtcgaaaggctttccctttcccatcaaagtagtactcagacatttccttaagttctgwtgttgatatgagcagttcctttctaatgtcctcatacagacctttcaagtctctgcaaccgaatttgaaaggatcggtgatctgtatatttctcaccactgtgtgttttactgtccggggttgtgtgataaaaccgtgatatactgtaaaa

SEQ ID NO: 721 - DNA, 1205 bp, Homo sapiens
  misc_feature (2)..(2): n equals a,t,g, or c
tnttgttttgttttttttctttttttttttttttttttttttattatttatagtaaactttattttcattgatatttcacttaacataatttcaaagtcagtctgtggtctaagatgagcaaaagaacagatattgtaaatctcctaaaagactttttttcacactgttcctcagagcagggaatrgggtttcagagccctgaaagctgacacctaacattttacccttgagatttacctacagatacagaaagaaaagacaacatcaatatacaagaatcaagctctatgagggtcttattaagctcttgtgttacatactcgccacctctgtaggtttgtaatcatgactgattttccacctctctgccaagtttggtgtctttttttttaggtaaaatgtcagatgcaaaaatgctgcacttatttctcttaatatattgaaaatagtggaagatgcagatttttaattcttcatcagtctaagctggaacatgacttctgctaatggggtctgttgaacatactaactccaactttggcgaccatcagcaaactggcacctgcaattaaacctgcaggcatgaattttccagagtggtagaacctcattcccataatgccagccaaggtaccagatgtagctaggaaaacccaaacgttccttggatcctgagacagctggtaagcacccaggccggctagactgccaaagagcagccctgcagccagggacggcacgctgcctgcttttacatagccaatgatcccaccagaagcaaccagtgctgcgtagccaaagccaaaccaatgcaaaggcactactgagccagtgtcctgcatttttctcttctctgtccagacaggagactaccccaggcctgcacctgcagaaaacaagcggtctcacgaaggccccggctgtcgacaagggcgcgcaagccgcaggaatgactgcgaggtgtcgccggaaatgcagcggcgggcgctctccgtcccggtggcggggcgaggagaggggagcggctctgttgtgcctgcgcagtgtaccgggagaggggcggtcagagaatggggacggtgcgggcggggcttgagccgccaagtagcagcatgcgccctgcattcagcgggtggagagtggggcggggcatcgcggcgagctcctgagtccagggaacgcggcggggaatctctgtgcttcc

SEQ ID NO: 722 - DNA, 712 bp, Homo sapiens
tcaagcttatcgataccgtcgacctcgtgccgcgggagtttgacaggcgattctcccctcattttctggactgggcagcctttggggtcatgacccttccctccatcggcatccccctgctattgtggtactccagcaagaggaaatatgacactcccaaaacgaagaagaactgattggggcttccacagccctcctctcccaagaaatccaggctcctctcccaagaaatccaggtgctttccagactccaaagggtatcttaaatgcaatctcttctctcttagcccttggccactttctcctggatcctgccctgctctcagccatagtgaaggaccagccctaggagtctgcgagagcctccttggttccatcgtgaagccataaacaggaatgcctttggcaatagccttgagcctagagggccctctgatgccccactgaggtgctgttggtttattgctggcaacgtgaattctctcaggggtctaggaggggcattttggagactgcctgacaccacccctatcccctgcctccccctctcagaagagggtggaagatgaaatgaaagctatgggactcttggaggatacccagtgtctattctgggttagagaagtgcttactaaggggttttctaataaaaacaaatgccacattgaaaaaaaaaaaaaaaaagggcggccgctcgcgatctagaactagc

SEQ ID NO: 723 - DNA, 341 bp, Homo sapiens
  misc_feature (304)..(304): n equals a,t,g, or c
gcggccgccgactagtgagctcgtcgacccgggtcgccgccgagctgagctgggccgarccggaggttgtggtgtctgactgckctgggcaccctcgggccgcarcggtgctctggggccaggtgccaccggccattgtccaggcagctgtgtgcaagccaaagaagcatgaggacactggaagactcctcggggacagtcctgcaccgcctcatccaggarcagctgcgctacggcaacctgactgagacgcgcacgctgctagccatccagcagcaggccctgaggggtggggctggaactnggggtacagggagcccccaggcctccctggagatcct

SEQ ID NO: 724 - DNA, 2302 bp, Homo sapiens
  misc_feature (2241)..(2241): n equals a,t,g, or c
  misc_feature (2256)..(2256): n equals a,t,g, or c
  misc_feature (2282)..(2282): n equals a,t,g, or c
  misc_feature (2292)..(2292): n equals a,t,g, or c
  misc_feature (2298)..(2298): n equals a,t,g, or c
cggcacgagggcggaagtgggagcgggcctggagtcttggccataaagcctgaggcggcggcagcggcggagttggcggcttggagagctcgggagagttccctggaaccagaacttggaccttctcgcttctgtcctccgtttagtctcctcctcggcgggagccctcgcgacgcgcccggcccggagcccccagcgcagcggccgcgtttgaaggatgacctctaggaagaaagtgttgctgaaggttatcatcctgggagattctggagtcgggaagacatcactcatgaaccagtatgtgaataagaaattcagcaatcagtacaaagccacaataggagctgactttctgaccaaggaggtgatggtggatgacaggctagtcacaatgcagatatgggacacagcaggacaggaacggttccagtctctcggtgtggccttctacagaggtgcagactgctgcgttctggtatttgatgtgactgcccccaacacattcaaaaccctagatagctggagagatgagtttctcatccaggccagtccccgagatcctgaaaacttcccatttgttgtgttgggaaacaagattgacctcgaaaacagacaagtggccacaaagcgggcacaggcctggtgctacagcaaaaacaacattccctactttgagaccagtgccaaggaggccatcaacgtggagcaggcgttccagacgattgcacggaatgcacttaagcaggaaacggaggtggagctgtacaacgaatttcctgaacctatcaaactggacaagaatgaccgggccaaggcctcggcagaaagctgcagttgctgagggggcagtgagagttgagcacagagtccttcacaaaccaagaacacacgtaggccttcaacacaattcccctctcctcttccaaacaaaacatacattgatctctcacatccagctgccaaaagaaaaccccatcaaacacagttacaccccacatatctctcacacacacacacacacgcacacacacacacacagatctgacgtaatcaaactccagcccttgcccgtgatggctccttggggtctgcctgcccacccacatgagcccgcgagtatggcagcaggacaagccagcggtggaagtcattctgatatggagttggcattggaagcttattctttttgttcactggagagagagagaactgtttacagttaatctgtgtctaattatctgattttttttattggtcttgtggtctttttaccccccctttcccctccctccttgaaggctaccccttgggaaggctggtgccccatgccccattacaggctcacacccagtctgatcaggctgagttttgtatgtatctatctgttaatgcttgttacttttaactaatcagatctttttacagtatccatttattatgtaatgcttcttagaaaagaatcttatagtacatgttaatatatgcaaccaattaaaatgtataaattagtgtaagaaattcttggattatgtgtttaagtcctgtaatgcaggcctgtaaggtggagggttgaaccctgtttggattgcagagtgttactcagaattgggaaatccagctagcggcagtattctgtacagtagacacaagaattatgtacgccttttatcaaagacttaagagccaaaaagcttttcatctctccagggggaaaactgtctagttcccttctgtgtctaaattttccaaaacgttgatttgcataatacagtggtatgtgcaatggataaattgccgttatttcaaaaattaaaattctcattttctttcttttttttcccccctgctccacacttcaaaactcccgttagatcagcattctactacaagagtgaaaggaaaaccctaacagatctgtcctagtgattttacctttgttctagaaggcgctcctttcagggttgtggtattcttaggttagcggagctttttcctcttttccccacccatctccccaatattgcccattattaattaacctctttctttggttggaaccctggcagttctgctcccttcctaggatctgcccctgcattgtagcttgcttaacggagcacttctcctttttccaaaggtctacattctagggtgtgggctgagttcttctgtaaagagatgaacgcaatgccaataaaattgaacaagaacaatgataaaaaaaaaaaaaagggcggagtntcccttggggggtanttggtggcaggcgcgtttaagggatnggacctggtncaatangctg

SEQ ID NO: 725 - DNA, 2007 bp, Homo sapiens
gcggcggcaaggcccgggcattttgctgcgtcaccagccgccgcccggcctcaccacccctcgtttgcacgcacgcacgttcattctccgtcctcgcgccccttttcctacactttcctcttctccccgaccggaggagccgctctttccgcgcggtgcattctggggcccgaggtcgagcccgccgctgccgccgtcgcctgagggaagcgagaagaggccgcgaccggagagaaaaagcggagtcgccaccggagagaagtcgactccctagcagcagccgccgccagagaggcccgcccaccagttcgcccgtccccctgccccgttcacaatgcagcctgcttctgcaaagtggtacgatcgaagggactatgtcttcattgaattttgtgttgaagacagtaaggatgttaatgtaaattttgaaaaatccaaacttacattcagttgtctcggaggaagtgataattttaagcatttaaatgaaattgatctttttcactgtattgatccaaatgattccaagcataaaagaacggacagatcaattttatgttgtttacgaaaaggagaatctggccagtcatggccaaggttaacaaaagaaagggcaaagcttaattggcttagtgtcgacttcaataattggaaagactgggaagatgattcagatgaagacatgtctaattttgatcgtttctctgagatgatgaacaacatgggtggtgatgaggatgtagatttaccagaagtagatggagcagatgatgattcacaagacagtgatgatgaaaaaatgccagatctggagtaaggaatattgtcatcacctggattttgagaaagaaaaataacttctctgcaagatttcataattgagagaattcctgagttgatagctctaaaggcagatatgctgtatttgcctactttaacccatttttcaacctgtttgttttttaaaaggcttcactaagggttgatatgtaccattgtatggggcaattttaagtcagctaaggcaataaccttatgcatgaacatttcccagactttcatgaagctgttgaggtcctaggcaattaatgcagcagttgcgataaataaaaacatctcacctaagtctccttttcttcataacatagatactgacatgataggaagctctcagcttagggaaagagaataaattttagattatagaacatggattcaaaagtgactggaacaaattggctgacaccttactggtaacctgctattcttctggtgttatccttcaggattgttccactaaaatttatttttcaaaaaatttacttcacattattctatgtaagtgatgacttgtcagtgttccaggtgtatcttagctaaaactagagaatgccctaacttagatggtttttgaagcctatacaattggtattgtttgacccttaagcttttacatctcttagcatggaggacgaagaaagctgtacattgttgcttgagagtctgtacatttagtccagatttgtatttgcactgtcagtatggcaaatgagtgaaaaatgtttaatacactattggattttttatttcctttttttgattcagcttatacccgggctgaaaacctcaatttatgttcatgacagtggggatttttttaaatgtctacattctttctaataaactgttggaagacttcttggctgtccttttaagtgtctggcttactgtaatttttatgtatttaccatttactggaatggagtttatttgaggaagaatttgggattattcctctgtttgaaaaaagaggcttgctgtaatgtcacaggaaaccttttaaaagtggatctgtaatagcatattgtagatgcactttgcagcagttggaaaagaaagtgttgtgtgatttgattgaaataaaactaaatgtgttgtcctcctaaaaaaaaaaaaaaaaaaaaaaaaaaaaaaaaaaagggcagccgctcgcgatctagaactagt

SEQ ID NO: 726 - DNA, 1027 bp, Homo sapiens
  misc_feature (1020)..(1020): n equals a,t,g, or c
ctatagaaaggtacgcctgcaggtaccggtccggaattcccgagcgcaccccgcccccggcgccatcttcccgaccgcgagccgtccaggtctcagtgctgtgccccccccagagcctagaggatgtttcatgggatcccagccacgccgggcataggagcccctgggaacaagccggagctgtatgaggaagtgaagttgtacaagaacgcccgggagagggagaagtacgacaacatggcagagctgtttgcggtggtgaagacaatgcaagccctggagaaggcctacatcaaggactgtgtctcccccagcgagtacactgcagcctgctcccggctcctggtccaatacaaagctgccttcaggcaggtccagggctcagaaatcagctctattgacgaattctgccgcaagttccgcctggactgcccgctggccatggagcggatcaaggaggaccggcccatcaccatcaaggacgacaagggcaacctcaaccgctgcatcgcagacgtggtctcgctcttcatcacggtcatggacaagctgcgcctggagatccgcgccatggatgagatccagcccgacctgcgagagctgatggagaccatgcaccgcatgagccacctcccacccgactttgagggccgccagacggtcagccagtggctgcagaccctgagcggcatgtcggcgtcagatgagctggacgactcacaggtgcgtcagatgctgttcgacctggagtcagcctacaacgccttcaaccgcttcctgcatgcctgagcccggggcactagcccttgcacagaagggcagagtctgaggcgatggctcctggtcccctgtccgccacacaggccgtggtcatccacacaactcactgtctgcagctgcctgtctggtgtctgtctttggtgtcagaactttgggggccgggcccctccccacaataaagatgctctccgaccttcaaaaaaaaaaaaaaaaaaaaaaaagggggggcccggtccccantcccccc

SEQ ID NO: 727 - DNA, 937 bp, Homo sapiens
  misc_feature (800)..(800): n equals a,t,g, or c
caaggcctccaaggagctgcagtcggtggagcaggaggtccgctggcgcatgcggaagctcaagtacaagcacctggccttcctggcagagtcctgtgccaccctctcacaggagcagcactcgcaggagctgctggctgagctgctcacacacctggaaaggcgttggacagaaattgaagattcccacacattagtgaccgtcatgatgaaggtgggacacctctcggagccactaatgaaccgcctggaagacaagtgcctggagttggtggagcactttggccccaatgagctgcggaaggtgctggtgatgctggcagctcagagccggcggtccgtgcccttgctgcgggccatctcctaccacctggtgcagaagcccttctctctgacgaaagatgtgctcttggacgtggcctatgcctatggcaaactcagctttcaccagacccaggtgtcccagcgcctggccaccgacctgctatccctcatgcccagcctgacttctggtgaggtggcccactgtgccaagtccttcgccttactcaagtggctcagcctgcccctgtttgaggcctttgccagcacgtcctgaacagagcgcaggacatcaccctgccccacctgtgcagcgtacttctggcttttgcgcgtctgaacttccatccagaccaagaggatcagttcttcagcctggtacatgagaagctggggtcagagctgccaggcctggagcagcccatgcaggtggacctggtgtgggccctgtgtgtgctgcagaggcacgggaagcagantgcaagccgtcctccaccctgaatttcacatccaatttctagggggcaagtctcagaaggatcagaacaccttccagaagctgctccacatcaaacgccactgccctgctggagtaccccgagtactcgggtcccct

SEQ ID NO: 728 - DNA, 1297 bp, Homo sapiens
gttgagatttaggattttattattatttatttttagaaaaaagagaaaatttacaagatgcaaaggtctcacacaatacattatcattgatgattgctctcttgacacttcaacacgggccctggcaataaaaagaacatggacagtgtgagtgtrttggagaacccccgccatggacacgcagaatacaccacagtggacttgatgacaaatgatgctgggccagcctgttccaaaagcaagccaagatgtggtagaaaccaacaaagcctttctgtgggggaggcacgagcgcacaccttctaccacatgcgcacccgccccctggcccaccggcagtgcccactgcatcactccaccacagcaacaacagaaaacgataaaacggtcctttggtgttttttgcagagctattcaggttcccaaattcttatttctgtcttcctcttcatgtttcagttccaaattcttaaagtagtgtaggtgcttagcatcttgaatttttcaggatccagttctgcccaatgataacacactgaattctgcctcctgagctacggctcccgttcagaggacacgtcgccctcagccccgctgctggcactgcggtcttcttttcggggagtgtttctttccttgcttgattcagaaggtcccttagctctggtcttttctttcctctgctgctgtttttcgagctttgacagctgctttgggtcagaggtagcagtgccgggagctggcgattccagctctatggtcacaggcccatcattctgaatgtgcacctgcatgtaggccccaaacttgccatctttgataagctccggcctgtatgttttacgcagctgctccaggaagctgttgtagaagccctctgcctgctccgtgggcattgctaggtggaaatcaggcttgtttcccttcaggacacactggagggtaaactggctgacacacagaatctcgtactgtttgtccatcacactcttcgaccagtgcttcccactctcatcctcaaatacacgcaggtttagaatctttcggaccatgtgttccagttccttctgcgtatcctccagggaaatacccagcaacacacatatgccccttccaatggcactaatctgctctcctccaactgtgacgctggcccgggtgacgcgctgcaccacggccttcatggcggcggctggggcgagtggggcggcgccgcgctgcgtccggcctcgcgactctgagggcggctccgcagccggcgccctctggaggtgacacccggaagcgcgcccaactg

SEQ ID NO: 729 - DNA, 723 bp, Homo sapiens
  misc_feature (682)..(682): n equals a,t,g, or c
  misc_feature (723)..(723): n equals a,t,g, or c
acgcctgcaggaccggccggaattcccgggtcgactattggtcgtcagtgagcgtttggcgaaactcgcccgggaactgggctggcaagacattaaggtcgccgataacgctgacaacgatgcgcttttacgggcattacaataactctcataacaggaagccataatgacggaacaagaaaaaacctccgccgtggttgaagagaccagggaggccgtggacaccacgtcacaacctgtcgcaacagaaaaaaagagtaagaacaataccgcattgattctcagcgcggtggctatcgctattgctctggcggcgggcatcggtttgtatggctggggtaaacaacaggccgtcaatcagaccgccaccagcgatgccctggctaaccaactgacggcattgcaaaaagcccaggagagccaaaaagccgagctggaaggcattattaagcaacaagctgcacaacttaagcaggcgaatcgtcagcaagaaacgctggcaaaacagttggatgaagtccaacaaaaggtcgccaccatttccggcagcgatgctaaaacctggctgctggctcaggccgattttctggtgaaactcgccggacggaagctgtggagcgatcaggacgtcacgaccgctgcagcgttgctgaaaagtgcagacgccagcctggyggatatnaatgacccgagtctgataccgktcgtcggcaattaccgatn

SEQ ID NO: 730 - DNA, 1708 bp, Homo sapiens
gacccacgctgtccggcgtcggctgttgcagcctgctgcgcgcccaggggtcccgcgggttttcgggcgcagggtggcgcccgcggcaggcggcggccatgaacttctccgaggtattcaagctctccagcttactctgcaagttctccccggacggcaagtacctggcttcctgtgtccagtaccggttagtggtccgggatgtgaacacccttcagatccttcagctgtacacgtgcctagaccagatccagcacatcgagtggtcggcagactcgctcttcatcctgtgcgccatgtacaagcgagggctggtgcaggtctggtctttagagcagcccgaatggcactgcaaaatagacgagggctcagccgggctggtggcctcgtgctggagcccggacgggcgccacattctcaacaccacggaattccatctgcggataaccgtctggtccttgtgcacaaaatccgtgtcttacatcaaatacccgaaagcttgtctgcagggaatcaccttcaccagggacggccgctacatggcgctggcagaacggcgcgactgcaaagattacgtgagcatcttcgtctgcagtgattggcagctcctgcggcattttgatacggacacccaggatctcacagggattgagtgggccccaaacggctgtgtgctggcagtgtgggacacctgcttggagtacaagattctgctgtactcattggatggccggttgttgtccacgtacagcgcttacgagtggtccctgggcatcaagtctgtggcctggagccccagcagtcagttcctggcagttgggagctatgatggaaaggtgcgcatccttaatcacgtgacttggaaaatgatcacggagtttgggcatcctgcagccattaatgatcccaagatagtggtgtataaggaggccgagaagagcccacagctgggactgggctgcctctccttcccgccgccccgggccggggccggccctgctcccgagctcagagagtaaatatgagatcgcctctgtcccagtctccttacagacactgaaacctgttaccgacagagcaaacccgaaaatcggcataggaatgctggcatttagtcctgacagctacttcctggcgacaaggaacgacaacattcccaatgccgtctgggtctgggacattcagaagctgaggctgttcgcggtgctcgagcagctgtccccagtgcgcgcgtttcagtgggacccgcagcagccgcggctggccatctgcacgggaggcagcaggctctacctgtggtccccagcgggctgcatgtcggtgcaggtgcctggggaaggcgactttgcagtgctctctctgtgctggcatttaagcggagactcgatggccctcctcagcaaggatcacttctgcctctgcttcctggagacagaggcagtggtcggcacagcctgcagacagctgggcggccacacgtagcagcggtgcactaacgtgtgcagaaacagggctactctgtgtttccagtgtgggaaaaaacacagcttcaccaggaggttctccactgtggtggtctggattcagtgattgattctatttttctatagcaaagcatttttgtaaatatgtatggtataaaactgtagttttattatttaaaataaatacttgctgatttatacaaaaaaaaaaaaaaaaaaaaaaa

SEQ ID NO: 731 - DNA, 1527 bp, Homo sapiens
ctggcgcgcactgcagtctgggagtctttggagtaagaatggccttggaagggatgagcaaacggaagagaaagagaagtgtccaggagggagagaatcctgacgacggcgttcgcgggagtccgccggaagactacaggcttggacaggtcgccagtagcttatttcgcggcgaacaccattccagaggtggcaccggtcggctggcgtccctcttcagttctctggagccccagattcaacccgtgtacgtgcctgtgcctaaacaaaccatcaaaaaaacgaaacggaatgaggaggaagaaagtacatcccagattgaaagaccactttcgcaagaacctgccaaaaaagtgaaagcgaagaagaaacacactaacgcagaaaaaaagttggcagacagatggagtcttgatgccacgcccaggctgcagtagagtgcagtgatctcrgctcactgcaacctccgcttcccgggttcaagcgattctcctgcctcggccctgaggaaagcgctctagcgagtgctgatttagaagaagaaattcaccagaaacaagggcagaaaaggaaaaattctcaacctggtgttaaagtagcagatagaaaaatacttgatgacacagaagacacagttgtcagtcaaagaaagaaaattcaaatcaaccaagaagaagagagattaaagaatgagagaactgtgtttgttgggaatttgcctgttacatgtaataagaagaagctgaagtcgttttttaaagagtatggacaaatagaatctgtacgatttcgttctctgattccagcagagggaacgctatccaaaaagttggcagcaataaaacgtaaaattcatcctgatcagaaaaatattaatgcctatgttgtgtttaaggaggagagtgctgccacgcaagcattgaaaagaaatggggcccagattgcagatggatttcgtattagagttgatctcgcatctgagacctcatctagagacaagagatcggtttttgtggggaatctcccttataaagttgaagaatctgccattgagaagcactttctggactgtggaagtatcatggccgtgaggattgtgagagacaaaatgacaggcatcggcaaagggtttggctatgtgctctttgagaatacagattctgttcatcttgctctgaaattaaataattctgaactcatggggagaaaactcagagtcatgcgttctgttaataaagaaaaatttaaacaacaaaattcaaatccacgattgaagaatgtcagtaaacctaagcagggacttaattttacttccaaaactgcagaaggacatcctaaaagcttatttattggagaaaaagctgttctccttaaaacgaagaagaaaggacagaagaaaagtggacgccctaagaaacagagaaaacagaaataacaaccaggaactgctttttcttttcctgctgagtactgctaataaaagtgctattatctgctgatagcatcgtctgctaaaaaaaaaaaaaa

SEQ ID NO: 732 - DNA, 2572 bp, Homo sapiens
gcgacgcgaaggttgtcgggatccgcggcagcagcggctgcttgagatctgtttctggggcctctggcggtggcggcctggggcggcgcgacggctggtgcgcaggtacactgatgctgaagtactatgagccttcggaacttgtggagagactacaaagttttggttgttatggtccctttagttgggctcatacatttggggtggtacagaatcaaaagcagccctgttttccaaatacctaaaaacgacgacattcctgagcaagatagtctgggactttcaaatcttcagaagagccaaatccaggggaagtagcaggcttgcaatcttcaggtaaagaagcagctttgaatctgagcttcatatcgaaagaagagatgaaaaataccagttggattagaaagaactggcttcttgtagctgggatatctttcataggtgtccatcttggaacatactttttgcagaggtctgcaaagcagtctgtaaaatttcagtctcaaagcaaacaaaagagtattgaagagtgaagtaaaataaatatttggaattactaatttgtcattaaatcattctatgctgattagcttcataaacattgaactttttgattttatagccacaatgctgcatattcatactttaattcctaaagaataatttttaatgttaaaacgtgataatgcaataaatagaaaaatgtggtttacaaaataaaaacggtcttcactagttaccacctgaagtaagatgtctcgtttggaagctaagaagccatcattgtgtaagagtgaaccactgacaactgagagagtcaggaccacactttctgtcttgaaaagaattgtaacatcatgctatggcccctcaggtaggctgaagcagctgcacaatggctttggaggttacgtgtgtacaacctcacagtcctcagctctgctcagtcaccttttggtcacacatcccattttaaagatcctgacagcctccatacagaatcatgtgtcaagcttcagtgattgtggcttattcacagctattctttgctgcaacctgattgaaaatgttcagagattaggcttgacacccaccactgtcattagattaaataaacatcttttgagtctttgcatcagttatctcaagtctgagacctgtggttgtcgaatcccagtggactttagtagtactcagatcctcctttgtttggtgcgtagtatattaacaagtaaacctgcctgtatgctcaccagaaaggaaacagagcatgtcagtgctttgatcctgagagcctttttgcttacaattccagaaaatgctgaaggccacatcattttaggaaagagtttaattgtacctttaaaaggtcaaagagttatagattccactgtattacctgggatactcattgaaatgtcagaagttcaattaatgaggctattacctatcaaaaaatcaactgccctcaaggtggcactcttttgtacaactttatccggagacacttctgacactggagaaggaactgtggtggtcagttatggggtttctcttgaaaatgcagtcttggaccagctgcttaacctaggaaggcagctaatcagtgaccacgtagatcttgtcctgtgccaaaaagttatacatccatctttgaagcagtttctcaatatgcatcgtattattgccatagacagaattggagtgactctgatggaacccctgactaaaatgacaggaacacagcctattggatccctaggctcaatatgtcctaatagttatggaagtgtgaaagatgtgtgcactgcaaaatttggctccaaacatttttttcatcttattcctaatgaagcaacaatctgcagcttgcttctctgcaacagaaatgacactgcctgggatgagctgaagctcacgtgtcagacggcactgcatgtcctgcagttaacactcaaggaaccatgggctttgttgggaggtggctgtactgaaactcatttggctgcatatatcagacacaagactcacaacgacccagaaagcattctcaaagatgatgaatgtactcaaacagaacttcaattaattgctgaagcattttgcagtgccctagaatctgttgttggctctttagaacatgatggaggtgaaattctcactgacatgaagtatggacacctttggtcagttcaggcagattctccctgtgttgctaactggccagatttgctttcacagtgtggctgtggattatacaatagccaggaagaactcaactggtctttcttaagaagcacacgtcgtccatttgtgccacaaagctgccttccacatgaagctgtgggctcagccagcaacctgaccttggactgtttgactgcaaagcttagtggcctacaggtggctgtagagacagccaatttgattttggatctttcatatgttattgaagataaaaactaagagaatagcatgttcgtattacaagagaaacaaataaactagtctgttggcaattgaaaaaaaaaaaaaaaagggcggcgytytagaggatccaagyttacgtacg

SEQ ID NO: 733 - DNA, 1472 bp, Homo sapiens
tcgacccacgcgtccgcgttactctgcgcacatcgctattgcggttccgaggcagtgggaagagatgcggcccctggacatcgtcgagctggcggaaccggaggaagtggaggtgctggagcccgaggaggatttcgagcagtttctgctcccggtcatcaacgagatgcgcgaggacatcgcgtcgctgacgcgcgagcacgggcgggcgtacctgcggaaccggagcaagctgtgggagatggacaatatgctcatccagatcaaaacgcaggtggaggcctcggaggagagcgccctcaaccacctccagaacccgggcgacgcggccgagggccgggcggccaagaggtgcgagaaggccgaggagaaggccaaggagattgcgaagatggcagagatgctggtggagctggtccggcggatagagaagagcgagtcgtcgtgagcgcggtcggcggtttccagccaatggattctggtcaactggtggagattggctgacaccctggagaagccgaaaccagagagccttttgttttctcttttttcctgtctatgctctgtctcacttaacactacgttttctgctatggtctgtggttgatgacctcaatatgagtttcgattgttaacgtgtttttgtttgggaagtaattttgtttgaaaatgctctcacatacaggaattagggcctagattgtaagctcttgcagcagtcacatttgttcccgggctttggtggttatttctaaatttttgaggtgctttgctatttcttgtgtgacctgatagctccctggaactttgggtctgtgtgtgacacatgagactcacagttggagttctccagctctggaggtgctgaaggagctgcattaattctggaagacgactccatgcagcaactactgaagaaaggaccagacttcaacggggagtgtggatgggccgacctggctgggactcgtgaatctggagaagagctggagaatggatagtattgtctgtatttggagactttaatttctgtgtgagaccaaaggaggagagatgtgttttgttcaaaatttaaatttgttgtggtacactatcttatgtaacctgtctggtgagtttgtttggacaacctaactcagcttttggatttaatatgaacatgtacagcgtgcatagggactcttgccttaaggagtgtaaacttgatctgcatttgctgatttgtttttaaaaaaacaagaaatgcatgtttcaaataaaattctctattgtaaataaaattttttctttggatcttggcaataagtgtgcctcgaatttattttctgggaagggttgagtcttttctcacctttgtcaaataccagatttggcttcgtgctcttctctgtctgggctcatttctttgtccatagacttaaataatatttcctttgttatcgtggctgcatttgtaggatgaagctaatgag

SEQ ID NO: 734 - DNA, 222 bp, Homo sapiens
ggaggaagaggaggaggaggaattagtggatcccctaacaacagtgagagagcaatgcgagcagctggagaaatgtgtaaaggctcgggagcggctagagatgtgtgaccagcgtgtatcctccaggtcacagacagaggaggattgcacggaggagctctttgacttcctgcatgcmaagggaccactgcgtgscccacaaactcttcaacagcttgaaat

SEQ ID NO: 735 - DNA, 1957 bp, Homo sapiens
cctccatacttgtttaaagatccggcttttctccgagttgggaaaagcagtttcgcccttttcaagtggtgaagctctacctcccaaaatccacctctattaaaccatggatggctataaccctctgagccccccaaacagaaccacttgctcaatctgcttccctaatcccttctgtctctaatggctcttggaagtttcagagcctcactcttacaggtaaaggtcaccatctttyattctcaccgcagagtcaaaatggccgagcaccccctcctttgtcattttcctcctcccctccttctcctgcctcctccgtctcactgaatcaakgtgccaagggcaccaggaccatccatactcccagcctcaccagctacaaggcacagaatggaagttcaagcaaagccaccccatccacagcaaaagaaacctcttaaaggtcaaatcctattaggcacaagtcggagttacatttaaaaaaaattaacagtctacaacaactgktttcacaagagaatgtaacatattgctgtatcgtttgaggcttaatgctaaatatgtgctaaatactggattaatagatttcagtaaagctcgttcgttttgtttggttttctttttacctagttgctatagtgtctacagtctatactcaatacctataaaatgcagtaagcatgtgttacagaaagaggttctggtgggagagaaaggtgcgtgtgagacaggagaattgtcttaagcatataaaacatgtatgattccagaattttagtatgktttgtataaaactatttttcattacggagactagaagtgaacagagaattacacaagtgtgactatacaaattgtaaaacagatactataatatttccttttattttagtgttatttagctttattacagatttctatttttgtcaaaacttcatggttcctttcaagatcttttttgccaaaacattttgatactatagcattgtacatttgaaagtagtgttctagactataaaaccaatgaacttctacatgagccctacagacaggcatgtgtagaaggcaatttatcaaacctattgcactgccatgaaaagtgtgtataataatttgctagcccaagcaagctagttttctttgcttgcttcttttctttcttttttccttcctttttttttttttttttttttttttaacatgttgagattctctagttgttttctttggcgtatctaaccccttcttttgttttctgagacctggtaacccacgctcttgcattgtggattttaaaatgtatactctgtacggttctgtaaaccgaaaaacttttgtaaatatataaatatacatagacataaaaatactgtatgtgacagcacatagagtagttttcccacaccaaagttaatttttatgcatgctttaaaagtatatatcgggaccggcagaaatggaagtatccatacatttttaaaaagcaacaagtttgcacagctagagtgtttttgtaaataaatgtatttgtataacacagtcatgtaatatacagaactataagcagagactttgcaaaactaaataaagggctgcatgcttattattttttgtaccttgtcactataactacttcctagtcaaagaacgaaatgtaactgttaccgagttaaatgtttttccgctttgagggatgtaaccacatccactcagaggacactacttttctgaaagctctggggtgactaatgatgagttcctaataaattaattgcaagtgtggtgccttggatgtggcctgttggctcgctttyttytctgtggcttatcaaggkgtagatgacagaaagcaaacctggatacagagtttccaccctcagttcctggaggggctcttattattttctctctttttaaaaaacttccagtaraagtaaagtggaaataaaatgtcttt

SEQ ID NO: 736 - DNA, 858 bp, Homo sapiens
tttttgtcctgcatttctcatttttatttgacagaaaaagttgctcttgctgtacagattttaaaaaaccaaaatgcctttaagaaacatgaaaagttggggggaggggttcacaacctcatgggggacagtagggaccaactaattccaaytcctgccccttccttccaagaasaccttatacaacctccagtcccaaccaccatcacaatcacccctgggaacttctggatacaagtggggccatgcmtccctggccctgactccaggctggggtatcctgaactgtatcctcccctcccccaactcccatctgcattccctcccaccccaaaccccccagaacacatgaaccaggaagaactcacggagattaacatttcacaggaacaaagaaaaaaaaaaggggagggaaagggagccctccatccaagggctgccaaggttcaaaggagagcagacaaggaccctcccacggctctgctggggaagaagggacactccttgtggctccagagcattgggtgtggtggaatcccccaaagacaatttatggagacctggaggagcggtgtctcatgggccgagggctaggtgtctccctcctgcgcttgtggctgggggagcggctgtccccacgctggcctctccgggaaccccgctcactgctgctgctctgctggtcccgtggtgagggctggggcgagggacggcgacgctccacaggcgagtagctgagggaccgagagtccctgagggagtctattggcttccgggggctgcgggacctggggaacacagtaggacccaatagcaccacaccctttcaagcacacggcggacgcgtgggtcgacccg

SEQ ID NO: 737 - DNA, 399 bp, Homo sapiens
  misc_feature (146)..(146): n equals a,t,g, or c
  misc_feature (380)..(380): n equals a,t,g, or c
  misc_feature (391)..(391): n equals a,t,g, or c
cttcgccgtttctcctgccaggggaggtcccggcttcccgtggaggctccggaccaagccccttcagcttctccctccggatcgatgtgctgccgccgccgccgccgccgtccctgcgtccttcggtctctgctcccgggacccgnctccgcgcagccagccagcatgtcggggatcaagaagcaaaagacggagaaccagcagaaatccaccaatgtagtctatcaggcccaccatgtgagcaggaataagagagggcaagtggttggaacaaggggtgggttccgaggatgtaccgtgtggctaacaggtctctctggtgctgggaaaaacaacgataattttgccctggaggagttacttgtctcccatgccatccntgttaattccnggatgggg

SEQ ID NO: 738 - DNA, 2247 bp, Homo sapiens
  misc_feature (22)..(22): n equals a,t,g, or c
  misc_feature (33)..(33): n equals a,t,g, or c
  misc_feature (64)..(64): n equals a,t,g, or c
  misc_feature (633)..(633): n equals a,t,g, or c
  misc_feature (2138)..(2138): n equals a,t,g, or c
  misc_feature (2154)..(2154): n equals a,t,g, or c
  misc_feature (2242)..(2242): n equals a,t,g, or c
ttgtggtacgtctcgttttccnggtcgaccacncgtccgcccacgcgtccggctcgtgctgcanaaagagctatagctgaagagaaaagggaagctgccaatttragacacaaattattagawttaacacaaaagatggcaatgctgcaagaagaacctgtgattgtaaaaccaatgccaggaaaaccaaatacacaaaaccctccacggagaggtcctctgagccagaatgtcttttggcccatcccctgtgagtggtggagaatgctcccctccattgacagtggagccacccgtgagacctctctctgctactctcaatcgaagagatatgcctagaagtgaatttggatcagtggacgggcctctacctcatcctcgatggtcagctgaggcatctgggaaaccctctccttctgatccaggatctggtacagctaccatgatgaacagcagctcaagaggctcttcccctaccagggtactcgatgaaggcaaggttaatatggctccaaaagggccccctcctttcccaggagtccctctcatgagcacccccatgggaggccctgtaccaccacccattcgatatggaccaccacctcagctctgcggaccttttgggcctcggcnacttcctccaccctttggccctggtatgcgtccaccactaggcttaagagaatttgcaccaggcgttccaccaggaagacgggacctgcctctccaccctcggggatttttacctggacacgcaccatttagacctttaggttcacttggcccaagagagtactttattcctggtacccgattaccacccccaacccatggtccccaggaatacccaccaccacctgctgtaagagacttactgccgtcaggctctagagatgagcctccacctgcctctcagagcactagccaggactgttcacaggctttaaaacagagcccataaaactatgacctctgaggtttcattggaaagaaagtgtactgtgcattatccattacagtaaaggatttcattggcttcaaaatccaaaagtttattttaaaaggtttgttgttagaactaagctgccttggcagtgtgcatttttgagccaaacaattcaaaaatgtcatttcttccctaaataaaaatcaccttttaagctagagcgtccttacaactttgaaatgtgcaataaagaatacctgtgttttagctaatgtagcatatgtaattgcaaaatgatttagaatgtcatgaaaaatatgaacatttcctgtggaaatgctttaagaacatgtatttccattatcctatttttagtgtacaccagctgaatacggagcaatggtgtttataagcgtttttttaaactatctggtcacaaagactgttacgctaaaaatgtttactaaaagatcactaaactatctcccctcttgctgaagttctttgtagtaatagctcataaaaatttgtttattaatatttcccaagtgtctgttgactcattgggactgttatgaggcttgtgcccatttgggggaacatgtaaactcaggctcccrgaactgaagrtggtggctggtggcacaytkccggctgctcctccgtcacctgtraactctacaagtgacgtctttttatttcaaagaagtttatttcccacttgtatagcattcacatgctttctttacgatcctcattgtctatttgagaatggttttctgagagtgagtttacattagtagcaagagttgtttgacctgatgttccattgtttttaccattcctgtagaaaaagggtgcacaacagaaaaatgaaaatgatgtgtcatggccgtaaaagtatagaaatctttaaaaattttaaaatgtacagtcccttatctatctttcccattccttgccactgatttttgaggaatataataaaaagattggaagagtataatgccatgagaaagaatgatttaggactgtgagggttataacatgccctaggtcagcaaccaagggttgaaatcagttctgttttagggggaaatggggggggcgacagatattattccaaaattaatattaattaatattwaaacgttggtgtttttatttaaaaatcagtaactaaccatctggnaattgcaccatacttnaaagtcttatccmttactacactgtctttaaaacmatgkttcytttaaatactctacacgkttctaaggacggacttccggmcttttnattta

SEQ ID NO: 739 - DNA, 990 bp, Homo sapiens
  misc_feature (878)..(878): n equals a,t,g, or c
  misc_feature (916)..(916): n equals a,t,g, or c
  misc_feature (949)..(949): n equals a,t,g, or c
  misc_feature (984)..(984): n equals a,t,g, or c
gcggacgcgtgggcggacgcgtgggctgcagccttacagagactggaaaagaagcccaaaccaaggcccccagagaggtcccccaggcccctttgggtccctgagcctcagctggaggtggggggtgcctgcagtgcgctggctcagtctccttctgaaaagctggatccagcttgtttgaagcccttgagctgatcttagatccggcgcaggagaccaacgcctgccatgctgttccggctctcagagcactcctcaccagaggaggaagcctccccccaccagagagcctcaggagaggggcaccatctcaagtcgaagagacccaacccctgtgcctacacaccaccttcgctgaaagctgtgcagcgcattgctgagtctcacctgcagtctatcagcaatttgaatgagaaccaggcctcagaggaggaggatgagctgggggagcttcgggagctgggttatccaagagaggaagatgaggaggaagaggaggatgatgaagaagaggaagaagaagaggacagccaggctgaagtcctgaaggtcatcaggcagtctgctgggcaaaagacaacctgtggccagggtctggaagggccctgggagcgcccaccccctctggatgagtccgagagagatggaggctctgaggaccaagtggaagacccagcactaagtgagcctggggaggaacctcagcgcccttccccctctgagcctggcacataggcacccagcctgcatctcccaggaggaagtggaggggacatcgctgttccccagaaacccactctatcctcaccctgttttgtgctcttcccctcgctgctagggctgcggcttctgactttagaagactaaggctggtctgngtttgcttgtttgcccacctttgggctgatacccaganaacctgggcacttgcttccttgtgcccaccccntgcaagtcattccttcattcacccaacgggaggtnggatgt

SEQ ID NO: 740 - DNA, 2143 bp, Homo sapiens
  misc_feature (1)..(1): n equals a,t,g, or c
  misc_feature (10)..(10): n equals a,t,g, or c
nttttttttntttttttttttttttttttttttttttttttttttttttttttttttttttttttttttttttttcatttttctcaaaacatatatttacccctcctctcagtacatctttgagcacctttcccagaatctcaggaatgtatagacccccgccccacacttcatacccgccctaggccttggtgatgaggcccctcacagcttgtgcaatggcatccctgtcgataccaaacatcttcagcagctcagccggcttcccacttcttggtacccggttaactgccaggtgggtgacagtgatgccaggctcgcccactactgcactggacacagcctcaccaatgccaccttcataataatggtcctccacggtgaggatcctgcccttggtggcacgagcgctgtcgagaatgagttttctgtccaggggcttgatggtgaaggggtccagcacgcggatgttgatcttttctttcttcagcagttcggcagcggccaaggcctcgtgcagggtcaccccagccccgataacggtcacctggtcatccttgctcttcaggaccaccttggcttgtccgacctggaagtcctcattgttgttatagatgatggcattttctgggcggctggtccggatgaagcagataccctttgtattggcggctagttccactgccttctctgtagcaacgccatcacttgggtaaaagacagttgatgtggggactgaccgaaacatagccagatcttctagggccatctgggagggcccgtcttccccgatggaaacgccgcagtgggagccgcagaggttgatgttgctctcggagatggcggccatgcgaatctggtcaaaggcccgcgtgaagaaggctgcaaaagtgctgcagaagggcaccgtcctgttgcgggtggcacagcccaccgcgatgctcaccatgttctgctcagcaatgtagcactcgatgaagcggtccgggtgctcctttttgaagatctccgagaaggtggaatttttggtgtccccatccagggcgatgatgcggtcactggcatggcccagcttggccagtgcctgcccgtaggccttgcgggtggctatcttgtccccaactttgtagctgggcaggctgggcatgcggatgttggcaatgtccactgagggtgcgtcctcctgtggaggggttgccaggatcttctttttgctctggatctggctgtagatctcctggatgatctgctcagccatgtttttggggaggggcttcccatgccaagactccttatcttctacccccgtgatccctcggcccttgaaggtcttggcaatgatggctgttggctggtgcttggcctgccaaaggccttgcacagctcctccacgctgtgtccatccacgatgatggcatgccaaccgaaggcctcgcaccgcttctggtagatgtccatctggtgctgcagyggggccgggtcactctggcccaggcgattgatgtctagaatggccacaaggttgtccagcttatagatgctggcgaaggccatggcctcccatacagagccctctgacagctccccgtctcccagcaagcaatagactcggtagctggccttgtcgaagtatttgccggtgtaggccatcccacaagcggccccgaggccctggcccagggagccagtggccacgtcggtgaaagcttgtttcgggaccgggtgcccgtccaagtcggagctgatcttcctcaggttcagcagctccgcctcggccaggaaaccagcttcagcccagaccgcgtagaggatgggagctgcatggcccttggagagcacaaagcggtcattgtgcggattccgggggtcctgggacttgtagcgcatggtgtggaaaaagaggacagccatgatctctgcggcgctgcagcatgacgtggggtggccagagcccgccgcagtggtggcctggatggagctgatacgtaggcggttggccgtgtccttcaaggcctgcagcttctgctggtcaggcttgtggtagctctccatggtgcggcaggcggggaccgggcgcacacgcggacacacagagatagcggctgctcccgcggcgacaggcggctgccgaggccgggcgcgc

SEQ ID NO: 741 - DNA, 2708 bp, Homo sapiens
agacgagtcccagagccgaccgcgctgcctcggccgctcggcgcctgcgcagtgaagaccgcggcgagccgcgcgcatgcgtgcaggcccggagccccaggcgctggtggggcagaaacgcggcgccctgcgtcttctggttccgaggctggtcctcaccgtttccgctccggcggaagtgaggaggagggtccttcgacccgtgctgagctggatggaccgcgagacgcgcgccctcgccgacagccacttccgaggcctgggggtcgatgtccccggcgtcggccaggctccgggccgggtagccttcgtctcggagccgggcgccttctcctacgccgactttgtgcggggcttcttgctgcccaacctgccctgcgtgttttccagcgccttcacgcagggctggggcagccggcggcgctgggtgacgcccgcggggaggcccgacttcgaccacctgctacggacctacggagacgtggttgtaccagttgcaaactgtggggtccaggaatacaactcgaaccccaaagagcacatgactctcagagactacatcacctactggaaagagtacatacaggcgggctactcctctcccaggggctgtctctacctcaaagactggcacttgtgcagggactttccggtggaggacgttttcaccctgcctgtgtacttctcgtccgactggctgaatgagttctgggatgcactggatgtggatgactaccgctttgtctacgcggggcctgcgggcagctggtccccgttccatgctgacatcttccgctccttcagctggtctgtcaatgtctgtgggaggaagaagtggctcctcttccccccagggcaggaagaggccctgcgggaccgccacggcaacctgccctacgacgtgacctccccagcactctgcgacacacacctgcacccacggaaccagcttgctggcccacccttggagatcacgcaggaagcgggcgagatggtgtttgtgcccagtggctggcaccaccaggtgcacaacctggatgacaccatctccatcaaccacaactgggtcaatggcttcaacctggccaacatgtggcgcttcttgcagcaggagctatgcgccgtgcaggaggaggtcagcgagtggagggactccatgcccgactggcaccaccactgccaggtcatcatgaggtcctgctcrggcatcaactttgaagagttttaccacttcctcaaggtcatcgctgagaagaggctcctggtcctgagggaggcagccgctgaggacggtgctgggttgggtttcgaacaggcagcctttgatgttgggcgcatcacagaggtgctggcctccttggttgcgcaccccgacttccagagagtggacaccagcgcgttctcaccacagcccaaagagctgctgcagcagctgagagaggctgttgatgctgctgcggccccatagcacctgtcgtgaggatagaaggacgggtggamgagaggcagcctcctgctccggggcccttccagaaataaagaccgccctccctgtgacctggggcccacccctgtcgaggcttgtggcctggctgttcatggccactgcctgggtgcctgttttcaggtgaggcccaatgaggtcagggacccaagatgggatgtggcccttctgacctgcagcaggcctgctgggagctcggagatggtgccaggacctggctcttttgggggccctgcctccttaggccaggacgcctgagctgacaggagtctgtgtctggtgtgccttctctggtggctcctcttaataggccagccctgtcccctcgtctcaggccattggaccacccctggctctgccctgtgggttcagggaggggttggagcagtgctgggcaagctcaccagggcctccaggcagggctggggttggcctccatcacctccaggtgatgggctgtggaaccagcggcctgcgccttcctctgggtacccagagtggagggctgggttgggctggcctttgccacctccctgcctttgcagggcctgtggacagctggagaggccacagatggggtggaatcccatctgctgctgaatcctcacctgggcctgagggactgtgcctgctgtgcactcacagctgggtcttcccaaggatgctgttctcaggagtggtgggtccccagcccctcttcacactgggtatgatggaggtgtgggcgggctcgtccaggccgatcaaggcacagcagtgagcagcggaggcctgtggtggggaatggactctcgtgggatcctcttgcagaggatgccccaggcctgaaccctctagtggatccacagtttgtggagactggcactctcccagccctgtccttgaccgagagtccagcattttttcagttggcccctggttggctgcctcaccccagcaggggaggaggcatccgaatccacagggacggcacgtgccatggctatgcacattgcctgcccgtggcatcaactggggccgctggcacttgtctaggatggaagcccccaagaagggcaggggtttctgtctgctctgttcagtgaatcatgtgaagtgcttgcaaaggcagctttacacagtaggtgcttcatatgtgtctgtcgaatgaatgcgcyccagmcaamaaaaaaaaaaaaaaaaaaaaaaaaagtcgtatcgatgt

SEQ ID NO: 742 - DNA, 4411 bp, Homo sapiens
tcgacccacgcgtccgatcattgtctataggctctcggtgttcattgtattttctgcaaaacttcccaagaacattaatggaacagacccaatccagaaatacctgactccacagacagccacgtccatcacggcctccatcatcagctttataattatcatgattctgaacaccatatatgaaaaagtggcaattatgattactaacttcgaactcccaaggacccagactgattatgagaacagcctcaccatgaagatgttcttattccagtttgtcaactactamtcttcatgcttctacatagcattctttaagggcaaatttgtaggctatccaggagacccagtttattggttgggaaaatacagaaatgaagagtgtgacccaggtggctgtcttcttgaactgacaactcagctgacaataatcatgggaggaaaagcaatctggaataacatacaagaagtattattgccctggatcatgaatctaattgggcgatttcacagagtttctggatcagaaaagataaccccacgatgggaacaggactaccatctgcagcctatgggcaaactgggattattttatgaatatcttgaaatgattattcagtttgggttcgtcaccttatttgtggcctcttttccactggcccctctgttggctctcgtgaacaatatattggaaataagagtggacgcatggaaactgaccacccagtttagacgcctggtaccagagaaagcccaagacattggagcatggcagcccatcatgcaaggaatagcaattctggctgtggtgaccaatgccatgatcatagctttcacgtcggacatgatcccccgcctagtgtactactggtccttctccgtccctccctacggggaccacacttcctacaccatggaagggtacatcaacaacactctctccatcttcaaagtcgcagacttcaaaaacaaaagcaagggaaacccgtactctgacctgggtaaccataccacatgcaggtatcgtgatttccgatacccacctggacacccccaggagtataaacacaacatctactattggcatgtgattgcagccaagctggcttttatcattgtcatggagcacgtcatctactctgtgaaatttttcatttcatatgcaattcccgatgtatcaaaacgcacaaagagcaagatccagagagaaaaatacctaacccaaaagcttcttcatgagaatcacctcaaagatatgacgaaaaatatgggggtgatagctgagcggatgatagaagcagtagataacaatttacggccaaaatcagaataagagctttatgttctgagaagcactttaaggaatttagctttgtcaaaatatattaggaatcactaatgagaatgtgtaagttaaatcactttggcaaatatgagtctcaactattgccatttcctcatgtattatttttcagtttcagctagcgatgcagaaactggaaaatgtaaaacttagatcatgaagggcataaaacttatcacccggaaaacctcaatgttacctttttctgataaattggaattttacagaaaaagtccctcagtgtgcttaaaaaccaccccttctaaagtagaatggattcttttttttctgtttgattattttcatttctgtctattctcaggcgcatgatctcctttatttttaagccatgtttcatttcttcacttggctagatctgttccagggtcatcttttccttacagtaccatcattatagatttaatttaatagctttcatgtgattaaaaatagctaactagactcaaggattcacaatatttaggtgtattttcaatacctccagaaaggaaacctcagttaatcagaggaaatagtttcagtcttcatttgagcatgtctttccatctcaaaaaaatactcttagtaggttggagtgaagatagcaaggttttgaagcatatttgtcctaatccacagtgacactttttatcttccaggagcactcctaggaggttccgtgcctaatcaatgttgactgctttgcagatctcaagggaataaaatgacaaaagcagggaaagttacagattcaaacagcattttaactcatgttgatctggataattaatctttctaaagatgtgtagtttcttggaaaacagtgatatcacatgattaaaattacatttttatcaacataattgtctggaaaagataagcccctcaattttctaccagttgacttttattcattagatacagaaggtgcagtattacacatcaccagctgcctttgtgaatggctcactacacagccattggggtacaactgtgtgcatgggcagaaacagcaagtgccctcattgtggtcattgggtggggagtgccttttgtcaaggagtctgcaggaattggcttatttctgtatgccaaagtgatcaacacaccaaagtctctgccataaagaatgtggcttccttgcatcctccatcctgttactctgggcccagtaatttgatgtaactgtctgattgtactagagacaggagtatacccagcttattcataatcaagtaaagagactcagattagatttgattttttagcctcctctagagccaatcaggcagttaagagtaataaaggaaaagggtttggtcacaaaccctaccattatctggagattacttcctgctgcactcctgtcttgccatgcacgtcttgccccctcacttttgctcagcctagcagtctacttcactttattgccttgtaagtgtcaggcctcctgggcgctctggaaaagacagggagccaggccctctcacccctactggtaacaggtcattgctgggtgcacaagagggaggtgatttgcatcatggtcatgctgcatgggcttcactgggatgctgttaaacaccagaggagccaacctatcagaatcccagcagcaaaggaaaactcagattttagaggctttttacaataaagtagcgtaactctaggtcatgattgatttcaaatgcctgccatgaatgatttgtaagtaattatgtaggatccatcaaagcagtattgtaggcttttgaattgtcccagtggatccgggaccccatttcactgtctctcttgatcgtgttaatgatgcaatcagagttcaagacaggccccatgaagtctgactgcactgggatggagaaatgaatttcttcccactgaaggaaactctttctcattcgcagccaagacgggagtgccactgttcctctcttcactcctgagatactgcttctggaagcgggtgtcacttcctctctagtacctcttctcttctctgaagtgtgtgactatctcctagtgtttaaatttggcagttactcgccatgtatgtcagcatagaaaaggaaatgtttttaccttatctcctgtatgtatgatagaacttaaaagaaatgtgcatttgttttcatagccccagcagagaaaatcctcttcatagattaaatgtgctgctgtggacaggagggaaaaaaaaaccctctacatattgaaaggcaccaaatgtaatatctgacactgttaagatgcccaaaagagcaaagttgtagtggagatgcagggtcatttccccatgccatccacagtgtttgttagtgagtccacggctgacttgcagtgataaagaaaagcatggagctgtgtctgcagacaatggtggctgcatctgtaagtggcttcagaggcagcagccctggggaaattgatgggtgtggcagtggacctgtgaagagggagaatctagccttcagcctgtccagtgttaaccactagagaaactgagctttatatccttttttaatgcctgtgaattttagcatattgaaacattagagcaaatactcaggggatttttcattaaacatccctcagataatttagctatatatcattagaaagggaaagctatcatttttattttaaaactaaacaaggccatcttataaactgtcaccaaagtcttcccttttttattgcatgtgtgccttgaatttcataaaacattaattcacaatgggggtcagaatgtactcttgttgaaacacttcttgtaccattttatgttcatattatgtttgagagggtaaaaatgtatgagcagcttaactgaagtagaactattcatgatgcttttcacacattgtggcataagatgtaaagtttgtaattaatgttaatttctgtgcattttaatattcttttataattattaatgttaatttctgtgcattttaatattcttttataattatgagcattttaataaattcatttttacaaacaaaaaaaaacgatatcaagcttatcgataccgtcgacctcgag

SEQ ID NO: 743 - DNA, 1145 bp, Homo sapiens
  misc_feature (1)..(1): n equals a,t,g, or c
  misc_feature (7)..(7): n equals a,t,g, or c
  misc_feature (1104)..(1104): n equals a,t,g, or c
ncccccntttttttttttttttttttttttttttttttttttttttttttttttttttttttttttttttttttttttttttttttaaaaatacggaagtttattgtaggacactcagtgtgaataaatggaatggaaaggcctacacatcgagactcatccatgattgatatgaatttaaaaattacaagcaaagacattttattcatcatgatgctttcttttgtttcttcttttcgttttcttctttttctttttcaatttcagcaacatacttctcaatttcttcaggatttaaaatcttgagggattgatctcgcctcatgacagcaagttcaatgtttttgccacctgactgaaccacttccaggagtgccttgatcaccagcttaatggtcagatcatctgtttcaatggcttcgtcagtatagttcttctccaggaactcrcgcactgacttggcaccccggcctatggcattggccttccaggcatggtatgtgcccgaggggtcagtctgatagagcctaggagtgccatcaaagtcgaaacccacgatgagggcagagatgccaaacggcctgcgcccattgctctgcgtataacgctgcttcagactggcgatgtagcgggtgatgtactccacagtgaccgggtcctccacagtcagccggtggctctggcactccacccgggccctgttgatgactatccttgcatcggcggtgaggcctgcaaaggccatgcagacgttgtcatccaaagcacagatcttccgcactgttctttcatcctgcagtttggccactgacttcttctccacaccaagaacaacaatgtctcttcctcgaacaccaaccgcggtcgagcccttcttgacggcctcctgcgcgtactccacttggaagaggtggccgtcgggcgagaagacggtgatggcgcggtcgtagctcatgccggcgggcggcggccgggctccttccgccgcgactctcaaaagcgcacactcacggcctgcgcgcacccgcgactcccggcgccactacgcccgcgccccaccctcggcgccgtgtcctgcagctgccggcgacgggcggcgtcagncggcccacgcgtccgcccactgcgtccgcccacgcgtccgc

SEQ ID NO: 744 - DNA, 1579 bp, Homo sapiens
  misc_feature (1519)..(1519): n equals a,t,g, or c
  misc_feature (1550)..(1550): n equals a,t,g, or c
ggctgcgagtgtccagacatccttgtggaaccagcgttgtttttccttggcagctgcggagacccgtgataattcgttaactaattcaacaaacgggacccttctgtgtgccagaaaccgcaagcagttgctaacccagtgggacaggcggattggaagagcgggaaggtcctggcccagagcagtgtgacacttccctctgtgaccatgaaactctgggtgtctgcattgctgatggcctggtttggtgtcctgagctgtgtgcaggccgaattcttcacctctattgggcacatgactgacctgatttatgcagagaaagagctggtgcagtctctgaaagagtacatccttgtggaggaagccaagctttccaagattaagagctgggccaacaaaatggaagccttgactagcaagtcagctgctgatgctgagggctacctggctcaccctgtgaatgcctacaaactggtgaagcggctaaacacagactggcctgcgctggaggaccttgtcctgcaggactcagctgcaggttttatcgccaacctctctgtgcagcggcagttcttccccactgatgaggacgagataggagctgccaaagccctgatgagacttcaggacacatacaggctggacccaggcacaatttccagaggggaacttccaggaaccaagtaccaggcaatgctgagtgtggatgactgctttgggatgggccgctcggcctacaatgaaggggactattatcatacggtgttgtggatggagcaggtgctaaagcagcttgatgccggggaggaggccaccacaaccaagtcacaggtgctggactacctcagctatgctgtcttccagttgggtgatctgcaccgtgccctggagctcacccgccgcctgctctcccttgacccaagccacgaacgagctggagggaatctgcggtactttgagcagttattggaggaagagagagaaaaaacgttaacaaatcagacagaagctgagctagcaaccccagaaggcatctatgagaggcctgtggactacctgcctgagagggatgtttacgagagcctctgtcgtggggagggtgtcaaactgacaccccgtagacagaagaggcttttctgtaggtaccaccatggcaacagggccccacagctgctcattgcccccttcaaagaggaggacgagtgggacagcccgcacatcgtcaggtactacgatgtcatgtctgatgaggaaatcgagaggatcaaggagatcgcaaaacctaaacttgcacgagccaccgttcgtgatcccaagacaggagtcctcactgtcgccagctaccgggtttccaaaagctcctggctagaggaagatgatgaccctgttgtggcccgagtaaatcgtcggatgcagcatatcacagggttaacagtaaagactgcagaattgttacaggttgcaaattatggagtgggaggacagtatgaaccgyacttcgacttctctaggaatgatnagcgagatactttcaagcatttagggacggngaatcgtgtggctactttcttaaactaca

SEQ ID NO: 745 - DNA, 1323 bp, Homo sapiens
  misc_feature (17)..(17): n equals a,t,g, or c
  misc_feature (24)..(24): n equals a,t,g, or c
  misc_feature (1313)..(1314): n equals a,t,g, or c
gccccttttaaaaaaancccccanttttttttttttttttttttttaaacgcagcccgtttaatgatggggcccagactgcagtggctcaagacaggacactgcggaaagccgccatgtgccgccgcacactgtctgagatctgctcagccgatctgctccggccgtagtaatccgtgaagaggccgtcagggttgagcaggtagatggcaatggagtggtccacgatgtagtcctggtcctcatccttggggcckgcattgtagtacacgcggtaactgtgactagcctgggcaacctgtttggtggagccggtcagacccaacagtcttgggtggaagtcctggacgtagcgggccatggcttcaacgtcgtcccgctcggggtccacagtgatgaagacaggctgcactggaggcaaaccaggctctgcttccagctgccgcaccacctgcaccagcttctccagctcgtctgggcagatgtcagggcagtgagtgaagccaaagtacatcagcacccactggccccggaagtcagccttgcagcgagcccggcctctgtgatccagcaggtggaagtcgccctggcccacagctgcctggcgcagggcttctgttcgcttttgctgctgcagcctctccttctcagccctcagggccagccaggccccaccgagtccagccccgaacaggcctgtgatcagcagccgggttcgaagcccagggccctggggctggccctgcccacctgtctctgcagggccctgccttgacaaaagccaggacctcagatgcagggcctggcctcccagggtcccagggaggaccsgaggcttgagctgagagagcctgtgccaagctgtggggctccgagtcagcagcagcatggatctgatgctcctggaaacaagcacaggcgtcaggagccagaagggaaggcccaggacagtgcctgggctgcccctgcgacttgagaccagccacccatctgaaggacccagcccacgttcaggcttaacaggcatttgcagctgctcacctgagctcagaactccacctccaccaaacatccacacctgggcaaccacacctgtcactcctgtcctctacctgggatcaccagcctgtcaccgcaccctgccctgcacctgcacctcagcaaggtgaacctcttgctgacggaaagcattccaagtgcatgccttgcctgaactaaccacgttatctatttgcaataaacccatttcttaaaaggaaaaaaaaaaaaaaaaaaaaaaaaaaaaaaaaaaaaaaaaaaaaaaaaaaaaaaaannggggggggg

SEQ ID NO: 746 - DNA, 1459 bp, Homo sapiens
  misc_feature (1430)..(1430): n equals a,t,g, or c
  misc_feature (1450)..(1450): n equals a,t,g, or c
ggacgacagagggagacgcagaggcggacaagatggcggcggcagctgtacagggcgggagaagcggtggtagcggaggctgtagtggggctggtggtgcttccaactgcgggacaggaagtggccgtagcggcttgttggataagtggaagatagatgataagcctgtaaaaattgacaagtgggatggatcagctgtgaaaaactctttggatgattctgccaaaaaggtacttctggaaaaatacaaatatgtggagaattttggtctaattgatggtcgcctcaccatctgtacaatctcctgtttctttgccatagtggctttgatttgggattatatgcacccctttccagagtccaaacccgttttggctttgtgtgtcatatcctattttgtgatgatggggattctgaccatttatacctcatataaggagaagagcatctttctcgtggcccacaggaaagatcctacaggaatggatcctgatgatatttggcagctgtcctccagtcttaaaaggtttgatgacaaatacaccttgaagctgaccttcatcagtgggagaacaaagcagcagcgggaagccgagttcacaaagtccattgctaagttttttgaccacagtgggacactggtcatggatgcatatgagcctgaaatatccaggctccatgacagtcttgccatagaaagaaaaataaagtagccaattctaaaagtagccctctttctcctggatcttgctgaattagtggcttggggggtgggggagataaaaagaacttaaaatgggtaaagtaagaaatgttaaaaagtccctgttttgtcctgaaattttagtctattctgggtaaataggattttctgacacagatatgagaagttgtagctctgatgtctagctgtagtctccttgatctgctgattgcattattttaatttgcttttctgggaaagcagttttgctaaaagctgtacagactttttcttttgtacctagcagtactttatatagtatagctttgggccatgtagcattttaagactcaattttaaaaaattattaatctgttgctgactcttaattcctatttcaatatgtgtttccttgaagaattcaggatacaacttcttgtgtatgacagctttccttcacacactatttttgtgggtgtgtatatatctgatttgggaagaatttaaaaaacacatagctttttaatttgtttgaaacagactttctgcctgttacatttttgcttttaaccaattaaagaagccaatggcattttagttttatattgtgttttccactagtatatccctgttgatttgtttgtgccttttattaactgccattttctaaaatttttttcaataaaaggaaggaagatgtgaaaaaaaaaaaaaaaaaaaaatgggnggccgaacttatccctaggngggtattta

SEQ ID NO: 747 - DNA, 3329 bp, Homo sapiens
  misc_feature (1317)..(1317): n equals a,t,g, or c
  misc_feature (2693)..(2693): n equals a,t,g, or c
agtgaattaggattgctctgaattacttaagtagctgaacaaggaggcatttatgcatttgctgcctctacttactacacatggataaattcctctggaaaagtaaaaacacaattatagaagattaaaaaaaacaagtcacctggttccaacaagttcatcaaatacatctagactttttgatctgttcagttggttactttcaaaattgggttcatggattagagctgtttttcaaactagatttattatgttactgttctttaccttatgatctttaagctctgttcttgttgcctaacctttgtaaagccagttctcccaacaagatgatgttggcctaacggttcgaggcgattgctaatgcctgtggctctaataagatggaattcaattctgaactccaggcaaacctgccatgagggtttttccttttgtcctctttgtaactaacttgtggcttggatccctgacattgactgtcatattttctccctgatgtgggaccagagacaacaaggatacatccatttccacactgagagacaattaaagcctaaattcaggatagttgatgctttcagagaaagagtttgaggaaaagggaaaaatgtgaaaatcgattatgtgaattggagttactgtgacacccaactaatttggagttgaggcaccaggtaggggaaaaacactcagagcrtaaagtgccygtgccaggaattatcttccaagcccagctgccaaaacaacctgctgtaatcttaaggccagttttgcctagtwgctkytaaaaccacctgccttactctgtggctagttttacctactgctgtcactcaccaatcagagcttaccaatacttgagaactctcactagcaccaatgagctttctattaaaacaatatacataacatttatctttcctacttaaaccccaatcttctttattcttcagacatactaaagaccacctcagtctttgtgtttgttccaagttgcacttctggttttatatattcccagctgaaatattttgcttagagatttgtctctatactttgattttgatactcggcatactagtccccccaaccctttgcagtcatggatctttttactgcctttttcgttttgccttttccagaatgtcatatagtkggaatcatacaatatataatcttttcaaattggcttctttcacttaataatatgcatttaaagktcttccatgtcttttcaagacttagagctcatttcttttagcacagtttatctgtctattcacctaccgaaggacgtcttggttgcttccaagntttgtcagcagtgtgtgtaaagttgctataaacgtgygtggacatatgtttcaactcatttgagtaaattctaagaagtacagttgctggatcttatgaaaagaatatgtttagtttkgtaagaaactgccagatgtgaggtgtctgtttaaggtctggctcatcattattgggttcattttcttggtgagggcttttgtttgtttgtttgtttgtttgtttgtttgtttttggagaggaagtctcattctgtcgcccaggctggaatgcaatggtgcgatcttggattactgcaacctctgcctcccgggttcaagcaattgtcatgcctcagcctcccgagtagctgggattacaggtgtgtgccaccacatccggctaattttttgtatttttagtagagatggggtttcaccatgttggccaggctgttctcgaactcctcacctcaggtgatccacctgccttggcttcccaaagtgctgggattacaggcgtgagccaccgggcccagccaagagttcttaattttaacgaagtccaactttttgattatttctttcattgattgtacctttaaaaagccatctccaaacccagggtcatctagattgtcttctgtgttattgtcttaagagttttatagttttaccttttacatttgggtctttaatgttattttttgtgaagagtttaaggtctgtgtctagactgatgttttttgcttgtggatgtcaaattgttctagcacttttttttttttttttttttggagacagggtctcactctgttgcccagtctggagtacagtgtcgtgatcttggctcactgcaacctccaccttccgggttcaagcgattctcccacctcaatctcccgatgattctcccacctcaacctcccaagtagctgggactgcaggcacatgccacgacgtccagctaatttttgtattttttagtagagacagggtttcaccatgttgaccaggctggtctcgaactttggacctcaagtgatccacctgcctcagcctcccaaagtgctggaattacaggcgcgagccaatgcaccccgcctgtttgggtccagcactgttttttgaaaagcctatcttttcttcattgtattacctttgcttctttgtcaaagatcagttgactgtatttgtgtgggtgtatttctggactcccttctcttctgttgatctatttgtcgtattgttttgccaacactacatcgttttgattactgtagatttatagtaaatcttgaagttgctacggttagktttccgacttkgtyckgttawactacttcagtatcatattggctactttagacctttggcctcttcagtaamccagaatcgctntgktagtattcacaaaacaattkgctaggattttggttgggattatgttgaatctataaatcaagttgagaagaactgacatcttgataatactgagttttcctatccacaagcatgtaatatttctccttttacttagttctttaatttctttcatcagagttttatacatttcctcatatatatcttgtacatgttttgctagatttataccttagcattttatgttttggggtgctaacataaatggtattgagttttaaatgtcaaattgtttgttcattcctggcatataggaaagcgattggcttttgtatattarctttgckacaatcactttttagttcaaagagttttttggtcagctcttgtgtggattttctgcaagacaatttcgtctcctgggaacagagactgttttgacttttttcttcccattctgtatgccttttatttccttttcatatcttactgcattagctaagacttccattacattgtcgaaaaggtgaggrmawccttgccttgttgcttatcttagtaggaaagtttctagtttctcaccagtacaacattatctgtagtttaaaaaaaaaggaattcgatatcaagcttatcgataccgtcgacctcgag

SEQ ID NO: 748 - DNA, 1195 bp, Homo sapiens
  misc_feature (2)..(2): n equals a,t,g, or c
  misc_feature (51)..(51): n equals a,t,g, or c
  misc_feature (1179)..(1179): n equals a,t,g, or c
cnatccgtcctcactaagggaccaaaagctggagctccaccgcggtggcgnccgctctagaactagtggatcccccgggctgcaggaattcggcacgaggggttgcccacctgcaaactctccgccttctgcacctgccacccctgagccagcgcgggcgcccgagcgagtcatggccaacgcggggctgcagctgttgggcttcattctcgccttcctgggatggatcggcgccatcgtcagcactgccctgccccagtggaggatttactcctatgccggcgacaacatcgtgaccgcccaggccatgtacgaggggctgtggatgtcctgcgtgtcgcagagcaccgggcagatccagtgcaaagtctttgactccttgctgaatctgagcagcacattgcaagcaacccgtgccttgatggtggttggcatcctcctgggagtgatagcaatctttgtggccaccgttggcatgaagtgtatgaagtgcttggaagacgatgaggtgcagaagatgaggatggctgtcattgggggcgcgatatttcttcttgcaggtctggctattttagttgccacagcatggtatggcaatagaatcgttcaagaattctatgaccctatgaccccagtcaatgccaggtacgaatttggtcaggctctcttcactggctgggctgctgcttctctctgccttctgggaggtgccctactttgctgttcctgtccccgaaaaacaacctcttacccaacaccaaggccctatccaaaacctgcaccttccagcgggaaagactacgtgtgacacagaggcaaaaggagaaaatcatgttgaaacaaaccgaaaatggacattgagatactatcattaacattaggaccttagaattttgggtattgtaatctgaagtatggtattacaaaacaaacaaacaaacaaaaaacccatgtgttaaaatactcagtgctaaacatggcttaatcttattttatcttctttcctcaatataggagggaagatttttccatttgtattactgcttcccattgagtaatcatactcaamtgggggaaggggtgctccttaaatatatatagatatgtatatatacatgtttttctattaaaaatagacagtaaaatactaaaaaaaaaaaaaaaaaccccggggggggnccggtacccattcgcc

SEQ ID NO: 749 - DNA, 4792 bp, Homo sapiens
gagaggagccgcccgagctgaatcgccagagcccgaacccgcggcgcggccacgcggtgccgcccaccctggtgccgctcatgaacggctcggccacgccgctgcccaccgcgctcggcctcggcggccgcgctgccgcctccttagccgcggtgtccggaaccgcggccgccagcctgggctccgcgcagcccaccgatctgggcgcccacaagcggccggcatccgtgtcgagcagcgctgccgtggagcacgagcagcgtgaggcggcagccaaggagaaacaaccgccgccgcctgcgcaccggggcccggccgacagcctgtccaccgckgccggggccgccgagctgagcgcggaaggtgcgggcaagagccgcgggtctggagagcaggactgggtcaacaggcccaagaccgtgcgcgacacgctgctggcgctgcaccagcacggccactcggggcccttcgagagcaagtttaagaaggagccggccctgactgcaggcaggttgttgggtttcgaggccaacggggccaacgggtctaaagcaggtaggggcggctgtgaagtgagggggtctaggggagaaaaggggacggagagcagaggaagggtggttctttggattcaccattttaccccagcccagaaacaacaaacaccccacttcctgatctgcctgaggcggaaccagtgcttggtggcaacgtgttcatgtcctgaagcagcataacaaagaatgagtcagactgggctgatacgctctgaacacggggttttcctttcccagcacattcttggatgggagcatgagggcaccagtcaccttttaacctattgggggacattagcagtcacatgttgagtgcaaacgagggtacttttgtgcatgtktacaaacaggcagttacaagcgtgtcattttcagtggctccattttaaatcagtctgctgcctcagaatcccgtacgcctgaaggttttaagttgcatgtgcacctgaaactcgtatatgagtattttctgtctgtgcttttagagaggaggaattctgtaacgacttttgtttcgggttaggaagagaatgatctctttcagtgcaccgccacttatgttacctttttccttttatttctttgtgtttccagttgcaagaacagcaaggaaaaggaagccctctccagaaccagaaggtgaagtcgggccccctaagatcaacggagaggcccagccgtggctgtccacatccacagaggggctcaagatccccatgactcctacatcctcttttgtgtctccgccaccacccactgcctcacctcattccaaccggaccacaccgcctgaagcggcccagaatggccagtcccccatggcagccctgatcttagtagcagacaatgcagggggcagtcatgcctcaaaagatgccaaccaggttcactccactaccaggaggaatagcaacagtccgccctctccgtcctctatgaaccaaagaaggctgggccccagagaggtggggggccagggagcaggcaacacaggaggactggagccagtgcaccctgccagcctcccggactcctctctggcaaccagtgccccgctgtgctgcaccctctgccacgagcggctggaggacacccattttgtgcagtgcccgtccgtcccttcgcacaagttctgcttcccttgctccagacaaagcatcaaacagcagggagctagtggagaggtctattgtcccagtggggaaaaatgccctcttgtgggctccaatgtcccctgggcctttatgcaaggggaaattgcaaccatccttgctggagatgtgaaagtgaaaaaagagagagactcgtgacttttccggtttcagaaaaacccaatgattacccttaattaaaactgcttgaattgtatatatatctccatatatatatatatccaagacaagggaaatgtagacttcataaacatggctgtataattttgattttttttgaatacattgtgtttctatattttttttgacgacaaaaggtatgtacttataaagacatttttttcttttgttaacgttattagcatatctttgtgctttattatcctggtgacagttaccgttctatgtaggctgtgacttgcgctgcttttttagagcacttggcaaatcagaaatgcttctagctgtatttgtatgcacttattttaaaaagaaaaaaaaagccaaatacattttctgacattgtaagattgccttactgtctgtcattccttattgctggcccctttctcaggccggaggccaagtggtggagaaggaaaggaaatgatcgaacgggcatgttgtcaagtgggcatgccactgggaaataccaccagtttaccctgaaacattgtcctcagaggagtaggaaagtggattttgaatctctattttgctcaaaagttcagttcctgagatactgatgactgagagtgctgctgggaaattttcaggattgtgtggtcttttggggttttttgtttttttttttttaagacaaagttgaccgctgttcactgtccacgtgatcagttgtaagattacaatgctgcatgctagttggttacataagatacaattccagtgatggaaggcggttataatggatggtggtgtgtacaagatggcactgccatctttgagcagagcccagctctgcagcgccacttcatctttttaaacaccctagaggtctgtttgttgttgctgttgtcctttattttgaaagagttgcaagagaagttacagtccaggtgaacttggagattgtgggattggttttgtttctgttttgttttgtttatcatttacctgtagtgctattgctgttgatactatcacctataccctgtttctagtgagtgctgaatacagtatggtacaatgacagtaacagccgcgtggtgctgccaggactgcccttgggcatatcagtgacagcccaaatgtgggtggaggaaacctgtaatttccttcttaacatgtgtttgaaataccaagtgaataatactgttctggaaaaaaatgataaactagtggaaattaaagaaattaagggttttatataatagacaggccccacctctcaaaatatttttagaagtctttttgtaaactaatttcttttgatcactattttgcatcagtaaaatgatttttttaaaaccaataaatcatcaattattagaaatagttgtctcacagtgatactggtttttcttttgtgctgttatgatttaacattgacaggaacactattttaaatccttacgttcaggtgtttgtaacttggccttataattaggctgaattatggcttcaaggtctacaatttatgtgtatggttcacagcctagcttctatttacatttgaaaatacagatttttaccaactttggattcttttttagttatatgtttgtctttcctttttaaattgttcaaaactattttttaatggtcaagttactaacacttgaaaatcagatactgcaccaaatacagtgtttttccgtagtgtttttaatgagtgcacctattactactgtgcgagaattcatgttttaccagtcattgttatattacaaacagacttgcatgattaaccagttgttacacttactttttcaagttggagtatatatgactcagtgcagactggtctctcttatgtgaatgcacacatgcagaaatgcagagtcaattttacatgcccataaagacatttgtaaagaattcagctcttatggtctgttgtataaatgtgtatctaggcactttattataactggaatttgacctcacagatgttacaacttgatcagtcgtttgacctaatttgtggtagctatctgtatgttttgcaatcttaatacagacatgctttccaaaaagattaatacagaaccatcctgccgttttggataagtctatccagctgtggaaagggcaacctgtggtttctctgtactggtgtttaatgggggaagaatatgaacagctttaaagagctgtgtattgtggttactactattaaaaaataagatctgcacgagtctgactggcctttgggtggcctttgtggacggctcgtagctggaaagtgttgatctgggttttctggcattcttttaagttaaaaagttaacatcgggacatgggtttgatcttttgttgtacctgatgacagtgcagagattctccacagctggataaaaatgtcacaaagctacttactgtacatgggcagtatcagatttcaaatcctaatatttcagctgtgcttttaatactcaaaatattaggggatggggtgttgaagctttcccttttttgcttttaacaatttatagaatttaacagatgtactgtctttcatgtggcctcacatttaaagttatgagaacatacacatggtttacaacttttactatatacctttccttggccaccaagtattttaaaagtgtgccaccttttaacctttactttttttaagttgaaggtgatactttttctatatatgatgaaactcatgtcaactgaagtgagtgtaatctcagatatcaacattattatattttaaaatcacgctatggaaatatcacctgaattctgtcatttgtcagatttacagtacctttttttctttaacttttagcattaaataaaaataaaattgggagcactgaaaaaaaaaaaaaaaaaaaaaaaaaaaaaaaaaaaaaaaaaaaaaaaaag

SEQ ID NO: 750 - DNA, 2798 bp, Homo sapiens
  misc_feature (2793)..(2793): n equals a,t,g, or c
  misc_feature (2798)..(2798): n equals a,t,g, or c
gcggctaactatggcgaccgccacggagcagtgggttctggtggagatggtacaggcgctttacgaggctcctgcttaccatcttattttggaagggattctgatcctctggataatcagacttcttttctctaagacttacaaattacaagaacgatctgatcttacagtcaaggaaaaagaagaactgattgaagagtggcaaccagaacctcttgttcctcctgtcccaaaagaccatcctgctctcaactacaacatcgtttcaggccctccaagccacaaaactgtggtgaatggaaaagaatgtataaacttcgcctcatttaattttcttggattgttggataaccctagggttaaggcagcagctttagcatctctaaagaagtatggcgtggggacttgtggacccagaggattttatggcacatttgatgttcatttggatttggaagaccgcctggcaaaatttatgaagacagaagaagccattatatactcatatggatttgccaccatagccagtgctattcctgcttactctaaaagaggggacattgtttttgtagatagagctgcctgctttgctattcagaaaggattacaggcatcccgtagtgacattaagttatttaagcataatgacatggctgacctcgagcgactactaaaagaacaagagatcgaagatcaaaagaatcctcgcaaggctcgtgtaactcggcgtttcattgtagtagaaggattgtatatgaatactggaactatttgtcctcttccagaattggttaagttaaaatacaaatacaaagcaagaatcttcctggaggaaagcctttcatttggagtcctaggagagcatggccgaggagtcactgaacactatggaatcaatattgatgatattgatcttatcagtgccaacatggagaatgcacttgcttctattggaggtttctgctgtggcaggtcttttgtaattgaccatcagcgactttccggccagggatactgcttttcagcttcgttacctcccctgttagctgctgcagcaattgaggccctcaacatcatggaagagaatccaggtatttttgcagtgttgaaggaaaagtgcggacaaattcataaagctttacaaggcatttctggattaaaagtggtgggggagtccctttctccagcctttcacctacaactggaagagagcactgggtctcgcgagcaagatgtcagactgcttcaggaaattgtagatcaatgcatgaacagaagtattgcattaactcaggcgcgctacttggagaaagaagagaagtgtctccctcctcccagcattcgggttgtggtcacggtggaacaaacagaggaagaactggagagagctgcgtccaccatcaaggaggtagcccaggccgtcctgctctaggcagagtcccgggaccatggcctcctgccacacaacacgcagagaggactcaagactcccgctggccatggagtggcctgaaagagagcaagaacatgtggatctttgataggattgttaccaaatggtgtcagtatggaccaattgtgtgaccatgagaaggatgcttattttttttaaaaagaaaacacatctaaaagcccaggaactgatttttttaagaggaaaactaatgacagtgtataactgatgtttaaattgtgcatttagtactatttaaatgttttcttatactagtattttatattcttttgttgtcgtttaaaactggagcttcagtgtctcttccctccctctaatagtaatggttcagtaagcactccttaactccttagtatttcatagaaaaatgactgcaacattaaagctaagaggaacacttcarcatatgtggtacaaatttatattgaagatctaaataaaccacgtattttccagtcttcgttgtgtgaagctaaatggtggctaaaaggaacactttttgtgtgattattataaactttgcattgtatttgaatcttagaacttttgtacacactaaatattgatgtcacaccatttctaatctgagcatccttagccagagaatattcattatacttcctaagtgagcaataatttaaatcagaagctattttattttaatgtaattaacctttctttacatttcttatgtgttcacctctaatctgttttaggaagagagttggttattatgttgatcccataatataaatcatatcctttatattttagaatatctcaaatgtattccttttttgtatggtgggtttgcctagggacgtgtaactacaggcttttactaagccaaggaaaaagagaatttttcttttcatcttacaaattccagatatctacaaaagatgtgaaagcactaaaaataccatttttaagcagtactttacctgttttttctttagcaaaccaggttatgtggtgtaaaggtttgttatacgtgccacaatatagcatataaatattatgccatcattccttctcttgttaaaggtagaagaataaaattgtgatttttataacctgtgcttattactcaaatggtcttcaacatctttttaaacaacacatactttttgaatgttcagtttctattttgcttgaggtattttgtacatatgtgccttgtgattgctgctgctttaaaggataaagtactctttgggggatgagtctggtttgttttgttttattttttaatgaaataaacctatattcctgaaaaaaaaaaaaaaaaaaaaaaaaaaaaaaaaaaaaaaaaaaanggggn

SEQ ID NO: 751 - DNA, 812 bp, Homo sapiens
ttttttttttttttttttttttttccagaatccaactggactttatttgacacagaatacaatatggctacagaaacagcaaactgaaaaaacaaagcagaaaaaaacacagttccatccaatttgtaattaggtaacagcagggaaagtcattaaatgaataacaaaacaattaagcttgatggaagaagtcttttcctagtgcccatacttttggaattcccactctctgttgtccaatggacacacctgtcgtgttttgagccagcgagagatgcagtggaagtgaaaagcatgctgaaagaaaacatatattttattaaaaataactctatgcaggctcagccatcgagcgacaacaggtcccacagggtagtggcatgggtgacatatagtgggcaagaaaagaaaagaagacaacgagaggcaaaagttcaacaactgattatatcttggttagatgcaagggtatttccaacaaagcatttgttagaaatgtcattactactaraggaaatcattcaggaagcacaggagtatgtgccagcactgagctctcttctatttaagagaacgtggaatgtggctccttggtcccattcagcctgtaaggggatacttccactttctttgggaaaggaggcccctcatcaatgcagatttcaaatatccccattctgggtctctagcttccctcccaccctcctgcccctggagaatgcgacctgtaggagcagagccttctccccagcccttggtagagaagtgcatggtcactgccgcccacccagaactgagacgggcacttcccc

SEQ ID NO: 752 - DNA, 2484 bp, Homo sapiens
  misc_feature (1)..(1): n equals a,t,g, or c
  misc_feature (3)..(3): n equals a,t,g, or c
  misc_feature (9)..(9): n equals a,t,g, or c
  misc_feature (21)..(21): n equals a,t,g, or c
  misc_feature (2463)..(2463): n equals a,t,g, or c
  misc_feature (2468)..(2468): n equals a,t,g, or c
ngnacgttnatcttccaaggncccactatagaaggtacgcctgcaggtaccggtccggaattcccggtcgacccacgcgtccgcggacgcgtgggcggacgcgtgggcgcagccccggagcccgggccagggtccacctgtccccgcagcgccggctcgcgccctcctgccgcagccaccgagccgccgtctagcgccccgacctcgccaccatgagagccctgctggcgcgcctgcttctctgcgtcctggtcgtgagcgactccaaaggcagcaatgaacttcatcaagttccatcgaactgtgactgtctaaatggaggaacatgtgtgtccaacaagtacttctccaacattcactggtgcaactgcccaaagaaattcggagggcagcactgtgaaatagataagtcaaaaacctgctatgaggggaatggtcacttttaccgaggaaaggccagcactgacaccatgggccggccctgcctgccctggaactctgccactgtccttcagcaaacgtaccatgcccacagatctgatgctcttcagctgggcctggggaaacataattactgcaggaacccagacaaccggaggcgaccctggtgctatgtgcaggtgggcctaaagccgcttgtccaagagtgcatggtgcatgactgcgcagatggaaaaaagccctcctctcctccagaagaattaaaatttcagtgtggccaaaagactctgaggccccgctttaagattattgggggagaattcaccaccatcgagaaccagccctggtttgcggccatctacaggaggcaccgggggggctctgtcacctacgtgtgtggaggcagcctcatcagcccttgctgggtgatcagcgccacacactgcttcattgattacccaaagaaggaggactacatcgtctacctgggtcgctcaaggcttaactccaacacgcaaggggagatgaagtttgaggtggaaaacctcatcctacacaaggactacagcgctgacacgcttgctcaccacaacgacattgccttgctgaagatccgttccaaggagggcaggtgtgcgcagcatcccggactatacagaccatctgcctgccctcgatgtataacgatccccagtttggcacaagctgtgagatcactggctttggaaaagagaattctaccgactatctctatccggagcagctgaaaatgactgttgtgaagctgatttcccaccgggagtgtcagcagccccactactacggctctgaagtcaccaccaaaatgctgtgtgctgctgacccacagtggaaaacagattcctgccagggagactcagggggacccctcgtctgttccctccaaggccgcatgactttgactggaattgtgagctggggccgtggatgtgccctgaaggacaagccaggcgtctacacgagagtctcacacttcttaccctggatccgcagtcacaccaaggaagagaatggcctggccctctgagggtccccagggaggaaacgggcaccacccgctttcttgctggttgtcatttttgcagtagagtcatctccatcagctgtaagaagagactgggaagataggctctgcacagatggatttgcctgtgccacccaccagggygaacgacaatagctttaccctcaggcataggcctgggtgctggctgcccagacccctctggccaggatggaggggtggtcctgactcaacatgttactgaccagcaacttgtctttttctggactgaagcctgcaggagttaaaaagggcagggcatctcctgtgcatgggtgaagggagagccagctcccccgacggtgggcatttgtgaggcccatggttgagaaatgaataatttcccaattaggaagtgtaacagctgaggtctcttgagggagcttagccaatgtgggagcagcggtttggggagcagagacactaacgacttcagggcagggctctgatattccatgaatgtatcaggaaatatatatgtgtgtgtatgtttgcacacttgtgtgtgggctgtgagtgtaagtgtgagtaagagctggtgtctgattgttaagtctaaatatttccttaaactgtgtggactgtgatgccacacagagtggtctttctggagaggttataggtcactcctggggcctcttgggtcccccacgtgacagtgcctgggaatgtattattctgcagcatgacctgtgaccagcactgtctcagtttcactttcacatagatgtccctttcttggccagttatcccttccttttagcctagttcatccaatcctcactgggtggggtgaggaccactccttacactgaatatttatatttcactatttttatttatatttttgtaattttaaataaaagtgatcaataaaatgtgatttttctgatgaaaaaaaaaaaaaaaaamaggggggnccggnaccaattcgccctaaa

SEQ ID NO: 753 - DNA, 1169 bp, Homo sapiens
  misc_feature (1076)..(1076): n equals a,t,g, or c
  misc_feature (1136)..(1136): n equals a,t,g, or c
agacaccgccatggccgggctatcccgcgggtccgcgcgcgcactgctcgccgccctgctggcgtcgacgctgttggcgctgctcgtgtcgcccgcgcggggtcgcggcggccgggaccacggggactgggacgaggcctcccggctgccgccgctaccaccccgcgaggacgcggcgcgcgtggcccgcttcgtgacgcacgtctccgactggggcgctctggccaccatctccacgctggaggcggtgcgcggccggcccttcgccgacgtcctctcgctcagcgacgggcccccgggcgcgggcagcggcgtgccctatttctacctgagcccgctgcagctctccgtgagcaacctgcaggagaatccatatgctacactgaccatgactttggcacagaccaacttctgcaagaaacatggatttgatccacaaagtcccctttgtgttcacataatgctgtcaggaactgtgaccaaggtgaatgaaacagaaatggatattgcaaagcattcgttattcattcgacaccctgagatgaaaacctggccttccagccataattggttctttgctaagttgaatataaccaatatctgggtcctggactactttggtggaccaaaaatcgtgacaccagaagaatattataatgtcacagttcagtgaagcagactgtggtgaatttagcaacacttatgaagtttcttaaagtggctcatacacacttaaaaggcttaatgtttctctggaaagcgtcccagaatattagccagttttctgtcacatgctggtttgtttgcttgcttgtttacttgcttgtttaccaatagagttgacctgttattggatttcctggaagatgtggtagctacttttttcctattttgaagccattttcgtagagaaatatccttcactataatcaaataagttttgtcccatcaattccaaagatgtttccagtggtgctcttgaagaggaatgagtaccagttttaaattgcccattggcatttgaaggtagttgagtatgkgktctttattcywagaagccactgkgcttgggtagnagtgcatcamtyaccacagctgsctyctgagctgsctgagcctggggcaaaaggatttgnccccattacggggcttctgaataaacttccaag

SEQ ID NO: 754 - DNA, 2484 bp, Homo sapiens
  misc_feature (7)..(7): n equals a,t,g, or c
  misc_feature (27)..(27): n equals a,t,g, or c
  misc_feature (70)..(70): n equals a,t,g, or c
  misc_feature (2349)..(2349): n equals a,t,g, or c
ccccccnaaattttttttttttttttntttttggtgcccgggctggagtgcaagggcatgttctcggctnactgcaacctccacctcccaggttcaagcgattcctcttgcctcagcctcctgagtagctgggattacaagcacccgcaaccacgcccagctaatttttgcatttttagtagaaatggagttcaccaggctggtctcgaactcctgacctcaggtgatccacccatctcggcctcccaaagtgctgggattacaggtgtgagccaccgcgcctggccgaaaggattttataatagatgcatgtccctgttcaccccaaagtcaagttcaggcgggatgccaataataagtccatcagtgtttccataaaaagtaaaatcatctacaagttaaatttctctctaaaaaggccacaccccttataaacaatttactttttataaaaagacaaatgtacatatttacacacgtcctatgtgttcacacatgacttaatggttagatgacatttccaattttaagtcataccaaggcgctcacacttccctccctgggcctgttgagggctgctggggcttgagggggtggtgggcgccgagcaaggcactgtataaataaatgcaaaggccaagagctcgggggaaatgttagtgtacacctctgatcagaaatgtggcaagatccacacgaaaaagtgccaagtttttttcccaagcccctcagccaaagcagggagcagggtagagctcctctgaggctgagggagcatygccccgaaggaccccactttccttcacatttcactggctttggaacagtccccagggctcagctgaaaagggggtagttctttgggaacgagattcatttagtgcaattttctcttagtgcagagccagccctgggattggtgttatgcttttctggggtcactggtctgttcccctaggagccagccagtgacagcgagaccctctccaggcagctgggctcagaggaaaaagccagacactgactcctgtccaagtccctgacctgatacactggtctcagaacctcatcttcccaggaggcagggccagctttacaccacaagaaaaacccagacactggcctgccaggccctgagaggtcaatgacccaaggagggaggccccatccccacttggcagtggggtcacacttggctgttgaggggcccacagaagtccagcttctctgcaccatatccaccatgatgccaggtcctgcttgcctagaggaataagaggggcccaggggccctgctacggtgcacagggaatggcctggatggagggcaaccggactggggtcagcaggctgtccagccaggtggcatccatgttcttcagatctgtgaagacacgctgtagactcagcccaatatccccccctgggctgtcaatttctggctcctccttacagctaaagtctccatagacagaggtgggctggactccaggttcattgagtaggtaccccttcccatccacgtttgttggctgccactccgactgctccaagagcttcatgatgtcctcaggtaatttcccttcctcatcctcatctgttgtagcttcagaggtggagggcatgggtgacacctggaagttgtacagatcactggtgctgtccggcacaacttccactgggatgtgccagtcggggagagtgctgctgacagcacatggcgacagtgctggagtcagggcctgctccacctccaagtcctgcatgtagcctggaactgtgtagctgctgtggtcatcaggcagagtggagctgctgagtccatcagagaaggtatcagggctggaatccccacatgacttcctcttggccttgctcttagcatctcggctggacttcgactttctttcttttctctggttcttggtgagaggtggaagcatccggtacactcgcacagctgagctgcccttgttcctgctctggtctttcacctcctcgatatctggcagggagttcatggcacagcgaaagttggccttccacgtcttgggatctggctccttttcccctgctttgtatcggcctgtgtgaatggcccagctccggaacaaacaggcatccttgttgatgtcccagccatgcttggcagcatgcttccatgggatctggaagatcatctcctctttattaatccagatgagccccgggatttggttggaattaatctgcatctctagccagggtctcatgcgcatccgagtgatgggcatgttggctctgctgcaggagcgattcggcggtcgcgcgcgagggtcccggcgacgcaggggctgcagtgagggcgcncggagcgcgactccgagtggaagagggaagaaggcagaggttgccgggttcttaaggccsccgggcacggccggcgtggactgggcacggctccgggtggcctcggttcggcggggctcgggcgcacgtcttgcc

SEQ ID NO: 755 - DNA, 2938 bp, Homo sapiens
  misc_feature (466)..(466): n equals a,t,g, or c
ggtcgccttcgggctgggacccggagccccttcgccgcgccccaagacctccttgagtgcgggctgcgacgcgctcaccccgctgggccgtctgtgggcgcggctttgcgaagtcatccatctctcggatcactctctggcagccttgagctctcttgaaagcccagccccgggacgagggaggagcgccttaagtgcccagcgggtcagaagccccgacgtgtggcggctgagccgggccccgcgcactttctcggccggggaggggttcgggctcgggcacccggagttggcccctcgtaacgccgcgggaaagtgcgggcgagggcagtggactctgaggccggagtcggcggcacccggggcttctagttcggacgcggtgccccctggtggcgctcaccgcgcgcgtggccttggcttccgtgacagcgctcggttggccgtcacagcagccctcggttgnccctttcctgctttatagcgtgcaaacctcgccgcgccagggccaagggacaggttggagctgttgatctgttgcgcaattgctattttccccagagcggctttgtctttggatttagcgtttcagaattgcaattccaaaatgtgtaagacgggatattctcttctgtgctgtcaagggacatggatttgattgacatactttggaggcaagatatagatcttggagtaagtcgagaagtatttgacttcagtcagcgacggaaagagtatgagctggaaaaacagaaaaaacttgaaaaggaaagacaagaacaactccaaaaggagcaagagaaagcctttttcgctcagttacaactagatgaagagacaggtgaatttctcccaattcagccagcccagcacatccagtcagaaaccagtggatctgccaactactcccaggttgcccacattcccaaatcagatgctttgtactttgatgactgcatgcagcttttggcgcagacattcccgtttgtagatgacaatgaggtttcttcggctacgtttcagtcacttgttcctgatattcccggtcacatcgagagcccagtcttcattgctactaatcaggctcagtcacctgaaacttctgttgctcaggtagcccctgttgatttagacggtatgcaacaggacattgagcaagtttgggaggagctattatccattcctgagttacagtgtcttaatattgaaaatgacaagctggttgagactaccatggttccaagtccagaagccaaactgacagaagttgacaattatcatttttactcatctataccctcaatggaaaaagaagtaggtaactgtagtccacattttcttaatgcttttgaggattccttcagcagcatcctctccacagaagaccccaaccagttgacagtgaactcattaaattcagatgccacagtcaacacagattttggtgatgaattttattctgctttcatagctgagcccagtatcagcaacagcatgccctcacctgctactttaagccattcactctctgaacttctaaatgggcccattgatgtttctgatctatcactttgcaaagctttcaaccaaaaccaccctgaaagcacagcagaattcaatgattctgactccggcatttcactaaacacaagtcccagtgtggcatcaccagaacactcagtggaatcttccagctatggagacacactacttggcctcagtgattctgaagtggaagagctagatagtgcccctggaagtgtcaaacagaatggtcctaaaacaccagtacattcttctggggatatggtacaacccttgtcaccatctcaggggcagagcactcacgtgcatgatgcccaatgtgagaacacaccagagaaagaattgcctgtaagtcctggtcatcggaaaaccccattcacaaaagacaaacattcaagccgcttggaggctcatctcacaagagatgaacttagggcaaaagctctccatatcccattccctgtagaaaaaatcattaacctccctgttgttgacttcaacgaaatgatgtccaaagagcagttcaatgaagctcaacttgcattaattcgggatatacgtaggaggggtaagaataaagtggctgctcagaattgcagaaaaagaaaactggaaaatatagtagaactagagcaagatttagatcatttgaaagatgaaaaagaaaaattgctcaaagaaaaaggagaaaatgacaaaagccttcacctactgaaaaaacaactcagcaccttatatctcgaagttttcagcatgctacgtgatgaagatggaaaaccttattctcctagtgaatactccctgcagcaaacaagagatggcaatgttttccttgttcccaaaagtaagaagccagatgttaagaaaaactagatttaggaggatttgaccttttctgagctagtttttttgtactattatactaaaagctcctactgtgatgtgaaatgctcatactttataagtaattctatgcaaaatcatagccaaaactagtatagaaaataatacgaaactttaaaaagcattggagtgtcagtatgttgaatcagtagtttcactttaactgtaaacaatttcttaggacaccatttgggctagtttctgtgtaagtgtaaatactacaaaaacttatttatactgttcttatgtcatttgttatattcatagatttatatgatgatatgacatctggctaaaaagaaattattgcaaaactaaccactatgtacttttttataaatactgtatggacaaaaaatggcattttttatattaaattgtttagctctggcaaaaaaaaaaaattttaagagctggtactaataaaggattattatgactgttaaaaaaaaaaaaaaaaaaaaaaaaaagtcgaccggccgcgaattta

SEQ ID NO: 756 - DNA, 1956 bp, Homo sapiens
gaaagccctgagctcagggaggagctccctccasgctckatttagagccgggtaggggagcgcagcggccagatacctcagcgctacctggcggaactggatttctctcccgcctgccggcctgcctgccacagccggactccgccactccggtagcctcatggctgcaacctgtgagattagcaacatttttagcaactacttcagtgcgatgtacagctcggaggactccaccctggcctctgttccccctgctgccacctttggggccgatgacttggtactgaccctgagcaacccccagatgtcattggagggtacagagaaggccagctggttgggggaacagccccagttctggtcgaagacgcaggttctggactggatcagctaccaagtggagaagaacaagtacgacgcaagcgccattgacttctcacgatgtgacatggatggcgccaccctctgcaattgtgcccttgaggagctgcgtctggtctttgggcctctgggggaccaactccatgcccagctgcgagacctcacttccagctcttctgatgagctcagttggatcattgagctgctggagaaggatggcatggccttccaggaggccctagacccagggccctttgaccagggcagcccctttgcccaggagctgctggacgacggtcagcaagccagcccctaccaccccggcagctgtggcgcaggagccccctccccyggcagctctgacgtctccaccgcagggactggtgcttctcggagctcccactcctcagactccggtggaagtgacgtggacctggatcccactgatggcaagctcttccccagcgatggttttcgtgactgcaagaagggggatcccaagcacgggaagcggaaacgaggccggccccgaaagctgagcaaagagtactgggactgtctcgagggcaagaagagcaagcacgcgcccagaggcacccacctgtgggagttcatccgggacatcctcatccacccggagctyaacgagggcctyatgaagtgggagaatcggcatgaaggcgtcttcaagttcctgcgytccgaggctgtggcccaactatggggccaaaagaaaaagaacagcaacatgacctacgagaagctgagccgggccatgaggtactactacaaacgggagatcctggaacgggtggatggccggcgactcgtctacaagtttggcaaaaactcaagcggctggaaggaggaagaggttctccagagtcggaactgagggttggaactatacccgggaccaaactcacggaccactcgaggcctgcaaaccttcctgggaggacaggcaggccagatggcccctccactggggaatgctcccagctgtgctgtggagagaagctgatgttttggtgtattgtcagccatcgtcctgggactcggagactatggcctcgcctccccaccctcctcttggaattacaagccctggggtttgaagctgactttatagctgcaagtgtatctccttttatctggtgcctcctcaaacccagtctcagacactaaatgcagacaacaccttcctcctgcagacacctggactgagccaaggaggcctggggaggccctaggggagcaccgtgatggagaggacagagcaggggctccagcaccttctttctggactggcgttcacctccctgctcagtgcttgggctccacgggcaggggtcagagcactccctaatttatgtgctatataaatatgtcagatgtacatagagatctattttttctaaaacattcccctccccactcctctcccacagagtgctggactgttccaggccctccagtgggctgatgctgggacccttaggatggggctcccagctcctttctcctgtgaatggaggcagagacctccaataaagtgccttctgggctttttct

SEQ ID NO: 757 - DNA, 3347 bp, Homo sapiens
  misc_feature (417)..(417): n equals a,t,g, or c
gcgtccggytacgaaacttgggggagtgcacagaagaacttcgggagcgcacgcgggaccagggaccaggctgagactcggggcgccagtccgggcaggggcagcgggagccggccggagatgccctgtatccaagcccaatatgggacaccagcaccgagtccrggaccccgtgaccacctggcaagcgaccccctgacccctgagttcatcaagcccaccatggacctggccagccccgaggcagcccccgctgcccccactgccctgcccagcttcagcaccttcatggacggctacacaggagagtttgacaccttcctctaccagctgccaggaacagtccagccatgctcctcagcctcctcctcggcctcctccacatcctcgtcctcagccacctcccctgcctctgcntcttcaagttcgaggacttccaggtgtacggctgctaccccggccccctgagcggmccagtggatgaggccctgtcctccagtggctctgactactatggcagcccctgctcggccccgtcgccctccacgcccagcttccagccgccccagctctctccctgggatggctccttcggccacttctcgcccagccagacttacgaaggcctgcgggcatggacagagcagctgcccaaagcctctgggcccccacagcctccagccttcttttccttcagtcctcccaccggccccagccccagcctggcccagagccccctgaagttgttcccctcacaggccacccaccagctgggggagggagagagctattccatgcctacggccttcccaggtttggcacccacttctccacaccttgagggctcggggatactggatacacccgtgacctcaaccaaggcccggagcggggccccaggtggaagtgaaggccgctgtgctgtgtgtggggacaacgcttcatgccagcattatggtgtccgcacatgtgagggctgcaagggcttcttcaaggtaccgcgcagccccaggtggggccttttgttggaaatggagagaggctggcctcatcccattgggacctgtggtctccccctgggttctcctcctagctaagtcctgtcctgcagggtgggatcagccctgccaggtgggccgccttcctggagacccgtagatgccagggctggaagctttcatttgccgggacactcgggcccatgggattgcacagagctggagggaggggtgagataggggcagataggagctgcaggggtgcctggcgagcctctggttttcctctgctcctctgcctgtcctctcccaactcaaggttctagtgggaaggggtgcccccaggctctcatgttcctggcgtgagatgaaaggatccctgcggagggtttggttcttgagggctgggggtggacttgggaacaggctgtgtgtttgtcccagcgatggtgcctgcttagcttcccgtccccaccccccagccccttggccctctcctgtctgccctagggagaaggcaggtggacaagggcccatgaaaaaatacaggtgtctagactgccagggagaccctggcccccagtagtgtgtcctggggacttcctcagagcgagaaacctcccccaatgtcttcaagacttttctctccccccgcccaaccccgtctctccctcccttgccacccaaatgttagaaaaatagctgtgaacagagagcgcttttgtctgcaatggcagcaggatctggacggtcccctcccctaagttcccccctccccaccccacactctgacagcttgttccgtgttgcccccccacccagcgcacagtgcagaaaaacgccaagtacatctgcctggctaacaaggactgccctgtggacaagaggcggcgaaaccgctgccagttctgccgcttccagaagtgcctggcggtgggcatggtgaaggaagttgtccgaacagacagcctgaaggggcggcggggccggctaccttcaaaacccaagcagcccccagatgcctcccctgccaatctcctcacttccctggtccgtgcacacctggactcagggcccagcactgccaaactggactactccaagttccaggagctggtgctgccccactttgggaaggaagatgctggggatgtacagcagttctacgacctgctctccggttctctggaggtcatccgcaagtgggcggagaagatccctggctttgctgagctgtcaccggctgaccaggacctgttgctggagtcggccttcctggagctcttcatcctccgcctggcgtacaggtctaagccaggcgagggcaagctcatcttctgctcaggcctggtgctacaccggctgcagtgtgcccgtggcttcggggactggattgacagtatcctggccttctcaaggtccctgcacagcttgcttgtcgatgtccctgccttcgcctgcctctctgcccttgtcctcatcaccgaccggcatgggctgcaggagccgcggcgggtggaggagctgcagaaccgcatcgccagctgcctgaaggagcacgtggcagctgtggcgggcgagccccagccagccagctgcctgtcacgtctgttgggcaaactgcccgagctgcggaccctgtgcacccagggcctgcagcgcatcttctacctcaagctggaggacttggtgccccctccacccatcattgacaagatcttcatggacacgctgcccttctgacccctgcctgggaacacgtgtgcacatgcgcactctcatatgccaccccatgtgcctttagtccacggacccccagagcacccccaagcctgggcttgagctgcagaatgactccaccttctcacctgctccaggaggtttgcagggagctcaagcccttggggagggggatgccttcatgggggtgaccccacgatttgtcttatcccccccagcctggccccggcctttatgttttttgtaagataaaccgtttttaacacatagcgccgtgctgtaaataagcccagtgctgctgtaaatacaggaagaaagagcttgaggtgggagcggggctgggaggaagggatgggccccgccttcctgggcagcctttccagcctcctgctggctctctcttcctaccctccttccacatgtacataaactgtcactctaggaagaagacaaatgacagattctgacatttatatttgtgtattttcctggatttatagtatgtgacttttctgattaatatatttaatatattgaataaaaaatagacatgtagttggaaaaaaaaaaaaaaaaaaaaaaaaaaaaaaaaaaaaaagggcggccgct

SEQ ID NO: 758 - DNA, 1678 bp, Homo sapiens
  misc_feature (1535)..(1535): n equals a,t,g, or c
  misc_feature (1541)..(1541): n equals a,t,g, or c
  misc_feature (1560)..(1560): n equals a,t,g, or c
  misc_feature (1586)..(1586): n equals a,t,g, or c
  misc_feature (1636)..(1636): n equals a,t,g, or c
  misc_feature (1657)..(1657): n equals a,t,g, or c
  misc_feature (1668)..(1668): n equals a,t,g, or c
ggtgcgagtgccccctggggcgtgagggcaccttctgccagacagcctcggggcaggacggctctgggcccttcctggctgacttcaacggcttctcccacctggagctgagaggcctgcacacctttgcacgggacctgggggagaagatggcgctggaggtcgtgttcctggcacgaggccccagcggcctcctgctctacaacgggcagaagacggacggcaagggggacttcgwgtcgctggcactgcgggaccgccgcctggagttccgctacgacctgggcaagggggcagcggtcatcaggagcagggagccagtcacsctgggagcctggaccagggtctcactggagcgaaacggmcgsaagggtgccctgcgtgtgggcgacggccccgtgtgttgggggagtccccggttccgcacaccgtcctcaacctgaaggagccgctctacgtagggggcgctcccgacttcagcaagctggcccgtgctgctgccgtgtcctctggcttcgacggtgccatccagctggtctccctcggaggccgccagctgctgaccccggagcacgtgctgcggcaggtggacgtcacgtcctttgcaggtcacccctgcacccgggcctcaggccacccctgcctcaatggggcctcctgcgtcccgagggaggctgcctatgtgtgcctgtgtcccgggggattctcaggaccgcactgcgagaaggggctggtggagaagtcagcgggggacgtggataccttggcctttgacgggcggacctttgtcgagtacctcaacgctgtgaccgagagcgagaaggcactgcagagcaaccactttgaactgagcctgcgcactgaggccacgcaggggctggtgctctggagtggcaaggccacggagcgggcagactatgtggcactggccattgtggacgggcacctgcaactgagctacaacctgggctcccagcccgtggtgctgcgttccaccgtgcccgtcaacaccaaccgctggttgcgggtcgtggcacatagggagcagagggaaggttccctgcaggtgggcaatgaggcccctgtgaccggctcctccccgctgggcgccacgcagctggacactgatggagccctgtggcttgggggcctgccggagctgcccgtgggcccagcactgcccaaggcctacggcacaggctttgtgggctgcttgcgggatgtggtggtgggccggcacccgctgcacctgctggaggacgccgtcaccaagccagagctgcggccctgccccaccccatgagctggcaccagagccccgcgcccgctgtaattattttctatttttgtaaacttgttgctttttgatatgattttcttgcctgagtgttggccggagggactgctggcccggcctcccttccgtccaggcagccgtggagggctcggcgtggatggcaagctcaggacacacacccctgcctcaaggtgctgagcccccgcttgactgcgcctgcccacggtgtccccgcggnaacaancccggttctgaatcacctngcttcgtcaggcgggactgtgtccanaaagaagggcttgttaagttgatgggcccttctcggggacccacagggcnttcagcccatttggctggtcntctgggggggnttgggcctgc

SEQ ID NO: 759 - DNA, 1109 bp, Homo sapiens
  misc_feature (1098)..(1098): n equals a,t,g, or c
  misc_feature (1106)..(1106): n equals a,t,g, or c
  misc_feature (1108)..(1108): n equals a,t,g, or c
acccacgcgtccgtaacaaccggcagcggactcctttggctatggcctccaactttaagaaggcaaacatggcatcaagttctcagcgaaaaagaatgagccctaagcctgagcttactgaagagcaaaagcaggagatccgggaagcttttgatcttttcgatgcggatggaactggcaccatagatgttaaagaactgaaggtggcaatgagggccctgggctttgaacccaagaaagaagaaattaagaaaatgataagtgaaattgataaggaagggacaggaaaaatgaactttggtgactttttaactgtgatgacccagaaaatgtctgagaaagatactaaagaagaaatcctgaaagctttcaagctctttgatgatgatgaaactgggaagatttcgttcaaaaatctgaaacgcgtggccaaggagttgggtgagaacctgactgatgaggagctgcaggaaatgattgatgaagctgatcgagatggagatggagaggtcagtgagcaagagttcctgcgcatcatgaaaaagaccagcctctattaagatcagtgtcttctttttctactgcaagcacatgtaactagatttagtgcctgccatggtgtgaaatctggcttttgagaacacaaacttttcccccacggacctccctttatcactttaatagtgaccttgagcctattttagccgtttggaagtgttctttgatattacagttctttgtaaaatgacctgcgaattaccctaattctcaaaagcaaaacaagagcacacaagcgtgaagaaaaggatcttaaagctttgagcacctgccattttgccttgcatcgtttccctcgtcatgcatttccacatatccacaaacacagaacgactttagacaagcacatgttacacctgtgttgccacaagcagtcattcttgacggctccagtttttatttgacacttgagtttagttttctcttttataaacccagtgaactcctgcactggcatttggatgtgtgttaatgctatttgttttgtcttaaaagtaaaacctttctcagtttgaaaaaaaaaaaaaaaaaaaaaaaaangggggggncnc

SEQ ID NO: 760 - DNA, 597 bp, Homo sapiens
gcccacgcgtccgcccacgcgttcggccgcgctcctaagcgggagggagatccgccgcggagttacgggaaagttggtccgagttcccagagtttccctctgtggtgccctaggctcggccggccggtgccccggctcctttcctcctttcggccttcgccgtccaccaggtccctctctctgtccccggccgccatggagcagccgccggcgcytaagagtaaactaaaaaagctgagtgaagacagtttgactaagcagcctgaagaagtttttgatgtattagagaagcttggagaagggtcttatggaagtgtatttaaagcaatacacaaggaatccggtcaagttgtcgcaattaaacaagtacctgttgaatcagatcttcaggaaataatcaaagaaatttccataatgcagcaatgtgacagcccatatgttgtaaagtactatggcagttattttaagaatacagacctctggattgttatggagtactgtggcgctggctctgtctcagacataattagattacgaaacaagacattaataggagatggaattggcaacattcttaaatctacattggaagggcta

SEQ ID NO: 761 - DNA, 683 bp, Homo sapiens
tccgggctgagccacacatttcaaacaaagggcaaccaattactaacttctggttgctaggtgtggtcccctttcaaactccataaaatcagaagcacaaggcttcacttctagtaggaaacgttcacagttgaatctctcttcagtgctttggaagaagttggagaaaaaggatccttctttcaaaatggcaatggtatcagaattcctcaaacaggcctggtttattgaaaatgaagagcaggaatacattaaaactgtgaaaggatccaaaggtggtcctgggtcagcagtgagcccctatcctagcttcaatccatcctcggatgttgctgccttgcataacgcgataacagttaaaggagtggatgaagcaaccatcattgacattctaactaagaggaacaacgcacagcgtcagcagattaaagcagcgtatctccaggaaaaaggaaagcccctggatgaagctctgaagaaagccctttctggtcaccttgaggaagttgtcttggcgctattaaaaactccagcccagtttgacgctkatgaacttcgtgctgccatgaaagggccttggggactggatggaagacactctggatgaaatttggtatcaagaactamcaagagwtcagagaaattaacagakctatgagaagactgaagaggagttctggggc

SEQ ID NO: 762 - DNA, 733 bp, Homo sapiens
acgtaccggtccggtaattcccgggtcgacccacgcgtccgctcggcgggcgctgttgagggagtcgggccgcgactgtggtcgtttttataccttcccgcgcggacgccggcgctgccaacggaagggcgggtagggcggtgcgtgattaggttggcgaaggctctgctgccatgaaggtgaagattaagtgctggaacggcgtggccacttggctctgggtggccaacgatgagaactgtggcatctgcaggatggcatttaacggatgctgccctgactgcaaggtgcccggcgacgactgcccgctggtgtggggccagtgctcccactgcttccacatgcattgcatcctcaagtggctgcacgcacagcaggtgcagcagcactgccccatgtgccgccaggaatggaagttcaaggagtgaggcccgacctggctctcgctggaggggcatcctgagactccttcctcatgctggcgccgatggctgctggggacagcgcccctgagctgcaacaaggtggaaacaagggctggagctgcgtttgttttgccatcactatgttgacacttttatccaataagtgaaaactcattaaactactcaaatcttgctggaggcctctgggtgcctgtgttctcrgcatatagatgtggtctcggtgtgttttgatatgaaaactctcatgaataaacatctccgtgaaacgccaaaaaaaaaaaaaaaaa

SEQ ID NO: 763 - DNA, 4725 bp, Homo sapiens
ggcagagcctcggccaggcggaacctctctgctgggcccggtggccgcaaaagaactttctttctcccgcccgaacggtcgccgcggccaactgcctcgcccgcctggcagcctaaccctccttctcttcttctcctctccggcttcgcgcggccctgcctccctctcgcccggcggcatccgcttgctgctgccaccgcctcctcatcttctgcccggccaaccggcctgccccgctgcagtgatgtgcgacaaggagttcatgtgggccctgaaaaacggagacttggatgaggtgaaagactatgtggccaagggagaagatgtcaaccggacactagaaggtggaaggaaacctcttcattatgcagcagattgtgggcagcttgaaatcctggaatttctgctgctgaaaggagcagatattaatgctccagataaacatcatattactcctcttctgtctgctgtctatgagggtcatgtttcctgtgtgaaattgcttctgtcaaagggtgctgataagactgtgaaaggcccagatggactgaccgcctttgaagccactgacaaccaggcaatcaaagctcttctccagtgatggatggatggactgataactccggaagaatgactctcctgtggcctcacactgctgcctgtctgtctgtcactctctatctgccagcttcttcagctaaatactttaagaggggtgaggggagagagaaattcataacaaatccgactaccagaaaaaaaaaattgttttggaggaggggcaaaaggaaccatgatcaggcttttactgggattcctgatcaagtaagcctcttccctttctaataaaatatacaccttatacccaagggagagcaaagacaaaatacaccagtaacatttgaccttttcagctccctagctaatttattagattgtgttgaaggtctgattctacaaaggccaactctacatatttggtagccctaactgtctgagcagtagtggctgctgtgatgtaaacttagggtgctgagataagcaattagctctagccttctgccttaagaatgcactctactggggatttcctggcatagttaagagcgctgcctataaggttggtgaccaaatctttcctcggtgactttaagctttatgtgaaagcttagttaaggtgaggaggggcacactcctaaattgctggatgactgaactttggattttctctcccctttcacatggatttcatgtctctttagataaaactgactagttttatttataaaatcttaagttttggaagtctaaaggagaaaccattccagtatgcatatttttttctcctctagattcatacatttatatagcattgaaacactttcaaactcctgctggtagtaaaaggggatttaaaaatagaatcatagccataagcctgttagtatcatatgaagagagaacagttatcttagtacctatggattttctttatttgctgtttgaatggattgaccttggttatgtgttgagaattaaggaacattctttgaaatgcctctctcagacccatcttggaggctgattacttactgcaccaaagctatcactggggtgagatttactgtttggacaaatttagccccatcccttcaaaaatacacttgtaaccaggtttcccagagttgttgataggcttctgctgaacatatgccaacccacctgcataatatatttttgttgcttttataaatcatgcattacataaagtgtgacaacttcaaaatgtattctctgttcttggaatacagtgccctaaaatggtgttcttatgacctgcagaaaatatttacacatatttccaaatatttatttcatgagcagtacagctaattaaaatatataagcttaaattttatatcttacatttaaaatattaagattcctttgacttgccatccatataagcttgctaaaaatattaagaccaagtcatgcaataattgaatgtacctcaaatttttaggggagggtgggttagggactgatactcagattgtggataataattgaattggtttttaaaggcaacatagcattctacagcagggttaatctattatcaagaacagtcaccctggttaataacaagttttactgatcagttgctggttggttggttggttggcatgtgggtgtgtgggtgtataggtgtgtgtgggtgtgtgtgtgtatttttccccatgagtcctttttttaatcctgtggctttttcacttacaactagcctaaccctgtaattttcctacatccaagaaaacaatcacaaagtagtggtttaaatactttgttgtatttggctaattttgctgtcttaatgcagcctattaagagttgggttaaaaatcagtaatcagtactttattacatcactgaactaaaatatggagacatcctcattgaaaatggagggcactctatcagtctataactatcaacgtagtgcaacagggtgttttgatacctttgttttcacctcttgacataatgctatttaaaggcttgaatttttccctttatataattttcacctttactttcaaagtgttttgttgtagttggctattgcagagagtgcattgtcctatcattcctaaacctggtctgctttctacattcatggtatggaaaccatgtgattctttgtacagtttatcctgatgttgcttgtaatgcagtagaggctatttcgccttcgcttttctttctcgacctttttgtaaaccctataattatgaagcgattgcttgagaaaataacatataaacatagaatagaatagactgaccaagatggttcacagtttctttttttaactaggttatttataatgtatttctgaaccacttggcagacaaattcacaacacttaatgttcatattttgagtaaaggaagctaaaaccatgtttgctttctggtactacatgcattagcgaaaggttaagtaagttttgttctccactgaagtaatacttaacatctcagaaaaaattttgcatgttctgtagttttgtattaaatcagtcatttcatatgcactatatcaagtacaaacaggtagtttacctgtttatagtagtgtactaacaaagtctcccttgcagcttcagactgttatctataggcttatcgttcaaatacagcacttgaatatcccaagtagttcttctacgcatagctcacctttctaaacccagttaagcatggaagagaggtagtaggtaggtgcagtgtgtggaagctgcaaacaagtaggccttttattcattgatatcttttcccaagtactggattttaaatctgtatgtatctgtttgatttttttttctaatatttcagttgagctgctgttttcttccatgcaatattgtatactcaattgtgtatagaagaagctggtgagagtgccctcctacataaataagcaattgcagtgttttgcatgcaaaatataaaaaatttaaattgtcctgattctattttgtaaatggagaaacaatcatatctttctaagcggtaatggaggaagactagtgctttgtgcattttgatatatttgagttcattttttccacaatgtcatacttttgacgcagttgggtttctcataagtatcctagttcatgtacatccgaatgctaaataatactgtgttttaagttttgtgttgcaagaacaaatggaataaacttgaattgtgctacaaaaaaaaaaaaaaaaaaaaaagctgttcacacagatgtttagacctttctctctctctctctctcttttcttctttctcaacaactctttcacagaggcagtcattttgaaaggttgaaatatttggcctttaccaaagagctttttttttccttaagcaaaatcctttcagaaagaaacaaatggggaagggcagattaagaatgcatatgtcccaatccacttctataggagtttaatcatattcacatgagtaaaatgatggaagaactctttaaggtaatcctttgggataaaggatcctgggaagttctctcaggtaaagaaagcttacagcagatttgtaatatatgtctggagagctatttataagaaatttaagaggattgttttgttttcctttattaaagatttaagcctttttactttgcaaaaagaaaactacaaaagttttatagatataactttgctaattttttaaacttttctgaaacgattagctgtagccaaattatgtggttacgttttgctacattagaatttgaaaatgcaatatgtgtggtaaatctactgtttgaaatttataatggtctctgatatgattcgaattttggtaacttttgaaagttattttccccctttagtcatggatttctatttgttttttaatgttaatttttctagaaagcatctgaattgactaggcttttcctatataaaaaactcaaaacttgttaactctgtactttaataaaatttaaaattaaaactgtgttgtttttttctcttctgctagatacatatataattaaagtactcaagttagttgttttgcagagatgttgccttcagatgttaatcaggtctctcaagtttcatggagtctatgctgatcctttaattgacaaataaaagatatatatctgtggtgtgcaaaaaaaaaaaaaaaaaaaaaaaa

SEQ ID NO: 764 - DNA, 1339 bp, Homo sapiens
  misc_feature (1332)..(1332): n equals a,t,g, or c
cggaggcgctgggcaccagagcagggtcgagatgtcctacatcccgggccagccggtcaccgccgtggtgcaaagagttgaaattcacaagctgcgtcaaggtgagaacttaatcctgggtttcagcattggaggtggaatcgaccaggatccttcccagaatcccttctctgaagacaagacggacaagggtatttatgtcacacgggtgtctgaaggaggccctgctgaaatcgctgggctgcagattggagacaagatcatgcaggtgaacggctgggacatgaccatggtcacacacgaccaggcccgcaagcggctcaccaagcgctcggaggaggtggtgcgtctgctggtgacgcggcagtcgctgcagaaggccgtgcagcagtccatgctgtcctagcagccaccaccatctgcgactcctgcctgccgcctctctgtacagtaacgccacttccacactctgtccccatctggcttctgctgaccgctgggccccagctcagaagggctatagctggtcccagaggcctggcctggccttccttcccttctcccatccctggcctggggcctctgggaccrgctttctctcctggacaccgaggattggaaataagggcctggagctgagtagtagccagtctgctgtgaccacaggctcaggtccgaccctgctgcttggccacagcagtggctgggcaagtgggaaccactatctcttgggagcccccaaaagctgggaaatgctggaggaaccaggcctttcccgcttttgcctggctgcagggttcggctccgcccctgccccccagccctcgtgtgtccacaccgcagtgcctctgcccctcgggggactggacacacatcctgccagaggcgctacgaagctttgcccagatgaagccaggtgggctccgcgttcactcccactctcccgaggggtgctggcctccccagggtttgccttcttacggatttagacgaggttcgaggctcacctatcagggcagctctcaggattgtcattttcctctttgcctgtgggtttaacttttgtatttttttaatcacaagtttgatacaaaatgtttttatcgtactctttggagatgcccattctacttttgaatttagcttttactaattcgcatctggaagctcagcaagtgcacaagccttactttggttaccgtggaaaccactgccrcccctccccgatgtggtgcgctcaataaaaatgctggaattcaaaaaaaaaaaaaaaaaaaaaaaaaaaaaaaaaaaaaaaaaaaaaaaaaaaaaaaaaaaaaaggggggggcgcnagcggcc

SEQ ID NO: 765 - DNA, 643 bp, Homo sapiens
  misc_feature (564)..(564): n equals a,t,g, or c
  misc_feature (632)..(632): n equals a,t,g, or c
aacaataacaaaaacctagtaccttctggaagtagaatttactcttttgccgttggcaggcaaatacgccatgcgagacctggtcaaccggctccccggcggcaatggccccagtgtcttgtctgatgagaccatggcagccatctgctgtgctctgcacgaggtcaccagcaaaaacatggagaacgcaaaagccctggccgactcaggaggcataragaagctggtgaacataaccaaaggcagggcgacagatcatctctgaaagtkgtgaaggcagcagcccaggtcttgaatacattatggcaatatcgggacctccggagcatttataaaaaggatgggtggaatcagaaccattttattacacctgtgtcgacattggagcgagaccgattcaaatcacatccttccttgtctaccaccaaccaacagatgtcacccatcattcagtcaggctccagcaaaccttcaccaatttacatcagttcctattcctcmccagcaagagaacaaaatagacggctacagcatcaacagcttgtattatagtcaagatgactncaacagaaagaacttttgattgcatacagatttgtattttgcagtcttcctcatagctattgaaggtnccttatttttg

SEQ ID NO: 766 - DNA, 888 bp, Homo sapiens
  misc_feature (57)..(57): n equals a,t,g, or c
gccaagctctaatacgactcactatagggaaagctgggtacgcctgcaggtaccggntccggaattcccgggtcgacccacgcgtccgagtttaaaaagtgtaagtgggccgggcgtggtggctcatgcctgtaatcccagcactttgggaggccgaggggggcggatcacgaggtcaggagatccagactatcctggctaacaaggtgaaaccccgtctctactaaaaatacaaaaaaaaacattagccaggcgtggtggcgggcgcttgtagtcccagctactcgggaggctgaggtaggagaatggcttgaacccaggaggcggagcttgcagtgagccgagattgcaccactgcactccagcctgggcgacagagcaagactccgtctcaaaaaaaaaaaaaaagtgtaagtggattaaaagagaaacttggtctagttcataatatttttaatagggctttccctggctgctggaaaacttaggccagtaagcatctctttgtttaaagtcctacaagacaatttgaaataattcattgttcatgccaaaattctaagtactgtttttcttagcaagtgtaacataatcaggaacaatgggtacaagtaaaacattctttggatgatattcaaagccttattagcactgcacctgaataataggtcattttgcctcactcatttgccaaagtagccatttctaagttaaggaagtttttagataggctcatagccttgtatttcgttttagattgtaagctcaatggcagggatactatattggtaattatgttttcatatagcaaccaccacagtatattcttggtgcttaataaatgtttataattgttaacaataaaaaaaaaaaaaaaaaaaaaaaaaa

SEQ ID NO: 767 - DNA, 2145 bp, Homo sapiens
ggcacagcggcacgaggatggcgactcccatgcatcggctaatagcccggagacaagctgaagcaaataagcaacatgtaagatgtcagaaatgcttggaatttggacattggacttatgaatgcacaggaaaaagaaaatacctacataggccctcaaggacagcagaactaaagaaagctttaaaagaaaaagaaaacagattattattgcaacaaagcattggagaaaccaatgtagaaagaaaggccaagaaaaaaaggtctaagagtgtaaccagttccagtagcagtagcagtgacagttctgccagtgattcttcatcagagagtgaagaaacatctacctcttcctcctcagaggacagtgacactgatgaaagctcctctagttcctcatcctcagcctcctccacaacctcttcctcctcctctgattcagactcagattccagctcttccagtagcagtagcaccagcacagatagcagctctgacgatgaaccaccaaagaagaagaaaaagaaatagagttgctccattcatattggactgatggactgaaaacattgatgtgattcttgaaagggaatttagaatatgttaaggccaagtaggttaactggtgaacatttctagaattcaaaagtttctaaatgttttacattgtaagagcatagagaatattaataatggcttatagagagagacttttatttgaagggtgaatcttgttttttttatctttaaaatatatctctagaacttaaagctgaaatctgcaaatctgtttgtgtgatgaaactatcttttctctctgtgaaataaatgccatactttgttatatatgttagtggtatgtatcagacatattttcaggatggtgcgtcaggatatctggcagtggatttctaatgcttttggctgtatgttatgtaagatttaatatgttgttactgtaagcttaggagttttcctactattaataaatgtgctctatttttacatttatgttcagaaagttatctgactttttgtcctaagtggtatgttcaaggagcctattaatatatttatagtttttgaatgctgtaagtttcaaattgctgtgttacgtcattcattttcttctggttccttaagtttttcaagttatccttttctgaggaaaattattctagaggaacctaaaaagggacaaaaaaattgaaacttcttaggagtctaatcttggtgccttctgttaaaagtcagtgtatcagaaaagaaagcagccatgtaagaggctaacttaartagaagtgctagaaatatctttgtgtattaacatgcaataaaaggtaccattcaaagcagggggaaaggtaggaagaagaggtaatttttactgaaaattagggcaatgttggtcgccttttattaaaagctttttttaagctttcataaagattgctttttgctatttttgaaaatatggtattatagtttgtatggtaactggtcatatatgacagtctactgcatatatatgaatgactaggattaatctggtgtgtttacataggatatacatagttgaaatctagcatgaaaggttaaaaaggagatactgcacaatatttcttaaaagtaaaatgctgttattgtgatgagtctttggtttaacatcacagtattctgtgatgtctttttaactttttggaaagaggtatcatttgtagaaaaaatttgatttgggttaaatataggtttttaaaactataaatgttgtcttttttatatttttatgaaaaagcagtagaaaattacttttgaagaaaacaggctatttaaatattgaaatatatgtatgttgtgagtttaaggagcctgtaattgtcagttttacaaaaccatctgtgttcaatggttgtaaataaattctcaaaacatcatttcaaaggctgcctacagaatattatcacttgacagatagagttaataaattaccaatcaggcacattttataatgtttgtctctgtaaaggtaatattagcagttaaagaacacggatgagaaaagaatgtgttacataggttgcatcacttgcagttaaataaaactcacaatttgtgctcacaagcttaaaaaaaaaaaaaaaaaaaa

SEQ ID NO: 768 - DNA, 1691 bp, Homo sapiens
ggcggaggagagccgtgcgcacggcgtatgtggggccgtgtgcagacccgcgtgtggcgcaggcaaggaccctcaaaataaacagcctctaccttgcgagccgtcttccccaggcctgcgtccgagtctccgccgctgcgggcccgctccgacgcggaagatctgactgcagccatgagcagcaatgagtgcttcaagtgtggacgatctggccactgggcccgggaatgtcctactggtggaggccgtggtcgtggaatgagaagccgtggcagaggtggttttacctcggatagagatatttgttatcgctgtggtgagtctggtcatcttgccaaggattgtgatcttcaggaggatggcctgctataactgcggtagaggtggccacattgccaaggactgcaaggagcccaagagagagcgagagcaatgctgctacaactgtggcaaaccaggccatctggctcgtgactgcgaccatgcagatgagcagaaatgctattcttgtggagaattcggacacattcaaaaagactgcaccaaagtgaagtgctataggtgtggtgaaactggtcatgtagccatcaactgcagcaagacaagtgaagtcaactgttaccgctgtggcgagtcagggcaccttgcacgggaatgcacaattgaggctacagcctaattattttcctttgtcgcccctcctttttctgattgatggttgtattattttctctgaatcctcttcactggccaaaggttggcagatagaggcaactcccaggccagtgagctttacttgccgtgtaaaaggaggaaaggggtggaaaaaaaccgactttctgcatttaactacaaaaaaagtttatgtttagtttggtagaggtgttatgtataatgctttgttaaagaaccccctttccgtgccactggtgaatagggattgatgaatgggaagagttgagtcagaccagtaagcccgtcctgggttccttgaacatgttcccatgtaggaggtaaaaccaattctggaagtgtctatgaacttccataaataactttaattttagtataatgatggtcttggattgtctgacctcagtagctattaaataacatcaagtaacatctgtatcaggccctacatagaacatacagttgagtgggagtaaacaaaaagataaacatgcgtgttaatggctgttcgagagaaatcggaataaaagcctaaacaggaacaacttcatcacagtgttgatgttggacacatagatggtgatggcaaaggtttagaacacattattttcaaagactaaatctaaaacccagagtaaacatcaatgctcagagttagcataatttggagctattcaggaattgcagagaaatgcattttcacagaaatcaagatgttatttttgtatactatatcacttagacaactgtgtttcatttgctgtaatcagtttttaaaagtcagatggaaagagcaactgaagtcctagaaaatagaaatgtaattttaaactattccaataaagctggaggaggaaggggagtttgactaaagttctttttgtttgtttcaaattttcattaatgtatatagtgcaaaataccatattaaagaggggaatgtggaggactgaaaaaaaaaaaaaaaaaaaaaaagggcggccsctttaaggggcccc

SEQ ID NO: 769 - DNA, 1640 bp, Homo sapiens
  misc_feature (1637)..(1637): n equals a,t,g, or c
tcgacccacgcgtccgcctgcaaccggaagtgaaggcasatttccctccttcgtcgctgttgctgccgccatacgcgctctccctgtttagttatggcagagaacgatgtggacaatgagctcttggactatgaagatgatgaggtggagacagcagctgggggagatggggctgaggcccctgccaagaaggatgtcaagggctcctatgtctccatccacagctctggctttcgtgacttcctgctcaagccagagttgctccgggccattgtcgactgtggctttgagcatccgtcagaagtccagcatgagtgcatccctcaggccattctgggaatggatgtcctgtgccaggccaagtcgggcatgggaaagacagcagtgtttgtcttggccacactgcaacagctggagccagttactgggcaggtgtctgtgctggtgatgtgtcacactcgggagttggcttttcagatcagcaaggaatatgagcgcttctctaaatacatgcccaatgtcaaggttgctgttttttttggtggtctgtctatcaagaaggatgaagaggtgctgaagaagaactgcccgcatatcgtcgtggggactccaggccgtatcctagccctggctcgaaataagagcctcaacctcaaacacattaaacactttattttggatgaatgtgataagatgcttgaacagctcgacatgcgtcgggatgtccaggaaatttttcgcatgaccccccacgagaagcaggtcatgatgttcagtgctaccttgagcaaagagatccgtccagtctgccgcaagttcatgcaagatccaatggagatcttcgtggatgatgagacgaagttgacgctgcatgggttgcagcagtactacgtgaaactgaaggacaacgagaagaaccggaagctctttgaccttctggatgtccttgagttcaaccaggtggtgatctttgtgaagtctgtgcagcggtgcattgccttggcccagctactagtggagcagaacttcccagccattgccatccaccgtgggatgccccaggaggagaggctttctcggtatcagcagtttaaagattttcaacgacgaattcttgtggctaccaacctatttggccgaggcatggacatcgagcgggtgaacattgcttttaattatgacatgcctgaggattctgacacctacctgcatcgggtggccagagcaggccggtttggcaccaagggcttggctatcacatttgtgtccgatgagaatgatgccaagatcctcaatgatgtgcaggatcgctttgaggtcaatattagtgagctgcctgatgagatagacatctcctcctacattgaacagacacggtagaagactcgcccattttggaatgtgaccgtctgtccttcaggagaggacaccagggtgggggtgaaggagacactactgcccccacccctgacagcccccaccccatggcttccatcttttgcatcaccaccactcctgaacccccatttctgatttgtcagaatttttttttaacaaaactaaaaatgaaacacatgtgtctgtggtatctataaaaaaaaaaaaaaaaaawwgggggggsgcccgtacccattggncct

SEQ ID NO: 770 - DNA, 3256 bp, Homo sapiens
agagtttgcacagctcattaaaaggcagcagcaacaacggcagcagcagcagcaacagcagcaacagcaagaataccaggaactgttcaggcacatgaaccaaggggatgcggggagtctggctcccagccttgggggacagagcatgacagagcgccaggctttatcttatcaaaatgctgactcttatcaccatcacaccagcccccagcatctgctacaaatcagggcacaagaatgtgtctcacaggcttcctcacccaccccgccccacgggtatgctcaccagccggcactgatgcattcagagagcatggaggaggactgctcgtgtgagggggccaaggatggcttccaagacagtaagagttcaagtacattgaccaaaggttgccatgacagccctctgctcttgagtaccggtggacctggggaccctgaatctttgctaggaactgtgagtcatgcccaagaattggggatacatccctatggtcatcagccaactgctgcattcagtaaaaataaggtgcccagcagagagcctgtcatagggaactgcatggatagaagttctccaggacaagcagtggagctgccggatcacaatgggctcgggtacccagcacgcccctccgtccatgagcaccacaggccccgggccctccagagacaccacacgatccagaacagcgacgatgcttatgtacagctggataacttgccaggaatgagtctcgtggctgggaaagcacttagctctgcccggatgtcggatgcagttctcagtcagtcttcgctcatgggcagccagcagtttcaggatggggaaaatgaggaatgtggggcaagcctgggaggtcatgagcacccagacctgagtgatggcagccagcatttaaactcctcttgctatccatctacgtgtattacagacattctgctcagctacaagcaccccgaagtctccttcagcatggagcaggcaggcgtgtaacaagaaacagagagttttgtgtacagcttgggaatgaaaaggttgattgtaaacccacagtatctagcagcgttgtgccaaattgcccttgtgtttctctccacccaaaatatcacagctgctttcctcacatttggttcatccgtgtgctgttcttttgggttctgagagggttttgccatgtttgcttgtatgaccaagtcaccaaggaaataaacaggaaggaaatccatgttctccatcttttgtgaaagtatatttgagttggtggttttttgttttgtttgggggtttgtgttttgttttgtttttggtatgttttcttccagaggtgatatactttcttttttttcttcctttcttttttttctttcgttccttttttgaaacaggagagcaaagcagttagagttcagaggccagcggctcagggccactccctccctagccttcatcagcagagcaccctccatccccctgcattgctcttctgtgaaagcaaatactaaaggatgccatcctctggaatcctaatggcaggcaaagggagagaggaagggtgacggcttctggcacttagaaaacaaaaagaacaaaaaaagagaaacccccaagcctggaacgcagagaggtctttactgctgggatccacggaaaacatgtctgtcctagccaagatcatatgaagagtttggcacggaggctgagaatgacctggcatagatggtttgccagttaggatgtctcaatttgagcctttgcttttggtggataactcagctcccctcttgtaacctggaaagttggttgcctttatcatcctgctggttttatccatggactgaacacccaacagcagtgcactatgctttctatggcatctttcattctcattttatattgtgctataaaaaggattgtttctccatatatatattatatatrtrtrtatatatataatataatatatgtgtatatatatattatatatataatatataatatatatattatatatatattatatatataatatatatataaaatatatatatatatgctctcctctttcagcctctttgtcacagggaagaagtgtaggaggttgccttgggccctgcctctctcctaacctcctcttccccactgggtaccctcagcccctatattttaattcttgatcatgtagaaattgtttttggtaaatgttgatattattgttattatcattattaataaataaagagaaaaggaatttttgtttaaatgagaaatgtttaaccagattctgttctatttgaattgtgacttgcaccttttgttcaaagtatttcctttaggcattgtaattgtgaacagctcttacttgtgccagtgacagatgcagtggtctcctttccccagttgaagcagtgcatacgcagtagctattatttgtgttatctttatttctcttcattgttagaaaccaaagtcttctctgctggctggggctgagagagggtctgggttatctccttctgatcttcaaaacaagagagagaccttgaatacactgactcttccaccctttttttttctgggaaaggagagcaagaggtcccgagtcccctcctagtctttcatcctgaatttgcacagaggaaagcgggtgcccggcatggccatcctgatgttgctggcgggatccccatgcaccttgtccttctccactgatactggcagctcggctcctggacccaagatcccttgagtggaattctgcagtgcaagagcccttcgtgggagctgtcccatgtttccatggtccccagtctcccctccacttggtggggtcaccaactactcaccagaagggggcttaccaagaaagccctaaaaagctgttgacttatctgcgcttgttccaactcttatgcccccaacctgccctaccaccaccacgcgctcagcctgatgtgtttacatggtactgtatgtatgggagagcagactgcaccctccagcaacaacagatgaaagccagtgagcctactaaccgtgccatcttgcaaactacactttaaaaaaaactcattgctttgtattgtagtaaccaatatgtgcagtatacgttgaatgtatatgaacatactttcctatttctgttctttgaaaatgtcagaaatatttttttctttctcattttatgttgaactaaaaaggattaaaaaaaaaatctccagaaaaaaaaaaaaaaaaaaaaattactgcggtccg

SEQ ID NO: 771 - DNA, 4326 bp, Homo sapiens
ggagacactatagaaggtacgcctgcaggtaccggtccggaattcccgggtcgactggacagttaaccgattcagtgccagatttcgcagtatctacaaggtccggctacctctgccgccacattaacaaaaaacctcgggcttccagcctgcgcgacagcaaacataagaaggggtgtttttatgtcatccgatattaagatcaaagtgcaaagctttggtcgtttcctcagcaacatggtgatgccaaatatcggcgcgtttatcgcgtggggtatcatcaccgcgttatttattccaacagggtggttaccgaacgagacgctggcgaagctggtcgggccgatgatcacttatctcctgccgctgctgatcggttataccggtggtaagctggtaggcggcgaacgtggcggcgtagtcggtgccatcaccaccatgggcgttatcgtcggcgcagacatgccgatgttcctcggttctatgattgcaggtccgctgggcggctggtgcattaagcacttcgaccgctgggtagacggtaagatcaaatccggttttgagatgctggtgaataacttctccgcaggcatcatcgggatgatcctcgctattctggcattcctcggcattggcccgattgttgaagccctgtccaaaatgctggctgcgggcgttaacttcatggttgtccatgacatgctgccgctggcgtctatctttgttgaaccggcgaaaatcctgttcctcaacaacgccattaaccacggtatcttctcgccgctgggtattcagcagtcccatgaactgggtaaatcaatcttcttcctgattgaagctaacccaggtccaggtatgggcgtgctgctggcgtacatgttctttggtcgtggtagcgctaaacagtctgcgggcggtgcggcaatcatccacttcctggggggtatccacgaaatctacttcccgtatgtgctgatgaatccgcgtctgatcctcgcagtcatcctcggcggtatgactggcgtgttcacgctgactatcctgggcggtggtctggtttctccggcatctccgggttctatccttgctgtactggcgatgacaccaaaaggtgcttacttcgctaacatcgcgggtgtgtgtgcggcgatggctgtctccttcgttgtctctgctattttgctgaaaaccagcaaagtgaaagaagaagatgatattgaagcagcaactcgtcgtatgcaggacatgaaagctgagtctaaaggcgcatctccgctgtctgctggcgatgtgactaacgacctgagccacgtacgtaaaatcatcgttgcctgtgacgccggtatgggttccagtgcgatgggcgcaggcgttctgcgtaagaaaattcaggatgcaggtctgtcgcagatttctgttactaacagcgcgatcaacaacctgccgccagatgtggacctcgtcatcactcaccgtgacctgaccgaacgcgctatgcgccaggttccgcaggcacagcatatttcgctgaccaacttcctcgacagcggcctgtacaccagcctgaccgaacgtctggttgctgcccaacgccacacggcaaacgaagagaaagtaaaagacagcctgaaagacagctttgacgattccagtgctaacctgttcaagctaggcgcggagaacatcttcctcggtcgcaaagcggcaaccaaagaagaagcgattcgttttgctggcgagcagctggtgaaaggcggttacgttgagccggaatacgttcaggcgatgctggatcgtgaaaaactgaccccgacttatctgggtgagtctatcgcggtgccacacggtacggttgaagcgaaagatcgcgtactgaaaacgggcgtcgtgttctgccagtacccggaaggcgtgcgcttcggtgaagaagaagatgacattgcccgtctggtgattggtattgctgcccgtaacaacgagcacattcaggttatcaccagcctgaccaatgcactggatgatgagtccgtcatcgagcgtctggcacacaccaccagcgtggatgaagtgctggaactgctggcaggtcgtaagtaatccaatcccaccctctccacatggagaaggtggggttaattgcctgatgcgctacgcttatcaggcctacaggatgcatcacaatttgttgaatttgcacgttcttgtaggccggataaggcgcttacgccgcatccggcgctgcccctctcctcacggagagggtttgggtgagggaaaagcctcaccccagccctctcgggtaaaaacattgatgaaggttaatactatgaaagcattacattttggcgcaggtaatatcggtcgtggctttatcggtaaactgctggcagacgcgggtatccaactgacgtttgccgatgtcaatcaggtggtacttgatrccctgaatgcccgtcatagctatcaggtacatgtggttggtgaaaccgagcaggtagataccgtttccggcgtcaatgctgtcagcagcattggtgatgatgtcgttgatctgattgctcaggttgatttagtcackaccgccgttggcccggwtgtgctggaacgtattgctccggcaatcgccaaagggcaggtgaaacgtaaagaacaaggtaatgaatccccgctgaacatcatcgcctgtgaaaacatggtacgcggtaccacgcagctgawaggccatgtgatgaacgccctgccggaagacgccaaagcgtgggtagaagaacacgttggctttgtcgattccgccgttgaccgcatcgtaccgccttcggcttcggcaactaacgatccgctggaagtgacggtagaaaccttcagcgaatgkattgtcgataaaacgcagttcaaaggcgcactgccgaacatcccaggcatggagttawccgacaacctgatggcatttgtcgaacgtaaactcttcaccctgaacacgggtcatgctataaccgcgtacctcggaaaactggccggtcatcagaccattcgtgacgcgattctcgacgagaaaatccgcgcggtggtaaaaggtgcgatggaagaaagtggtgcagtattgatcaagcgctacggctttgacgctgacaagcatgcggcgtacatccagaaaattctcggccgttttgagaacccgtatctgaaagatgatgtagagcgcgtaggccgtcagccactgcgtaaactgagtgctggcgaccgtctgatcaagccactgctcggtacgctggaatatggtctgccacataaaaacctgattgaaggtattgccgctgcaatgcacttccgcagtgaagatgatccgcaggctcaggaactggcagcactgatcgctgacaaaggtccgcaggcggcgctggcacagatttccggtcttgatgccaacagcgaggttgtatccgaggcggtaaccgcttataaagcaatgcaataatggtggaccaggcgcaggacaccctgcgcccgaataacagattgtcagatatgcaggcaacaatggaacaaacccaggcctttgaaaaccgtgtgcttgagcgtctgaatgctggcaaaaccgtgcgaagctttctgatcaccgccgtcgagctcctgaccgaggcggtaaatcttctggtgcttcaggtattccgcaaagacgattacgcggtgaagtatgctgtagaaccgttactcgacggcgatggtccgctgggcgatctttctgtgcgtttaaaactcatttacgggttgggcgtcattaaccgccaggaatacgaagatgcggaactgctgatggcattgcgtgaagagctaaatcacgacggcaacgagtacgcctttaccgacgacgaaatccttggaccctttggtgaactgcactgcgtggcggcgttacmammgccgccacagtttgaaccagcagactccagtttgtatgcaatgcaaattcagcgctatcaacaggctgtgcgatcaacaatggtcctttcactgactgagctgatttccaaaatcagcttaaaaaaagcctttcaaaagtaagcaacgtctgcttactgcccctctacctgcttcggccgataaagccgacgataatactccagacgttgtagatataacggcacgctttcatcgggtattccggacggaatcgcgttacggggaggaagttttttcagatactcccggaacgcctggcttgatgccatgaaatctacggctttatcgataagaagcggaacgttttcacctaatttgcccatgatgatatctccgtattaccccgcgccgggaatgcgcggccgc

SEQ ID NO: 772 - DNA, 867 bp, Homo sapiens
ttttttttttttttttttttttttttttaagaaaggatgtttattcaggcctgatgcctcgatacagctagatgtacaaaaatatatcattcaaagtcatgaaaaccatcatcatattggtgtgacctccttcctccccttgggcacagcttttgcaactacctcctttgaaatctgggagttggtggggcaagggtcacttcttggcagcttcttcttgggcagccaaatctgcctccttctgagcagccaggaagatggctcgttccttctggaaagctgcaagctcttctgaactgaggtccttcaccacgcgaatgcccagagaacgggcagacccgatgatggagcggacaacagacgacaggggtacatcctgcagggcaaatgcctcatcctgagctttgatgcgggcaatctcatacacatgcttcaaggtcaccaggcctgccacctctttccctgtttgccgggcccccttttcaatcccagctgctgccttcaggaagtaggaaacagtgggctgtccaatcttaatttcaaatgtcctgtcaggcttcactaaaatcttggtaggcagaggaatgccttccttgatgtcctttgtcctctcattgaactccttgcaaaactggttgatggaaacgcctctctgacccagcactgggcctagtgggggcccgggcatggccaggcctgcccgcacgatcgcccggatyacaccgccgacctcgggcttcctgaggccccgggcggcccggccgagctttgacatgatgcggggctgctggcttcagttcacctcaggggagcagcaagagcgaagctctgctcgtgccgaattcctgcagcccgggggatccacta

SEQ ID NO: 773 - DNA, 969 bp, Homo sapiens
tcgacccacgcgttygggcaagcatggaagcagtagtttcacttctagctggtctccctctgcagcctgaagaaggagatggtgtggaattgatggaagccaaatcacagttatttcttaaatacttcacattatttatgaaccttttgaatgactgcagtgaagttgaagatgaaagtgcgcaaacaggtggcaggaaacgtggcatgtctcggaggctggcatcactgaggcactgtacggtccttgcaatgtcaaacttactcaatgccaacgtagacagtggtctcatgcactccataggcttaggttaccacaaggatctccagacaagagctacatttatggaagttctgacaaaaatccttcaacaaggcacagaatttgacacacttgcagaaacagtattggctgatcggtttgagagattggtggaactggtcacaatgatgggtgatcaaggagaactccctatagcgatggctctggccaatgtggttccttggtctcagtgggatgaactagctcgagttctggktactctgkttgattctcggcatttactctaccaactgctctggaacatgktttctaaagaagtagaattggcagactccatgcagactctcttccgaggcaacagcttggccagtaaaataatgacattctgkttcaaggtatatggkgctacctatctacaaaaactyctggatcctttattacsaawtgkgatcacatcctctgattggcaacatgktagctttgaagtggatcctaccaggttagaaccatcagagagccttgaggaaaaccagcggaacctccttcagatgactgaaaagttcttccatgccatcatcagttcctcctcagaattcccccctcaacttcgaagtgtgtgccactgtttataccaggcaacttrccactccctactgaataaagctacagtaaaaaaaaaaaaaaaaa

SEQ ID NO: 774 - DNA, 836 bp, Homo sapiens
  misc_feature (829)..(829): n equals a,t,g, or c
aattcggcacgagcagagctcagagccacccacagccgcagccatgctgtgcctcctgctcaccctgggcgtggccctggtctgtggtgtcccggccatggacatcccccagaccaagcaggacctggagctcccaaagttggcagggacctggcactccatggccatggcgaccaacaacatctccctcatggcgacactgaaggcccctctgagggtccacatcacctcactgttgcccacccccgaggacaacctggagatcgttctgcacagatgggagaacaacagctgtgttgagaagaaggtccttggagagaagactgagaatccaaagaagttcaagatcaactatacggtggcgaacgaggccacgctgctcgatactgactacgacaatttcctgtttctctgcctacaggacaccaccacccccatccagagcatgatgtgccagtacctggccagagtcctggtggaggacgatgagatcatgcagggattcatcagggctttcaggcccctgcccaggcacctatggtacttgctggacttgaaacagatggaagagccgtgccgtttctagctcacctccgcctccaggaagaccagactcccacccttccacacctccagagcagtgggacttcctcctgccctttcaaagaataaccacagctcagaagacgatgacgtggtcatctgtgtcgccatccccttcctgctgcacacctgcaccacggccatggggaggctgctccctgggggcagagtctctggcagaggttattaataaacccttggagcatgaaaaaaaaaaaaaaaaaangggcggc

SEQ ID NO: 775 - DNA, 954 bp, Homo sapiens
  misc_feature (18)..(18): n equals a,t,g, or c
  misc_feature (909)..(909): n equals a,t,g, or c
  misc_feature (925)..(925): n equals a,t,g, or c
  misc_feature (937)..(938): n equals a,t,g, or c
tttggcgactccctatanggaaagctggtacgcctgcaggtaccggtccggaattcccgggtcgacccacgcgtycggwttctgggagccaagagtggtaatggcgtctgtatgatcttcggagcctgctgcatcggacctcggccagtcataaaagatgacaacagcagccaggccaacctttgaacctgccagaggtggaaggggaaaaggagaaggtgatttgagccaactttcaaagcagtattcaagcagagacctaccctctcatacaaagataaaatacagacagactactcaggatgcccctgaagaggttcgtaaccgtgacttcaggagagagttggaagaaagagagagagctgctgcaagagagaaaaatagggatcgtccaacccgagaacatacaacctcctcttcagtgtcaaaaaagccacggttagaccagattcctgccgccaaccttgatgcagatgaccctctaacagatgaggaagatgaagattttgaagaagaaagtgatgatgatgatactgcagctcttcttgcagaactggaaaaaattaaaaaagaaagagctgaagagcaggccaggaaggaacaagaacaaaaagctgaagaagagaggattcgtatggaaaacattctgagcggaaaccctctccttaatctcactggcccatcccagcctcaggccaacttcaaagttaaaagaaggtgggatgatgacgttgtcttcaagaactgtgcaaaaggtgtagatgaccagaagaaagacaaaagatttgtaaatgacacactgcgatctgaatttcacaaaaagttcatggagaaatatattaaatagtacagttttatgtgcttaattaaagactgtaaaacgtaaaaaaaaaaaaaaaaaaaaagggnggcccgttttagaggntccaggtttacnnccccgggcttgcaacg

SEQ ID NO: 776 - DNA, 886 bp, Homo sapiens
  misc_feature (871)..(871): n equals a,t,g, or c
  misc_feature (884)..(884): n equals a,t,g, or c
tgcgagaagacgacagaagggggcacagggcgagggcggctgcggcgcagtctgcagcatggcgtacccggggcatcctggcgccggcggcgggtactacccaggcgggtatggaggggctcccggagggcctgcgtttcccggacaaactcaggatccgctgtatggttactttgctgctgtagctggacaggatgggcagatagatgctgatgaattgcagagatgtctgacacagtctggcattgctggaggatacaaaccttttaacctggagacttgccggcttatggtttcaatgctggatagagatatgtctggcacaatgggtttcaatgaatttaaagaactctgggctgtactgaatggctggagacaacactttatcagttttgacactgacaggagtggaacagtagacccacaagaattgcagaaggccctgacaacaatgggatttaggttgagtccccaggctgtgaattcaattgcaaaacgatacagcaccaatggaaagatcaccttcgacgactacatcgcctgctgcgtcaaactgagggctcttacagacagctttcgaagacgggatactgctcagcaaggtgttgtgaatttcccatatgatgatttcattcaatgtgtcatgagtgtttaaatcaagaggaagctgcatgaatgtaatcaacattccaactggagctctcctttgcttgtcctctttgccttcggtaatatgtataaacttacatcacgactttctcttaacagctgttgtaaagtttattactttatgtacaactgaagttttgttttagttttgataataaattctttggaactttaaaaaaaaaaaaaaaaactcggggggggncccgttccccatngg

SEQ ID NO: 777 - DNA, 1760 bp, Homo sapiens
  misc_feature (2)..(2): n equals a,t,g, or c
cngacagtacggtcggaytcccgsgtcgacccacgcgtcggctggaaggaactggtctgctcacacttgctggcttgcgcatcaggactggctttatctcctgactcacggtgcaaaggtgcactctgcgaacgttaagtccgtccccagcgcttggaatcctacggcccccacagccggatcccctcagccttccaggtcctcaactcccgcggacgctgaacaatggcctccatggggctacaggtaatgggcatcgcgctggccgtcctgggctggctggccgtcatgctgtgctgcgcgctgcccatgtggcgcgtgacggccttcatcggcagcaacattgtcacctcgcagaccatctgggagggcctatggatgaactgcgtggtgcagagcaccggccagatgcagtgcaaggtgtacgactcgctgctggcactgccgcaggacctgcaggcggcccgcgccctcgtcatcatcagcatcatcgtggctgctctgggcgtgctgctgtccgtggtggggggcaagtgtaccaactgcctggaggatgaaagcgccaaggccaagaccatgatcgtggcgggcgtggtgttcctgttggccggccttatggtgatagtgccggtgtcctggacggcccacaacatcatccaagacttctacaatccgctggtggcctccgggcagaagcgggagatgggtgcctcgctctacgtcggctgggccgcctccggcctgctgctccttggcggggggctgctttgctgcaactgtccaccccgcacagacaagccttactccgccaagtattctgctgcccgctctgctgctgccagcaactacgtgtaaggtgccacggctccactctgttcctctctgctttgttcttccctggactgagctcagcgcaggctgtgaccccaggagggccctgccacgggccactggctgctggggactggggactgggcagagactgagccaggcaggaaggcagcagccttcagcctctctggcccactcggacaacttcccaaggccgcctcctgctagcaagaacagagtccaccctcctctggatattggggagggacggaagtgacagggtgtggtggtggagtggggagctggcttctgctggccaggatggcttaaccctgactttgggatctgcctgcatcggtgttggccactgtccccatttacattttccccactctgtctgcctgcatctcctctgttgcgggtaggccttgatatcacctctgggactgtgccttgctcaccgaaacccgcgcccaggagtatggctgaggccttgcccacccacctgcctgggaagtgcagagtggatggacgggtttagaggggaggggcgaaggtgctgtaaacaggtttgggcagtggtgggggagggggccagagaggcggctcaggttgcccagctctgtggcctcaggactctctgcctcacccgcttcagcccagggcccctggagactgatcccctctgagtcctctgccccttccaaggacactaatgagcctgggagggtggcagggaggaggggacagcttcacccttggaagtcctggggtttttcctcttccttctttgtggtttctgttttgtaatttaagaagagctattcatcactgtaattattattattttctacaataaatgggacctgtgcacaggaaaaaaaaaaaaaaaaaaaaaaaaaaaaaaaaaaaaaaaaaagggcggccgc

SEQ ID NO: 778 - DNA, 2886 bp, Homo sapiens
  misc_feature (110)..(110): n equals a,t,g, or c
atatgaagcacccttatctgctggctaatctcttgctttggatgttgtagggttgaatgcaatgcagttacagaatttggctgcactagctgctgcagctagtcattcangaacacaccaagtggtaccaatgctctcactacatccagcagtcccctcagcgtgctcactagttcagcggtcctcacctagctctagcagcagtaattctgtcaaccccatagcctcacttggagccctgcagacattagctggagcaacggctggcctcaatgttggctctttggcaggaatggctgctttaaatggtggcctgggcagcagtggcctttccaatggcaccgggagcaccatggaggccctcactcaggcctactcgggtatccagcaatatgctgctgctgcgctccccactctgtacaaccagaatcttctgacacagcagagtattggtgctgctggaagccagaaggaaggtccagagggagccaacctgttcatctaccacctgccccaggagtttggtgatcaggacctgctgcagatgtttatgccctttgggaatgtcgtgtctgccaaggttttcatagacaagcagacaaacctgagcaagtgttttggttttgtaagttacgacaatcctgtttcggcccaagctgccatccagtccatgaacggctttcagattggcatgaagcggcttaaagtgcagctcaaacgttcgaagaatgacagcaagccctactgagcgtgctcccctctgagactggagtgagagggtcttctgattcctgccgtttgttcatcgttgtgcctaaagcatgtcgatgtggcgtcaagtacatcgtccaaatccctgtctcttcagcttctctgatgcttgaactctcacctttgaccttgtgttgacctttgatgctgatgtgtatttttattatgtttgtttctttcttcgtttttttttctttttttctttcctttttttttccttttgtgctgccaaattggttttgctagaacgactgctgaaggggaaatatttaaacttgcatttgaatataaaaaaaatctatttttctagaacttcataagataaccacttgattttgtgattccaattctttgtaattgtcttcagagcagccctactagcacataccgcgtggtgtttgtatttctgtgaacacacagccagtccgtttctaggctttgtttctctgtgtgcttagttttaaagacaactttgaagtaaacaatgaaataaaagatgtcactaaaacctctgaggctcctgagcacattttgctgatacagtctgtggggcttgaggagaccgcatgtattgttctttcttttgtttttcttctgagttctcaactgcggagagcacctgaaccccctttcctttttgaccgcaggctgcactttgggccccagccagccctttttctttttctttttcttttgtggttcttccctggagcgactctggggagtcctggatatcccgcctgccccttcccctcagccccatgcttgttccaacagtctccacagcaaaatgtgatgctttgatttttttgttgttgtttttgtttttgtattgtttttgtgtttttgttttgaattttttcctttcctactaagattatgcccagaaaaaagttttgcatgtttcctgctgtttcttcacaccttcgtatatatcaccttcacctctctgttttctatagtttgtgcaaaaactgatcgatttaaaagggtttcaaagaagctgttttaaattgttgtagggttgattatttttttcaagattgtattatgcccaaggccgctctgcctgggggaaagggcagccaggcagaggcccagtgtctggtaggctgctgaatttcctggaaggggtgattggatggaaagaggccagaaaccccagcctgagagactgctgtgcaccccacagtctgactgcacagagccgcctctgttggcaggaggcactgaggctccccttcctgtgtattgagaagcagtgtttgccaatatattttgctttcaattccaagaggagctctgggaaaacctgtggataaaaccaaatgccaaatgttggacgttgtttccttttccttttctctctctgattgttttaattgttctgtggtggttttaatggatttgagaccctggagcggcagctgcctttctgatttccagctgctttttgtgaataatttaaaaagaaaaaaaaaaagaaactttacattttggagacaaacctgtgtgagttttttattggtacaaacgttgtatttaacactaggggttttgtacagttttttgccttttctactagaaaacaatgtaaagtgatttcacaatgtgaagagaaaaaaaaattgccactatgaccaaacgcacagtctgttctgcagcaacaacgggattcaatcaactcagtcgtgattcagccgtagaaatgcttttcctttatcttgtttgagcttttcctttctttcctgttttgatttgcaaaagaaaatgtcttttttgtgtgaacttgtgttgtactctgtagaaaattatggattttactttaatggtttaaaaaaaggcaaggagagcccttgtcgcttttcttacctaatcacagagtttgtgtagtgaatttaaaaagaaaaaaaaattgttataagtttggagcaagggagtatgtgtttcaaaggaatctccttcctttttttgtgtgtttttccttttgtcccaatggggaacctaaatctgttttaattgcacagacacatggacaaaaagtcattttgtatctgccaagtgtggtaccttcctttgtttatttgctattaaactgtttgagaagaaaaaaaa

SEQ ID NO: 779 - DNA, 1641 bp, Homo sapiens
  misc_feature (1270)..(1270): n equals a,t,g, or c
ggctgacttcacagggtggtgaaagttaaatgcaataaggcacgtggtcgaccagccacagcgagcagtctgcagagggttgttcttattacactttagtgagcactgccggctgctgacatccaggccacaggaggaaactggtgggagcagccagggactccgggcgcccactgctgtggctgcgctagagccatgctttccagttcacaaaacccactacctcccgtctcacacggagcggtgaagggcaggggtgggggacgggggtgcaagttgtcccagctggggacagagggcccaggaccacaggctggaacaccccacctggccgctggggaagaaccccacagacgaatacctggagggcatgatgagcgaggccccggggcccatcaacttcaccatgttcctcaccatgtttggggagaagctgaacggcacggaccccgaggatgtgattcgcaacgcctttgcctgcttcgacgaggaagcctcaggtttcatccatgaggaccacctccgggagctgctcaccaccatgggtgaccgcttcacagatgaggaagtggacgagatgtaccgggaggcacccattgataagaaaggcaacttcaactacgtggagttcacccgcatcctcaaacatggcgccaaggataaagacgactaggccaccccagccccctgacaccccagcccccgccagtcacccctccccgcacacacccgtccataccagctccctgcccatgaccctcgctcagggatccccctttgaggggttagggtcccagttcccagtggaagaaacaggccaggagaagtgcgtgccgagctgaggcagatgttcccacagtgaccccagagccctgggctatagtctctgacccctccaaggaaagaccaccttctggggacatgggctggagggcaggacctagaggcaccaagggaaggccccattccggggctgttccccgaggaggaagggaaggggctctgtgtgccccccaggaggaagaggccctgagtcctgggatcagacaccccttcacgtgtatccccacacaaatgcaagctcaccaaggtcccctctcagtccccttccctacaccctgaccggccactgccgcacacccacccagagcacgccacccgccatgggagtgtgctcaggagtcgcgggcagcgtggacatctgtcccagagggggcagaatctccaatagaggactgagcactgaaaaaaaaaaaaaaaacttcgtgcnggaattcggcacgaggtcatgctagcaagtggcagagctggmcctgaaaccacgtagttcagcgacaaaacctgtgctaacatttttgttgcatactcacttacctgcagaggccaggcaggtcatgtgaatggatgaagtgggccaaaaaaaaaaaaaaaagggagctagatttcatgttgttccaaagaaggtagccaagcagaccagtgttgctagctagctcttctgactgttcctgggaagccagaaatcctggctttcatgtgaaatctctcaatttattcagattagctcagattttttatttaatttaatttattatttatttatttatctgtgacagagcaaaaccctatctcaaaaaaaaa

SEQ ID NO: 780 - DNA, 2026 bp, Homo sapiens
ggcggcccgggcgcccgagcctcctcggccttggagagcagcggcggcggcggcaccscgggcgcggcaatactgaacactgcgcagcttgcagaggtctcctggcagccctcattaggaattctgtctggccccgatcagaatactggagacgagaccacgagattgatgagtttgccttgggagtcggtaagaaggtgaagccaggggcgaacatgggtcagaaggtcactggagggatcaagactgtggacatgagggaccccacgtacaggcccctgaagcaggagctccagggtctggattactgcaagcccacccggctggatctgctactggacatgccccctgtgtcctatgatgtccagctgctgcattcatggaacaacaacgaccgatcgctcaatgtctttgtgaaggaggacgacaagctcatctttcaccggcatccggtggcccagagcacggacgctatcaggggcaaagtcgggtatacccgtgggctgcacgtgtggcagatcacgtgggccatgagacagcggggcacacacgccstggtgggggtggcgacggcagacgcccccctgcactctgtcgggtacacaacccttgtggggaataaccacgagtctggggctgggacttggggcgcaaccggctctaccacgatggcaagaaccagccaagcaaaacatacccagcctttctggaaccagatgagacattcattgtccctgactccttcctggtagccctggacatggacgacgggactctgagcttcattgtggatggacagtacatgggagtggcttttcggggactcaagggcaaaaaactgtatcctgtagtgagtgccgtctggggccactgtgagatccgaatgcgctacttgaacggactcgatcccgagccgctgccgctcatggatttgtgccgtcgctcggtgcgcctggccctggggagggagcgcctgggggagatccacacgctgccgctgccggcttccctcaaggcctacctcctctaccagtgacgttcgccatcataccgccagcgcgacagccacctggtgccaactcactgagccgcctgccgctggggccgccgcaccctgcaccttggaccggcatccgtagccatggacagaggtccctggtcttccctcatcctccgtggctgcctccatgggacaaggaccgattccaacacaggctcctctttcccccttcccgacatcagcggaaggcagcatccctgcatgccgtccatatacaacccctctttgaaaaaagacacagagaataaactcctacgaaagccctacattgagctccaatctgctcggggtgggacgggtgcttcccacacctctgggagaaggctgcagccacctgggggtcccagggtggtgggggtggcaggtggtaccacagctctgagagcagataccaggggtactaagaggtgcttagacaagggctggtgcccggcccagggtgcccagcggggccatgccatggcagataaagctcaggacgtcaaaaactcaccatggaccccaaggcagaaaccaagaactgtctgcaggcaaataagcacccagcacccatcctggctgccggtgccccgtaccctgtatttattcttttaacaataacaaaagccatttatttattccatctagaaaggaaaccctgtttcagtcccctctctctggctgttctgttactttccttccacctgtgccctccctgggatatgtatgcctcgcccgccctccctgggcacatgtgcacacgtgcccaggcacaagtatgtctctgggtcccttgccctgcagtttccagggggctctgctccaagttccctagcgggcccctcagggagaaatagcctcgaccccacccttctttcctaccagcccagagccttgtggcttgtacagttttgaaactcccgttctattttatgatggttgataatagtcagtaacctaataaaggaacgtttgttaaaatatcaa

SEQ ID NO: 781 - DNA, 783 bp, Homo sapiens
  misc_feature (777)..(779): n equals a,t,g, or c
tcgacccacgcgtccgccgtcacttacggccggrgctgtttgtgctgggagctggtggcgcggtgcagggctcttaagaacgaacggcttgggcgcggactggtatccggggactgtgacttgcagggtccgccatggagccagagcagatgctggagggacaaacgcaggttgcagaaaatcctcactctgagtacggtctcacagacaacgttgagagaatagtagaaaatgagaagattaatgcagaaaagtcatcaaagcagaaggtagatctccagtctttgccaactcgtgcctacctggatcagacagttgtgcctatcttattacagggacttgctgtgcttgcaaaggaaagaccaccaaatcccattgaatttctagcatcttatcttttaaaaaacaaggcacagtttgaagatcgaaactgacttaatgggaagaacagaaaaatttagttgctactgtagatttacatgattaagaggcagctttaattgccatgatcattccctctttttggatgtataagaaccttccggacaacagaacctatttctggaattgcagaagataacatatttcccttattttgatttaatcaccataaaccatacctatttaatgagtgtattctgtgcaatttttttctcagattgtctttaactttgtttttaaaatgaccttcaaaataaactgtcaaaacaccaaaaaaaaaaaaaaaaaaaaaaaaaaaaaaaaaaaaaaaaaaaaaaaaaaaaaaaaaaaaaaaannnagag

SEQ ID NO: 782 - DNA, 630 bp, Homo sapiens
  misc_feature (5)..(5): n equals a,t,g, or c
  misc_feature (47)..(47): n equals a,t,g, or c
  misc_feature (546)..(546): n equals a,t,g, or c
gctcngggtgccctgcctttacatcatcgacgccatcttcaactccnacccggrttccagccaaagccggttctgcatcgtgctccagatcttcctccggctctttggtgtatttgcatccagtattgttctgatcttgtcacaacgatcacttttcaagttttacacgtacagctcagcctttctgttagctgcaacttcagtgttggtgaattattatgcttctttgcacattgacttctatggtgcctacaacacgtcagcttttggaattgagctgcttcctcgaaaaggtccctcgctgtggatggcacttatcgttctacagctaacatttggaattggatacgttacactactccagattcattccatctattcacaattaattattttggatctcttggttcctgtaataggcttaatcacagagctaccattacacatcagagagactttactgtttacttcttccttgattctcacattaaatacagtgtttgtcctggcagtgaaactgaaagtggttttattattccacacganatgtttatcttttgggtgaaggcacatgtttcgaatttatggaattaacagttattgatggaaggacacatgggaagaagaatc

SEQ ID NO: 783 - DNA, 1144 bp, Homo sapiens
  misc_feature (7)..(7): n equals a,t,g, or c
  misc_feature (21)..(21): n equals a,t,g, or c
  misc_feature (35)..(35): n equals a,t,g, or c
aggtttnttaaagtatttagntccatttataaaangtacgcctgcaggtaccggtccggaaattcccgggtcgacccacgcgtccgggaagaattgcttgaacctgggaggtggaggttgcagtgagccgagatcgcgccactgcactctagcctgggtgacagagcaagactccatctcaaaataaataaaaaataaaacactgggtacaattttgctaatagtggcttattcacagatataaataaagtattagcataaatcgtagccttaaaaaagccttttatatgtccttttatatagaattttacatggtcttcaaaaaatagtatgtaattgagaaaaagattagaagggaatatgtagaaatagaaagaattatgttagagtgataggattatgtaattttttcttagtattttctcagttcatcaaactttctattataccctgattatactgattatattacctcctacgctgactcaaaatctttttttttttcccctcaggtggcgacatgtctaagaatgtgagccagtcacagatggcaaaattgaaccaacaaatggccaaaatgatggatcctagggttcttcatcacatgggtggtatggcaggacttcagtcaatgatgaggcagtttcaacagggtgctgctggcaacatgaaaggcatgatgggattcaataatatgtaaagaaaatgccttaatataaactgactcagttgaatacctaatttgctgagacctcagcgtttcccttctttttgcgaattggggggaaagtgtatttttcttgcttatcatgcactctttccttttcttctcgcccgcttttcccctccttttctttttccttccttctttcctccctttaatataagggagaaatacatggtttttgtggaaatcattatatgtttgctttagattttcttctgttttcaccatcataacacttaagttaaatcatgatgtaaaattttagtacttaaaggtttttaattatctcgaaggccaagcattgcatttgtaaacagtcctggtcagtagttaaataatgtttcaattaaagtgctgtaaaataaacttcaaagtggttataagttaaaaaaaaaaaaaaaaaaaaaaaaaaaaagg

SEQ ID NO: 784 - DNA, 2343 bp, Homo sapiens
ttcgcggcggcgcgactcgggctccggacccgggcactgctggcggctggagcggagcgcaccgcggcggtggtgcccagagcggaggcagtccctgccccgcccctccccctcggcctcgcggcgacggcggcggtggcggcttggacgactcggagagccgagtgaagacatttccacctggacacctgaccatgtgcctgccctgagcagcgaggcccaccaggcatctctgttgtgggcagcagggccaggtcctggtctgtggaccctcggcagttggcaggctccctctgcagtggggtctgggcctcggccccaccatgtcgagcctcggcggtggctcccaggatgccggcggcagtagcagcagcagcaccaatggcagcggtggcagtggcagcagtggcccaaaggcaggagcagcagacaagagtgcagtggtggctgccgccgcaccagcctcagtggcagatgacacaccaccccccgagcgtcggaacaagagcggtatcatcagtgagcccctcaacaagagcctgcgccgctcccgcccgctctcccactactcttcttttggcagcagtggtggtagtggcggtggcagcatgatgggcggagagtctgctgacaaggccactgcggctgcagccgctgcctccctgttggccaatgggcatgacctggcggcggccatggcggtggacaaaagcaaccctacctcaaagcacaaaagtggtgctgtggccagcctgctgagcaaggcagagcgggccacggagctggcagccgagggacagctgacgctgcagcagtttgcgcagtccacagagatgctgaagcgcgtggtgcaggagcatctcccgctgatgagcgaggcgggtgctggcctgcctgacatggaggctgtggcaggtgccgaagccctcaatggccagtccgacttcccctacctgggcgctttccccatcaacccaggcctcttcattatgaccccggcaggtgtgttcctggccgagagcgcgctgcacatggcgggcctggctgagtaccccatgcagggagagctggcctctgccatcagctccggcaagaagaagcggaaacgctgcggcatgtgcgcgccctgccggcggcgcatcaactgcgagcagtgcagcagttgtaggaatcgaaagactggccatcagatttgcaaattcagaaaatgtgaggaactcaaaaagaagccttccgctgctctggagaaggtgatgcttccgacgggagccgccttccggtggtttcagtgacggcggcggaacccaaagctgccctctccgtgcaatgtcactgctcgtgtggtctccagcaagggattcgggcgaagacaaacggatgcacccgtctttagaaccaaaaatattctctcacagatttcattcctgtttttatatatatattttttgttgtcgttttaacatctccacgtccctagcataaaaagaaaaagaaaaaaatttaaactgctttttcggaagaacaacaacaaaaaagaggtaaagacgaatctataaagtaccgagacttcctgggcaaagaatggacaatcagtttccttcctgtgtcgatgtcgatgttgtctgtgcaggagatgcagtttttgtgtagagaatgtaaattttctgtaaccttttgaaatctagttactaataagcactactgtaatttagcacagtttaactccaccctcatttaaacttcctttgattctttccgaccatgaaatagtgcatagtttgcctggagaatccactcacgttcataaagagaatgttgatggcgccgtgtagaagccgctctgtatccatccacgcgtgcagagctgccagcagggagctcacagaaggggagggagcaccaggccagctgagctgcacccacagtcccgagactgggatcccccaccccaacagtgattttggaaaaaaaaatgaaagttctgttcgtttatccattgcgatctggggagccccatctcgatatttccaatcctggctacttttcttagagaaaataagtcctttttttctggccttgctaatggcaacagaagaaagggcttctttgcgtggtcccctgctggtgggggtgggtccccagggggccccctgcggcctgggcccccctgcccacggccagcttcctgctgatgaacatgctgtttgtattgttttaggaaaccaggctgttttgtgaataaaacgaatgcatgtttgtgtcacgaaaaaaaaaaaaaaaaaaaaaaaaaaaaaaaaaaaaaaaaaaaaaaaaaaaaaaaaaaaaaaaaaaaaaaaaacccgg

SEQ ID NO: 785 - DNA, 2902 bp, Homo sapiens
  misc_feature (2887)..(2887): n equals a,t,g, or c
  misc_feature (2897)..(2897): n equals a,t,g, or c
  misc_feature (2902)..(2902): n equals a,t,g, or c
agttcccggcggctcttgcggggcacaggtgagccctggctgcgcgcgcggcccctcctccccggcgcctcccaggaatgggtggtgtggacagctgccaggcgttgaagaccacccctggctctgtgcccctgtctcatcagatgggggctccggaggtggcgcccaggctctgagctaccctaggtctgcagactagcgggcattggccagagacatggcccagccactggccttcatcctcgatgtccctgagaccccaggggaccagggccagggccccagcccctatgatgaaagcgaagtgcacgactccttccagcagctcatccaggagcagagccagtgcacggcccaggaggggctggagctgcagcagagagagcgggaggtgacaggaagtagccagcagacactctggcggcccgagggcacccagagcacggccacactccgcatcctggccagcatgcccagccgcaccattggccgcagccgaggtgccatcatctcccagtactacaaccgcacggtgcagcttcggtgcaggagcagccggcccctgctcgggaactttgtccgctccgcctggcccagcctccgcctgtacgacctggagctggaccccacggccctggaggaggaggagaagcagagcctcctggtgaaggagctccagagcctggcagtggcacagcgggaccacatgcttcgcgggatgcccttaagcctggctgagaaacgcagcctgcgagagaagagcaggaccccgagggggaagtggaggggccagccgggcagcggcggggtctgctcctgctgtggccggctcagatatgcctgcgtgctggccttgcacagcctgggcctggcgctgctctccgccctgcaggccctgatgccgtggcgctacgccctgaagcgcatcgggggccagttcggctccagcgtgctctcctacttcctctttctcaagaccctgctggctttcaatgccctcctgctgctgctgctggtggccttcatcatgggccctcaggtcgccttcccacccgccctgccgggccctgcccccgtctgcacaggcctggagctcctcacaggcgcgggttgcttcacccacaccgtcatgtactacggccactacagtaacgccacgctgaaccagccgtgtggcagccccctggatggcagccagtgcacacccagggtgggtggcctgccctacaacatgcccctggcctacctctccactgtgggcgtgagcttctttatcacctgcatcaccctggtgtacagcatggctcactctttcggggagagctaccgggtgggcagcacctctggcatccacgccatcaccgtcttctgctcctgggactacaaggtgacgcagaagcgggcctcccgcctccagcaggacaatattcgcacccggctgaaggagctgctggccgagtggcagctgcggcacagccccaggagcgtgtgcgggaggctgcggcaggcggctgtgctggggcttgtgtggctgctgtgtctggggaccgcgctgggctgcgccgtggccgtccacgtcttctcggagttcatgatccagagtccagaggctgctggccaggaggctgtgctgctggtcctgcccctggtggttggcctcctcaacctgggggccccctacctgtgccgtgtcctggccgccctggagccgcatgactccccggtactggaggtgtacgtggccatctgcaggaacctcatcctcaagctggccatcctggggacactgtgctaccactggctgggccgcaggtgggcgtcctgcagggccagtgctgggaggattttgtgggccaggagctgtaccggttcctggtgatggacttcgtcctcatgttgctggacacgctttttggggaactggtgtggaggattatctccgagaagaagctgaagaggaggcggaagccggagtttgacattgcccggaatgtcctggagctgatttatgggcagactctgacctggctgggggtgctcttctcgcccctcctccccgccgtgcagatcatcaagctgctgctcgtcttctatgtcaagaagaccagccttctggccaactgccaggcgccgcgccggccctggctggcctcacacatgagcaccgtcttcctcacgctgctctgcttccccgccttcctgggcgccgctgtcttcctctgctacgccgtctggcaggtgaagccctcgagcacctgcggccccttccggaccctggacaccatgtacgaggccggcagggtgtgggtgcgccacctggaggcggcaggccccagggtctcctggctgccctgggtgcaccggtacctgatggaaaacaccttctttgtcttcctggtgtcagccctgctgctggccgtgatctacctcaacatccaggtggtgcggggccagcgcaaggtcatctgcctgctcaaggagcagatcagcaatgagggtgaggacaaaatcttcttaatcaacaagcttcactccatctacgagaggaaggagagggaggagaggagcagggttgggacaaccgaggaggctgcggcaccccctgccctgctcacagatgaacaggatgcctagggggacggcgatgggcctcacgggcccgcccagcaccctgagaccacactgttgcctcccagtgaccctgctgggacaccaggacaaggaagacagtttcgcctctcgaaagccgcagctgcgcctaggctggagctggaagggtgggtgaatccggcttgggcatccccaatgaactctgccctgcctgggactctatttattctgattaaaggggttttgcaaatggaaaaaaaaaaaaaaaaaaaaaccncggggggggnccggn

SEQ ID NO: 786 - DNA, 2326 bp, Homo sapiens
gcggccgcctactactactaaaggcgcggccgcgtcgaccttatggctgccgagtgattcagagaatcctggagcactgtctccctgaccagacactccctattttagaggagcttcaccagcacacagagcagcttgtacaggatcaatatggaaattatgtaatccaacatgtactggagcacggtcgtcctgaggataaaagcaaaattgtagcagaaatccgaggcaatgtacttgtattgagtcagcacaaatttgcaagcaatgttgtggagaagtgtgttactcacgcctcacgtacggagcgcgctgtgctcatcgatgaggtgtgcaccatgaacgacggtccccacagtgccttatacaccatgatgaaggaccagtatgccaactacgtggtccagaagatgattgacgtggcggagccaggccagcggaagatcgtcatgcataagatccggccccacatcgcaactcttcgtaagtacacctatggcaagcacattctggccaagctggagaagtactacatgaagaacggtgttgacttagggcccatctgtggcccccctaatggtatcatctgaggcagtgtcacccgctgttccctcattcccgctgacctcactggcccactggcaaatccaaccagcaaccagaaatgttctagtgtagagtctgagacgggcaagtggttgctccaggattactccctcctccaaaaaaggaatcaaatccacgagtggaaaagcctttgtaaatttaattttattacacataacatgtactattttttttaattgactaattgccctgctgttttactggtgtataggatacttgtacataggtaaccaatgtacatgggaggccacatattttgttcactgttgtatctatatttcacatgtggaaactttcagggtggttggtttaacaaaaaaaaaaagctttaaaaaaaaaagaaaaaaaggaaaaggtttttagctcatttgcctggccggcaagttttgcaaatagctcttccccacctcctcattttagtaaaaaacaaacaaaaacaaaaaaacctgagaagtttgaattgtagttaaatgaccccaaactggcatttaacactgtttataaaawatatatatatatatatatatatatataatgaaaaaggtttcagagttgctaaagcttcagtttgtgacattaagtttatgaaattctaaaaaatgccttttttggagacwatattatgctgaagaaggctgttcgtgaggaggagatgcgagcacccagaacgtcttttgaggctgggcgggtgtgattgtttactgcctactggatttttttctattaacattgaaaggtaaaatctgattatttagcatgagaaaaaaaaatccaactctgcttttggtcttgcttctataaatatatagtgtatacttggtgtagactttgcatatatacaaatttgtagtattttcttgttttgatgtctaatctgtatctataatgtaccctagtagtcgaacatacttttgattgtacaattgtacatttgtatacctgtaatgtaaatgtggagaagtttgaatcaacataaacacgttttttggtaagaaaagagaattagccagccctgtgcattcagtgtatattctcaccttttatggtcgtagcatatagtgttgtatattgtaaattgtaatttcaaccagaagtaaatttttttcttttgaaggaataaatgttctttatacagcctagttaatgtttaaaaagaaaaaaatagcttggttttatttgtcatctagtctcaagtatagcgagattctttctaaatgttattcaagattgagttctcactagtgtttttttaatcctaaaaaagtaatgttttgattttgtgacagtcaaaaggacgtgcaaaagtctagccttgcccgagctttccttacaatcagagcccctctcaccttgtaaagtgtgaatcgcccttcccttttgtacagaagatgaactgtattttgcattttgtctacttgtaagtgaatgtaacatactgtcaattttccttgtttgaatatagaattgtaacactacacggtgtacatttccagagccttgtgtatatttccaatgaacttttttgcaagcacacttgtaaccatatgtgtataattaacaaacctgtgtatgcttatgcctgggcaactattttttgtaactcttgtgtagattgtctctaaacaatgtgtgatctttattttgaaaaatacagaactttggaatctgaaaaaaaaaaaaaaaaaaaaaaaaaaaaaaa

SEQ ID NO: 787 - DNA, 2426 bp, Homo sapiens
  misc_feature (24)..(24): n equals a,t,g, or c
gcccacgcgtcgcccacgcgtycnggaggctcgggtcgttgtggtgcgctgtcttcccgcttgcgtcagggacctgcccgactcagtggccgccatggcatcagatgaaggcaaactttttgttggagggctgagttttgacaccaatgagcagtcgctggagcaggtcttctcaaagtacggacagatctctgaagtggtggttgtgaaagacagggagacccagagatctcggggatttgggtttgtcacctttgagaacattgacgacgctaaggatgccatgatggccatgaatgggaagtctgtagatggacggcagatccgagtagaccaggcaggcaagtcgtcagacaaccgatcccgtgggtaccgtggtggctctgccgggggccggggcttcttccgtgggggccgaggacggggccgtgggttctctagaggaggaggggaccgaggctatggggggaaccggttcgagtccaggagtgggggctacggaggctccagagactactatagcagccggagtcagagtggtggctacagtgaccggagctcgggcgggtcctacagagacagttacgacagttacgctacacacaacgagtaaaaacccttcctgctcaagatcgtccttccaatggctgtgtgtttaaagattgtgggagcttcgctgaacgttaatgtgtagtaaatgcacctccttgtattcccactttcgtagtcatttcggttctgatcttgtcaaacccagcctgaccgcttctgacgccgggatggcctcgttactagacttttctttttaaggaagtgctgtttttttttgagggttttcaaaacattttgaaaagcatttacttttttgaccacgagccatgagttttcaaaaaaatcgggggttgtgtgggtttttggtttttgttttagtttttggttgcgttgcctttttttttttagtggggttggccccatgaagtgggtgccccactcacttctctgagatcgaacggactgtgaatccgctctttgtcggaagctgagcaagctgtggcttttttccaactccgtgtgacgtttctgagtgtagtgtggtaggaccccggcgggtgtggcagcaactgccctggagccccagcccctgcgtccatctgtgctgtgcgccccacagtagacgtgcagacgtccctgagaggttcttgaagatgtttatttatattgtccttttttactggaagacgtacgcatactccatcgatgttgtatttgcagtggctgaggaattcttgtacgcagttttctttggctttacgaagccgattaaaagaccgtgtgaaatgaaccttgctctgacaattcccttgcattgcaccacacactccttgctgcgggctcctgcagccagacctgagcagagagagaaggtggagaagcagcgggtctgcaagccttccctggggcctgcagagctagaaagggaggcccagcagactggcgctggtcagggtaggggagccaggcgggggacgggagcgggcagctcaggcctcagggcagccctgggaggcttctggcagtggtggccagagggctggactgtgcgggcagcttagcagggacagtggacgtgcacctgacgctgacctggactgcctcagtctagaagcaggccagagagcagaggcacgtggcatcccagggcgacctcagacggccagccggttagctagttctgctgttgcttcacgagttctgagcattctctgctagcctatggaagctgcagccctcggaggacagaagtgttgtgcgcccaacagaaccctctgagacgcaagctgctcccttggctagctcatatgtggaaatagccctgtaattcgaggttgaaggggcccggccaggactcggggaagggtggcctgagagcagcgatgacctctggggtcactgtcccaggagggacttcacctggaacaagagctggaggcagccgcttgcccaggaggcttgtcccctgtaagtgctttcgggaagagtggcatgtggcgctgagccctgtcccgggcggcacctgggcgtttcagtgagtcctgctctcccgcacctatggccccayggcgggcgcctttcggtgtgtgttgggtgcagggcagcgcctcccgggagcgccgggtcccycgcctggagcccgcgcctgttctccctcccttcctcctccttccaggaggcgcttcgccagtgaggtgcgggctcagggcctcgagtctctcctggagcacgggctgcggtgcgccggcagcttacggggcggccagtccttgcccacaacgatgtggagccctgtgaaagtcggattcgaataaagggccacgtgtgcacccagaaaaaaaaaaaaaaaaaaaaaaaaaaaaaaaaaaaaaaaa

SEQ ID NO: 788 - DNA, 547 bp, Homo sapiens
gcggccgcgagcaaaggagggagggaaggaaggaagagarggaggcgggcargcaggcgggcgcgggggtcggggactgaggcagtagagaggcgagagcccggcagccgcttcgcgctgyttgctgcgcgggcttttggagggggcggccgyttagtcggctgaggagaagcggacaccagcggcgttggtgatagcgcctgggggagggggactggagaggcgagaaggggggtcgctgcggtggttctctcgctgtcgctctctctttgcctcgctcccggctcggcgggctcctcccggcgtctctctcgcctccggggtcccgctccccgccccccgcggtatgtcttgatcccgagcagcgggtttcatggggctcctcaggattatgatgccgcccaagttgcagctgctggcggtggtggccttcgcggtggcgatgctcttcttggaaaaccagatccagaaactggaggagtcccgctcgaagctagaaagggctattgcaagacacgaatccgagaaattgaacacgacatacaat

SEQ ID NO: 789 - DNA, 889 bp, Homo sapiens
caagaatgtgtgcccatgtatgtgtgtgttgggggtcgacatgaccttggaaataatagtgtttgtatttcctctgccaggtgacaaggagccctgtgcacatcccaactctcgattttgtgccccggctcgccagtgccccatcatggacccagcctgggaggccccagagggtgtccccattgacgccatcatctttggtggccgcagacccaaaggtaaacaacatatgagctccatgttcttggcaaaagggctatctctgtattagggcctacctccctccctctgatccagagcctcagcctggatctcacctttctccagagttctcccctggtgaatgcaaacttgggaggaggcaaagggtctgaaaatgggatagccgaggtcttaggagagagagtaccagtcaagctcaccagaagggctggagttagggtccaaagaaaagggctgcctgtgactctkttcattggtgatctaggggtacccctggtatacgaggccttcaactggcgtcatggggtgtttgtgggcagcgcatgmgctctgagtccactgctgcagcaraacacaaaggtgagcaccctcaccattcctccctctcctgtgtgtgcaacagcacgtcctctctcccttcctgagccagamcttccttttgtccamccctggagtctgatatggccccacctcttcccacttctatcttttccccatccctgaagatattcagaaccataagcctttcacagcttcctctcccactcttttctcacatagctcagctggccgcaccttcatggctaaacaacctgagctcttggagatgccctggctcccctctctctgctccgtatcacacaaggttctaggcagctgatgaggc

SEQ ID NO: 790 - DNA, 1172 bp, Homo sapiens
gggagggcgggcgccagccccgtcgggggcccggagggggactcggagcgggccaaggggcggctccggcgggcggactcggagcgggcggcggagtgacccggacagctgtcctctctgacaccaccccggcctgcctctttgttgccatgagagctgcctacctcttcctgctattcctgcctgcaggcttgctggctcagggccagtatgacctggacccgctgccgccgttccctgaccacgtccagtacacccactatagcgaccagatcgacaacccagactactatgattatcaagaggtgactcctcggccctccgaggaacagttccagttccagtcccagcagcaagtccaacaggaagtcatcccagccccaaccccagaaccaggaaatgcagagctggagcccacagagcctgggcctcttgactgccgtgaggaacagtacccgtgcacccgcctctactccatacacaggccttgcaaacagtgtctcaacgaggtctgcttctacagcctccgccgtgtgtacgtcattaacaaggagatctgtgttcgtacagtgtgtgcccaygaggagctcctccgagctgacctctgtcgggacaagttctccaaatgtggcgtgatggccagcagcggcctgtgccaatccgtggcggcctcctgtgccaggagctgtgggagctgctagggtggtgctggcatcctgagtcctggccctcctgggatctggggccctcgggccctgcctgacctggtgcttttttccccatccccatgttccttttattctgtaaaaagttagtggactgcagccctgggggttgcaggctgcggtgcctcaggcccctccttcagcctgtggccacctctggggcacgatgggggctccccactgcccagtctgcccctcgggttgggggagtatcccaggcctctctgtgggacctgggcccctgacgggccttctcagcccgttttgaggacagacagtcccccgaggtaggctacatccccccaccccagctggtctgcttggatttcctacagcccccgtgggcatggaccacctttattttatacaaaattaaaaacaagtttttacaaaaaaaaaaaaaaaaactkggaggggggcccggtactcaaatcgccggatagtgat

SEQ ID NO: 791 - DNA, 1008 bp, Homo sapiens
  misc_feature (7)..(7): n equals a,t,g, or c
  misc_feature (977)..(977): n equals a,t,g, or c
  misc_feature (980)..(980): n equals a,t,g, or c
  misc_feature (1003)..(1003): n equals a,t,g, or c
acaatgntggatcccccgggactgcaggaattcggcacgagcccacttcgcctgccgcggtcgggtccgcggcctgcgctgtagcggtcgccgccgttccctggaagtagcaacttccctaccccaccccagtcctggtccccgtccagccgctgacgtgaagatgagcagctcagaggaggtgtcctggatttcctggttctgtgggctccgtggcaatgaattcttctgtgaagtggatgaagactacatccaggacaaatttaatcttactggactcaatgagcaggtccctcactatcgacaagctctagacatgatcttggacctggagcctgatgaagaactggaagacaaccccaaccagagtgacctgattgagcaggcagccgagatgctttatggattgatccacgcccgctacatccttaccaaccgtggcatcgcccagatgttggaaaagtaccagcaaggagactttggttactgtcctcgtgtgtactgtgagaaccagccaatgcttcccattggcctttcagacatcccaggtgaagccatggtgaagctctactgccccaagtgcatggatgtgtacacacccaagtcatcaagacaccatcacacggatggcgcctacttcggcactggtttccctcacatgctcttcatggtgcatcccgagtaccggcccaagagacctgccaaccagtttgtgcccaggctctacggtttcaagatccatccgatggcctaccagctgcagctccaagccgccagcaacttcaagagcccagtcaagacgattcgctgattccctcccccacctgtcctgcagtctttgacttttcctttcttttttgccaccctttcaggaaccctgtatggtttttagtttaaattaaaggagtcgttatcgtggtgggaatatgaaataaagtagaagaaaaggccaaaaaaaaaaaaaaaaaaaaaaaacncgngggggggcccggaacccaattgncccta

SEQ ID NO: 792 - DNA, 857 bp, Homo sapiens
ggtaaatcttgaggaataatgttagtaataatactgaaactatattgaagatttttgtgccaagtcctgtgctaagcacatcctatggattaattcctttagtctcacgtcagtctgatgagataggtgctgtattatcttaattttaaaggcaaggtatatggagacctggagaggtcaagtgacctgtccaaggccacagagctaagaatgaggaagactgtaatttgaattcagacctccaggccagatggagtccaccttttgtataacccatgctgaagttttcaggtaagtgattcagtgtcccttgtctaatcatccatgaaaaaaggccttctggaatttggtaccaggtgctagaaagaatcctacttcccctcttatctacagggaaatagaataagggcccctgtccccaacatcccccaaaccttgtggcagtttttgcatctgtagactggttgggtttgtaggtccggccacagctggggcttgggtccaagctgggtgatgtagttattggaggggcattaatcctggaactcagatcgccactcagaaagttctttgcataggaggcgaggttcggcacgctgaccacgcggctgggcacgtcctccaccttctttttctgtttgtattaatggacaggttagtgcaatgcaatgcaaaaaacaaagcattattgtaaaagcaaataatgctcacccaatcaaaattgtatcggagaagaagcaacaatttcatttatacacttacatgctattttttaaagcacttttccctccaatcttcattttgtattataaataaatatgtatgttcacaacctcttaaaaaaaaaaaaaaaaaaa

SEQ ID NO: 793 - DNA, 2357 bp, Homo sapiens
  misc_feature (2357)..(2357): n equals a,t,g, or c
accctgacggatgcacagactcgagtagcttccccatcccaaggccaggtggggtcgtcgtcccccaaacgctcagggatgaccgccgtaccacagcatctgggaccttcactgcaaaggactgttcatgacatggagcaattcggacagcagcagtatgacatttatgagaggatggttccacccaggccagacagcctgacaggcttacggagttcctatgctagtcagcatagtcagcttgggcaagaccttcgttctgccgtgtctcccgacttgcacattactcctatatatgaggggaggacctattacagcccagtgtaccgcagcccaaaccatggaactgtggagctccaaggatcgcagacggcgttgtatcgcacaggttcagtaggtattggaaatctacaaaggacatccagccaacgaagtacccttacataccaaagaaataattatgctctgaacacaacagctacctacgcggagccctacaggcctatacaataccgagtgcaagagtgcaattataacaggcttcagcatgcagtgccggctgatgatggcaccacaagatccccatcaatagacagcattcagaaggaccccagggagtttgcctggcgtgatcctgagttgcctgaggtcattcacatgcttcagcaccagttcccatctgttcaggcaaatgcagcggcctacctgcagcacctgtgctttggtgacaacaaagtgaagatggaggtgtgtaggttagggggaatcaagcatctggttgaccttctggaccacagagttttggaagttcagaagaatgcttgtggtgcccttcgaaacctcgtttttggcaagtctacagatgaaaataaaatagcaatgaagaatgttggtgggatacctgccttgttgcgactgttgagaaaatctattgatgcagaagtaagggagcttgttacaggagttctttggaatttatcctcatgtgatgctgtaaaaatgacaatcattcgagatgctctctcaaccttaacaaacactgtgattgttccacattctggatggaataactcttcttttgatgatgatcataaaattaaatttcagacttcactagttctgcgtaacacgacaggttgcctaaggaacctcagctccgcgggggaagaagctcggaagcaaatgcggtcctgcgaggggctggtagactcactgttgtatgtgatccacacgtgtgtgaacacatccgattacgacagcaagacggtggagaactgcgtgtgcaccctgaggaacctgtcctatcggctggagctggaggtgccccaggcccggttactgggactgaacgaattggatgacttactaggaaaagagtctcccagcaaagactctgagccaagttgctgggggaagaagaagaaaaagaaaaagaggactccgcamgaagatcaatgggatggagttggtcctatcccaggactgtcgaagtcccccaaaggkgtygagatgctgtggcacccatcggtggtaaaaccatatctgactcttctagcagaaagttccaacccagccaccttggaaggctctgcagggtctctccagaacctctctgctggcaactggaagtttgcagcatatatccgggcggccgtccgaaaagaaaaggggctccccatccttgtggagcttctgagaatggataacgatagagttgtttcttccgtggcaacagccttgaggaatatggcactagatgttcgcaacaaggagctcataggcaaatacgccatgcgagacctggtcaaccggctccccggcggcaatggccccagtgtcttgtctgatgagaccatggcagccatctgctgtgctctgcacgaggtcaccagcaaaaacatggagarcgcaaaagccctggccgactcaggaggcatagagaagctggtgaacataaccaaaggcaggggcgacagatcatctctgaaagtggtgaaggcagcagcccaggtcttgaatacattatggcaatatcgggacctccggagcatttataaaaaggatgggtggaatcagaaccattttattacacctgtgtcgacattggagcgagaccgattcaaatcacatccttccttgtctaccaccaaccaacagatgtcacccatcattcagtcagtcggcagcacctcttcctcaccagcactgttaggaatcagagaccctcgctctgaatacgataggacccagccacctatgcagtattacaatagccaaggggatgccacacataaaggsctgtwccctggctccagcaaacctycaccaatttactcaktcctatycctccccccgcn

SEQ ID NO: 794 - DNA, 1976 bp, Homo sapiens
  misc_feature (23)..(23): n equals a,t,g, or c
  misc_feature (1965)..(1966): n equals a,t,g, or c
taacttggacccttagggggccncccttttttttttttttttgttttcctccaaggcatttattaactcctgagtgtcacggggccaggggaaggctggagccaaaaccaagtctctgggggcgggggtcctctctggatccccactactcagctccccgggctccccatgcagccctagagacgggagaagtccagtgtgcygttccacctccctccaagtcccaagaaagtgggaggcagtgttccactccagtgtcgtccagacgaacaagtccaaccagtctggaaccctaggccggcgtggtcaggtcgggggcgggagggccgggcctggctctgtctctgtctgtgtccaggtcacacataaactgcccgccgtgagatgagggagccgtccagctgggactccatgtcatcctcgagtgctgggggtggaggcaacatgaggcctttctctgccttctcttcctcctcctcctcctcctcatccttgccatctggttccatgggaccagggactactggtgtccagaagacggggtccccatttcccaacacctgagctttcggatcgtagaatcccccgtcgccactggctcctcctcctgctcctccagggctcttcctcctcctcctcaccctcagcaggatgaaggccaaggaccccccagccagaagcagcagcaccagcagtgtcccccccacggccccccacaccagcgggcccacatctcggggcgaggccctgggggtttctcggacaaagatgacctgctcagcgcggcccatgcccacggcattggtgactgtgcagacgaaggtggtattgaacagactgtcswctgcgtggatgaccagctgggagccctgggccactgcggaggtcgggaaggtgcctgaggtcgtgctccagtcatagcccgtgggctctgggttgctgcggacgtcacagctcagggtggcatcagtacggccgaggtaccagttgtcatcatagccggagatggacacttcaggagggtagcgtacagagagggtcacaggtatcagggctggttcctcgaagctctcatgctccactttgcaggtgaccgtgacaccatctgctcggcccgagggcaccaaggtgaagcggctggtgacagtgacagttccggccagggtccctgacacctgagtctctttggcttcccagtccagggatgagagccaggagatccgggcaggtgggcggccctctttggagatgcagagggccactgtcgtagggtcctggctgaacgtgaccttctgggcctcagcttggttcttgggcttggctatgactctgagccaggtcatccctcggacggaccccttggggaaggtggcaaactcgcaagtgtagttgccctcgtcctccaccgtgagcccgtggagggccagcgtggcgtcctggagctctgcctctgtgtcttgcccagtgctctgcttggcagagacgaaggacagccgctcgctgccaggcttcgggctggggaagctgggacccatcttagggtggaaggcggccacattctggtggttcgcaggtgcatctgggcgctgccaggtcaccagggagatgtacagtccaggaacaggtggcagcaggtggcacggcagctccacggtgcccccgagctggcctcgcacctcgggtagcacttgaactcgcacatcctgggctccggtttccaggagcagcagcagcagcagcggccacagcagcggcgtcggcggcgatctcgacggcaggagggcagcggcccgggccatggagggcccgggaggggactgggcccggccggaggcccgcgggccactctgtgggggccgatcggctgggcggtttagtaggtgcctgtggggctccggctccggctccgggccggttcccgctgcgctctagcctccctgttctgctctcccggcccagctctcnncgcccggctc

SEQ ID NO: 795 - DNA, 2118 bp, Homo sapiens
tttccgccacaacagaacctaagggtacagcactaagtctaagaccaacccttctccggtggttgtaggtgccaagcggcttcccctgggagccttagcccctagcaccgcccccccacccccgccccgctggcgggccttggaattagggtgaggacgccccctggtggcaaggaggtgctgcggcctcggaggtgggaggagttgggaacctgggtcagggcaggcggcagcccgaagggatctggatttctttattaacagacatgagcacgacccgttacagaagtttgtgctttccaaaaaaaaaaaaaaaaaaaacagttactaaacgtgaaaaaggaacccaagcaaagaggaaggagttggggaggggccaccaaagcccctgggccccatccatagccctgacctgaaccgcgcctagggcctccaacctgggacctgcccggcaggagacggggggtagccgaggggccccagctgggcctgctacttcctttgggccagacaggaaggggtcaaaagaagggcggggagggggtcccagggagccagagcccacgagccatttattgccatgttttaaaattcgtgcaaaatatctgaagccctggacagagaatacaaagtgatattttcccaagaaacataaaactaggaaaagaggtgggggacattttcccaccagagctccccccacgccaggccccaagcagggtgaggcctccaacccggccagctgagcagggaggactaagagctacaatctggaccagggaaggaggggtggaatttgcaacagcgtctcaactaccaacgagaggaaagccagtcaactgtacaagtctcctatcaactttttaaaaaaagagaaaagctgtaaaagtcaggccctgtgggtagggaagcggccaagtccccagccagggccggaatccggagtgggtgccaggcggagctgctgcgaatgcaggcacggcgggccgtctggccagaggctgatgcaggtgggcggccttggcaagggtagcctagggctggcgccaccgctaatcaccaccctcgaagccctcctcctcttctggaactgggtctgcatcccagcatgtgatgtcgatctctggaggcttgttgtagaacacaggaggcggagccttggcacagagctcttccgattgggcaaactcctcctcctgtgattgactgaagtacccctcactggcctgggtcccctccttctgggtggtctcgccattggttagcaggtggggctccggctcctgctcttgctccagctcctcaagggctgagggcagagttggggtctggggggcagccaggggctccccttccacttcctctgggtcacagaaggtggctggcggctcaggcagctcatcaaagttgagaagggtggcacagccttcgcctgctggcagcagtggctccggagccacctcatccagcaggggcacctctgccagggtgacctcagtacccgagggtggcgtgggggccctgggctcaccctggagtgtggaggccccttccccgttgccaggccataggtcaatgaggctggtggcggcggggggtacgttgttggcaacagtggtgtcagcagtggcagtgtcagtttcaatggtgtcagctgcatcgtggayctccgtggcgtcagctgtggcaggctccacgggagcagccaggacagcctgctctgcagactccatgaacatcaagtcctctgcagggctgcctggcccccggggaggcgcctgtgcctgagggggctcctccatggggccggcccaggcctgaggggctgctgctctggtctcctcactgtctaggatggggctgggctcctgggtctcttgggctggtgggggtggcggtggcagtggtggaggctgcgaggaggtgacctcatccagggcccgctctatctgctcagcgacaggggtggaggcggtgctggagtcagacgggctccgcgtggggatgggagtgggcgccatcctccggtggctgtccaggtggctgcctggtcgatggttgaagggcgagggtacatcacagctgcccgcagaggccgatgcgactctttcctgctgc

SEQ ID NO: 796 - DNA, 2438 bp, Homo sapiens
aatagtcaatcattctcataatatgtcttataaacggctgctgctgctgccctctatccaccttgaggccttggacctgctgtctgcactcatcctcgcgtgtggaagccggctcttgcgctttgggatcctgatcggccgcctgcttccccaggtcctcaattcctggagcatcggtagagattccctctctccaggccaggagaggccttacagcacggttcggaccaaggtgtatgcgatattagagctgtgggtgcaggtttgtggggcctcggcgggaatgcttcagggaggagcctctggagaggccctgctcacccacctgctcagcgacatctccccgccagctgatgcccttaagctgcgtagcccgcgggggagccctgatgggagtttgcagactgggaagcctagcgcccccaagaagctaaagctggatgtgggggaagctatggccccgccaagccaccggaaaggggatagcaatgccaacagcgacgtgtgtgcggctgcactcagaggcctcagccggaccatyctcatgtgtgggcctytcatcaaggaggagactcacaggagactgcatgacctggtcctccccctggtcatgggtgtacagcagggtgaggtcctaggcagctccccgtacacgagctcccgctgccgccgtgaactctactgcctgctgctggcgctgctgctggccccgtctcctcgctgcccacctcctcttgcctgtgccctgcaagccttctccctcggccagcgagaagatagccttgaggtctcctctttctgctcagaagcactggtgacctgtgctgctctgacccacccccgggttcctcccctgcagcccatgggccccacctgccccacacctgctccagttccccctcctgaggccccatcgcccttcagggccccaccgttccatcctccgggccccatgccctcagtgggctccatgccctcagcaggccccatgccttcagcaggccccatgccctcagcaggccctgtgccctcggcacgccctggacctcccaccacagccaaccacctaggcctttctgtcccaggcctagtgtctgtccctccccggcttcttcctggccctgagaaccaccgggcaggctcaaatgaggaccccatccttgcccctagtgggactcccccacctactatacccccagatgaaacttttggggggagagtgcccagaccagcctttgtccactatgacaaggaggaggcatctgatgtggagatctccttggaaagtgactctgatgacagcgtggtgatcgtgcccgaggggcttccccccctgccacccccaccaccctcaggtgccacaccaccccctatagcccccactgggccaccaacagcctcccctcctgtgccagcgaaggaggagcctgaagaacttcctgcagccccagggcctctcccgccacccccacctccgccgccgcctgttcctggtcctgtgacgctccctccaccccagttggtccctgaagggactcctggtgggggaggacccccagccctggaagaggatttgacagttattaatatcaacagcagtgatgaagaggaggaggaagaggaagaagaggaagaagaagaagaggaagaagaggaagaggaggaagactttgaggaagaggaagaggatgaagaggaatattttgaagaggaagaagaggaggaagaagagtttgaggaagaatttgaggaagaagaaggtgagttagaggaagaagaagaagaggaggatgaggaggaggaagaagaactggaagaggtggaagacctggagtttggcacagcaggaggggaggtagaagaaggtgcacctccacccccaaccctgcctccagctctgcctccccctgagtctcccccaaaggtgcagccagaacccgaacccgaacccgggctgcttttggaagtggaggagccagggacggaggaggagcgtggggctgacacagctcccaccctggcccctgaagcgctcccctcccagggagaggtggagagggaaggggaaagccctgcggcagggccccctccccaggagcttgttgaagaagagccctctgctcccccaaccctgttggaagaggagactgaggatgggagtgacaaggtgcagcccccaccagagacacctgcagaagaagagatggagacagagacagaggccgaagctctccaggaaaaggagcaggatgacacagctgccatgctggccgacttcatcgattgtccccctgatgatgagaagccaccacctcccacagagcctgactcctagccatcttctgcaccccactctttgtttccaataaagttatgtccttaraaaaaaaaaaaaaaaaaaaaaaaaaaaaaaaaaaaaaaaaaaaaaaagggcggcc

SEQ ID NO: 797 - DNA, 2022 bp, Homo sapiens
  misc_feature (29)..(29): n equals a,t,g, or c
  misc_feature (2011)..(2011): n equals a,t,g, or c
ctgaggaggaggagcctgaggtgggaggntcacttgagtccagaaggagccatgattgcaccactgcagtcagcctgggtgacagaccctgccttaaaaaaaaaaaaacccaaaacgtaacatttttggttccggttcagtctatttaaaataccatttattttcttaactgcacaaaattaggaaaataaaggaaaaaatacaattatttcttccacagaaatgcctgaatattagcagttatttatttttttgtttctgcatatattataaatattattcaaagttggggtcttgttttgattctgcttttctgatatatgaacactggatattaagggttcattcagatttttacttggtttcagattggggtataacattttgaatttaaaatagaactgcaggaaatcttttctttttttcctcccaaaggtttgattgttatggtggtggactttccaagatcaacactcctttattgacacctcttaaattgtcactagaagaatggagcacaaagccaactaacgacagctatggattatttgcggttgtgatgcatagtggcattacaattagtagtgggcattacactgcttctgttaaagtcactgaccttaacagtttagaactagataaaggaaattttgtggttgaccaaatgtgtgaaataggtaagccagaaccattgaatgaggaggaagcaaggggtgtggttgagaattataatgatgaagaagtgtcaattagagttggtggaaatacacagccaagtaaagttttgaacaaaaaaaatgtagaagctattggacttcttggaggacaaaagagcaaagcagattatgagctatacaacaaagcctctaatcctgataaggttgctagtacagcgtttgctgaaaatagaaattctgagactagtgatactactgggacccatgaatctgatagaaacaaggaatccagtgaccaaacaggcattaatattagtggatttgagaacaaaatttcatacgtagtgcaaagcttaaaggagtatgaggggaagtggttgctttttgatgattctgaagtcaaagttactgaagagaaggactttctgaattctctttccccttctacatctcctacttctactccttacttgctattttataagaaattatagagtgagtgtattttccttgtgtatatattaaacacacccatacaaacattggtaaagttgattacatcaaagaatctttagcttatcttttgaagctactggatattattggtctctctaggtttttatataaatagtgaaatytgaattactgaaaaccatgttaatttttagaactcattttcctcagtagagactagtgatgcattagcttctgggaacaaacttgtatcggttcttaattaaattatccaaaacggaggcatttaaacacttggatttacaccagtcttttgtgtttgctttttaaaataaagtgctcgtatttgtattctccatattttggagtaattatctacatgatgtttatagttcctgtggtttttcacccaagaagcagaatctcattcagtacatttagttttataagagtcatgaagctaaatccttgggctatgtcagaggcacaaagtctagaatgtgtgtattcacaatggtgtatgtacattttgtgccttgattcacttagaagtgtctcagaaaacctggacagttcgcttctacacaagaattttatatgtatttatgaagatgattctgtaccctagtatatctttttgggcatggactaatttgtatctgtttaactcatattctgcacgatctgtatatagtacatcaaacttagaggtgtgaccttaaatttaactttttttaaaaactgggaggtcaataaaatttaaactgcttaactatgtatatgaatatttgaattttttacttgtatatttttataaatacagctgagttttcttaaagcgaaaaaaaaaaaaaaaaaantaaaaaaaaaa

SEQ ID NO: 798 - DNA, 813 bp, Homo sapiens
  misc_feature (742)..(742): n equals a,t,g, or c
cggacgcgtgggcggacgcgtggggcctatcatatagtaaaacccagcccatgacccctaacaggggccctctcagccctcctaatgacctccggcctagccatgtgatttcacttccactccataacgctcctcatactaggcctactaaccaacacactaaccatataccaatgatggcgcgatgtaacacgagaaagcacataccaaggccaccacacaccacctgtccaaaaaggccttcgatacgggataatcctatttattacctcagaagtttttttcttcgcaggatttttctgagccttttaccactccagcctagcccctaccccccaattaggagggcactggcccccaacaggcatcaccccgctaaatcccctagaagtcccactcctaaacacatccgtattactcgcatcaggagtatcaatcacctgagctcaccatagtctaatagaaaacaaccgaaaccaaataattcaagcactgcttattacaattttactgggtctctattttaccctcctacaagcctcagagtacttcgagtctcccttcaccatttccgacggcatctacggctcaacattttttgtagccacaggcttccacggacttcacgtcattattggctcaactttcctcactatctgcttcatccgccaactaatatttcactttacatccaaacatcactttggcttcgaarccgccgcctgatactggcattttgtanatgtggtttgactatttctgtatgtctccatctattgatgaaggtcttaaaaaaaaaaaaaaaaaaaaccc

SEQ ID NO: 799 - DNA, 1131 bp, Homo sapiens
  misc_feature (1119)..(1120): n equals a,t,g, or c
aataacgtggcaaccacccacgagcccgcgtcggtgcccgccccgcagggggacctactatccggcgccgagccggaggggggaaacggcgcccgccgcccgcccggagcccgcgagcaaccccagtcccccccacccgcgcgtggcggcgccggctccctagccaccgcggccccaccctcttccggcctcagctgtccgggctgctttcgcctccgcctgtggatgctgcgcctctccgaacgcaacatgaaggtgctccttgccgccgccctcatcgcggggtccgtcttcttcctgctgctgccgggaccttctgcggccgatgagaagaagaaggggcccaaagtcaccgtcaaggtgtattttgacctacgaattggagatgaagatgtaggccgggtgatctttggtctcttcggaaagactgttccaaaaacagtggataattttgtggccttagctacaggagagaaaggatttggctacaaaaacagcaaattccatcgtgtaatcaaggacttcatgatccagggcggagacttcaccaggggagatggcacaggaggaaagagcatctacggtgagcgcttccccgatgagaacttcaaactgaagcactacgggcctggctgggtgagcatggccaacgcaggcaaagacaccaacggctcccagttcttcatcacgacagtcaagacagcctggctagatggcaagcatgtggtgtttggcaaagttctagagggcatggaggtggtgcggaaggtggagagcaccaagacagacagccgggataaacccctgaaggatgtgatcatcgcagactgcggcaagatcgaggtggagaagccctttgccatcgccaaggagtagggcacagggacatctttctttgagtgaccgtctgtgcaggccctgtagtccgccacagggctctgagctgcactggccccggtgctggcatctggtggagcggacccactcccctcacattccacaggcccatggactcacttttgtaacaaactcctaccaacactgaccaataaaaaaaaatgtgggttttttttttttttaataaaaaaaaaaaaaaaaaactcgrggggggcccgtacnnaatcgccctat

SEQ ID NO: 800 - DNA, 209 bp, Homo sapiens
  misc_feature (209)..(209): n equals a,t,g, or c
gggtcgacccacgcgtccgtgctgatcaagatggagagaagttacaagctttgctccgcctcgtaatagagctgttagaaagagtcaaaattgttgaagcgcttcttacaacctcaacaacagctaagcagtacatctgaggaactgtactaagagcttcagatgtactgcttagcgttgttgagtttaagagtaaaaatgttccatan

SEQ ID NO: 801 - DNA, 1159 bp, Homo sapiens
tttttttttcaccaragaaggaaagagagctttktttttttttgtacatagagggggaaaaaattccctgtccctcccgttccagggagagctggtcgctgagggaggaggaagagccacggcaagaaccctgccaggtctgtgctgggcacaaccaccaccacataaggcacccacggaaagtgcagctcagaaggcaggcgagagaaaggctgagggggagagaagagaggaggactaattcccctggaaggctccttgggcagcagatgaagcagctctgtggaaggttctgctgctgaagatgccctgggaaaactcctcctgggcctgctggaagctggcccctgtccgtcggtagagggagtgcacccgctgcaggaggaagactgagagcacggcacagagggtgaagaagccagccaccaccatcatgatgactgatatggccagggaatgattatccagtgtagacagggctgcaatccaaccgctgtcccccaggccagggatgccaaccaactggatgatgtagatccctatttgacaaaaaaatacaaagaagaacacaaagaagctgaaagagttgtcggacctaaaggccttatagatgggtcggtaccaacaaaggaaggcacagggagtgaagatcagaaaccacaggatggagaggccaaagtccactcccttggagctgttgcccgagaaccaggccaggcaggcaagcaggttcagaaacagagtcactgaatgcaacatccacagatagtagagcatcttgcatatccgctggtagtcggcagggatctctgtggagaaatcctgatagaagcagggcttcacagggcaccacgagggcagagggggccagttgttctgtctcacatgcaagttggctacagtgttctgcagctcccgctccttgcgttccagctcggcagctttcctgtccagttcttcctgctgccggagcaggcctgcctgggctgcagacaccacggccttcggaagctttcgcatgtagctgtctctgagaatactttctcctcctaggagcatctgcctctctgagagctcgctcactgccaggaattgggcaggcgggaacttgctggcctgtctaagcaggagctggggggtcggctgggttggttccacc

SEQ ID NO: 802 - DNA, 1601 bp, Homo sapiens
  misc_feature (3)..(3): n equals a,t,g, or c
  misc_feature (27)..(27): n equals a,t,g, or c
  misc_feature (55)..(55): n equals a,t,g, or c
  misc_feature (100)..(100): n equals a,t,g, or c
  misc_feature (1524)..(1524): n equals a,t,g, or c
  misc_feature (1584)..(1584): n equals a,t,g, or c
  misc_feature (1587)..(1587): n equals a,t,g, or c
ttntgaaatgataactgttacatcccnttaatgttttaagatccccaagtctatnctgatataaattaattaatatcttgaaaaagaaaatttttccttncagtagaatgccagttagtaaaacctttaaaaagtcacttattctgcaccattcatagtgctgtctgattcagaaggaatcatcaatgaaggcattaccaytgctgggtaaaggtaggatgagctgtcagctctgagctcttcccagctggaaggcccctctcgggggcagccaacaaggatttccgtggcattgtgggctcagtggggggctcccaggccccagcaggccccacagagggagcgtggcttcccctgagcaagcaccgtggcatgatgtggtcgttcaacccaggaactgggggtccggggcaggtcccgggtctcacgaggtgcgtgttgtgtgtgttcgcatgtacatgtgtgtgagaggatattcatgggggagagagggaaccagaacaggggtctttggggtctttgcaaatggccacggatggcagacatcgccctgcctggctgctagacgggggagtgctgtcctcccctgtgaccagaccggctgccatcagagacctggctgctgcccctgctggaccaggtgggcatgggctgaaggaagacaccctgtggccccagagtcctcgggctgggggaagggcagctagctggctcccggcgccctggctgtagtgtgcccggcccccaaggggcgccggtttgaggttttggcttgctcctttggaaacggaaagaaagaggaagagggacgaggacacagaggaggaagaagaggagacagaggtggcacgagaggggatctggaatgcttttgtgttagggagcctctgccgccgctgtctgtgcctgcggggcctgggactcctcaggtggggggtccgctttggagaagttcatctccaggatgtgccgctgtaagtgccgcacccactcttcctggatggagagggggccctggaattccacctcacagaacctgcatttgagggtgtagatgttgcccacgaacttgacaagtgatgtctgggggggccggggcaccagggaggggactggccggactcggggtgggggttgccgcacctcctccagcttctgctgtaggtcattggtgtcctcgcctccccgggctgcggaggcatctggagggcgggcttgtcggcgttcaaatttgttgatgttctgccgctggtgctcctcagccttcacggtgcctggcgggctggctgccagaggccgctcaccaccgtcggctgcccggccagcctcgggccctggctcccctccggcactgcggccgaccacggccaggcccccgggtgccagccccagggacggccgcttgtcactgtcacggccatggmyggcactgsggaacttcttggtgaaggggcrgccgcccttgggatgtagttgtggtaggtgcccacctttttggggttggtgtttgatccattggttcantgtctcgatgggcggaaccattgacgcaacattggtcaagtcgaactggctcaagtgttnccntgcgtggttggcca

SEQ ID NO: 803 - DNA, 690 bp, Homo sapiens
  misc_feature (582)..(582): n equals a,t,g, or c
  misc_feature (613)..(614): n equals a,t,g, or c
tttttttttttttttttttttttttttttttttttttttttttttctgcatcagtaattttaataaagaaaagcatgctctgagagaaagctcgctccttggtctgcagtcctttaaacaaagcagtgcagttcttagccaagggtaagtactgcaactgtcgagagcatyttgtcttccacacagttgggtgactctccgttttgacacaaagataagccttgcccttgtttccttttgggagggatatatccactgagatgagaggccaaactccgtttttcacgagattttttgactttgagcttcattttcttcttgkcaggatcatgtacaacagcatgcctagggagactttgtttcattgcaaatgttttgccacagccagcatgttcacacacaaaagggcggctttcctcatggaaggagaggatatggctttggagattaaacacagttgtataggttcttccacagccttctcttggacagcgacatacatccctttctggggcatgagttttcatgggttgcttaaggtaatctttggcgttaaatgttttccggcatactccacatagnatttccctctttatgggttctctcacatgtnncagaaggtccgcccatgttttgccacaaagggacatccttttgacatacataggccttgtgggccttggcagtgcg

SEQ ID NO: 804 - DNA, 2451 bp, Homo sapiens
  misc_feature (2312)..(2312): n equals a,t,g, or c
  misc_feature (2340)..(2340): n equals a,t,g, or c
tttttttttttttttttttccctttattttagtttattaatagaatacagagtgcaggcacttacagtggtcaaactgagcgaggagtgggtgaggtctcctcagagagaggccgccctgggcccacccatcagggaggcatgggcgggagctgagaggcccccaagaccccccgccaccaccacccacatagcccaagcccagccaccctgggggacccaggaggaggaggaggagaggaatagggcaaggccggcccgggccaacggctccgggcctagcaaaggcacctctggcagccgaggctgggccaggctcaggctgtgtggttaatatggccgggaaggactatgtacacctcaggcctgccagctgggcactaccgagcccactgggccaggcttgccgctggggagctcctgctaatgggaagttgatatacccctgcaccccagcaaggcctggggatgtaggcgcccttggtgcccgcacttatagaaggcctgccctacatgggctttcccagcccaagaagaccttggtagagtcccccccaggctggacccctcattcaggatggtgtcaagggttcwggtcccccctctgccaccctgagactccatcccccaaagtgcaacaccccagcgccccctgcctggagctccagggcccctttgcgcagtgcggtgtccagccaggcacaggggccggccctggaccggggccagcgttaaggaagaggccagggctgcccactgggagcctggtcccagcataggggcggcggagggccccagaccactgaagctcytgcgccgcgggtgcgtgaggcccccccgagagcacgcccccctcgaggcctagtcgagcagggatggctcggctgggcggataatggtgggccggctgggcgcagcagggggtcttctgctgggcactcctgggggaatccctggggggatccgaactggccgagatgggatctgaggcggggctgggaagaggtcactgttggcaaacacgctctggggtccaggccgggatgggattgggggcgccgagaaggaggctgctgcccccacgggaacaggaatcagggggggccctggagtggggcccctcactgctgggggccggccaggggggtgtatgctggacaccggtcggcgctgtggagtggggctgtggctgctggcgctctggagccaggtgtcatcgacaggcgggggtacaggcgtggacacagtgctggtgctgatgtcaccgatgatgttgagcgcctccttgagggcatggtacatgcgcagcatgtcgtcccgccgctgtgcctggtcagccgactcctccatgaggctgctctggtctgccgaggagtataggtaggccagcagctcgtggtggatgaaggccttcgtattgttgatcatgaggtgcatgatggtctttggcatgaggtcgcggatggacttgttgatgatggccacgtatgagtccaccaggttgcgaatggtctccacctgccgctccagttgggggtccatggagaaggtgttctcctgggccccatcctcgttttctgcctggtccttctcggggtagacgccagctcggaggaacgaggcyttccagctgtcmacgtcttcctgggagtcacaggccagctcgatctgccgcaggtccttgtaracgtttctctgctccgtgttgaaratgscraaacktgcttgttggacatgaagcccttctccacatcacggatcttgaaggttgtccagaggcagcatgtacttcttctctttctcctcctcatccttgtaccaggacagtgactcggcagtcagcacaaaccagtactccttggagccgcctttcatcaggctgatgttgttgatggtcagccagccctgcggatcaccaggatctccccctgattggggatggctctcttcttgttcagctgcgtgctcctctgctgggcattggcaaacccgatgaagtcctcatggttcgtgttgatgtaggactgctcaatgtcgatcagcagaagaatctggtccttcgttctcccctcccgttcccggatgtaagtggtgacgattcgctctgtctcctctcgcaaccgggggtaggaactgagcttactggtacactgcctaactgtattgattagctcctggataaccaggtcgacacatttcagacagggctytttcagcttgacgacctgctttttcacaatggcctcgaatgccaagtccggggtgaaaagcccggtcctgaaaccgtccagacccgggggcaggggagataantcagagagaaacaaagcatggtcagcantttcattggccctggccgggtccccaacaaggaatgaaggttgtgtcatgtgtggggtcggatgcctgagtccactgcccggaaaccctcagggtgacccgagctcgtgcc

SEQ ID NO: 805 - DNA, 1951 bp, Homo sapiens
  misc_feature (1121)..(1121): n equals a,t,g, or c
gagaaagccctgtcagcctgaggatccaagacgcatctcttacctcagctagaagctccgagttctcttactcccagcagtgaactcagcagcccaggccaaagtgagctcactaacatggatcttgctgcactcttctctgacacacctgccaatgctagtggttctgcaggtgggtcggatgaggctctgaactccggaatcctgactattgacgtcacttctgtgagctcctctctgggagggaacctccctgctaataatagctccctagggccgatggaacccctggtcctggtggcccacagtgatattcccccaagcctggacagccctctggttctcgggacagcagccacggttctgcagcagggcagcttcagtgtggatgacgtgcagactgtgagtgcaggagcattaggctgtctggtggctctgcccatgaagaacttgagtgacgacccactggctttgacctccaatagtaacttagcagcacatatcaccacaccgacctcttcgagcaccccccgagaaaatgccagtgtcccggaactgctggctccaatcaaggtggagccggactcgccttctcgcccaggagcagttgggcagcaggaaggaagccatgggytgccccagtccacgttgcccagtccagcagagcagcacggtgcccaggacacagagctcagtgcaggcactggcaayttctatttggaaagtgggggctcagcaagaactgattaccgagccattcaactagccaaggaaaaaaagcagagaggagcggggagcaatgcaggagcctcacagtctactcagagaaaaataaaagaaggcaaaatgagtcctccccatttccatgcaagccagaacagttggttgtgtgggagcctcgtggtgcccagcggaggacggccaggaccagctccagcagctggggtgcagtgcggggcgcagggcgtccaggtccagctggtgcaggatgacccctccggcgaaggtgtcctgccctcggcccgcggccagccaccttcctccccttcctcactgtggacctgcccgtctacgtcctccaggaggtgctcccctcatctggaggccctgctggaccggangccacccagttcccaggaagcactatcaacctgcaggatctgcagtgacggcagcctcggcctgggcaggcccaaggcmacggtctaggacacaccttccctgagactcatgacatgagcctggggagacctcatttggtttccrttcagaagaccagcgtagccttttkagacttttgggtacatttatcaaaaatgttttccttttgttttaccaggaatgagttcgggctatactctttgaaactgcctttgtgagcaaagtgctttggcaaggcaagggtctccctcagcagggctaggtgcactacagcctctttccccgtgtcccgttggatctgagctgtgtagcacttgttgcattacaaagaaaaagacttctgcaggaaatagggtagagaacaggctgtctagtcagatgcagcttgatctgtggcaaaaccaagtgtggtctttcagcttcagtgtgttagcatcccagcacctgggatggggtttgtgggcaagttgattttgccacactgtagggcccaggtggtcccattgccaccgtgaagccaaattctagcccaagtctggtagagcagtcgggcagctagttttcgggggaggatgatgtggtgggacagaggacctcagtggcctattacggagccctcttcccagactaaattcatagccgagagctcggggggatggtagagttaaaatttaaaataattttctaaattctgtatttggatattagtgtttaagtggtaatttggcaacagtttataaagtgatgttctgaataccataaaaaaaaaaaaaaaaaaaaaaaaaaaaaa

SEQ ID NO: 806 - DNA, 1315 bp, Homo sapiens
  misc_feature (8)..(8): n equals a,t,g, or c
  misc_feature (1283)..(1283): n equals a,t,g, or c
  misc_feature (1307)..(1307): n equals a,t,g, or c
  misc_feature (1313)..(1313): n equals a,t,g, or c
ctgacagnaattcgggcagagaccaggactgactgaagccatgaagggaacagaatgggtagaacccagaggaccccacagtcattgctgagaatgagctcctgggagctgcagccgccattgaggctgcagccaaaaagctagagcagctgaagccccgggccaaacccaaggaggcagatgagtccttgaactttgaggagcagatactagaagctgccaagtccattgcagcagccaccagtgcactggtaaaggctgcgtcggctgcccagagagaactagtggcccaagggaaggtgggtgccattccagccaatgcactggacgatgggcagtggtcccagggcctcatttctgctgcccggatggtggctgcggccaccaacaatctgtgtgaggcagccaatgcagctgtacaaggccatgccagccaggagaagctcatctcatcagccaagcaggtagctgcctccacagcccagctccttgtggcctgcaaggtcaaggctgaccaggactcggaggcaatgaaacgacttcaggctgctggcaacgcagtgaagcgagcctcagataatctggtgaaagcagcacagaaggctgcagcctttgaagagcaggagaatgagacagtggtggtgaaagagaagatggttggcggcattgcccagatcatcgcagcacaggaagaaatgcttcggaaggaacgagagctggaagaggcgcggaagaaactggcccagatccggcagcagcagtacaagtttctgccttcagagcttcgagatgagcactaaagaagcctcttctatttaatgcagacccggcccagagactgtgcgtgccactaccaaagccttctgggctgtcggggcccaacctgcccaaccccagcactccccaaagtgcctgccaaaccccagggcctggccccgcccagtcccgcagtacatcccctgtcccctccccaaccccaagtgccttcatgccctagggccccccaagtgcctgcccctccccagagtattaacgctccaagagtattattaacgctgctgtacctcgatctgaatctgccggggccccagcccactccaccctgccagcagcttccagccagtccccacagcctcatcagctctcttcaccgttttttgatactatcttcccccacccccagctacccataggggctgcagagttataagccccaaacaggtcatgctccaataaaaatgattctacctacaaaaaaaaaaaaaaaaaggggggsgcccggncccaattcccctattggggggcgnttacantt

SEQ ID NO: 807 - DNA, 2645 bp, Homo sapiens
  misc_feature (1324)..(1324): n equals a,t,g, or c
  misc_feature (2645)..(2645): n equals a,t,g, or c
tcgacccacgcgtccggtaatcttcaaatatgcgcatggcgagtattatggtctgggtgatgatcatcatggtgattctggtgctgggctacggaatatttcactgctacatggagtactcccgactgcgtggtgaggccggctctgatgtctctttggtggacctcggctttcagacggatttccgggtgtacctgcacttacggcagacctggttggcctttatgatcattctgagtatccttgaagtcattatcatcttgctgctcatctttctccggaagagaattctcatcgcgattgcactcatcaaagaagccagcagggctgtgggatacgtcatgtgctccttgctctacccactggtcaccttcttcttgctgtgcctctgcatcgcctactgggccagcactgctgtcttcctgtccacttccaacgaagcggtctataagatctttgatgacagcccctgcccatttactgcgaaaacctgcaacccagagaccttcccctcctccaatgagtcccgccaatgccccaatgcccgttgccagttcgccttctacggtggtgagtcgggctaccaccgggccctgctgggcctgcagatcttcaatgccttcatgttcttctggttggccaacttcgtgctggcgctgggccaggtcacgctggccggggcctttgcctcctactactgggccctgcgcaagccggacgacctgccggccttcccgctcttctctgcctttggccgggcgctcaggtaccacacaggctccctggcctttggcgcgctcatcctggccattgtgcagatcatccgtgtgatactcgagtacctggatcagcggctgaaagctgcagagaacaagtttgccaagtgcctcatgacctgtctcaaatgctgcttctggtgcctggagaagttcatcaaattccttaataggaatgcctacatcatgattgccatctacggcaccaatttctgcacctcggccaggaatgccttcttcctgctcatgagaaacatcatcagagtggctgtcctggataaagttactgacttcctcttcctgttgggcaaacttctgatcgttggtagtgtggggatcctggctttcttcttcttcacccaccgtatcaggatcgtgcaggatacagcaccacccctcaattattactgggttcctatactgacggtgatcgttggctcctacttgattgcacacggtttcttcagcgtctatggcatgtgtgtggacacgctgttcctctgcttcttggaggacctggagaggaatgacggctcggccgagaggcnttacttcatgtcttccaccctcaagaaactcttgaacaagaccaacaagaaggcagcggagtcctgaaggccccgtgctccccacctctcaaggagtctcatgccgcagggtgctcagtagctgggtctgttcccccagccccttgggctcacctgaagtcctatcactgccgctctgcccctccccatgagccagatcccaccagtttctggacgtggagagtctggggcatctccttcttatgccaaggggcgcttggagttttcatggctgcccctccagactgcgagaaacaagtaaaaacccattggggcctcttgatgtctgggatggcacgtggcccgacctccacaagctccctcatgcttcctgtcccccgcttacacgacaacgggccagaccacgggaaggacggtgtttgtgtctgagggagctgctggccacagtgaacacccacgtttattcctgcctgctccggccaggactgaaccccttctccacacctgaacagttggctcaagggccaccagaagcatttctttattattattattttttaacctggacatgcattaaagggtctattagctttctttccgtctgtctcaacagctgagatggggccgccaaggagtgccttccttttgctccctcctagctgggagtgacgggtgggagtgtgtgtgcccaggtgggggtgtctcctggctgggaaggagggaaagggagggagagttttgcgggggttggcagtggagagcaggctggagaggagatggctaatagctgtttaatggaaacctgctgggctggagggagttaggctgaatttcccgacttcctctgccagttattgacacagctctctttgtaagagaggaaagaaactaaacccacccaagggatgatttcagggggagaggtggagggcagatgtcctgggcaaaccgggcccctctgcccacacacctcacttgatccttttgccaaacttgtcaaactcaggggaactggcttcccagttgcccctttgccatattccaagtccccctcagacttcatgtctctgctcatcagcactgtcccaggatcctggagagggagaacccctggccccaggggaaagaggggggggtctcccgtttcctgtgcctgcaccagccctgcccccattgcgtctgcacacccctgcgtgtaactgcattccaaccactaataaagtgcctattgtacaggtmaaaaaaaaaaaaaaaaaaaaaaaaaaaaaaaaaaaaaaaaaaaaaaaaaaaaaaaaaaaaaaaaaaaaaaaaaggggggggn

SEQ ID NO: 808 - DNA, 851 bp, Homo sapiens
  misc_feature (847)..(847): n equals a,t,g, or c
gggcgccgaggagagcggcgcggcgtgcgcgggcacgaggcgtagtggtctcccctaaggctgaggcggcggcgggcgcgcggcggcggcgggcgtgcgaggctgttgtgctcccggctctcgtgtttcccctcctgagcgggtggaggaggcccaagcggtgctgggcgcgctcccccttcctttccctccggcgtcctctcccggccctctcgcgctgcactgtctctccgacgcaagactgtcccggcccggatatggctcgtggacagcagaaaattcagtctcagcagaaaaatgccaaaaagcaagctggacaaaagaagaaacaaggacatgaccaaaaggctgctgccaaagctgccttaatatatacctgcactgtctgtaggacacaaatgccagaccctaagaccttcaagcagcactttgagagcaagcatcctaagactccacttcctccagaattagctgatgttcargcataaggttgkttacaggtgaattcatgacacctttgactcttctactggctyaaaccttaagtaacatacctgcagctgcttttctaacaaactggtgatcagcaaaaataaaggggctacagaaacactmatttttatgctgttccctcttgggcttyatgcaaagacaattctgtgkaaatgkacagktgactctkawttggaaatatgaaaatcagkccatccttgttataaaaaatttttttacaattgtaattatattgatgttcatattgtgtaaaataactcatttaataaaatagtactttgatttacgacaaaaaaaaaaaaaaaaaaaaaaaaaaaaaaaaaaaaaaaaaaanaaaa

SEQ ID NO: 809 - DNA, 1958 bp, Homo sapiens
  misc_feature (1724)..(1724): n equals a,t,g, or c
  misc_feature (1843)..(1843): n equals a,t,g, or c
  misc_feature (1850)..(1850): n equals a,t,g, or c
  misc_feature (1864)..(1864): n equals a,t,g, or c
  misc_feature (1875)..(1875): n equals a,t,g, or c
  misc_feature (1907)..(1907): n equals a,t,g, or c
  misc_feature (1911)..(1911): n equals a,t,g, or c
  misc_feature (1936)..(1936): n equals a,t,g, or c
tcaccaaccatgcaaatgtgaatgagggcatsgttcccaytkcgatgctggttgccaacgatcagatggcgctgggcgcaatgcgcgccattaccgagtccgggctgcgcgttggtgcggatatctcggtagtgggatacgacgataccgaagacagctcatgttatatcccgccgttaaccaccatcaaacaggattttcgcctgctggggcaaaccagcgtggaccgcttgctgcaactctctcagggccaggcggtgaagggcaatcagctgttgcccgtctcactggtgaaaagaaaaaccaccctggcgcccaatacgcaaaccgcctctccccgcgcgttggccgattcattaatgcagctggcacgacaggtttcccgactggaaagcgggcagtgagcgcaacgcaattaatgtgagttagctcactcattaggcaccccaggctttacactttatgcttccggctcgtatgttgtgtggaattgtgagcggataacaatttcacacaggaaacagctatgaccatgattacgccaagctctaatacgactcactatagggaaagctggtacgcctgcaggtaccggtccggaattcccgggtcgacccacgcgtccgaccgaaacggacacggactgaatgttacttttcctcctctcctaagtggaaacgacttccaaacagttgaggaaggcagtaatgtgaagttggtttgcaatgtgaaagccaacccccaggctcaaatgatgtggtacaaaaacagtagtctcctcgatttagagaaaagccgtcaccaaatccaacagacaagtgagtcttttcagctgtcaatcaccaaagtcgagaagcctgacaacggaacctacagttgtattgcaaagtcatctctgaaaacggagagcttggactttcacctgattgttaaagataaaactgtgggtgtaccaatagagcccattattgctgcatgtgttgtgatctttctgacattgtgctttggactgattgctagaagaaagaaaataatgaagctctgcatgaaggataaagaccctcacagtgaaacagctctatgagaaagctgagatgccatcgaatacagagagagttttgcatcaggacctccacaatttatgtagtcccatctgtatttattgctattattaaattcactcctgtcactcctgtttcattaatcacttaacagtagttgttaggactaatttgatacacttgtggaacatttttatggaaagagctattaagaatgaaaagtaagattttgttaagtcttctccttgaagtatatgttaattaattgagatttgttccaaataggttggtaatcatttactgtttagtgtgttttttttctaggtaggagatacttgggtctcacaaattggtgcaaagccaaaaaaaaaaaaaaaagggcggccgctctagaggatccaagcttacgtacgcgtgcatgcgacgtcatagctcttctatagtgtcacctaaattcaattcactggccgtcgttttacaacgtcgtgactgggaaaaccctggcgttacccaacttaatcgccttgcagcacatccccctttcgccagctggcgtaatagcgaagaggcccgcaccgatcgcccttcccaacagttgcgcagcctgaatggcgaatgggacgcgccctgtagcggcgcattaagcgcggcgggtgtggtggntacgcgcagcgtgacccgctacacttgccagcgccctagcgcccgtcctttcgctttcttcccttcctttcttgccacgttcgcccggctttccccgtcaagctctaaatcgggggctncctttanggttcccatttagngctttaccggnaccttgaccccaaaaaaacttggattaagggngaanggttcacgtaaatggggcccattgnccctgatagaacgggttttttc

SEQ ID NO: 810 - DNA, 2366 bp, Homo sapiens
gctcgtgccgcccagcccctggccgactataaagtgtcgagcttctcctcgcgagagacttagtgctcatgctcgctgcaggggtcggaggtcagggcgagcgtctcgcaggccgtaggaggaagatggcggtggagtcgcgcgttacccaggaggaaattaagaaggagccagagaaaccgatcgaccgcgagaagacatgcccactgttgctacgggtcttcaccaccaataacggccgccaccaccgaatggacgagttctcccggggaaatgtaccgtccagcgagttgcagatctacacttggatggatgcaacyttgaaagaactgacaagcttagtaaaagaagtctacccagaagctagaaagaagggcactcacttcaattttgcaatcgtttttacagatgttaaaagacctggctatcgagttaaggagattggcagcaccatgtctggcagaaaggggactgatgattccatgaccctgcagtcgcagaagttccagataggagattacttggacatagcaattacccctccaaatcgggcaccacctccttcagggcgcatgagaccatattaaattctatttactatttgttgaatttatttttccgtcagttatgtaaaataaacatactcttcttcctcccctgattattgccattaagcctttaaattctaaacaaattataatgcatcatctatttaggagttagatttggatgtgctattgtatgattacgaatagtctgtatgtttcaagcccttctgtaaaatatgaagaaaagtgctcttagcattctgtgtaaaactgtactgttaaatatatgtgtgtaatcagcctgagtgtgaaagttaatggaggcctgggaacagggtttatactaagtagtggaggagcgtatggttaagcccaaaggggcagaacaagaaagccacgggattgtatgaaatcaaacatgagtttgtggtgtagactgctgtatgcagttggaaaggacacgtgagagtgagctcaagtggcagcagaggcagtttggaataagctgcggcaagttgaagaagctgtgttggacgagattgccccgccttgatcagggtaccatgacataaaaggttaaagaacaggcaacacaatgagcacttaagtttttaacatgtggggaatagggcattttaaaggctggaaccagttcagaggaaacaagggtttgggtagaggtagaaaggtttaattaaccctggagatctgcaaatggagggaggggtgaaggaggaatcttaagacsgagggagaagagccaaggacaaggtcaggttgaatgagtaggaggtgttcacacatcctcttgtgtgctaggtagtggcgtgcatctgatctgagaggcagtaaagcagtgatgaagacagtgcagcagaacattgaagtcctgattgcagcagtgactctgcaaccttggataaattatttcaatctttattttgtaaaacggagataacggcctataggattgttaagactgaatattttaaaagagcttagaatggtgcctgacaaatgagaaacaataaatactgattattggccataaagtggtattaaaactggatctcttttcttccatggcactactctcattttgaagtttatgaacrgtacgacagtgtattgtaaattccctttagtttgttacagtagccaattgaaaatgtatatcccaaaatttaaaaaaaaaagtacyagcagcaataaaattgcactagttttatctggtacatacaaaaacagccatttaaaatctgatgattctgtggaattggtgtccctgttagcaatggcagagaccagcctggagcctagatctggtgcttcttctgtgctgtggtttaccccaaacctttaggttgtttattcattcagattagatagactggagccataaagttaatttgcacctagctttttggagaatagccatgattaactgctattcgtggtgggggtgggggggaaccctatgatttactatgcagatgaagagggtaggaactaaataaaggactttgtaagccaaagtggttgggctgctttgtcaaattccaccctttgcttggttccaacatggaatttctcctttaaagatttcaatatcccatcaaaagtacagttagagaatacctagtgaatttattgaatataatgctaagaatcaaaagacttgtactagtttacctctggctttggtaagtgtggctttgagtaataactgagctgtttccccgcatataaaatagaaataaataagtagtcatcawaaaaaaaaaaaaaaaaaaaattactcggtccacaagggaattc

SEQ ID NO: 811 - DNA, 1130 bp, Homo sapiens
  misc_feature (203)..(203): n equals a,t,g, or c
  misc_feature (1126)..(1126): n equals a,t,g, or c
gtgaaaacgccaccttaagcttatgtcgcctgtgaatatttaagggaaaaaaacatcccggcaaccaactgctaggcgacggacgctaagcacctcctccccgcggacgtcagcacccgccttttcccgaagtcgcaacacgcaggcgcgctccggctcgctcaccacgcacggaagtgcgcctgcgccaggagacgccccgnccagcccctggccgactataaagtgtcgagcttctcctcgcgagagacttagtgctcatgctcgctgcaggggtcggaggtcagggcgagcgtctcgcaggccgtagaggaagatggcggtggagtcgcgcgttacccaggaggaaattaagaaggagccagagaaaccgatcgaccgcgagaagacatgcccactgttgctacgggtcttcaccaccaataacggccgccaccaccgaatggacgagttctcccggggaaatgtaccgtccagcgagttgcagatctacacttggatggatgcaacyttgaaagaactgacaagcttagtaaaagaagtctacccagaagctagaaagaagggcactcacttcaattttgcaatcgtttttacagatgttaaaagacctggctatcgagttaaggattttctttcttaymgagttaaggagattggcagcaccatgtctggcagaaaggggactgatgattccatgaccctgcagtcgcagaagttccagataggagattacttggacatagcaattacccctccaaatcgggcaccacctccttcagggcgcatgagaccatattaaattctatttactatttgttgaatttatttttccgtcagttatgtaaaataaacatactcttcttcctcccctgattattgccattaagcctttaaattctaaacaaattataatgcatcatctatttaggagttagatttggatgtgctattgtatgattacgaatagtctgtatgtttcaagcccttctgtaaaatatgaagaaaagtgctcttagcattctgtgtaaaactgtactgttaaatatatgtgtgtaatcagcaaaaaaaaaaaaaaaaaaaaaaaaaaaaaaaaaaaaaaaaaaaaaaaaaaaaaaaaaaaaanctcg

SEQ ID NO: 812 - DNA, 1708 bp, Homo sapiens
  misc_feature (1467)..(1467): n equals a,t,g, or c
  misc_feature (1644)..(1644): n equals a,t,g, or c
attttttttttttttttttaaacaagctgaatgttcccatatggttcctgtgcccaaagtttacttttaaataaagagcagtgatatcatatccatgactgacttgggtaaagcactcctgttaaactcaagaaaattatgtcacccccatcctaatccacaaagactgccagtggggtgtgtgtggtgtgtggtgtgtgtgtgtacacttgtatctgtgtgtatatattatatatgtatacacacatatagatataggtagatacagatacatacatctcaaaaaaggcaataacgaaaacatcaaactatgcttgcattgtggcggcagaataagagagttagggtgagggggaaaatggttaagatctattacaattttaaatgactatgatactagcttaacttttaccaaacttgcctgtaactcccctcgaaatagacagacttcttttaaaagaaaggggttctccttacacaaaatgctttgtgttcacatcaatctgtactattcagaacaaaaccagttctgctggcagagattgtgggttcgcagggacatttaagctttcattaaactggaaagcaatcaagtctttatgtctacaaataatacatttcatagttccacaaatttggcagagtttgtgatgacatctaggatgttttcaccaaatcgtagacataaatatggaaatcatcatcaaacttgatgaaatagacggagggcttggcttctacttgatgaatgaccatgccagtccttttcgagccatcttctttggcatattccacttgtttgcctaccaggctgtccacaacttctcctggttccctttctgctggaggtgaatcattggaatcaggcataatgcgaaggtcgccttctttgtaatcatctaagagttggtacatgtacaagacagggtctttctcataggtaatgtaaaaccatgtgttcatgacaggtgcacgtgctaagaccattcccctccactcatctttagaaccatcctctgtctcaaacatatgttccactgctttgccaatcattgtgtctgccaagtgtgcatcgctgattcgagatgtcgcaactctatcagggaggacttcaagcgcagaractctktcatctttattaagttctagtccataaacacagtcaaatccatcgtaktttataagatacaaagaaggatttacaggcacctggtccagaacggttcctttccactgggtaacagggccattcccctctttccacccatgctgaatcctgcagcctacgatgttccgccggggctgggaaacaggtttgctcggacccacactgctccgatgttttttgtgggatgtcctcttcttcatcatgttggcagatactccagcatggcctgcatcagctctggaccgctggccaggtgtctttccgaatggggtcttcattcatctgtatttaacgtgacngcggagctgctggactagggtgaaaattcaatattctccaatttgaaacttttcacagaatgttagtgttctggttaatccaccatccaagtgtctcttttacgagttcagcaaaaatacgtgaaatcacaagcactctctgaycgccgaggctgcagtccacaggcccacgggttncgccgtcgctcgttcgcgtcccgccggccccagcctgagccagacggcgcctccccgcccccgc

SEQ ID NO: 813 - DNA, 889 bp, Homo sapiens
ttttttttttttttttttttttttttttttttttttttttggcmctaawaaaaatttaatatcagaaamcagcatttttttaaccattcacaattaargkggaaagagacaaaattatarggsagccatccatggaakgatttcatgtttacargggayccaaaaaaggggacatttaaaatcactgttccagctwttgaaccaggggaactgcagtcttatcccatgagacttctaactkgctggaagatgccacaagaaaaaaagatcaaagccaatctccttgkgttaagccactgggttaggctgagtattttggtaaattgccacggctagcatctcgggtccatgattgtccmtgygtctcaggtctgtatgtataactawcttctgaccatgttctgttatctggcaagtaatccactggtggaatgatcaattttccattctttggtgaccctgaattgcccgaatatcccccagcaccagtgtcaacagggaggacttctattcgactagacggcagtacaagggggcttgggcggctgtaagatttctccggagaagcactgacggaaagagtagaaccatgaggtctcctggaaggattcagttgagtcccagggctaaactgtggagaagcaaagctgctgttggcagtagggaagtgtttgggagagtttccgtggtaaacggggggattgctgtaggaggggggatgagctagccctcgggcttccccatctagctgggacggatatcgtgcatgacttggaggmtgtactttaaaagtaaacttgttggatacttttgatggactagaacttggctcagcgtgctttctcgggctaggagggtaaagggcatgccgggggctctgggctctgcc

SEQ ID NO: 814 - DNA, 2423 bp, Homo sapiens
  misc_feature (2423)..(2423): n equals a,t,g, or c
agagagagagagagatggcggtcgtggcggtcggagatccgagagctctgcttctctgaaaagcgtgtggctttctggacttgtttcaggccacccacgagccagcgggaaaggattgccagccagagaaagacgaactccgaagtcccaatgcacagatcagcccccagtcaaaccaccaagaggagccgatcgccattttccactactcgtcgtagttgggacgacagcgagagttcgggaaccaacctgaatattgataatgaggactattccaggtatccgccaagagagtacagagcttcgggtagcagaagaggaatggcctatggacatattgactcttatggggcagatgatagtgaggaggagggggctgggcctgttgagcgaccgccagtgagagggaaaactggcaagtttaaagatgataagctgtatgacccagagaaaggggcaaggtctttggctgggccacctcacatttctctagttttagccgtgatgtgagagaggagcgagacaagttagacccagtccctgcagcaagatgctcarctagcagagctgagcttcctgccacaaagtagtgtggcctcacagtcgtcttctgaaggcaagctggctacaaaaggtgacagctcggagagggagagaagggagcaaaatttacctgcacgtcccagcagggctcctgtgagtatttgtggtggtggggaaaacacctcaaagagtgcagaggaacctgtggtcaggcccaaaatcagaaacctggcawgtccaaactgcgtgaaaccaaaaattttttttgatactgatgatgatgacgatatgccacacagtacttccaggtggagggataccgccaatgacaatgagggccactcggatggcctggcaagaagagggagaggcgagagttcaagtggctatcccgagccaaagtaccctgaagacaaacgggaagcgaggagtgaccaagtgaaaccagaaaaggtgccgagacgacgacgcaccatggccgaccctgacttctggacgcacagtgatgattactacaaatactgcgacgaagactctgacagtgacaaagagtggattgctgctctgcgtcggaaatatcgaagccgagagcaaaccctgtcctccagtggcgaaagctgggagactctgccggggaaagaagagcgggaacctccacaggctaaggtgagtgccagcactggcaccagccctggccccggtgctagtgccagtgccggggctggcgccggggccartgctggcagcaatggcagcaattaccttgaagaagttcgagaaccatctcttcaggaagagcaggcatccctggaagaaggagaaattccttggctccagtaccatgagaatgacagtagcagtgagggggataatgattctggtcacgagttgatgcaacctggggtattcatgctggatggaaacaacaaccttgaagatgactccagtgtgagcgaagacctagaagtggattggagcctctttgatggatttgcagatgggttaggagtggctgaagccatttcctatgtggaccctcagttcctcacctacatggcacttgaagaacgcctggcccaggcaatggaaactgcccttgcgcacttggagtctctcgcagtggatgtagaggtggccaatccaccagcaagcaaggagagcattgacgctcttcccgagatcctggtcactgaagatcatggcgcagttggtcaggagatgtgctgccccatctgctgtagcgaatatgtgaagggggaggtggcaactgagctgccgtgccaccactatttccacaagccgtgtgtgtccatctggcttcagaagtcaggcacctgccccgtgtgccgctgcatgttccctcccccactctaaagaccaaggccgtttactcctggtctgattattttccccatctgaaatccacaatactgcaggagccctcttgaaattaacaatggaaataaaaccaatcagtcagttagcctaaacctattgattcctcgtgattatttccaatgtgaaaacagttgtgtatgattgcattaaaaatcatatcatcttttagaggttagaaaagggaaaactaaactttctaaatgctacttgagattgcagtaagaagatacgttttctaacctgaaagttaaatcgcatttgttttcttcagtagaatgggaatgtgttgctgttacttgtaatgtcaagtttatctgttaaatatgtccaaaaggcaaaatcatttttgttgcatgttatgggtcgatgttcctgtaattgcagtgccgtaaaagcttattaaagttgttcttttggttttaaaaaaaaaaaaaaaaaaaaaaaaaaaaaaaaaaaaaaaaaaccccgggggggggccgggn

SEQ ID NO: 815 - DNA, 2772 bp, Homo sapiens
  misc_feature (1253)..(1253): n equals a,t,g, or c
ggcgcggaacaaatgtaaggacttcagacaattttttgctaccagcgaagacctcaacacaaaccagaaaatctatgaccaagagaagtctcatggcgaggagtctcaaggcgagaatactgatggggaggagacccacagcgaggagacccatggtcaggagacaattgaagaccctgtcattcaaggctcagacatggaagaccctcagaaggatgaccctgatgacaaaatctatgaatgtgaggactgtggcctgggctttgtggatctcacagacctcacagaccatcagaaagtccacagcaggaagtgcctggttgacagtcgggagtacacacattctgtaattcacacccattccatcagcgagtatcagagagattacactggagagcagctgtatgaatgtccaaagtgtggggaatcttttattcatagctcattccttttcgagcatcagagaatccatgaacaagaccagttgtattccatgaaggggtgtgatgatggttttattgccctcttgcccatgaagccacggaggaatcgtgctgcagagaggaatcctgctcttgctgggtcggccattcgatgccttttgtgtggacaaggcttcattcatagctctgcccttaatgagcatatgagacttcatagggaagatgatttactggagcagagccagatggctgaggaagctatcattccaggcttagccctcactgagtttcagagaagtcagaccgaagagagactctttgaatgtgcagtctgtggagaatctttcgtcaacccagcagaacttgcagatcacgtaactgttcataagaatgagccctatgagtacgggtcctcctatactcacacctcatttcttactgagcccctcaaaggagctataccattctatgaatgcaaggattgtggtaagtcctttattcatagcacagtcctcactaaacataaggagcttcatctggaagaagaagaagaagatgaagcagcagcagctgcagcagcagcagcccaggaagttgaagccaatgtccatgttccacaagtagttctgaggattcagggcttaaacgtagaggctgctgagccagaagtggaggctgccgagccagaagtggaggctgctgagccagaagtggaggctgctgagccaaacggagaggctgaagggccagatggagaggctgcagagcccattggagaggctggacagccaaatggagaggccgagcagncaaatggggatgctgatgagccagatggtgcaggtattgaagacccagaagaaagagctgaagagccagagggcaaaagctgaagagccagagggagatgccgacgagcctgacggtgtgggaattgaagacccagaagaaggtgaagatcaagagattcaggtagaagaaccatactatgactgccatgaatgcacagaaaccttcacttccagcacagcattcagtgaacacctgaaaactcatgccagcatgatcatatttgagcctgcaaatgcctttggggagtgctcaggctacatcgaacgtgccagcaccagcacaggtggtgccaatcaagctgatgagaagtacttcaaatgtgacgtctgtgggcagctcttcaatgaccgcctgtccctcgccagacaccagaatacccacactggctgagggcatggggtaaaggttagaaaaccttcacctaggacttgacccttaccaaaccacagagaatccaaaccaatccatgataatgtcagtaggagacttaaccttagtgtgttacacacctgacttaacatctctaaactcagattgaaaagagaccgaatgtgcagattccacagtcttaagctttccccttcagatgtcagtgtctgcatgtgggaaagccatagcacacatcttacctttccaagtaatcagattgagaaaaccctatgagtattccagactacagagtttgcccaaatcaactgtaaatgacacttgtgtaacgtatatatagtgtttcatgaggtgtatataaaatagcaaattatgacagaacagtgatcacatatatttggatttatatgatatacagttacagtttactctgcagaggtaccttacctggtattctttgaattttttttttttttggaggaggaagagagcaacaaatttgattatatttttaagtgtcttagatcctgagaaagatttattgtgcattatttgaaccctgtcaatatctttttgagtaattgttttgtttcttacccttaaatagtcttgtgaagctgtaggcatgatagataacatggcttttactccttactgtttgaaaagataagtactttagcttctttctgcagccatttcatctgcrccaacactttggaacctaatactgtgtaaggctttacaatatacggattggctttttgtgacccagattgattggttgccacatgttatgtttgttgaagtggktctcatgcaraaataktcacattgtgtctgggtgttttttttaccacmcatakgkgtgatgkagggatgkaaaccgagcttcctgaacataacttgcgttaagatggtcaccacctgctcagacctatagggtgacacgggagcgcctgcgggaaaaaggtgggaatgcacccctgcgtatagaaagggcttgcgattacaagcccccgggggggttttgatcttctcgccgaaatcaaggcgccgtgctccctggggaataaagcgccccaaggggacg

SEQ ID NO: 816 - DNA, 860 bp, Homo sapiens
  misc_feature (794)..(794): n equals a,t,g, or c
  misc_feature (848)..(848): n equals a,t,g, or c
  misc_feature (856)..(856): n equals a,t,g, or c
ggcagggggtgagagccagagggaagaggaccacagggtgacccagaaacacctcctttcaaaggagccctgagtaagtttgggaagggtggggtgagttggggagcacagggtagtttgatggaggcaacctctgggtggggaagggagcaatgtctcaggatctagtgtgtctaggttctgaagaatgataaattggactggggctgaggttgccctggggtttgagggaacagggctccctgggtatggctctccagggtaagaggaggagacttcccagttcagcctgactgcttcccccacccctccaggtcctgagcctttgcctccaaaaggtctgcagtatctggtgctcttgtctcatgcccacagccgagagtgcagcctggtgcccgggcttcgggggcctggcggccaagatggggggcttgtgtgggagtgctcagcaggccataccttctcctggggaccctctttgagccctacaccttcagaggcacccaagccagcctcccttccacatactactcggagaagttggtgttccgaggccacgagtgggcaggagcttgcagatttggaatctgagcatgatgagaggactcaagaggccaggttgcccaggaagggtgggacccccaccagagaccttcccacctccaggagaggaagarggtgaggaagaagaggacaatgatgaggatgaagargagatgctcagtgatgccagcttatggacctacagmtcctccccawgatgatgcccccagactacttgccttcccctgtcncttgcacaccttaaagaaggggaaacaccaccagcccctgcaggactctcccantcctcctngctg

SEQ ID NO: 817 - DNA, 1818 bp, Homo sapiens
  misc_feature (1785)..(1785): n equals a,t,g, or c
  misc_feature (1809)..(1809): n equals a,t,g, or c
gcgcctctctgtagccgcccgcggagcatcgcagccggcccgggcccccgccagcctccctcctcgcgtccctcggtgtcctccgcgggccggcgcgatgcggctgggcccgaggaccgcggcgttggggctgctgctgctgtgcgccgccgcggccggcgccggcaaggccgaggagctgcactacccgctgggcgagcgccgcagcgactacgaccgcgaggcgctgctgggcgtccaggaagatgtggatgaatatgttaaactcggccacgaagagcagcaaaaaagactgcaggcgatcataaagaaaatcgacttggactcagatggctttctcactgaaagtgaactcagttcatggattcagatgtcttttaagcattatgctatgcaagaagcaaaacaacagtttgttgaatatgataaaaacagtgatgatactgtgacttgggatgaatataacattcagatgtatgatcgtgtgattgactttgatgagaacactgctctggatgatgcagaagaggagtcctttaggaagcttcacttaaaggacaagaagcgatttgaaaaagctaaccaggattcaggtcccggtttgagtcttgaagaatttattgcttttgagcatcctgaagaagttgattatatgacggaatttgtcattcaagaagctttagaagaacatgacaaaaatggtgatggatttgttagtttggaagaatttcttggtgattacaggtgggatccaactgcaaatgaagatccagaatggatacttgttgagaaagacagattcgtgaatgattatgacaaagataacgatggcaggcttgatccccaagagctgttaccttgggtagtacctaataatcagggcattgcacaagaggaggcgcttcatctaattgatgaaatggatttgaatggtgacaaaaagctctctgaagaagagattctggaaaacccggacttgtttctcaccagtgaagccacagattatggcagacagctccatgatgactatttctatcatgatgagctttaatctccgagcctgtctcagtagagtactggctccttttataatttgttaccagctttacttttgtgataaaatattgatgttgtattttacactcttaagtcttaaccacagtcagaattatcttaatgtagattataattttggtcttttaggaaaaaaaaacaaaaatctgatatttatttcaaaacgtattgaagcaacaaaatattaatattgtgccatatgacaacaaagtctttcctaaatactccatctgtttagtactgtattgtggaatatttgagttctatttccatacttgaaaacatggaggattttagagatgcctgaacaatattatttaagtagtatgtgaccgagctataaatttttgtttttgttctaagtagatttaatttgggaactgacaggacaatgtttttaggtttagcattttgtttaaaaacctttaaagaaacctttagaaggacttagacctcacatattaatgttgagaagttctgcttaattttaaaatggtttctataaagggttttattgtatgaaatagaactttatatttttgcatatgtatagatagtaattatatttaatgtataactatagcattatggtgagtggaatttgacattgtccaaacctttttcatttttgagtgattaaaaatgaaatgtcctttgtaaaaaaaaaaaaaaaaaaaaaaaaaaaaaaaaaaaaaaaaaaaaaaaaaaaanaaaaaaaaaaaaaaaaaaaaaaanaaaaaaaaa

SEQ ID NO: 818 - DNA, 2294 bp, Homo sapiens
agcggccgcgcgcgccctcctgcccccgatgctgctgctgctgctccagccgccgccgctgctggcccgggctctgccgccggacgtccaccacctccatgccgagaggagggggccacagccctggcatgcagccctgcccagtagcccggcacctgcccctgccacgcaggaagccccccggcctgccagcagcctcaggcctccccgctgtggcgtgcccgacccatctgatgggctgagtgcccgcaaccgacagaagaggttcgtgctttctggcgggcgctgggagaagacggacctcacctacaggatccttcggttcccatggcagttggtgcaggagcaggtgcggcagacgatggcagaggccctaaaggtatggagcgatgtgacgccactcacctttactgaggtgcacgagggccgtgctgacatcatgatcgacttcgccaggtactggcatggggacgacctgccgtttgatgggcctgggggcatcctggcccatgccttcttccccaagactcaccgagaaggggatgtccacttcgactatgatgagacctggactatcggggatgaccagggcacagacctgctgcaggtggcagcccatgaatttggccacgtgctggggctgcagcacacaacagcagccaaggccctgatgtccgccttctacacctttcgctacccactgagtctcagcccagatgactgcaggggcgttcaacacctatatggccagccctggcccactgtcacctccaggaccccagccctgggcccccaggctgggatagacaccaatgagattgcaccgctggagccagacgccccgccagatgcctgtgaggcctcctttgacgcggtctccaccatccgaggcgagctctttttcttcaaagcgggctttgtgtggcgcctccgtgggggccagctgcagcccggctacccagcattggcctctcgccactggcagggactgcccagccctgtggacgctgccttcgaggatgcccagggccacatttggttcttccaaggtgctcagtactgggtgtacgacggtgaaaagccagtcctgggccccgcacccctcaccgagctgggcctggtgaggttcccggtccatgctgccttggtctggggtcccgagaagaacaagatctacttcttccgaggcagggactactggcgtttccaccccagcacccggcgtgtagacagtcccgtgccccgcagggccactgactggagaggggtgccctctgagatcgacgctgccttccaggatgctgatggctatgcctacttcctgcgcggccgcctctactggaagtttgaccctgtgaaggtgaaggctctggaaggcttcccccgtctcgtgggtcctgacttctttggctgtgccgagcctgccaacactttcctctgaccatggcttggatgccctcaggggtgctgacccctgccaggccacgaatatcaggctagagacccatggccatctttgtggctgtgggcaccaggcatgggactgagcccatgtctcctcagggggatggggtggggtacaaccaccatgacaactgccgggagggccacgcaggtcgtggtcacctgccagcgactgtctcagactgggcagggaggctttggcatgacttaagaggaagggcagtcttgggcccgctatgcaggtcctggcaaacctggctgccctgtctccatccctgtccctcagggtagcaccatggcaggactgggggaactggagtgtccttgctgtatccctgttgtgaggttccttccaggggctggcactgaagcaagggtgctggggccccatggccttcagccctggctgagcaactgggctgtagggcagggccacttcctgaggtcaggtcttggtaggtgcctgcatctgtctgccttctggctgacaatcctggaaatctgttctccagaatccaggccaaaaagttcacagtcaaatggggaggggtattcttcatgcaggagaccccaggccctggaggctgcaacatacctcaatcctgtcccaggccggatcctcctgaagcccttttcgcagcactgctatcctccaaagccattgtaaatgtgtgtacagtgtgtataaaccttcttcttcttttttttttttaaactgaggattgtcattaaacacagttgttttctaaaaaaaaaaaaaaaaaaaaaaaaaaaaaaaaaaaaaaaaaaaaaaaaaaaaaaaagggcggccgctcgcgatctagaactag

SEQ ID NO: 819 - DNA, 899 bp, Homo sapiens
ttttttttttttttttttttttttttcacattgaaaaaaagtttatttaaaaaagttctagcagcaagaacagtaacaaaagaaaaggagagacaaacaaaacaagagggaggttgtatcccatggaacttgtctcctttcttaatcgagttctttatatcgagcaaacatgactcttcgaacagcatctcgrtaagtctcgttggactgtcttttgctggttcttcctgaggctccaacactggggcccctcatccggccttcagcctcctctgatgaagccaatccaggatggccatatcccaggcctgtccctttcctccagccagtagcctgttggacacagcctcctttgctgctagtgtcgatatcttctttatcaacaagtttacgatcactgtcagtttccctggagtacttaatccgtttcctttctggagagtcaaaagactggagcttttccctgcgatcatttcctcttcctttaaactttccctctcgttctctcctttccagataggctagctcctgctcagactgttttatcttccggtggatttccaggttttgcttgtgcaggtctgacagctgctggtgtttgatcagaacttctttattgggaaactgccttctgcaaagcagacaagccagtttattccagtcagtgagtttgtcttcttcattctccttcttggtttgctcctctcgcttctggggctgtgctgtgcggggctgtgggggaggggtctgttcctcctcttcttcctcctcatagtcactgtctcctcmawattmaccaagaggcgatcagtgggttwacactttaggtgagggggactctcttccttttcacagwaggaggaggggsttcytaaagagtcttctgcaagggggttccc

SEQ ID NO: 820 - DNA, 1847 bp, Homo sapiens
  misc_feature (856)..(856): n equals a,t,g, or c
ccgcccttttttttttttttttttttttttttttttttttttttttttttttttttttttttttttttttaagtgttagaaacatttatttgtcaaaaaatttttttaaaaaagggaggagtggagtaaaacaagggtaaatttcagctaatgctgtaccacgatcacaggtcggacataaaaaacaaacaaaacaacaaaacccccaatggtcctagcaatttcagaagagtaacttaagtgttaagagtccagagctaacagaagagtaaaaggctgcttgccactacatggtcattttaaagggaaaggagatgctgcaggtaggcagggagaaggattcaactcctagggaaagcaagataagaggggttccactgcacaggaaaaaggggatgccagcataatccttacctagggctgctcagaggctgagaatataaggaacagagtgaaaggctacagagactagtttcaggaggaaagaaaagtcaacttagaagaattaagaaagaaaacatagttggtcacaaactccttttgtttactgaaacatgaagcaatggaaacatcccggcaaaggggaccgcgcggascaagttctcatatatgaccgcagcccgagggttcagtccgcaattatcctacctccagtttttaaaaggctgagtaccgggctcggtccacatactgctcccgttcataccgggccatgtcatacagagaattccgtgtagctgcggaagcctgagataattcactctctggcccataaccgtagccctctccaactgtggggagcatggctgcagcacgacgcagtgggctcctgtcccttccatagtaggaggaagtngtgctgcagcagcagccatagcagctgaagtggcagcagcgccagagtttggcaataggtgtctgtcatagggatcaacagaagtagagttgaggtggctggtcacagttgtgctttggacttgaggcagatgggacatggtctgctctgcgtagttgtatgcagaagccgctgccgccgctgctactgcctcataagagcggacccggtatcgcttatagtagtcgagtgctccatatgcatcgttgtaatacatggattccccgtagcccatggtgtaaggtgttcgaactgctccatattgttcattatactgctcagtaaagtctgccacacgacccgtacgatctactgggcactctttggaccagtgcccttctttcccacaccgatagcagccactctggtctcccataccagggcgcagtcckaagccggctkgtggacaactgcacrtgcattcktttgccttgaaactctgtgttatcaaggcccctgatggcctccactgcatcctctgcccgctccatgtgtacgaaggcataatctttcacgatgtcacattcgatgaccggaccatactcctcaaacttggctcgaagctccttattggtgcaggtgggactgatgttgcccacatgcaactttgttgaggttttgctcttattcttgctggcttccacgttgatgttcaccccatgaagcttgtaatggtgcaggttgcgtatggcatcctcagctgccgtcttgtcttctatgtgcacaaagccgtaattcttaatgatgtcacattccagcaccttcccatactgctcgaagagtgagcgaatctcctgctctgtagcctcccggggcaggtttccgatgaacagcttcaccatcctgacaagagcccgcacagaaaccagcagggcctcctcctcgcggcgcggacgcttctgacaaaacgctaaaatggcggcggccgcagcagtgctctgagtagaagggg

SEQ ID NO: 821 - DNA, 1677 bp, Homo sapiens
ggaagcacggcggctcgggccgtgggaccggtgagtgtcaacccgaacctatatctgaagcccttcagacgcggaaggggcttgggaggccagtttgccccgcagcggtgaggaagaatgttcacaccctttcyagaaattcttggctggtaaccgcgaaaccgactggagcaggagctgggagaactggagaaaactgctctaatctcacttgactccagctaggagctgatgctgcatcgtaataacatttgcagagcgctttcacaggcgctggagtgacttgtctgagattcctccagaactgagccctttgttggaaccataccccagcccatggtcccatgactaggtggatagtactccttgtacctcctgcaacccagaaccctggctgaccactttgaaggaggatgctccagcaggtcaatggccacaatccggggtctgatggccaagccagggagtacctcagagaagacctgcaggagttcctgggtggggaggtcctgctgtacaaactggatgacctcaccagggtgaatcctgtgacactagagacagtcctgaggtgcctgcaggcccggtacatggcagacacattctacaccaatgctggctgcaccctggtagccttgaaccccttcaagcctgttcctcagctctactcgcccgagctaatgagagagtaccatgctgcgcctcagccccagaaactgaagccccatgtgttcactgtgggtgaacagacctacaggaatgtcaagagcctgattgaaccagtcaaccagtctattgttgtcagtggagaragtggtgctggaaagacatggacgtctcgctgcctaatgaagttctatgctgtggtggccacctcacctgcatcttgggagagccacwwgattgcagagaggatagaacagaggatcctgaactccaaccctgtcatggaagcttttgggaatgcgtgtacactgaggaataacaacagcagtcgctttgggaagttcatccagctccagctgaacagggctcagcaaatgactggagccgcagtccagacctacctcctagagaaaactcgagtggcctgccaggcttccagtgagaggaacttccacatcttctatcagatttgcaaaggagccagtgaggacgagaggctccagtggcaccttcctgagggagctgccttctcctggctgcccaacccagagaggagcttagaagaggattgttttgaggtgaccagagaggccatgctccatttgggcattgacacccctacccagaacaacatctttaaggtcagaagaaaagccacgccacttaagtttggcagagatgacgggcagccctttgcatagagcttttccctggacttggagttggtctttccctgaggatctaggactttgggcccttctgtgctacctccaaggaatcagtcacctctgttctgctgagtctggagaccaggtggtggggtggacggggcataaggaagagtgatgcatacacagtgctagagtacagaatgcagtaagtgatccatgggggcagagagcaaggtaccgcatgatcagaagagagaactagtgctaccgccttgcttgtctagtacattaaaacttacaagtcatgttcacacttctctgctcaaaaaaaaaaaaaaaa

SEQ ID NO: 822 - DNA, 2408 bp, Homo sapiens
  misc_feature (210)..(210): n equals a,t,g, or c
  misc_feature (2395)..(2395): n equals a,t,g, or c
  misc_feature (2406)..(2406): n equals a,t,g, or c
agctcgtcgacccgggaattcgcggccgcgtcgacagattttgcttttattgctaatccttcttctacagagatatctagtattactggaaacattgaattgaatcaacagacttgtcttcttactctgcgagattataataatcgagagaaatcagaagtatctacagatttgattcaggcaaatcctaaacaaggcgcgttaggaarnaagtcatctcaaacgaaaaagaagaagaaggctttcaactccccgaaaacagggcagaataaaacagtgcaatatcccagtgacatcttagagaatgcatctgttgaattattcctagatgcaaataaactgcccacacctgtagtagaacaagttgcacaaataaatgataattcagaactcgagttgacatcagttgtggaaaatacttttccagcacaagatattgtgcacactgttacagtgaaacggaaacgtggaaaatcacagccaaactgtgctctgaaagaacactctatgtctaatatagccagcgtcaagagtccttatgaggcggagaactccggggaagagctggatcagaggtattccaaggccaagccaatgtgtaacacatgtgggaaagtgttttcagaagccagcagtttgagaaggcacatgagaatacataaaggagtcaaaccttacgtctgccacttatgtggaaaggcatttacccaatgtaaccagctgaaaacgcatgtaagaactcatacaggtgagaagccatacaaatgtgaattgtgtgataaaggatttgctcagaaatgtcagctagtcttccatagtcgcatgcatcatggtgaagaaaaaccctataaatgtgatgtatgcaacttacagtttgcaacttctagcaatctcaagattcatgcaaggaagcatagtggagagaagccatatgtctgtgataggtgtggacagagatttgctcaagccagcacactgacctatcatgtccgtaggcatactggagaaaagccttatgtatgtgatacctgtgggaaggcatttgctgtctctagttctcttatcactcattctcgaaaacatacaggtgaaaaaccatacatatgtggtatttgtgggaaaagttttatttcctcaggagagctcaacaaacactttcggtcccatacaggagaaagaccatttatctgcgaattatgtggaaattcttacacagatattaaaaatttaaagaagcacaaaacaaaagtccattctggtgcagataaaactctagactccagtgcagaggatcatactttgagtgaacaggattccatacaaaaaagtcctttatcagaaactatggatgtgaagccttctgatatgactttaccattagctcttccacttgggactgaggaccatcacatgcttctgcctgtcacggatactcagtctcctacatcagatacattgttgaggtcaactgtgaatgggtattcagaaccacagttgatttttttacaacaattatactgactttgtaaggaatatggaattgctaagatatcattggtagcaaacatctctggtaaggtgcatatattcatattaaattcccattcatttgagttgtgaccattatttttcattcactgaagtaaaagcacctgatgctgcatcacaactgcaatgtttgtttttatttttggctttatgtctatactccacagagagctttttaagtaatgaattatgtagcactattttgggtggatgagttttattttcttttaaagctgccttaattccatttttattttgcattttagaattgcccttcatttactaaatcagccagttaatgtgattcagttgtgacctgtgggattttaaaattttcctgccctcataatttaagcaaaatccacgatagtatcagcccaagagtgtgttgctatttgtaagccccatggatcaatacataaactatgcataaaaataaaatttcatattttcgctcgtaaaaatttaggcgctgaataagaattgtgctatttctctattaatatattgttagaaataacttttctaatgaaacaaaaatgtttctcaaaatctagaaaagtgcatataaatttttgttcatttagaactgagtattctggagaaaaccaatggtcagcacttttggtttgagttatctgagattgtattttcaaaatgaattttaagtagatatttggtgtttttatcttgtcaaagacagtttcaaaatttgattcagtttatgttttattccgttctaaaatattggagatgaggaaaatgtacttgagttttgaaatattttggtaagcctctcttactcctgttatgcactttttaaaataaatactgaattccagaaaanaaaaaaaaaanaa

SEQ ID NO: 823 - DNA, 1310 bp, Homo sapiens
  misc_feature (5)..(5): n equals a,t,g, or c
tatgnccacatgtgataataaaatattcaaggccacagatgsaagtcaccaacttacaaagagaatactgaaggtagggtacattaaaaaaatagagaaatgcaataaagaaaatgccacctctgcctaaatcaggaaagagtaaatgcataggcattaaaacagcagctctgcatactacactgcatttctctttgtcaaaaagaattcactgtgtatcattacaaaggtcagtgaataagacgaggcaataaacgtagcgccttggtattagggcaaatttagttttcttttcattttacacatgagggggaaaaaagaagtgtagaactaggaatgctcatctttccattcagtacactaacttttaagtgtgtggcacaaatggaatagagacatgaagtttaatgagatccaagcttccaaaaatgatttcacatttgaaaagctatggaaagatacaattatttactgttttacaaatcaaatgcttaaaccaagtttaaaagttgagaccgaaaaaaaattgatgaagaaaaaatggccaaaaaaattaaacaaaatctcttggtttcctttacagtttctttttttgcgttttatttttttcaaattgcattttacagtagaaatgcagaccactttggatagctatggctcgatacttctgggtgccctcctcctaagacatcctcttcttacattccactgaacagaaaaccatcccttctactggcatgaacttctgcccaatgaggcatttgctgcagcaagagcacagaaagcactctgtggatgcatgccagctgaaattgttataggtcacscgctgcacttctgggtcgatggcattgtggcatccttgacacaccacagcgtgattcttcacatagcagggcttgcacacgggcttgtcattgaccatcacgtatatctccccagctagaatgctatcacagtcaaagcagcagaagtgtttcaggtgccaattctggttttctgcctgggtatactcattgctgaatatcagctcgtcacagccagcacatcggggtttctcgctgtcacagtaatgtctgccacagtatagcttctcattcttccaaaaataaatcatgtcaaccaggagttcatggcaggtgctgcagacaaaacaagctgggtgccacagtttatcatagccagccctttcggcatagatggctgggtcaccttctytcatactcagtttgcagcaatagcaggactgaaagggaagccatccagaacaacctagtcattagaagactgccatttcttttctttctttc

SEQ ID NO: 824 - DNA, 1206 bp, Homo sapiens
  misc_feature (1206)..(1206): n equals a,t,g, or c
gccttcgcwckagctgggaggctgacggcccgcgggcgtaacggactgcagccgcgagctcctggaggcggcgggatggaggcggcggccgagcctggaaacctggccggcgtcaggcacatcatcctggtcctctcaggaaaggggggcgttgggaaaagcaccatctccacggagctggccctggcactgcgccatgcaggcaagaagcgctgataaagcagtttgtgtccgacgtggcctggggggagctggactacctggtggtggacacgcccccggggacctccgatgagcacatggccaccatagaagccctgcgtccctaccagcccctgggggccctcgtggtcaccacgccccaggcggtgtccgtgggggacgtgaggcgcgagctgaccttctgtaggaagacgggcttgcgggtgatgggaatcgtggagaatatgagcggcttcacctgcccacactgcacggagtgcaccagcgtcttctccaggggcggcggagaggagctggcccagctcgccggggtgcccttcttaggctccgtgcccctggaccctgcgctcatgaggaccctggaggagggccacgacttcatccaggagttccccgggagccccgccttcgctgcactcacctccatagcccagaagattctggacgcgacgcccgcgtgcctcccctgactaaggccaccttgcagccgctttccagggccaccaagggctctgctccagcctctcagagaaacagaggcctgggctcggttcccgggccctgcaggggcaggcccaggcagcgtcagcgggagagcttctccccgaccagcccagccccaggatgtgtcgcaccagcagctctgcctggttggcctgcagtgccgtggtctgcgtgctctgcagctgtgagacgggggcggcctgggctctcttcccatccatgttgcctacctgtgcccctggcagccgcgtgtccacacagttagcggagcgcaggacttctgcagtcctcaggtgaccccgggcctccagcaccctgggtcgctgtcatctgtgtttagctcggggagtgccccctaagggggcgaactgacctcaggcatgtcttgtaactgtagaggcgcctgccattaaacgtgtccgctgctgtggcgacaraaaaaaaaaaaaaaaaaaaaaaaaaaaaaaaaaaaaaaaaaan

SEQ ID NO: 825 - DNA, 1799 bp, Homo sapiens
ggttcctcatccagtccgtgtgcaaatcctgtcagctctgccttcagtcagttgcagggctgggacctattatgatggagcacgagaacgctgcattttatgtccaaatggaaccttccaaaatgaggaaggacaaatgacttgtgaaccatgcccaagaccaggaaattctggggccctgaagaccccagaagcttggaatatgtctgaatgtggaggtctgtgtcaacctggtgaatattctgcagatggctttgcaccttgccagctctgtgccctgggcacgttccagcctgaagctggtcgaacttcctgcttcccctgtggaggaggccttgccaccaaacatcagggagctacttcctttcaggactgtgaaaccagagttcaatgttcacctggacatttctacaacaccaccactcaccgatgtattcgttgcccagtgggaacataccagcctgaatttggaaaaaataattgtgtttcttgcccaggaaatactacgactgactttgatggctccacaaacataacccagtgtaaaaacagaagatgtggaggggagctgggagatttcactgggtacattgaatccccaaactacccaggcaattacccagccaacaccgagtgtacgtggaccatcaacccaccccccaagcgccgcatcctgatcgtggtccctgagatcttcctgcccatagaggacgactgtggggactatctggtgatgcggaaaacctcttcatccaattctgtgacaacatatgaaacctgccagacctacgaacgccccatcgccttcacctccaggtcaaagaagctgtggattcagttcaagtccaatgaagggaacagcgctagagggttccaggtcccatacgtgacatatgatgaggactaccaggaactcattgaagacatagttcgagatggcaggctctatgcatctgagaaccatcaggaaatacttaaggataagaaacttatcaaggctctgtttgatgtcctggcccatccccagaactatttcaagtacacagcccaggagtcccgagagatgtttccaagatcgttcatccgattgctacgttccaaagtgtccaggtttttgagaccttacaaatgactcagcccacgtgccactcaatacaaatgttctgctatagggttggtgggacagagctgtcttccttctgcatgtcagcacagtcgggtattgctgcctcccgtatcagtgactcattagagttcaatttttatagataatacagatattttggtaaattgaacttggtttttctttcccagcatcgtggatgtagactgagaatggctttgagtggcatcagcttctcactgctgtgggcggatgtcttggatagatcamgggctggctgagctggactttggtcagcctaggtgagactcacctgtccttctggggtcttactcctcctcaaggagtctgtagtggaaaggaggccacagaataagctgcttattctgaaacttcagcttcctctagcccggccctctctaagggagccctctgcactcgtgtgcaggctctgaccaggcagaacaggcaagaggggagggaaggagacccctgcaggctccctccacccaccttgagacctgggaggactcagtttctccacagccttctccagcctgtgtgatacaagtttgatcccaggaacttgagttctaagcagtgctcgtgaaaaaaaaaagcagaaagaattagaaataaataaaaactaagcacttctggagacataaaaaaaaaa

SEQ ID NO: 826 - DNA, 4322 bp, Homo sapiens
  misc_feature (82)..(82): n equals a,t,g, or c
aattccggcggacagtgcggaactaaagcaaatggttatgagccttagagtttctgaactccaagtactgttgggctacgcngggagaaacaagcacggacgcaaacacgaacttctcacaaaagccctgcatttgctaaaggctggctgtagtcctgctgtgcaaatgaaaattaaggaactctataggcggcggttcccacagaaaatcatgacgcctgcagacttgtccatccccaacgtacattcaagtcctatgccagcaactttgtctccatctaccattccacaactcacttacgatggtcaccctgcatcatcgccattactccctgtttctcttctgggacctaaacatgaactggaactcccacatcttacatcagctcttcacccagtccatccggatataaaacttcaaaaattaccattttatgatttactggatgaactgataaaacccaccagtctagcatcagacaacagtcagcgctttcgagaaacctgktttgcatttgccttgacaccacaacaagtgcagcaaatcagtagttccatggatatttctgggaccaaatgtgacttcacagtacaggtccmgttaaggttttgtttatcagaaaccagttgtccacaagaagatcacttcccacccaatctttgtgtgaaagtgaatacaaaaccttgcagccttccaggttaccttccacctacaaaaaatggcgtggaaccaaagcgacccagccgaccaattaatatcacctcacttgtccgactgtccacaacagtaccaaacacgattgttgtttcttggactgcagaaattggaagaaactattccatggcagtatatcttgtaaaacagttgtcctcaacagttcttcttcagaggttacgagcaaagggaataaggaatccggatcattctagagctttaattaaagagaagttgactgcggatccagacagtgaaatagctacaaccagcctaagggtttctctactatgtccacttggtaaaatgcggctgacaattccgtgtcgggcccttacatgttctcatctacaatgttttgacgcaactctttacattcagatgaatgagaaaaaaccaacctgggtttgtcctgtctgtgataagaaggctccatatgaacaccttattattgatggcttgtttatggaaatcctaaagtactgtacagactgtgatgaaatacaatttaaggaggatggcacttgggcaccgatgagatcaaaaaaggaagtacaggaagtttctgcctcttacaatggagtcgatggatgcttgagctccacattggagcatcaggtagcgtctcaccaccagtcctcaaataaaaacaagaaagtagaagtgattgacctaaccatagacagttcatctgatgaagaggaagaagagccatctgccaagaggacctgtccttccctatctcccacatcaccactaaataataaaggcattttaagtcttccacatcaagcatctccagtatcccgcaccccaagccttcctgctgtagacacaagctacattaatacctccctcatccaagactataggcatcctttccacatgacacccatgccttacgacttacaaggattagatttctttcctttcttatcaggagacaatcagcattacaacacctccttgcttgccgctgcagcagcagcagtttcagatgatcaagacctcctacactcgtctcggtttttcccgtatacctcctcacagatgtttcttgatcagttaagtgcaggaggcagtacttctctgccaaccaccaatggaagcagtagtggcagtaacagcagcctggtttcttccaacagcctaagggaaagccatagccacaccgtcacaaacaggagcagcacggacacggcatccatctttggcatcataccagacattatttcattggactgattcccaggccctgctgctcccatccccaccccagatcgaatgaacttggcagaaagaagagaactttgtgctctgttttaccttactctgtttagaaaagtatacaagcgtgttttttttcctttttttagggaaaaaattaaaagaaatgtacagagaacaaaactatattttcagttttacttttgtatataaatctaagactgcctgtgtgataaaacacttgtttaaaaaaaaaaaggaaagaaaagaaaaaagaaaaacaagcacccacaaaccaccttcagttcatttttttctggattctgaagatttttcattatttgtcctatggttttggttttatttgactycgatggcatwattttatttgcaataacagaaaaggaattgcatgtatgaagttttcaatcgtgggcttttctttgttgtggggagggggtcgggggatagtttgatttccattttctgaaaacgacagacttggattctgtttgtgtgtgcatattttatccagccttaagttataaagctcatctgtcccgctgcattccctgtgtattttcaggacatggctcgtgggtgtgtgtgttcattgtgtgcgtctgtatgtatttttctgtcatcactgttccctctcctcccgagtgtgcattcagttaatataatcagttgcttgcttctttcaaagtgctttgaaggtcttgaactcaygtgtgagcatctttatcaactatcccaattgcatgttctccatcacatattctcttatttgctctgtaccccctgagaatatgttttagagatattggaataaagctgtctgggtaaggagtaggcttagccgacctatgaataatacactttagtctagttctttattctaaatctggattgccagtattgtgtatttaaaccaagtctgtgaatacctgctttttttggccacagagtaacaagttttcatgtaagatcttcataccaaagtaggaagtaaaaatagcttagaaagctctgtcaggtgttttgtgcagctgacagaggtaatgttacatcacctaaaaaagaaagatacacggtcagttatcctaaaaataaattgtttggaaagtacaatgcaccacatttttgtagaagtctactatttgataaacagttgaaattcaagatgtgtttgacccttagtcatttttactctttggttctgagtatacctattttcttagcgtatctgccttgtttatctttttcttcaccttttaacaagtatgacataggaaagtcatttttttttagaattcatggatcagtctgatctactcttattcataatggaacatgtaaatatactgaaaactgtttttcaggagagaaatatgagttggagggaaggaaaagtggttctactaatgttccaaaatcctcatcagagaaggtatgatgttctcaggtgtggaaaatattttttagttgattgagaatgcaggtttaacagaagagataaggggcataatgactgctggttttccagactggattttcctaccgcaactattaatgttctcagagttgatgaggaccacctttgtgtatacacttgtagttttaaaccttgcattggtaacaaaatgatcaactttaatccaggtagaattcaagatggctgtacttcagttgtatgataaaattaatggttctcatgacttgtgtggcatctaaaaataatgtttttatagcatctctctgccactaaattgttgacttgaattttgggaaaaaaaaaagttggtgttgatatgtatatgtgtgtgtgtatatatgtatttataaacaagtgtgtttgagtaacaagtgagtttcatagtcttcccctacgcatgtgtattccacacacaaatggctgagttatagtcataaaacaatttgcaataaaaaaaaaaccaaaacagattgtcagttaaccaggaaacagttaatgttttttaatgaatctggcattatagtgagcaaatgtcgtattaatttaggctaatttctaatactaccataatttgtgtctaaatttctgttggggtagaaattactaaaattgtggggagttttttctgatttttacattgctttaggaaacatttttactaattcagctgtcttaggtaaaatgaatagttttcttcctgtttttttatgtgtcattgttagtggtctcagaattctgatcagtaactttgtgtatgatgctgaattacaaaccgtttgaatgatccagttgaaaacgtatccctctactttcttcagttgtakgataaaattaatggttctcatgacttgtgtggcatctaaaaataatgtttttatagca

SEQ ID NO: 827 - DNA, 1599 bp, Homo sapiens
ggaggccgctgcccgaaatgacctggaagaagtccgccagttccttgggagtggggtcagccctgactkggccaacgaggacggcctgacggccctgcaccagtgctgcattgatgatttccgagagatggtgcagcagctcctggaggctggggccaacatcaatgcctgtgacagtgagtgctggacgcctctgcatgctgcggccacctgcggccacctgcacctggtggagctgmtcatcgccagtggcgccaatctcctggcggtcaacaccgacgggaacatgccctatgacctgtgtgatgatgagcagacgctggactgcctggagactgccatggccgaccgtggcatcacccaggacagcatcgaggccgcccgggccgtgccagaactgcgcatgctggacgacatccggagccggctgcaggccggggcagacctccatgcccccctggaccacggggccacgctgctgcacgtcgcagccgccaacgggttcagcgaggcggctgccctgctgctggaacaccgagccagcctgagcgctaaggaccaagacggctgggagccgctgcacgccgcggcctactggggccaggtgcccctggtggagctgctcgtggcgcacggggccgacctgaacgcaaagtccctgatggacgagacgccccttgatgtgtgcggggacgaggaggtgcgggccaagctgctggagctgaagcacaagcacgacgccctcctgcgcgcccagagccgccagcgctccttgctgcgccgccgcacctccagcgccggcagccgcgggaaggtggtgaggcgggtgagcctaacccagcgcaccgacctgtaccgcaagcagcacgcccaggaggccatcgtgtggcaacagccgccgcccaccagcccggagccgcccgaggacaacgatgaccgccagacaggcgcagagctcaggccgccgcccccggaggaggacaaccccgaagtggtcaggccgcacaatggccgagtagggggctccccagtgcggcatctatactccaagcgactagaccggagtgtctcctaccagctgagccccctggacagcaccaccccccacaccctggtccacgacaaggcccaccacaccctggctgacctgaagcgccagcgagctgctgccaagctgcagcgacccccacctgaggggcccgagagccctgagacagctgagcctggcctgcctggtgacacggtgaccccccagcctgactgtggcttcagggcaggcggggacccacccctgctcaagctcacagccccggcggtggaggctcccgtggagaggaggccgtgctgcctgctcatgtgaggctgttgctcagcatgcaggggccctgtcgcgggcacagcccaaggctgcctccccacggtgcgtgccctggtgctgcgggtgcagcacggaaaccccggcttctactgtacaggacactggcccctctcaggtcagaagacatgcctggagggatgtctggctgcaaagactatttttatcctgcaactcttgataaagggctgttttgccatggaaaaaaaaaaaaaaaaaaaaaa

SEQ ID NO: 828 - DNA, 2443 bp, Homo sapiens
  misc_feature (402)..(402): n equals a,t,g, or c
ctgcgtgagctggagcgctatgtcacctcctgtttgcggaagaaaaggaaacctcaagctgagaaagttgatgtgattgccggctcctccaagatgaagggcttctcgtcctcagagtcggagagctccagtgagtccagctcctctgacagcgaagactccgaaacaggtcctgcctaatcattggacacggactcttaataaaacggtcttcagttccagattccttcccagcaagctatagcttaagtccattttcttccgtgaaagggacaggactccatcaagttatggaattcctcagagccctgggcctgtcccccggggtggattagtcatgtccagcagcacacgcctagtcccgccttcgggaaggctgcctgcctggccagccgcccaggnctctctgtgtaaagactgcctggctgtcctgcccagccttcctggttctctggggtcctctgggtgggtggcatctcctggagggtgatgacaatccccaacacatgcattcatgtggtgctactctgtgtgcaaagccagaccccaagtatgttttctctctttgtcccatccctctttttctgggactttggaccctaactacttccctcctgaaccttgcagtgacatcagtccaggagagctctcgttcagtgtgcggaagaacactctgacctctagagctgtcctagataaggagtgggagctttagaggcaaggcctctagaccctggaaggctcagtgaggctcttcccacagcatgcttctcactggtgccctgtaaggctcgagccaccgctgactctgagccttttggagtctttcctccttcgtctccattgttcccgtgcatttccaaaagcttaagttgcctggtgggcatttccccagtttctttggcctccgtcttctcaagtcacatagggaaagtacctcctggaaccaggctgcagtatgcaggamctgccaggcagscactggtgaagggccttgggcctatcatccccycaaccccacctcaccccacccgcctcctctagtggggtgagtctgggctggtggaccagagagggtgtcacagaccctcagggactgccccatggacacctctgactggtgttaacagtgtgaacattttccccgtcttcagtcccttagaatgacgacagcccctggggttggggcaggcgagtgtggccacatcatccaagccctcccagagacacaaataggcttttttgctctaaaaataaataccagcccttttttggtcacaaatccagcatctcagcagaaaactgcctgacatgaaaagtcccctgaggaactgcatctgcgtttcaggggcttttcattttttctccttttttaaagtgtagattgtgggtgcttcctagaggcctgccttcttctggaactggaagtgggctatcaccatgggcaagcccttgggtgcaggctccccacctgcctgggaactctggcagctctcctcagctccttgggcttgagcagctgcaactgccccagatttgctgtggaagcaggggctagccctggcctcaccagggcctcccggggccctgcattgatgctcaggagttcctgggctgctcttgatcctttctgggcatccagcttccagttaagctctgtttgccaaacaaactattctcagctgccctttggcctgcgcctgatgtgttcctgttgcagtcccgcctgcctgagacaggagcaggcaggagagccttcatgcccagattcccacaggacaattggggagctgctggcattgtctttctgggaagattctgctttcttggaccaaatggcagcctgattaccagtgtcgggcctgcatgctgcccccgacacacgcacgcacgcgcacacacgtgtgcacatgggccatagccacaagccagctctcctccagggtcctttcaacctcgctgtccagggaccctgtccttcttgcccgtggggcttccatctggcagagaacgttcagggcttgttgaacttgaaagctcattagacttaagctgtcacctgtgcttggtgccccaggaacagccagagaggacagtgcccactcacttcttgttggcagcctcctgtgcaggaagtgccagccgggcctcgacgcaccagctggctgtgggtcctgaggaggggcgggaggcggccgctcagtgcagatggggactcctctcctctgccctgaccttaccctccattacctccttcactggagtggggctggggggtgggtggaatcagtgttttaatcggatttttaaaaaacattttatttctttgtacaattaccatcctatgtaaagatgaaatttgtgttgagttgaagattgtcatggaataaagatcacaccgtacttgaggccatcttcatgtaaaaaaaaaaaaaaaaaaaaa

SEQ ID NO: 829 - DNA, 781 bp, Homo sapiens
ggcacgaggtggagcctgtgcgtgccagccgcaacaagcggcccaccttcctgaagatcaagaagccactgtcgtaccgcaagcccatggacacggacctggtgtacatcgagaagtcgcccaactactgcgaggaggacccggtgaccggcagtgtgggcacccagggccgcgcctgcaacaagacggctccccaggccagcggctgtgacctcatgtgctgtgggcgtggctacaacacccaccagtacgcccgcgtgtggcagtgcaactgtaagttccactggtgctgctatgtcaagtgcaacacgtgcagcgagcgcacggagatgtacacgtgcaagtgagccccgtgtgcacaccaccctcccgctgcaagtcagattgctgggaggactggaccgtttccaagctgcgggctccctggcaggatgctgagcttgtcttttctgctgaggagggtacttttcctgggtttcctgcaggcatccgtgggggaaaaaaaatctctcagagccctcaactattctgttccacacccaatgctgctccaccctcccccagacacagcccaggtccctccgcggctggagcgaagccttctgcagcaggaactctggacccctgggcctcatcacagcaatatttaacaatttattctgataaaaataatattaatttatttaattaaaaagaattcttccaaaaaaaaaaaaaaaaaaaaaactcgagggggggcccgtacccaattcgccctatarwgagtcgtattacgcacaaa

SEQ ID NO: 830 - DNA, 1468 bp, Homo sapiens
  misc_feature (1435)..(1435): n equals a,t,g, or c
  misc_feature (1437)..(1437): n equals a,t,g, or c
  misc_feature (1448)..(1448): n equals a,t,g, or c
  misc_feature (1466)..(1467): n equals a,t,g, or c
cccacgcgtccgcccacgcgtccgcccacgcgtccgttcaaagggagcgcacttccgctgccctttctttcgccagccttacgggcccgaaccctcgtgtgaagggtgcagtacctaagccggagcggggtagaggcgggccggcacccccttctgacctccagtgccgccggcctcaagatcagacatggcccagaacttgaaggacttggcgggacggctgcccgccgggccccggggcatgggcacggccctgaagctgttgctgggggccggcgccgtggcctacggtgtgcgcgaatctgtgttcaccgtggaaggcgggcacagagccatcttcttcaatcggatcggtggagtgcagcaggacactatcctggccgagggccttcacttcaggatcccttggttccagtaccccattatctatgacattcgggccagacctcgaaaaatctcctcccctacaggctccaaagacctacagatggtgaatatctccctgcgagtgttgtctcgacccaatgctcaggagcttcctagcatgtaccagcgcctagggctggactacgaggaacgagtgttgccgtccattgtcaacgaggtgctcaagagtgtggtggccaagttcaatgcctcacagctgatcacccagcgggcccaggtatccctgttgatccgccgggagctgacagagagggccaaggacttcagcctcatcctggatgatgtggccatcacagagctgagctttagccgagagtacacagctgctgtagaagccaaacaagtggcccagcaggaggcccagcgggcccaattcttggtagaaaaagcaaagcaggaacagcggcagaaaattgtgcaggccgagggtgaggccgaggctgccaagatgcttggagaagcactgagcaagaaccctggctacatcaaacttcgcaagattcgagcagcccagaatatctccaagacgatcgccacatcacagaatcgtatctatctcacagctgacaaccttgtgctgaacctacaggatgaaagtttcaccaggggaagtgacagcctcatcaagggtaagaaatgagcctagtcaccaagaactccacccccagaggaagtggatctgcttctccagtttttgaggagccagccaggggtccagcacagccctaccccgccccagtatcatgcgatggtcccccacaccggttccctgaacccctcttggattaaggaagactgaagactagccccttttctggggaattactttcctcctccctgtgttaactggggctgttggggacagtgcgtgatttctcagtgatttcctacagtgttgttccctccctcaaggctgggaggagataaacaccaacccaggaattctcaataaatttttattacttaacctgaaaaaaaaaaaaaaaangnggccgttttanaggatccaggttttacgnnc

SEQ ID NO: 831 - DNA, 1600 bp, Homo sapiens
agcccaccaagcccgggctcctgccttccctctttaagggactcagagagaccctctcccgcaacctggaactgggcctcacacaggggagttttgccttcatccacaaggattttgatgtcaaagagactttcttcaatttatccaagaggtattttgatacagagtgcgtgcctatgaattttcgcaatgcctcacaggccaaaaggctcatgaatcattacattaacaaagagactcgggggaaaattcccaaactgtttgatgagattaatcctgaaaccaaattaattcttgtggattacatcttgttcaaagggaaatggttgamcccatttgaccctgtcttcaccgaagtcgacactttccacctggacaagtacaagaccattaaggtgcccatgatgtacagtgcaggcaagtttgcctycacctttgacaagaattttcgttgkcatgtcctcaaactgccctaccaaggaaatgccaccatgctggtggtcctcatggagaaaatgggtgaccacctcgcccttgaagactacctgaccacagacttggtggagacatggctcagaaacatgaaaaccagaaacatggaagttttctttccgaagttcaagctagatcagaagtatgagatgcatgagctgcttaggcagatgggaatcagaagaatcttctcaccctttgctgaccttagtgaactctcagctactggaagaaatctccaagtatccagggttttacaaagaacagtgattgaagttgatgaaaggggcactgaggcagtggcaggaatcttgtcagaaattactgcttattccatgcctcctgtcatcaaagtggaccggccatttcatttcatgatctatgaagaaacctctggaatgcttctgtttctgggcagggtggtgaatccgactctcctataattcaggacacgcataagcacttcgtgctgtagtagatgctgaatctgaggtatcaaacacacacaggataccagcaatggatggcaggggagagtgttccttttgttcttaactagtttagggtgttctcaaataaatacagtagtccccacttatctgagggggatacattcaaagacccccagcagatgcctgaaacggtggacagtgctgaaccttatatatattttttcctacacatacatacctatgataaagtttaatttataaattaggcacagtaagagattaacaataataacaacattaagtaaaatgagttacttgaaygcaagcactgcaataccataacagtcaaactgattatagagaaggctactaagtgactcatgggcgaggagcatagacagtgtggagacattgggcaaggggagaattcacatcctgggtgggacagagcaggacratgcaagattccatcccactactcagaatggcatgctgcttaagacttttagattgtttatttctggaatttttcatttaatgtttttggaccatggttgaccatggttaactgagactgcagaaagcaaaaccatggataagggaggactactacaaaagcattaaattgatacatattttttaaaaaaaaaaaaaaa

SEQ ID NO: 832 - DNA, 2601 bp, Homo sapiens
  misc_feature (29)..(29): n equals a,t,g, or c
  misc_feature (38)..(38): n equals a,t,g, or c
  misc_feature (44)..(44): n equals a,t,g, or c
  misc_feature (2584)..(2584): n equals a,t,g, or c
  misc_feature (2588)..(2588): n equals a,t,g, or c
  misc_feature (2594)..(2594): n equals a,t,g, or c
agaccaaacacgaataccacgcactgatnagggcaaanctggtnacgcctgacaggtcaccggtaccggaattcccgggtcgacccacgcgtccggaaggattgaccagttaaccaacatcttagcccccatggctgttggccagattatgacatttggctccccagtcatcggctgtggctttatttcgggatggaacttggtatccatgtgcgtggagtacgtcctgctctggaaggtttaccagaaaaccccagctctagctgtgaaagctggtcttaaagaagaggaaactgaattgaaacagctgaatttacacaaagatactgagccaaaacccctggagggaactcatctaatgggtgtgaaagactctaacatccatgagcttgaacatgagcaagagcctacttgtgcctcccagatggctgagcccttccgtaccttccgagatggatgggtctcctactacaaccagcctgtgtttctggctggcatgggtcttgctttcctttatatgactgtcctgggctttgactgcatcaccacagggtacgcctacactcagggactgagtggttccatcctcagtattttgatgggagcatcagctataactggaataatgggaactgtagcttttacttggctacgtcgaaaatgtggtttggttcggacaggtctgatctcaggattggcacagctttcctgtttgatcttgtgtgtgatctctgtattcatgcctggaagccccctggacttgtccgtttctccttttgaagatatccgatcaaggttcattcaaggagagtcaattacacctaccaagatacctgaaattacaactgaaatatacatgtctaatgggtctaattctgctaatattgtcccggagacaagtcctgaatctgtgcccataatctctgtcagtctgctgtttgcaggcgtcattgctgctagaatcggtctttggtcctttgatttaactgtgacacagttgctgcaagaaaatgtaattgaatctgaaagaggcattataaatggtgtacagaactccatgaactatcttcttgatcttctgcatttcatcatggtcatcctggctccaaatcctgaagcttttggcttgctcgtattgatttcagtctcctttgtggcaatgggccacattatgtatttccgatttgcccaaaatactctgggaaacaagctctttgcttgcggtcctgatgcaaaagaagttaggaaggaaaatcaagcaaatacatctgttgtttgagacagtttaactgttgctatcctgttactagattatatagagcacatgtgcttattttgtactgcagaattccaataaatggctgggtgttttgctctgtttttaccacagctgtgccttgagaactaaaagctgtttaggaaacctaagtcagcagaaattaactgattaatttcccttatgttgaggcatggaaaaaaaattggaaaagaaaaactcagtttaaatacggagactataatgataacactgaattcccctatttctcatgagtagatacaatcttacgtaaaagagtggttagtcacgtgaattcagttatcatttgacagattcttatctgtactagaattcagatatgtcagttttctgcaaaactcactcttgttcaagactagctaatttatttttttgcatcttagttatttttaaaaacaaattcttcaagtatgaagactaaattttgataactaatattatccttattgatcctattgatcttaaggtatttacatgtatgtggaaaaacaaaacacttaactagaattctctaataaggtttatggtttagcttaaagagcacctttgtatttttattatcagatggggcaacatattgtatgaagcatatgtagcacttcacagcatggttatcatgtaagctgcaggtagaagcaaagctgtaaagtagatttatcacacaatgactgcatacagacttcaaatatgtcaatagtttggtcatagaacctagaagccaaaagccacacagaagggcaagaatcccaatttaactcatgttatcatcattagtgatctgtgttgtagaacatgagggtgtaagccttcagcctggcaagttacatgtagaaagcccacacttgtgaaggttttgttttacaaatcacttgatttaacacactcaggtagaatatttttatttttactgttttatacccagaagttatttctacattgttctacagcaagaatattcataaaagtatccctttcaaatgcctttgagaagaatagaagaaaaaaagtttgtatatattttaaaaaattgttttaaaagtcagtttgcaacatgtctgtaccaagatggtactttgccttaaccgtttatatgcactttcatggagactgcaatacgttgctatgagcactttctttatccttggagtttaatcctttgcttcatctttctacagtatgacataatgatttgctatgttgtaaaatctttgtaaaaaatttctatataaaaatattttgaaaatcttaaaaaaaaaaaaaaaaaangggnggccgntttaaag

SEQ ID NO: 833 - DNA, 948 bp, Homo sapiens
  misc_feature (716)..(716): n equals a,t,g, or c
  misc_feature (819)..(819): n equals a,t,g, or c
  misc_feature (857)..(857): n equals a,t,g, or c
  misc_feature (906)..(906): n equals a,t,g, or c
  misc_feature (909)..(909): n equals a,t,g, or c
  misc_feature (942)..(942): n equals a,t,g, or c
tacgccagctcgaaattaaccctcactaaagggaacaaaagctggagctccaccgcggtggcggccgctctagaactagtggatcccccgggctgcaggaattcggcacgagtgcgggggacagcggcggccggaagctggctgagccggcctttggtaacgccacctgcacttccgggggcgtcgagcctggaggtagaatcttcccagtaggcggcgcgggagggaaaagaggattgaggggctaggccgggcggatcccgtcctcccccgatgtgagcagttttccgaaaccccgtcaggcgaaggctgcccagagaggtggagtcggtagcggggccgggaacatgaggcagtctctcctattcctgaccagcgtggttcctttcgtgctggcgccgcgacctccggatgacccgggcttcggcccccaccagagactcggtaaagacccaggggagttggcttaggccggcgcctggagcgctcgtttgagggaagagcaggggagctgggtctatcaggtgtttgggggcggggtattggcgatggtggcgcgtccctaagttttcagtgtagaagggggtgtggctctcggagtttggggaaagaataaaggagatgggcctgtctctgagtgggaaagggctactggacgggctccatgtagtgactgagcgcctgagaggggtttgctccctagctttgtgttcggngagggtgttgggaaagcggtaaggagtagggtggctggatcttgtttggagagggagatgtggtcagggttcttgccttagtagggaacaaatctagtgttgngtgttcctaccagagccagaaaggaaggcccaaagctncagaattcttcctggtcctcgaaggagggaactagaatttctgctgtangangtacttatgcagtaatctcgttggaaggcgganactgga

SEQ ID NO: 834 - DNA, 2593 bp, Homo sapiens
ataagagacagcacgacaggtttcccgactggaaagcgggcagtgagcgcaacgcaattaatgtgagttagctcactcattaggcaccccaggctttacactttatgcttccggctcgtatgttgtgtggaattgtgagcggataacaatttcacacaggaaacagctatgaccatgattacgccaagctcgaaattaaccctcactaaagggaacaaaagctggagctccaccgcggtggcggccgctctagaactagtggatcccccgggctgcaggaattcggcacgagctcgcctgctgccctcttgcgcgcgggaagcagcaccaagttcacggccaacgccttggcactagggtccagaatggctacaacagtccctgatggttgccgcaatggcctgaaatccaagtactacagactttgtgataaggctgaagcttggggcatcgtcctagaaacggtggccacagccggggttgtgacctcggtggccttcatgctcactctcccgatcctcgtctgcaaggtgcaggactccaacaggcgaaaaatgctgcctactcagtttctcttcctcctgggtgtgttgggcatctttggcctcaccttcgccttcatcatcggactggacgggagcacagggcccacacgcttcttcctctttgggatcctcttttccatctgcttctcctgcctgctggctcatgctgtcagtctgaccaagctcgtccgggggaggaagcccctttccctgttggtgattctgggtctggccgtgggcttcagcctagtccaggatgttatcgctattgaatatattgtcctgaccatgaataggaccaacgtcaatgtcttttctgagctttccgctcctcgtcgcaatgaagactttgtcctcctgctcacctacgtcctcttcttgatggcgctgaccttcctcatgtcctccttcaccttctgtggttccttcacgggctggaagagacatggggcccacatctacctcacgatgctcctctccattgccatctgggtggcctggatcaccctgctcatgcttcctgactttgaccgcaggtgggatgacaccatcctcagctccgccttggctgccaatggctgggtgttcctgttggcttatgttagtcccgagttttggctgctcacaaagcaacgaaaccccatggattatcctgttgaggatgctttctgtaaacctcaactcgtgaagaagagctatggtgtggagaacagagcctactctcaagaggaaatcactcaaggttttgaagagacaggggacacgctctatgccccctattccacacattttcagctgcagaaccagcctccccaaaaggaattctccatcccacgggcccacgcttggccgagcccttacaaagactatgaagtaaagaaagagggcagctaactctgtcctgaagagtgggacaaatgcagccgggcggcagatctagcgggagctcaaagggatgtgggcgaaatcttgagtcttctgagaaaactgtacaagacactacgggaacagtttgcctccctcccagcctcaaccacaattcttccatgctggggctgatgtgggctagtaagactccagttcttagaggcgctgtagtattttttttttttttggctcatccttaggatacttcttttaagtgggagtctcaggcaactcaagtttagacccttactctttttgtttgttttttgaaacaggatcttgctctgtcacccaggcttgagtgcagtggtgcgatcacagcccagtgcagcctcgaccacctgtgctcaagcaatcctcccatctccatctcccaaagtgctgggatgacaggcgtgagccacagctcccagcctaggcccttaatcttgctgttattttccatggactaaaggtctggtcatctgagctcacgctggctcacacagctctaggggcctgctcctctaactcacagtgggttttgtgaggctctgtggcccagagcagacctgcatatctgagcaaaaatagcaaaagcctctctcagcccactggcctgaatctacactggaagccaacttgctggcacccccgctccccaacccttcttgcctgggtaggagaggctaaagatcaccctaaatttactcatctctctagtgctgcctcacattgggcctcagcagctccccagcaccaattcacaggtcacccctctcttcttgcactgtccccaaacttgctgtcaattccgagatctaatctccccctacgctctgccaggaattctttcagacctcactagcacaagcccggttgctccttgtcaggagaatttgtagatcattctcacttcaaattcctggggctgatacttctctcatcttgcaccccaacctctgtaaatagatttaccgcatttacggctgcattctgtaagtgggcatggtctcctaatggaggagtgttcattgtataataagttattcacctgagtatgcaataaagatgtggtggccactctttcatggtggtggcagcagttaaaaaaaaaaaaaaaaaaaaaaaaaaaaaaaaaa

SEQ ID NO: 835 - DNA, 4875 bp, Homo sapiens
ggtggtgtgtctctgtgtgtgtggtgtgtctctgtggtgtgtctgtcttgtgtgttgtgtctgcatgtctgcatggtgcgtgtgtctctgtgtctgtgtctgtgtgttgtgtggcgtgtgtgttggtggggtgtgtggaatcacgtggtacccaaggggagaatcccccagccccaggtgtgaggaacagcagggaattctcactcaggggcccagatcacaacatgccccacgtgaacatggacccacagcctcgctcctgggggcgtgggcaggagacgccgtggacgtggacccacagcctcgctcctgggggcgtgggcaggagacgccgtggacgtggacccacagcctcgctcctgggggcgtgggcaggagacgccgtggacgtggacccacagcctcgctcctgggggcgtgggcaggagacgccgtggacgtggacccacagcctcgctcctgggggcgtgggcaggagacgccgtggacgtggacccacagcctygstcctgggggcgtgggcargaracaccgwggctgsactgtgggcaagtgtgtgaacatccatgttactttcatgctttttctttattttgcccwataagcccgttgtttttgcctggaacatgccagaagacgccagatcgttcacatggcggccatgacaaggctgcgccctgggacagcttgctgggtgcggggggtcgccgaggcgccgcacccctcccctggcctgtcttgccctcaggggtcagtagcggtccctgaggatgtttctcctccgggttttcctgaagtttaaaacatccagccgccttggcgcgtgttcggcccagccgggcgtgcgctggggaaacctgtgcggggagcatctgcggtgcggcctcctycagggcagggctctggccagaagagaggagcgcgttccccctcccgcctccgcatgtctgaccaccggccgaggcaggttcagaagcgtcactgtcctcgacccgattggacacgacttactgaagctcagatggtgcctgggcagggaaggccagcgtgcccaccccagcggccccccggaragcaccagagagggctggacgaggcgagagggggcctggaggaggcgagagcagyktcctttgcttcccaggcctgccgggcctccctggcccccccggacccccgggacctgtggtctacgtgtcggagcaggacggatccgtcctgagcgtgccgggacctgagggccggccgggtttcgcaggctttcccggacctgcaggacccaagggcaacctgggctctaagggcgaacgaggctccccgggacccaagggtgagaagggtgaaccgggcagcatcttcagccccgacggcggtgccctgggccctgcccagaaaggagccaagggagagccgggcttccgaggacccccgggtccatacggacggccggggtacaagggagagattggctttcctggacggccgggtcgccccgggatgaacggattgaaaggagagaaaggggagccgggagatgccagccttggatttggcatgaggggaatgcccggccccccaggacctccagggcccccaggccctccagggactcctgtttacgacagcaatgtgtttgctgagtccagccgccccgggcctccaggattgccagggaatcagggccctccaggacccaagggcgccaaaggagaagtgggcccccccggaccaccagggcagtttccgtttgactttcttcagttggaggctgaaatgaagggggagaagggagaccgaggtgatgcaggacagaaaggcgaaaggggggagcccgggggcggcggtttcttcggctccagcctgcccggcccccccggccccccaggcccacgtggctaccctgggattccaggtcccaagggagagagcatccggggccagcccggcccacctggacctcagggaccccccggcatcggctacgaggggcgccagggccctcccggccccccaggccccccagggcccccttcatttcctggccctcacaggcagactatcagcgttcccggccctccgggcccccctgggccccctgggccccctggaaccatgggcgcctcctcaggggtgaggctctgggctacacgccaggccatgctgggccaggtgcacgaggttcccgagggctggctcatcttcgtggccgagcaggaggagctctacgtccgcgtgcagaacgggttccggaaggtccagctggaggcccggacaccactcccacgagggacggacaatgaagtggccgccttgcagccccccgtggtgcagctgcacgacagcaacccctacccgcggcgggagcacccccaccccaccgcgcggccctggcgggcagatgacatcctggccagcccccctcgcctgcccgagccccagccctaccccggagccccgcaccacagctcctacgtgcacctgcggccggcrcgacccacaagcccacccgcccacagccaccgcgacttccagccggtgctccacctggttgcgctcaacagccccctgtcaggcggcatgcggggcatccgcggggccgacttccagtgcttccagcaggcgcgggccgtggggctggcgggcaccttccgcgccttcctgtcctcgcgcctgcaggacctgtacagcatcgtgcgccgtgccgaccgcgcagccgtgcccatcgtcaacctcaaggacgagctgctgtttcccagctgggaggctctgttctcaggctctgagggtccgctgaagcccggggcacgcatcttctcctttgacggcaaggacgtcctgaggcaccccacctggccccagaagagcgtgtggcatggctcggaccccaacgggcgcaggctgaccgagagctactgtgagacgtggcggacggaggctccctcggccacgggccaggcctcctcgctgctggggggcaggctcctggggcagagtgccgcgagctgccatcacgcctacatcgtgctctgcattgagaacagcttcatgactgcctccaagtagccaccgcctggatgcrgatggccggagaggaccggcggctcggaggaagcccccaccgtgggcagggagcrgccggccagcccctggccccaggacctggctgccatactttcctgtatagttcacgtttcatgtaatcctcaagaaataaaaggaagccaaagagtgtatttttttaaaagtttaaaacagaagcctgatgctgacattcacctgccccaactctcccctgacctgtgagcccagctgggtcaggcagggtgcagtatcatgccctgtgcaacctcttggcctgatcagaccacggctcgatttctccaggatttcctgctttgggaarccgtgctcgccccagcaggtgctgacttcatctcccacctagcagcaccgttctgtgcacaaaacccagacctgttagcagacaggccccgtgaggcaatgggagctgaggccacactcagcacaaggccatctgggctcctccagggtgtgtgctcgccctgcggtagatgggagggaggctcaggtccctggggctagggggagccccttctgctcagctctgggccattctccacagcaaccccaggctgaagcaggttcccaagctcagaggcgcactgtgacccccagctccggcctgtcctccaacaccaagcacagcagcctggggctggcctcccaaatgagccatgagatgatacatccaaagcagacagctccaccctggccgagtccaagctgggagattcaagggacccatgagttggggtctggcagcctcccatccagggcccccatctcatgcccctggctgggacgtggctcagccagcacttgtccagctgagcgccaggatggaacacggccacatcaaagaggctgaggctggcacaggacatgcggtagccagcacacagggcagtgagggagggctgtcatctgtgcactgcccatggacaggctggctccagatgcagggcagtcattggctgtctcctaggaaacccatatccttaccctccttgggactgaaggggaaccccggggtgcccacaggccgccctgcgggtgaacaaagcagccacgaggtgcaacaaggtcctctgtcagtcacagccacccctgagatccggcaacatcaacccgagtcattcgttctgtggagggacaagtggactcagggcagcgccaggctgaccacagcacagccaacacgcacctgcctcaggactgcgacgaaaccggtggggctggttctgtaattgtgtgtgatgtgaagccaattcagacaggcaaataaaagtgaccttttacactgactcttggtttgcaagcagccttcactgtcacaggaaggacacaattctccaaaaggagttctcaggagtcttttatccctggactgccccactggcagatcccgagtgtgcacaggcacgcacggttacatggggtatgcatgcatggccatacacaggcgtgcagttgtacacaggtgtgcaggagcatccatagtgtgcacaggtacacaggcatgcacgggtgtgtggacacacaccaacactcttaggtctctcctcacagcaggacctgacttgctcccagcaacactacatcctgacagccatccctgtcctggtggacgggtgagtgcaggactcagaggcaggcaggcagtgggtgcagtgagcaggctgcggagggagcaggccctcaggttggggaggcgctgggaggaggattctgatggcggtgtgggcctccccagtgacgctctagcccaatggacaggccagcccacctcaccat

SEQ ID NO: 836 - DNA, 1739 bp, Homo sapiens
  misc_feature (1681)..(1681): n equals a,t,g, or c
cttccactggccgcccactacagcctgcccgasggccgccacggccgcctggacagccccaccttccacctcaccctgcactatcccacggagcacgtgcagttctgggtgggcagcccgtccaccccagcaggctgggtacgcgagggtgacactgtccagctgctctgccggggggacggcagccccagcccggagtatacgcttttccgccttcaggatgagcaggaggaagtgctgaatgtgaatctcgaggggaacttgaccctggagggagtgacccggggccagagcgggacctatggctgcagagtggaggattacgacgcggcagatgacgtgcagctctccaagacgctggagctgcgcgtggcctatctggaccccctggagctcagcgaggggaaggtgctttccttacctctaaacagcagtgcagtcgtgaactgctccgtgcacggcctgcccacccctgccctacgctggaccaaggactccactcccctgggcgatggccccatgctgtcgctcagttctatcaccttcgattccaatggcacctacgtatgtgaggcctccctgcccacagtcccggtcctcagccgcacccagaacttcacgctgctggtccaaggctcgccagagctaaagacagcggaaatagagcccaaggcagatggcagctggagggaaggagacgaagtcacactcatctgctctgcccgcggccatccagaccccaaactcagctggagccaattggggggcagccccgcagagccaatccccggacggcagggttgggtgagcagctctctgaccctgaaagtgaccagcgccctgagccgcgatggcatctcctgtgaagcctccaacccccacgggaacaagcgccatgtcttccacttcggcaccgtgagcccccagacctcccaggctggagtggccgtcatggccgtggccgtcagcgtgggcctcctgctcctcgtcgttgctgtcttctactgcgtgagacgcaaagggggcccctgctgccgccagcggcgggagaagggggctccgccgccaggggagccagggctgagccactcggggtcggagcaaccagagcagaccggccttctcatgggaggtgcctccggaggagccaggggtggcagcgggggcttcggagacgagtgctgagccaagaacctcctagaggctgtccctggacctggagctgcaggcatcagagaaccagccctgctcacgccatgcccgcccccgccttccctcttccctcttccctctccctgcccagccctcccttccttcctctgccggcaaggcagggacccacagtggctgcctgcctccgggagggaaggagagggagggtgggtgggtgggagggggccttcctccagggaatgtgactctcccaggccccagaatagctcctggacccaagcccaaggcccagcctgggacaaggctccgagggtcggctggccggagctatttttacctcccgcctcccytgctggtccccccacctgacgtcttgctgcagagtctgacactggattcccccccctcaccccgcccctggtcccactcctgcccccgccctacctccgccccaccccatcatctgtggacactggagtctggaataaatgctgtttgtcacatcaanaaaaaaaaaaaaaaaaaaaaattcgrggggggcccggtacccaatttgcaggatggga

SEQ ID NO: 837 - DNA, 1229 bp, Homo sapiens
ggcacgagctcgtgccgcttgcaactccacctcagcagtggtctctcagtcctctcaaagcaaggaaagagtactgtgtgctgagagaccatggcaaagaatcctccagagaattgtgaagactgtcacattctaaatgcagaagcttttaaatccaagaaaatatgtaaatcacttaagatttgtggactggtgtttggtatcctggccctaactctaattgtcctgttttgggggagcaagcacttctggccggaggtacccaaaaaagcctatgacatggagcacactttctacagcaatggagagaagaagaagatttacatggaaattgatcctgtgaccagaactgaaatattcagaagcggaaatggcactgatgaaacattggaagtgcacgactttaaaaacggatacactggcatctacttcgtgggtcttcaaaaatgttttatcaaaactcagattaaagtgattcctgaattttctgaaccagaagaggaaatagatgagaatgaagaaattaccacaactttctttgaacagtcagtgatttgggtcccagcagaaaagcctattgaaaaccgagattttcttaaaaattccaaaattctggagatttgtgataacgtgaccatgtattggatcaatcccactctaatatcagtttctgagttacaagactttgaggaggagggagaagatcttcactttcctgccaacgaaaaaaaagggattgaacaaaatgaacagtgggtggtccctcaagtgaaagtagagaagacccgtcacgccagacaagcaagtgaggaagaacttccaataaatgactatactgaaaatggaatagaatttgatcccatgctggatgagagaggttattgttgtatttactgccgtcgaggcaaccgctattgccgccgcgtctgtgaacctttactaggctactacccatatccatactgctaccaaggaggacgagtcatctgtcgtgtcatcatgccttgtaactggtgggtggcccgcatgctggggagggtctaataggaggtttgagctcaaatgcttaaactgctggcaacatataataaatgcatgctattcaatgaatttctgcctatgaggcatctggcccctggtagccagctctccagaattacttgtaggtaattcctctcttcatgttctaataaacttctacattatcaccaaaaaaaaaaaaaaaaaaa

SEQ ID NO: 838 - DNA, 1324 bp, Homo sapiens
gacttagattcagtttattttaattacatatattgtttgatctaatgaagtgttacggcaggacagaagggtgaaattaaaaatctgaaagaaatctttaataatcttatatacttaaaaaagtagtatgcaaactgacagaagaagtattttatttatttataatatcattttgtaaacaatcacactgtgcactttttaattcaacaataagaacaatttttttctagggatttatagcaaaccctatataaagtgaatgacttaatacacgagtgaagatgactagggtagaataatttctgaaaatgtcaaattacagcacttgatacaaagactgatgataactatctgtaccataaaaatttacatgccacgaaaacattaatttataattttaaatatacagtaaaacatagttataaaaagagtattacatttattataaaccagtgaattactcagagaaatatttattaaaacctactaaaaaccagtaaatattgcaactgaggtaaaaatttataagtaaacaaaactatcatttataaggaccaagaagtaaacaaaagggcagacattttctgatgactgtgtctactccttgatattttgaagcagcttcaacaaatgtgactcaataacctgttgaacacttctatagcctagggctacagctagatccatagaattatatccagagtcagtttcaattgttggatcagccccactttctaagagcatctttacacatttcacatgatttccatgtacagcataaagcagaggtgttcctccattccaatcatattcatttacatcaactccacaatcaagcagcattttgacaatatctgtgtagcctttactacaggccaacgacagtgcactttctcgaccttttcctaaaagttggggatcagcaccattctgaagtaggaactctaccacagctatttgcccgtgtgctgcagcccacatcagaggagtaaatccttcttcatccgtgtgattgataacattttcttgttcgatacgagtagccagatagagcatctctccctgagcagccaactggtgaacagacaaagaatttgctaacagaggtgtggtagagacctcatttcctctgtgtttgttggttaaagtggttgactgttttatgggtgagaaatgctttgttgtagagggggtgtagacatgccttacttgaattcccggagaaggagatgtatggatattgcattcagctaagtgaaaaacaaatgtaaacacattaaaagcatttcagtaagagttctatgtcaatgtctacatttgaaaa

SEQ ID NO: 839 - DNA, 1498 bp, Homo sapiens
ggcgcctgtggtcccgagtagctgggattgcaggaaattcgaaatgagtcccatgactatcctcatagagtggccaagtttccagaaaacagaaatcgaaacagatacagagatgtaagcccatatgatcacagtcgtgttaaactgcaaaatgctgagaatgattatattaatgccagtttagttgacatagaagaggcacaaaggagttacatcttaacacagggtccacttcctaacacatgctgccatttctggcttatggtttggcagcagaagaccaaagcagttgtcatgctgaaccgcattgtggagaaagaatcggttaaatgtgcacagtactggccaacagatgaccaagagatgctgtttaaagaaacaggattcagtgtgaagctcttgtcagaagatgtgaagtcgtattatacagtacatctactacaattagaaaatatcaatagtggtgaaaccagaacaatatctcactttcattatactacctggccagattttggagtccctgaatcaccagcttcatttctcaatttcttgtttaaagtgagagaatctggctccttgaaccctgaccatgggcctgcggtgatccactgtagtgcaggcattgggcgctctggcaccttctctctggtagacacttgtcttgttttgatggaaaaaggagatgatattaacataaaacaagtgttactgaacatgagaaaataccgaatgggtcttattcagaccccagatcaactgagattctcatacatggctataatagaaggagcaaaatgtataaagggagattctagtatacagaaacgatggaaagaactttctaaggaagacttatctcctgcctttgatcattcaccaaacaaaataatgactgaaaaatacaatgggaacagaataggtctagaagaagaaaaactgacaggtgaccgatgtacaggactttcctctaaaatgcaagatacaatggaggagaacagtgagagtgctctacggaaacgtattcgagaggacagaaaggccaccacagctcagaaggtgcagcagatgaaacagaggctaaatgagaatgaacgaaaaagaaaaaggccaagattgacagacacctaatattcatgacttgagaatattctgcagctataaattttgaaccattgatgtgcaaagcaagacctgaagcccactccggaaactaaagtgaggctcgctaaccctctagattgcctcacagttgtttgtttacaaagtaaactttacatccaggggatgaagagcacccaccagcagaagactttgcagaacctttaattggatgtgttaagtgtttttaatgagtgtatgaaatgtagaaagatgtacaagaaataaattaggagagattactttgtattgtactgccattcctactgtatttttatactttttggcagcattaaatatttttgttaaatagtcaaaaaaaaaaaaaaaaaaaaaaaaa

SEQ ID NO: 840 - DNA, 6066 bp, Homo sapiens
  misc_feature (6036)..(6036): n equals a,t,g, or c
  misc_feature (6038)..(6039): n equals a,t,g, or c
gcgttggagctcccggaaagttgccggacccggaacgcaggcggagcgcaagtctgtcagccagtcagtccgccagtccgccagcccagtacctctctctcctcggccctcgtaagctgtccgcggtctgtttggcccgaacggcggcggaggcgctgatcatggcgacattcatctcggtgcagctgaaaaagacctcagaggtggacctggccaagccgctggtgaagttcatccagcagacttacccaagcggcggggaagagcaggcccagtactgccgcgcggcggaggagctcagcaagctgcgccgcgccgcagtcggtcgtccgctggacaagcacgagggcgcgctcgagacgctcctgagatattatgatcagatttgttctattgaacccaaattcccattttctgaaaatcagatctgcttgacatttacctggaaggatgctttcgataaaggttcactttttggaggctctgtaaaactggctcttgcaagcttaggatatgaaaagagctgtgtgttgttcaattgtgcagccttagctagccaaattgcagcagaacagaacctggataatgatgaaggattgaaaatcgctgctaaacattaccagtttgctagtggtgcctttttacatattaaagagacggttttatctgccttaagtcgagagccgaccgtggacatatctccagatactgttgggaccctcagtcttattatgctggcacrggctcaagaagtattttttttaaaagccacaagagataaaatgaaagatgccatcatagctaaattggctaatcaggctgcagattattttggtgatgctttcaaacagtgtcaatacaaagatactctccccaaggaggtgttccctgtcttggctgcaaagcactgtatcatgcaggccaatgctgagtaccatcagtctatcctggcaaaacagcagaagaaatttggagaagaaattgcaaggttacagcatgcagcagaactgattaaaacagtggcatctcgctatgatgaatatgttaatgtgaaggatttttctgacaaaatcaatcgtgcccttrctgcagcaaagaaggataatgacttcatttatcatgatcgagttccagaccttaaagatctagatcctattggcaaagccacacttgtgaaatctaccccggtcaatgtacccatcagtcagaaatttactgatctgtttgagaagatggttcccgtgtcagtacagcagtctttggctgcctataatcagaggaaagccgatttggttaacagatcaattgctcagatgagagaagccaccactttggcaaatggggtgctagcttcccttaatcttccagcagcaattgaagatgtgtctggagacactgtacctcagtctatattgactaaatccagatctgtgattgaacagggaggcatccagactgttgatcagttgattaaagaactgcctgaattactgcaacgaaatagagaaatcctagatgagtcattaaggttgttggatgaagaagaagcaaccgataatgatttaagagcaaaatttaaggaacgttggcaaaggacaccatccaatgaactgtataagcctttaagagcagagggaaccaacttcagaacagttttagataaagctgtgcaggcagatggacaagtgaaagaatgttaccagtctcatcgtgacaccatcgtgcttttgtgtaagccagagcctgagctgaatgctgccatcccttctgctaatccagcaaagaccatgcagggcagtgaggttgtaaatgtcttaaaatccttattgtcaaatcttgatgaagtaaagaaggaaagagagggtctggagaatgacttgaaatctgtgaattttgacatgacaagcaagtttttgacagccctggctcaagatggtgtgataaatgaagaagctctttctgttactgaactagatcgagtctatggaggtcttacaactaaagtccaagaatctctaaagaaacaggagggacttcttaaaaatattcaggtctcacatcaggaattttcaaaaatgaaacaatctaataatgaagctaacttaagagaagaagttttgaagaatttagctactgcatatgacaactttgttgaacttgtagctaatttgaaggaaggcacaaagttttacaatgagttgactgaaatcctggtcaggttccagaacaaatgcagtgatatagtttttgcacggaagacagaaagagatgaactcttaaaggacttgcaacaaagcattgccagagaacctagtgctccttcaattcctacacctgcgtatcagtccttaccagcaggaggacatgcaccaactcctccaactccagcgccaagaaccatgccgcctactaagccccagcccccagccaggcctccaccacctgtgcttccagcaaatcgagctccttctgctactgctccatctccagtgggggctgggactgctgcgccagctccatcacaaacgcctggctcagctcctcctccacaggcgcagggaccaccctatcccacctatccaggatatcctgggtattgccaaatgcccatgcccatgggctataatccttatgcgtatggccagtataatatgccatatccaccagtgtatcaccagagtcctggacaggctccrtacccgggaccccagcagccttcataccccttccctcagcccccacagcagtcttactatccacagcagtaatatgtctgctcagcagctcagctgattcagatcagagggaaagaaataccaaccctgcaataagtgtactaaactctacgctctggttaatgtaatgtactctcctggactgaatgcagtgtataatttctgtctacagctagaagctgtgccccagttccacatttgattacacatgtgagatttgctgctgttgcagtataaacactaggtataataggatttgaaattgcattacagttcataaaaattgaaaatgagaaattaaacctgcaagtgaaacatttgaaacgattatactttctacataagacatggttgggacatcagatacttacaaagatggtttaagtatggatactagagaaaattaagttttctttctctttggtttattgatttggtttaatttccattatgctattttgcataatcaaggcactgtaaatcttataattttaaaataaattacttaagaacagttgtcattgttatgttttgktattgattctcattactgtctaattttttttctggkattagtctcattttgtatgtatataagttaaacagatactgtttttaagtgcatgaatagtacaagttattatcaaggatgttttacagggaaatcaaaagaatattatcatactttatctttcgtatgctgattagtaaacgatttttgacatttattttagaaagtcctataatgtggaagaaacaaacagttgctaccaaagattcttcaaataaacatacaaataaatgtgtatatttaatgttttattgttagcttctccagaaaattgatgcaaattctggtaataattcttgcattttttccccataacctggttaaaataaatacgccattggcaatacttcataatgtaatggaattgtttggggaacacttactgtaccctcycatcctttttccaccttactgtgttaacttagtgacatttaatgcccaatatgtatgaatagatctaagccatttaattttttttccttaaagattggagtattttataattcaaggagcatacaaaacaatggttgggaacatatgccaattatggaataggctatgtatttaatattaatctctgccattaggatatctactcactgtataaacctcagtaaaaatagtgaagacatgcatcatggaatgagaaaatgagaaaggaatgagttgtctaacatcacagtgggatctgttttttgtgaggttcatttctgaacacattaggcatatgagcagatttccagtgaatctatttatgtttattttctgagtttcaacgctgaccttttcttgcattattgtttcattttaatgatagtgttacttgtcccactgttgttttcattgagtttggatttatattttaaatgttcgaatgaaagtatgattgtaaaagggagtgaattggkttwaaaawatatgtatattttaaactttgttgtgtgtaggaaacatgaaggcatgttaattcaatataaatgacctttgatttcatggaatattaaagttggtttaaagtccaatagttaaaccttagcaaaaatagctttttacttcatcagttgctaagatttaatactttggattcatcaaagtgtgacatgggcttgtttgacttctgtaagtggcatttaagttccacattcttattacttgaggtactttatactaacataagacagtgagagttagaggtattacaagttgctagtttataatgtcttactaatgcagaaacaaggaaaaaagcaaaattggcctgaatattctcttggggaaagagggcaccaaagaaaagggtaagtgcatctgagggccaaaagagatgtataagccttttagcccattccccatgctgggcctgctcacagagccacaggaagatcattcagaaactaggaaaggaggcccccacagctgatcctgccacagcacacctgactcactcggctctgttagtgtaaccttttaaatgtagcaacacaaaccctttccctcttgtcagttcactcatcctttggtttctttttaatcacctgtgtctgggcacagacaatcacaataaatgcagccctttattactgttaaggatcatactgttggtttggagttggaagggtactactctgtgattcaggtgtgttgtacccatatttataattaggctttattatcttcctaaatcaaggaaaggaaatcatccccagaccatttatgctgagctttggaatactattttaaactggattgtacttaaataatgaagctctgcatagaggaactagtcagaagtggggaaaacactgtctaatttttatcagtctggtataaagtattgatctaagagaactctccctgtgccccttggtctttattctcaattaagaaaaacagtcacatgtcacgacaaaccaatcaatctttatgagatattcctgtatccataccccagcttgtttgcaatttataaacctccccttcaaaactaaggagttgcagaaaaaaatggatttcacagagccttgtgtccctaaagttctgtcccagtcagcagtctttatagtccaaacagattataaaaaatgttttccatttgaactttacagtttgcaaaagtgcttttatacattttctaatttcagaaacaggataatataatttgttaagtgggtttcagtttgctaatagggattttttgtgttttgttttttaattttcagcatctcttgaagaatcttgctacagccaaatggcatctcactttttaaagacgtttgcaattattagttgattcacagtacagaacaaggtataaaggaaaaaaccctgctaggtagtgttataattgctagattaaaaatagactagaacaggttcattttaagatttacttggaagagcaaagaaggaaaaattatatttttaaagaaagagaatattcaggctttatttctggtatgaagtttatattttttaaaaaaatcctatattatcacaccagagattttagattcttttctggttagaaacattgctggtagttggattatatttttattgtattcatttatcttagggggaacattgtaaagaaacaaaaaggtccagatgaatgtatgctagaaataaaagttgaaagattcttaaaaaaaaaaaaaaaaaaaaaaaaaaaaaaaaaaaaaaaaaaaaaaaaaaaaaaaaaaaaccccggggggggcccccccccccccngnncccccctggggggggggttaaaaaaaa

SEQ ID NO: 841 - DNA, 2703 bp, Homo sapiens
gattatgtggagtgaaagttacaccgtggcggattgacttctaaggactcttggtacatgaggaagaaacccggaagggaagaggaaagcaaaggcgtcaggaatggttcttcctcagggtctattgacattcagggaygtggccatagaattctctcaggaggagtggaaatgcctggaccctgctcagaggactctatacagrgacgtgatgytggagaattataggaacctggtctccctgggtattttttctaaatgtgagatcaaggaattaccaccaaaaaaggagagtaatacaggagaaatattccagacagtaatgttggaaagacatgaaagccacgacatacaagatttttgcttcagagaaacccagaaaaatgtacatgactctcagtgtctgtggaaacatgattgaagacattataagcgagtgcgtgtgacctataaggaaagtctcattggtagaagagacatgcatggkagaaaggatgatgcacaaaagcagcctgttaaaaatcagcttggattaaacccgcagtcacatctaccagaactgcagctatttcaagctgaagggaaaatatataaatatgatcacatggaaaaatctgtcaacagtagttccttagtttccccaccccaacgtatttcttctactgtcaaaacccacatttctcatacatatgaatgtaattttgtggattcattattcacacaaaaagagaaagcaaatattgggacagaacactacaaatgtartgagcgtggcaaggcctttcatcaaggcttacattttactatacatcaaataatccatactaaagagacgcaatttaaatgtgatatatgtggcaagatcttcaataaaaaatcaaaccttgcaagtcatcaaagaattcatactggagagaagccatataaatgtaatgaatgtggcaaggtcttccataatatgtcacaccttgcacagcatcgcaggattcatactggagagaaaccatataaatgtaatgaatgtggcaaggtctttaatcaaatttcacaccttgcacaacatcaaagaattcataccggagagaaaccttataaatgtaatgaatgtggaaaggtcttccatcaaatttcacaccttgcacaacatcggacaattcatactggagaaaaaccttacgaatgtaacaaatgtggcaaggtgttcagtcgcaattcctaccttgtacaacatctgatcattcatactggagagaaaccttacagatgtaatgtatgtggaaaggtcttccatcatatttcacaccttgcacaacatcagagaatccacactggagagaaaccttacaaatgtaatgagtgtggcaaggtcttcagtcacaagtcatccctagtaaatcactggagaattcatactggagagaaaccttacaaatgtaatgagtgtggcaaggtcttcagtcacaagtcatccctagtaaatcactggagaatccacactggagagaaaccttacaaatgtaatgaatgtggcaaggtcttcagtcgcaattcataccttgcccaacatctgataattcatgccggtgagaaaccttataagtgtgatgaatgtgacaaagcattcagtcaaaattcacatcttgtacaacatcacagaatccatactggagagaaaccttacaaatgtgatgaatgtggcaaagtcttcagtcaaaattcataccttgcatatcattggagaattcatactggagaaaaagcttataaatgtaatgaatgtgggaaggtcttcggtctaaactcatccctagcacatcatcggaaaattcacactggagagaaacctttcaaatgtaatgaatgtggcaaagcttttagtatgcgttcaagcctcactaatcatcatgcgatccacactggagagaaacatttcaaatgtaatgaatgtggcaaactcttccgcgacaattcatatcttgtacgtcatcagagatttcatgccggaaagaaatctaacacatgtaattaatgtggcagagtgttcagttagcattaaagccttgtaagacatacaataatttatactggagaaaaactttgcaagtataatgaatgtagcagagcctttagtttttgttcaaggcttaataaccgttagctagaccatagaggacagaaactttactaatgtactgaatgtggcaaggtcttaaggtaaaatctgagaccaggattyttcaaagaattcttgctggtgagaaacctaacaaatgtaatgaatgtggcaaggtcttctggcacaattctcacattgtacaatattgcaaaaattcatgcttgagagaaacaaaaacactgagagtgggaaaccattatgacttcaaacattcatcaacatcagagaatccatactaaagagcatttataataattatatgtgatagagattttccrcaggccaaagtctcactaggcatcaaaaacttttttgatgaaaccatacaaatgtaacgtgcatgcttaagcttttacccaggcatcaaaaccggaacatcacagggtttatactggagagtaactacacaaagataatgtaataagcctttcagtgtaatattcatgattttgtcgtgagagatccactcaataaaaaccaggcaaatgtaaaaaaaaaaaaaaaaaaaaaaaaaaaaaaaaaaaaaa

SEQ ID NO: 842 - DNA, 2114 bp, Homo sapiens
  misc_feature (2032)..(2032): n equals a,t,g, or c
  misc_feature (2071)..(2071): n equals a,t,g, or c
  misc_feature (2090)..(2090): n equals a,t,g, or c
gcggccgctgaacgggacgtaccaccaccaccaccaccaccaccaccaccatccgagcccctactcgccctacgtgggggcgccactgacgcctgcctggcccgccggacccttcgagaccccggtgctgcacagcctgcagagccgcgccggagccccgctcccggtgccccggggtcccagtgcagacctgctggaggacctgtccgagagccgcgagtgcgtgaactgcggctccatccagacgccgctgtggcggcgggacggcaccggccactacctgtgcaacgcctgcgggctctacagcaagatgaacggcctcagccggcccctcatcaagccgcagaagcgcgtgccttcatcacggcggcttggattgtcctgtgccaactgtcacaccacaactaccaccttatggcgcagaaacgccgagggtgaacccgtgtgcaatgcttgtggactctacatgaaactccatggggtgcccagaccacttgctatgaaaaaagagggaattcaaaccaggaaacgaaaacctaagaacataaataaatcaaagacttgctctggtaatagcaataattccattcccatgactccaacttccacctcttctaactcagatgattgcagcaaaaatacttcccccacaacacaacctacagcctcaggggcgggtgccccggtgatgactggtgcgggagagagcaccaatcccgagaacagcgagctcaagtattcgggtcaagatgggctctacataggcgtcagtctcgcctcgccggccgaagtcacgtcctccgtgcgaccggattcctggtgcgccctggccctggcctgagcccacgccgccaggaggcagggagggctccgccgcgggcctcactccactcgtgtctgcttttgtgcagcrgtccagacagtggcgactgcgctgacagaacgtgattctcgtgcctttattttgaaagagatgtttttcccaagaggcttgctgaaagagtgagagaagatggaagggaagggccagtgcaactgggcgcttgggccactccagccagcccgcctccggggcggaccctgctccacttccagaagccaggactaggacctgggccttgcctgctatggaatattgagagagattttttaaaaaagattttgcattttgtccaaaatcatgtgcttcttctgatcaattttggttgttccagaatttcttcataccttttccacatccagatttcatgtgcgttcatggagaagatcacttgaggccatttggtacacatctctggaggctgagtcggttcatgaggtctcttatcaaaaatattactcagtttgcaagactgcattgtaactttaacatacactgtgactgacgtttctcaaagttcatattgtgtggctgatctgaagtcagtcggaatttgtaaacagggtagcaaacaagatatttttcttccatgtatacaataatttttttaaaaagtgcaatttgcgttgcagcaatcagtgttaaatcatttgcataagatttaacagcattttttataatgaatgtaaacattttaacttaatggtacttaaaataatttaaaagaaaaatgttaacttagacattcttatgcttcttttacaactacatcccattttatatttccaattgttaaagaaaaatatttcaagaacaaatcttctctcaggaaaattgcctttctctatttgttaagaatttttatacaagaacaccaatataccccctttattttactgtggaatatgtgctggaaaaattgcaacaacactttactacctaacggatagcatttgtaaatactctaggtatctgtaaacactctgatgaagtctgtatagtgtgactaacccacaggcaggttggtttacattaatttttttttttgaatgggatgtcctatggaaacctatttcaccagagttttaaaaataaaaagggtattgttttgtcttctgaaaaaaaaaaaaaaaaaaaaaaaagggcggccgntctagaggatccaagcttacgtacgcgtgcatgcgacgncatagctcttctatagggncacctaaattcaattcactggccg

SEQ ID NO: 843 - DNA, 2172 bp, Homo sapiens
  misc_feature (5)..(5): n equals a,t,g, or c
tcganccacgacgtccgggacgctggactttgatgaagttgtgaatgatgcagatatcattctggtggagttttatgccccatggtgtggacactgcaagaaacttgcccccgagtatgagaaggccgccaaggagctcagcaagcgttctcctccaattcccctggcaaaggtcgacgccaccgcagaaacagacctggccaagaggtttgatgtctctggctatcccaccctgaaaattttccgcaaaggaaggccttatgactacaacggcccacgagaaaaatatggaatcgttgattacatgatcgagcagtccgggcctccctccaaggagattctgaccctgaagcaggtccaggagttcctgaaggatggagacgatgtcatcatcatcggggtctttaagggggagagtgacccagcctaccagcaataccaggatgccgctaacaacctgagagaagattacaaatttcaccacactttcagcacagaaatagcaaagttcttgaaagtctcccaggggcagttggttgtaatgcagcctgagaaattccagtccaagtatgagccccggagccacatgatggacgtccagggctccacccaggactcggccatcaaggacttcgtgctgaagtacgccctgcccctggttggccaccgcaaggtgtcaaacgatgctaagcgctacaccaggcgccccctggtggtcgtctactacagtgtggacttcagctttgattacagagctgcaactcagttttggcggagcaaagtcctagaggtggccaaggacttccctgagtacacctttgccattgcggacgaagaggactatgctggggaggtgaaggacctggggctcagcgagagtggggaggatgtcaatgccgccatcctggacgagagtgggaagaagttcgccatggagccagaggagtttgactctgacaccctccgcgagtttgtcactgctttcaaaaaaggaaaactgaagccagtcatcaaatcccagccagtgcccaagaacaacaagggacccgtcaaggtcgtggtgggaaagacctttgactccattgtgatggaccccaagaaggacgtcctcatcgagttctacgcgccatggtgcgggcactgcaagcagctagagcccgtgtacaacagcctggccaagaagtacaagggccaaaagggcctggtcatcgccaagatggacgccactgccaacgacgtccccagcgaccgctataaggtggagggcttccccaccatctacttcgcccccagtggggacaaaaagaacccagttaaatttgagggtggagacagagatctggagcatttgagcaagtttatagaagaacatgccacaaaactgagcaggaccaaggaagagctttgaaggcctgaggtctgcggaaggtgggaggaggcagacgccctgcgtggcccatggtcggggcgtccacgccgaggccggcaacaaacgacagtatctcggattcctttttttttttttttaattttttatactttggtgtttcacttcatgctctgaatactgaataaccatgaatgactgaatagtttagtccagatttttacagaggatacatctatttttatcattatttggggtttgaaaaatttttttttacaccttctaatttctttatttctcaaagcagataattcttctgtgtgaaaatgttttctttttttaatttaaggtttaaaattccttttccaaatcatgttgattttgctctttgctttttcgttgtctgagaaattgttggcgtagatttggcttctggtatgtgtttctgattgcttcctgttgagcacaaagtgagagctgccactgagcagccctgccaggggtgctgtttcaggctgggcatcgccaggcggcctccctgcaaaccaagggctgggggcaaaggggcatgatccagggtcccccagggtgggctcagctccagggagaggccacccacgtggcagccccacctcttgagagcccccagtgccggagcagaaaggaccctggacccagaggcagatactgcggggtggtagaaaaggtagagtaggctgtggcaatggaataaaacacgattaaaaacgttaaraaaaaaaaaaaaaaaaaaaaaaaaaaaaaaa

SEQ ID NO: 844 - DNA, 3103 bp, Homo sapiens
  misc_feature (3076)..(3076): n equals a,t,g, or c
  misc_feature (3078)..(3078): n equals a,t,g, or c
  misc_feature (3098)..(3098): n equals a,t,g, or c
gggaagaggcggcgcgccggttgagcagggcgtttctaggcctggtcggctggcggcgatggcaggattttcataatatatgtagtatgagttccacatcttggcctcttacccagcttcagcagtctcagctccaccagttagagaataaatgggatttgcatgaactccactctgagctgaaatacagactgcggtgttaatatccttttcttctgattgttattaacaggtccttatgtcgtcagaagatcgagaagctcaggaggatgaattgctggccctggcaagtatttacgatggagatgaatttagaaaagcagagtctgtccaaggtggagaaaccaggatctatttggatttgccacagaatttcaagatatttgtgagcggcaattcaaatgagtgtctccagaatagtggctttgaatacaccatttgctttctgcctccacttgtgctgaactttgaactgccaccagattatccatcctcttccccaccttcattcacacttagtggcaaatggctgtcaccaactcagctatctgctctatgcaagcacttagacaacctatgggaagaacaccgtggcagcgtggtcctgtttgcctggatgcaatttcttaaggaagagaccctagcatacttgaatattgtctctccttttgagctcaagattggttctcagaaaaaagtgcagagaaggacagctcaagcttctcccaacacagagctagattttggaggagctgctggatctgatgtagaccaagaggaaattgtggatgagagagcagtgcaggatgtggaatcactgtcaaatctgatccaggaaatcttggactttgatcaagctcagcagataaaatgctttaatagtaaattgttcctgtgcagtatctgtttctgtgagaagctgggtagtgaatgcatgtacttcttggagtgcaggcatgtgtactgcaaagcctgtctgaaggactactttgaaatccagatcagagatggccaggttcaatgcctcaactgcccagaaccaaagtgcccttcggtggccactcctggtcaggtcaaagagttagtggaagcagagttatttgcccgttatgaccgccttctcctccagtcctccttggacctgatggcagatgtggtgtactgcccccggccgtgctgccagctgcctgtgatgcaggaacctggctgcaccatgggtatctgctccagctgcaattttgccttctgtactttgtgcaggttgacctaccatggggtctccccatgtaaggtgactgcagagaaattaatggacttacgaaatgaatacctgcaagcggatgaggctaataaaagacttttggatcaaaggtatggtaagagagtgattcagaaggcactggaagagatggaaagtaaggagtggctagagaagaactcaaagagctgcccatgttgtggaactcccatagagaaattagacggatgtaacaagatgacatgtactggctgtatgcaatatttctgttggatttgcatgggttctctctctagagcaaacccttacaaacatttcaatgaccctggttcaccatgttttaaccggctgttttatgctgtggatgttgacgacgatatttgggaagatgaggtagaagactagttaactactgctcaagatatggaagtggattgtttttccctaatcttccgtcaagtacacaaagtaactttgcgggatatttagggtactattcattcactcttcctgcgtagaagatatggaagaacgaggtttatattttcatgtggtactactgaagaaggtgcattgatacatttttaaatgtaagttgagaaaaatttataagccaaaggttcagaaaattaaactacagaatattaaatattataatgtgcccaaagctctgaatagttaaaaattaaatatttattttcttccccaagctttaggtaaggagaagaggggtcaagagttaaacttagagaccctttgtctctgagaagcatccttctaagacattctgttggagttccctcagtactattccttacaactggagtgggtagaagccttatgaaaattatactgacaacctgatctcgtttactccatgttaatcacattcctaccaacctaaatttctgccaagtcagttctctttggaggaagcccattactccataactgactggatggtccagtgtcattttgatctgcttttcagaatggaaatttataatataaatatatgttttaataccacaaacactgtggggcacttgatatttattagtggtgtatatggtccactggtttcaggccaaatctagaatttagtgatactggctcagaagaatttaagttctattcagctttcctgggtgttagaacctagattcaaaatggcttgtctttgctacttttgttccacattctctctctttacctttgccctaccttctgtttgtaaggatgattttaatattaattccaggaacacatgtttttatttcctctgctggaataggagaaagcttaatatattcccaagctgaatgttcttgaattatatctgcatttaccactgtatatgcatatagtgacagtataacctgtctatactacagtagttccagtcctaactttctgaattatttttaaagatcttctctaacaagctatgggaatttggcttcatactctttctttgcaacagcagtgttctgggtgataattttgaattgatacctgttcctttttctgggttttgttggctttttgaaaaattgtctttccttatcattggtgggaggcttggtagcaaagtaacattttttggaaaagaggacagaaaaattgaactacagcttgagaacgtattctttttttcctactttgttattgcaaattgaggaatcacttttaactgttttaggtgtgtgtgtccagagtgagcaaggattatgtttttggattgtcaaagaggatgcttagtcttaaaataaaaataaatttaaaaatcatcttataattaraaaaaaaaaaaaaaancncgagggggggcccggtaccnaattc

SEQ ID NO: 845 - DNA, 2163 bp, Homo sapiens
cgcccacgcgtccgaggcggcggagccccarccccacccagtgcggagcgcgccgcgagccccgccgyaagctgagcgcctccgcccgccaggcgcgccggcgccgggccatgtactcggggaaccgcagcggcggccacggctactgggacggcggcggggccgcgggcgctgaggggccggcgccggcggggacactgagccccgcgcccctcttcagccccggcacctacgagcgcctggcgctgctgctgggctccattgggctgctgggcgtcggcaacaacctgctggtgctcgtcctctactacaagttccagcggctccgcactcccactcacctcctcctggtcaacatcagcctcagcgacctgctggtgtccctcttcggggtcacctttaccttcgtgtcctgcctgaggaacggctgggtgtgggacaccgtgggctgcgtgtgggacgggtttagcggcagcctcttcgggattgtttccattgccaccctaaccgtgctggcctatgaacgttacattcgcgtggtccatgccagagtgatcaatttttcctgggcctggagggccattacctacatctggctctactcactggcgtgggcaggagcacctctcctgggatggaacaggtacatcctggacgtacacggactaggctgcactgtggactggaaatccaaggatgccaacgattcctcctttgtgcttttcttatttcttggctgcctggtggtgcccctgggtgtcatagcccattgctatggccatattctatattccattcgaatgcttcgttgtgtggaagatcttcagacaattcaagtgatcaagattttaaaatatgaaaagaaactggccaaaatgtgctttttaatgatattcaccttcctggtctgttggatgccttatatcgtgatctgcttcttggtggttaatggtcatggtcacctggtcactccaacaatatctattgtttcgtacctctttgctaaatcgaacactgtatacaatccagtgatttatgtcttcatgatcagaaagtttcgaagatcccttttgcagcttctgtgcctccgactgctgaggtgccagaggcctgctaaagacctaccagcagctggaagtgaaatgcagatcagacccattgtgatgtcacagaaagatggggacaggccaaagaaaaaagtgactttcaactcttcttccatcatttttatcatcaccagtgatgaatcactgtcagttgacgacagcgacaaaaccaatgggtccaaagttgatgtaatccaagttcgtcctttgtaggaatgaagaatggcaacgaaagatggggccttaaattggatgccacttttggactttcatcataagaagtgtctggaatacccgttctatgtaatatcaacagaaccttgtggtccagcaggaaatccgaattgcccatatgctcttgggcctcaggaagaggttgaacaaaaacaaattcttttaattcaacgggtgctttacataatgaaaaaaccacttgtggcacacgatgggcatctaacatcatcatcttctaatgtgttggagattttcatttcaaatatattttttaaattactctattttccaaaacacgtaatgcatttttctcgaaaataccttactgtaaaaataactgtcgcgtacacatgtgtgaagtagctagaacatactgaattttttttgtactgttggactctattcagtgtcatgtcctatatctgatcaagttatcaaggagataattctagaatgaaaaagaaaatcctcttgttggaaacaaaagacgttttatatgtgcagtatgacaaagaggagtttcagagacaactttgaatccttgtcagcctggagaccagcaccagaggaatctacaaggcaaactcccatatatttgcttcccccaaattgctgcccctacagactcaaagctctttttctttgttttgttgtttctctaaaaatttactgttctttgtcgatgctatataagccagggagttctaagacgccagctctttgagatttgctcattcccctgtatttcccacatatatattacatatacccgctaataaatttatgtttgttttaaaaaaaaaaaaaaaaaactcgagggggg

SEQ ID NO: 846 - DNA, 1154 bp, Homo sapiens
  misc_feature (1104)..(1104): n equals a,t,g, or c
  misc_feature (1112)..(1112): n equals a,t,g, or c
  misc_feature (1126)..(1126): n equals a,t,g, or c
  misc_feature (1148)..(1148): n equals a,t,g, or c
gctttggggctctggctgccgccgccccccgcgccgccgggctagggcgatgtgggcgcccccggcgggcggccccggcgggcaccatgagccctctgctccgccgcctgctgctcgccgcactcctgcagctggcccccgcccaggcccctgtctcccagcctgatgcccctggccaccagaggaaagtggtgtcatggatagatgtgtatactcgcgctacctgccagccccgggaggtggtggtgcccttgactgtggagctcatgggcaccgtggccaaacagctggtgcccagctgcgtgactgtgcagcgctgtggtggctgctgccctgacgatggcctggagtgtgtgcccactgggcagcaccaagtccggatgcagatcctcatgatccggtacccgagcagtcagctgggggagatgtccctggaagaacacagccagtgtgaatgcagacctaaaaaaaaggacagtgctgtgaagccagayagccccaggcccctctgcccacgctgcacccagcaccaccagcgccctgacccccggacctgccgctgccgctgccgacgccgcagcttcctccgttgccaagggcggggcttagagctcaacccagacacctgcaggtgccggaagctgcgaaggtgacacatggcttttcagactcagcagggtgacttgcctcagaggctatatcccagtgggggaacaaagaggagcctggtaaaaaacagccaagcccccaagacctcagcccaggcagaagctgctctaggacctgggcctctcagagggctcttctgccatcccttgtctccctgaggccatcatcaaacaggacagagttggaagaggagactgggaggcagcaagaggggtcacataccagctcaggggagaatggagtactgtctcagtttctaaccactctgtgcaagtaagcatcttacaactggctcttcctcccctcactaagaagacccaaacctctgcataatgggatttgggctttggtacaagaactgtgacccccaaccctgataaaagagatggaaggagcaaaaaaaaaaaaaaaaaactygagggggggggccccggnaccccaanttcgccctaatagngagttggatttacaaatttaantggccg

SEQ ID NO: 847 - DNA, 1139 bp, Homo sapiens
ggcttctcggagggacctgggttttaaaaaataaaggggggtaggagaaaaagggagagagaagaaaaagggggaaaagaaacagctcaaatgaacagagagatcacggtttgcatggctgcccttcaataggctaaactgacaagatcagttttaaagggccacttaaatcagtttcaaagactggagaaaaatgagtcgccctctttggggggaatctgaggctggatcgtggacgccattactcgggactgggccaggttgtccacccccaacccccaacccctatataattataagccaaactattatttacagaggaggaggggagagagtgctggtagttttggtttcttctgtttactgacttgggccagacagacccaatgcacytttgcttgggcctctcaatgacccaggctaaggactcgggcagtgaaagcctgtagcacactgagctatgttttattttaaagcaaacacttcctcaggaccatctcttgctctttcttcccccaccccgcctcccccccttaagttttcagtacatagacatttgctccaactccggttggggcagtttgacagagctctgtgcacacacctcatgtgacccaattcaaacctcttaatctgatgactgaattcttcttcttcttcttcttcttctttttcttcttcttcttcttctgtttttaaactttcttccagatgcctgtggtctctctgatgtagcccatgtggaaagcttgcaggaaaagtctcagtgtgctttggaagaatacgttaggagccagtaccccaaccagccgacgagattcggaaagcttttgcttcgcctcccttccctccgcaccgtctcctcctcagtcatagagcaattgtttttcgtccgtttggtaggtaaaacccccatcgaaaccctcatccgggatatgttactgtccggcagcagttttaactggccgtatatggcaattcaataaataaataaaataagaagggggagtgaaacagagaaagaaaaggcaaaagactggtttgtttgcttaatttccttctgttaagaaaggatataaaaggatgttacaagtttgctaaaagaagagaggggaagaatttaatggactgtgaatttc

SEQ ID NO: 848 - DNA, 1353 bp, Homo sapiens
agcggccgcatcccgcactcgctgcctggtgccgtggccgcctcctcgggcagccccccgggctcggcgctggcggcagtggcgagcggcggagacctcttcccggggcagccggtgtccgaactgatcgcgcagctgctgcgcgctgagccctaccctgcggcggccggacgcttcggcgcagggggcggcgcggcgggcgcggtgctgggcatcgacaacgtgtgcgagctggcggcgcggctgctcttcagcaccgtggagtgggcgcgccacgcgcccttcttccccgagctgccggtggccgaccaggtggcgctgctgcgcctgagctggagcgagctcttcgtgctgaacgcggcgcaggcggcgctgcccctgcacacggcgccgctactggccgccgccggcctccacgccgcgcctatggccgccgagcgcgccgtggctttcatggaccaggtgcgcgccttccaggagcaggtggacaagctgggccgcctgcaggtcgactcggccgagtatggctgcctcaaggccatcgcgctcttcacgcccgacgcctgtggcctctcagacccggcccacgttgagagcctgcaggagaaggcgcaggtggccctcaccgagtatgtgcgggcgcagtacccgtcccagccccagcgcttcgggcgcctgctgctgcggctccccgccctgcgcgcggtccctgcctccctcatctcccagctgttcttcatgcgcctggtggggaagacgcccattgagacactgatcagagacatgctgctgtcggggagtaccttcaactggccctacggctcgggccagtgaccatgacggggccacgtgtgctgtggccaggcctgcagacagacctcaagggacagggaatgctgaggcctcgaggggcctcccggggcccaggactctggcttctctcctcagacttctattttttaaagactgtgaaatgtttgtcttttctgttttttaaatgatcatgaaaccaaaaagagactgatcatccaggcctcagcctcatcctccccaggacccctgtccaggatggagggtccaatcctaggacagccttgttcctcagcacccctagcatgaacttgtgggatggtggggttggcttccctggcatgatggacaaaggcctggcgtcggccagaggggctgctccagtgggcaggggtagctagcgtgtgccaggcagatcctctggacacgtaacctatgtcagacactacatgatgactcaaggccaataataaagacatttcctacctgcaaaaaaaaaaaaaaaaaaaaaaaaaaaaagtcgtatcgatgtcgagcgatcat

SEQ ID NO: 849 - DNA, 304 bp, Homo sapiens
  misc_feature (301)..(303): n equals a,t,g, or c
cccacgcgtccggtatttatatttggaaagagaccagcaccgagctcggcacctccccggcctctctcttcccagctgcagatgccacacctgctccttcttgctttccccgggggaggaagggggttgtggtcggggagctggggtacaggtttggggagggggaagagaaatttttatttttgaacccctgtgtcccttttgcataagattaaaggaaggaaaagtaaaaaaaaaaaaaaaaaaaaaaaaaaaaaaaaaaaaaaaaaaaaaaaaaaaaaaaaaaaaaaaaaaaaaaaannna

SEQ ID NO: 850 - DNA, 2170 bp, Homo sapiens
cgtgaggaccagcggctgctgccctgccgcaagtacgagcagatcgaagagggcactgtccggcgcctcatcatccacaggctgaaggcagacgatgatggtatctacctgtgcgagatgcggggccgggtgcgcaccgtggccaacgtcacagtcaaagggcccatcctgaagcgcctgccccggaagctcgacgtcctggaaggagagaatgctgtgctgctagtggaaactctagaggccggggtcgagggacgctggagccgtgatggggaggagctgccggtcatctgccagagcagctcaggccacatgcatgccctggtccttccaggggtcacccgagaggatgctggcgaggtcacctttagcctgggcaactcccgtaccactacgcttctcagagtaaaatgtgtcaagcacagtcccccaggaccccccatattggcagagatgttcaagggccacaagaacacggtcctgttgacctggaagcctcccgagccagctcccgagaccccattcatctaccggctggagcggcaggaagtgggctctgaagactggattcagtgcttcagcatcgagaaagccggagccgtggaggtgccgggcgactgtgtgccctccgagggtgactaccgcttccgcatctgcacagtcagcggacatggccgtagtccccacgtggtgttccacggttctgctcaccttgtgcccacagctcgcctggtggcaggtctggaggatgtgcaggtatacgacggggaagatgccgtcttctccctcgatctctccaccatcatccagggtacctggttccttaatggggaagagctcaagagtaacgagccggagggccaggtggaacctggggccctgcggtaccgtatagagcagaagggtctgcagcacagactcatcctgcatgccgtcaagcaccaggacagcggtgccctggtcggcttcagctgccccggcgtgcaggactcagctgccctcacaatccaagagagcccggtgcacatcctgagcccccaggacaaggtgtcgttgaccttcacaacctcagagcgggtggtgctgacttgtgagctctcaagggtggacttcccggcaacctggtacaaggatgggcagaaggtggaggagagcgagttgctggtggtgaagatggatgggcgcaaacaccgtctgatcctgcctgaggccaaagtccaggacagtggcgagtttgagtgcaggacagaaggggtctcggccttcttcggcgtcactgtccaagatcctcccgtgcacatcgtggacccccgagaacatgtgttcgtgcatgccataacttccgagtgtgtcatgctggcctgtgaggtggaccgagaggacgcccctgtgcgttggtacaaggacgggcaggaggtggaggagagtgacttcgtggtgctggagaatgaggggccccatcgccgcctggtgctgcccgccacccagccctcagacgggggcgagtttcagtgcgtcgctggagatgagtgtgcctacttcactgtcaccatcacagacgtctcctcgtggatcgtgtatcccagcggcaaggtgtatgtggcagccgtgcgcctggagcgtgtggtgctgacctgtgagctatgccggccctgggcagaggtgcgctggaccaaggatggagaggaggtggtggagagccccgcgctgctcctgcagaaggaagacactgtccgccgcctggtgctgcccgctgtccagctcgaggactccggcgagtacttgtgtgaaattgacgatgagtcggcctccttcactgtcaccgtcacagagtcttaccaaagtcaggacagttcaaataacaatccggagttatgcgtcctcttgaaaaagccgaagacccggcggctctggtcccgcttccccccatggcgacgaacagctggcactgagtagcagctgcccccatagtttggggcccacattcctctgtcccacctccctgccattgctttttgcctctccccagactgcttcagccgctaacctaacctggcccctgtgggcatttgagtttgcgacccctgtgttaaaccaataaacatgcaaataaatgtaaaaaaaaaaaaaaaaaaaaaaaaaaaaaaggggggggggcggacgcgtgggc

SEQ ID NO: 851 - DNA, 1041 bp, Homo sapiens
  misc_feature (7)..(7): n equals a,t,g, or c
  misc_feature (14)..(14): n equals a,t,g, or c
attacgngtacgtnagcttggacctttaggggggcccccctttttttttttttttttttacttttccttcctttaatcttatgcaaaagggacacaggggttcaaaaataaaaatttctcttccccctccccaaacctgtaccccagctccccgaccacaacccccttcctcccccggggaaagcaagaaggagcaggtgtggcatctgcagctgggaagagagaggccggggaggtgccgagctcggtgctggtctctttccaaatataaatacgtgtgtcagaactggaaaatcctccagcacccaccacccaagcactctccgttttctgccggtgtttggagaggggcggggggcaggggcgccaggcaccggctggctgcggtctactgcatccgctgggtgtgcaccccgcgagcctcctgctgctcattgtagaagagatgacactcggggtccccccggatggtgggggctccctggatcagcttcccggtgttggggttcacacaccagcactccccacgctgcccgttcagagacatcttgcactgtttgaggttgtacaggccatgcttgtcacagttggggatgtgcagggagtagaggtgctccagagggccccgctcatccggaaggcgcatggtggagatccgctccaggacctggtccagttcctgttggcagggagtcctggcagggggtggtcgcagcttcttgggctcctccaggccaaggtgatgcttgccacccttgcccatctgccggtgctgctcagtgaccttctcccggaacacggccagctccttcatacccgacttgaggggcttccggccagcactgcctcccccgcccaacatgttcatggtgctgtccacgtggttctccaccaggcctccttctgagtggtcatcgccattgtctgcaacctgctccgggctggcgccatactcggcgtcccggcgcttctcacaagtgccctcgcccatgaccagcgcctgcaggtcgtctacgaatggtttagcgccagttccccacg

SEQ ID NO: 852 - DNA, 1551 bp, Homo sapiens
  misc_feature (24)..(25): n equals a,t,g, or c
taccggtccggaattcccgggtcnncccacgcgcccccgcagctgccgccgccgccagggcccggactcggacgcgtggtagccccaggatgggtgagttcaacgagaagaagacaacatgtggcaccgtttgcctcaagtacctgctgtttacctacaattgctgcttctggctggctggcctggctgtcatggcagtgggcatctggacgctggccctcaagagtgactacatcagcctgctggcctcaggcacctacctggccacagcctacatcctggtggtggcgggcactgtcgtcatggtgactggggtcttgggctgctgcgccaccttcaaggagcgtcggaacctgctgcgcctgtacttcatcctgctcctcatcatctttctgctggagatcatcgctggtatcctcgcctacgcctactaccagcagctgaacacggagctcaaggagaacctgaaggacaccatgaccaagcgctaccaccagccgggccatgaggctgtgaccagcgctgtggaccagctgcagcaggagttccactgctgtggcagcaacaactcacaggactggcgagacagtgagtggatccgctcacaggaggccggtggccgtgtggtcccagacagctgctgcaagacggtggtggctctttgtggacagcgagaccatgcctccaacatctacaaggtggagggcggctgcatcaccaagttggagaccttcatccaggagcacctgagggtcattggggctgtggggatcggcattgcctgtgtgcaggtctttggcatgatcttcacgtgctgcctgtacaggagtctcaagctggagcactactgaccctgccttgggccttgctgctgctgcacccaactactgagctgagaccactgagtaccaggggctgggctccctgatgacacccaccctgtgccatcaccataacctctggggaccccaacctcagaggcagcttcaagtgccttttgctgcgcaccaatgcccagcaggggaggtgaggggggctggcggggcgaagtttggggggtgttttgtggggctccccggacatactctctgcctggtggtcagatgcaggttggaaggggccttgctgagtggcgcaaggccgagcgttcccagcagggggagaaacccttcacaccccaggcccttcaggaactggggctttgccttgcagccacatggccccatcccagttggggaagccaggtgagctctgacccttgggcctgggcctctgcccctcccaacccagccgtcgtctccctcgacagcgcccctgctgtcttccccaccgcagtcaccaccacccgaaatgccacgtggtcactgtgcactgccctgttcatgtgcctctgcggggcagggccttcctggttttgtacactgctgtacccagatgcctacaaccatccctgccacatacaggtgctcaataaacacttgtagagcagaaaaaaaaaaaaaaaaaaaaaaaaaaaaaaaaaaaaaaaaaaaaaaaaaaagggcggccgct

SEQ ID NO: 853 - DNA, 893 bp, Homo sapiens
  misc_feature (21)..(21): n equals a,t,g, or c
  misc_feature (27)..(27): n equals a,t,g, or c
  misc_feature (39)..(39): n equals a,t,g, or c
  misc_feature (860)..(860): n equals a,t,g, or c
  misc_feature (874)..(874): n equals a,t,g, or c
  misc_feature (893)..(893): n equals a,t,g, or c
tacgccgtgcaggtaccaggntccggnaagttcccgggntcgacccacrcgtcagctgcgctcccctaggagtgctgagcccgcggaaccgcagccatgactgaggctgatgtgaatccaaaggcctatccccttgccgatgcccacctcaccaagaagctactggacctcgttcagcagtcatgtaactataagcagcttcggaaaggagccaatgaggccaccaaaaccctcaacaggggcatctctgagttcatcgtgatggctgcagacgccgagccactggagatcattctgcacctgccgctgctgtgtgaagacaagaatgtgccctacgtgtttgtgcgctccaagcaggccctggggagagcctgtggggtctccaggcctgtcatcgcctgttctgtcaccatcaaagaaggctcgcagctgaaacagcagatccaatccattcagcagtccattgaaaggctcttagtctaaacctgtggcctctgccacgtgctccctrccatgaggcatggagcagggcagagcaagggccccgggacagagttttcccagacctggctcctcggcagagctgcctcccgtcagggcccacatcatctaggctccccagcccccactgtgaaggggctggccaggggcccgagctgcccccacccccggcctcagccaccagcacccccatagggcccccagacaccacacacatgcgcgtgcgcacacacacaaacacacacacactggacagtagatgggccgacacacacttggcccgagttcctccatttccctggcctgccccccacccccaactgtccacccccgtgccccctcttaccccgcaagacggncctacagggggggncttcccttcacccctggan

SEQ ID NO: 854 - DNA, 884 bp, Homo sapiens
gcgaattgggtaccgggccccccctcgagttttttttttttttttttgcaaatctagacacagcccaagtctttggcatccagatcttacctctaggtcttattccctgtcttcttaaaagaaaggtgaaactttctaaatgtaatttaaatctaagtcttcaggcattaaaccttaagtaaatctacccacatgacacaaatttttaagtttaagaaaattaaaggagagtaatttattcagtttatcctttgtgccatcctacagctttggaatcgtttacctccctaatctgcaaaggttcagaaaagaaaacatagcgacaaagtggcatttacttaatagattctaaaaaggcttccgtcaaggatttaaatggttgcaatttgtagtttgccatttcagtagtaaggagcttaagtgacaaaacaaatcattacaatttcatatgcatattttcttaagtgctaacaaattcctcctcggagaaaagaatccgaacatcataaagtaacctttctttctgagctccttatttaggagatgttaacctcctccaggttaataagaacacagattatcgtagtggaacaaggtgagtccaatgcttactgacctgagcaaaatacttccttggggtaaaaccaaattcagtgcttaaaaagatgctgtttagcccggcgcggtggctcacgcctgtaatcccagcrctttgggaggctgaggcgggcagatcacctgaggtcgggagtttgagaccagcctgaccaacatggagaaaccccatctctactaaaaatacaaaaattagccaggcgtggtggcacatgcctgtaatcccagctactagggaggctgaggctcgtgccgaattcggcacgagc

SEQ ID NO: 855 - DNA, 742 bp, Homo sapiens
  misc_feature (101)..(101): n equals a,t,g, or c
gcagcgagtcaagaagctgttcagcacagagacgtcactgcaggtgcaccggcgcatccacacaggtgagcggccatacccatgtccagactgtggcaaansgttccgtcagagtacccacctgaaagaccaccggcgcctgcacacaggtgagcggccctttgcctgtgaagtgtgtggcaaggcctttgccatctccatgcgcctggcagaacatcgccgcatccacacaggcgaacgaccctactcctgccctgactgtggcaagagctaccgctccttctccaacctctggaagcaccgcaagacccatcagcagcagcatcaggcagctgtgcggcagcagctggcagaggcggaggctgccgttggcctggccgtcatggagactgctgtggaggcgctacccctggtggaagccattgagatctaccctctggccgaggctgagggggtccagatcagtggctgactctgcccgacttcctctttggcacctccattccctgttgctgaaggccctccagcatccccttaagcatctgtacatactgtgtcccttcctcttcccatccccaccaccttgtaagttctaaattggatttattctctcgtgaggggggtgctctggggtccttgacacacataaaggtgcccccccaccttccacctcttagcactggtgaccccaaaaatgaaaccatcaataaagactgagttgccaaaaaaaaaaaaaaaacaa

SEQ ID NO: 856 - DNA, 405 bp, Homo sapiens
  misc_feature (385)..(385): n equals a,t,g, or c
aggaatgccgagtactgcaggggctccccagggagtatgtgaatgccaggcactgtttgccgtgccaccctgagtgtcagccccagaatggctcagtgacctgttttggaccggaggctgaccagtgtgtggcctgtgcccatcaagtggatggcgctggagtccattctccgccggcggttcacccaccagagtgatgtgtggagttatggtgtgactgtgtgggagctgatgacttttggggccaaaccttacgatgggatcccagcccgggagatccctgacctgctggaaaacgggggagcggctgccccarccccccatctgcaccattgatgtctacatgatcatggtcaaatgttggatgattgactctkaatgtccngccaaaaatttccgggaaat

SEQ ID NO: 857 - DNA, 816 bp, Homo sapiens
  misc_feature (170)..(170): n equals a,t,g, or c
ggcaccctggaagccaacagtgaacgggacaatggtggccgtagagggggagacggtctctatcttgtgctccacacagagcaacccggaccctattctcaccatcttcaaggagaagcagatcctgtccacggtcatctacgagagcgagctgcagctggagctgcggnccgtgtcacccgaggatgatggagagtactggtgtgtggctgagaaccagtatggccagagggccacygccttcaacctgtctgtggagttcgcccctgtgctcctcctggagtcccactgcgcggcagcccgagacacggtgcagtgcctgtgcgtggtgaagtccaacccggagccgtccgtggcctttgagctgccatcgcgcaatgtgaccgtgaacgagagcgagcgggagttcgtgtactcggagcgcagggcctcgtgctcaccagcatcctcacgctgcgggggcaggcccaggccccgccccgcgtcatctgcamcgcgaggaacctctatggcgccaagagcctggagctgcccttccagggagcccatcgactgatgtgggccaagatcgggcctgtgggcgccgtggtcgcctttgccatcctgattgccatcgtctgctacattacccagacacgcaggaaaaagaacgtgacagagagccccagcttytcggcaggggacaaccctcccgtcctgttyagcagcgacttccgcatytytgggcamcagagaagtacgagtccaaagaggtttctaccctggaatctcactgagtgccccaggagagcgagaggcgcctgggatctgagagga

SEQ ID NO: 858 - DNA, 2312 bp, Homo sapiens
  misc_feature (1763)..(1763): n equals a,t,g, or c
gctgatgctcaccatggggcgcctgcaactggttgtgttgggcctcacctgctgctgggcagtggcgagtgccgcgaagctgggcgccgtgtacacagaaggtgggttcgtggaaggcgtcaataagaagctcggcctcctgggtgactctgtggacatcttcaagggcatccccttcgcagctcccaccaaggccctggaaaatcctcagccacatcctggctggcaagggaccctgaaggccaagaacttcaagaagagatgcctgcaggccaccatcacccaggacagcacctacggggatgaagactgcctgtacctcaacatttgggtgccccagggcaggaagcaagtctcccgggacctgcccgttatgatctggatctatggaggcgccttcctcatggggtccggccatggggccaacttcctcaacaactacctgtatgacggcgaggagatcgccacacgcggaaacgtcatcgtggtcaccttcaactaccgtgtcggcccccttgggttcctcagcactggggacgccaatctgccaggtaactatggccttcgggatcagcacatggccattgcttgggtgaagaggaatatcgcggccttcgggggggaccccaacaacatcacgctcttcggggagtctgctggaggtgccagcgtctctctgcagaccctctccccctacaacaagggcctcatccggcgagccatcagccagagcggcgtggccctgagtccctgggtcatccagaaaaacccactcttctgggccaaaaaggtggctgagaaggtgggttgccctgtgggtgatgccgccaggatggcccagtgtctgaaggttactgatccccgagccctgacgctggcctataaggtgccgctggcaggcctggagtaccccatgctgcactatgtgggcttcgtccctgtcattgatggagacttcatccccgctgacccgatcaacctgtacgccaacgccgccgacatcgactatatagcaggcaccaacaacatggacggccacatcttcgccagcatcgacatgcctgccatcaacaagggcaacaagaaagtcacggaggaggacttctacaagctggtcagtgagttcacaatcaccaaggggctcagaggcgccaagacgacctttgatgtctacaccgagtcctgggcccaggacccatcccaggagaataagaagaagactgtggtggactttgagaccgatgtcctcttcctggtgcccaccgagattgccctagcccagcacagagccaatgccaagagtgccaagacctacgcctacctgttttcccatccctctcggatgcccgtctaccccaaatgggtgggggccgaccatgcagatgacattcagtacgttttcgggaagcccttcgccacccccacgggctaccggccccaagacaggacagtctctaaggccatgatcgcctactggaccaactttgccaaaacaggggaccccaacatgggcgactcggctgtgcccacacactgggaaccctacactacggaaaacagcggctacctggagatcaccaagaagatgggcagcagctccatgaagcggagcctgagaaccaacttcctgcgctactggaccctcacctatctggcgctgcccacagtgaccgaccaggaggccacccctgtgccccccacaggggactccgaggccactccygtgccccccacgggtgactccgagaccgcccccgtgccgnccacgggtgactccggggccccccccgtgccgcccacgggtgactccggggccccccccgtgccgcccacgggtgactccggggccccccccgtgccgcccacgggtgactccggggccccccccgtgccgcccacgggtgactccggggccccccccgtgccgcccacgggtgactccggcgccccccccgtgccgcccacgggtgacgccgggcccccccccgtgccgcccacgggtgactccggcgccccccccgtgccgcccacgggtgactccggggccccccccgtgacccccacgggtgactccgagaccgcccccgtgccgcccacgggtgactccggggccccccctgtgccccccacgggtgactctgaggctgcccctgtgccccccacagatgactccaaggaagctcagatgcctgcagtcattaggttttagcgtcccatgagccttggtatcaagaggccacaagagtgggaccccaggggctcccctcccatcttgagctcttcctgaataaagcctcatacccctgaaaaaa

SEQ ID NO: 859 - DNA, 3612 bp, Homo sapiens
  misc_feature (3612)..(3612): n equals a,t,g, or c
ggtacgcctgcaggtaccggtccggaattcccgggtcgacccacgcgtccgcccacgcgtccggctgaggcggccaccgcgactccggctctgcgctcggctgcctgacttcttcctgctgctgcttttcaggggctgcctgataggggctgtaaatctcaaatccagcaatcgaaccccagtggtacaggaatttgaaagtgtggaactgtcttgcatcattacggattcgcagacaagtgaccccaggatcgagtggaagaaaattcaagatgaacaaaccacatatgtgttttttgacaacaaaattcagggagacttggcgggtcgtgcagaaatactggggaagacatccctgaagatctggaatgtgacacggagagactcagccctttatcgctgtgaggtcgttgctcgaaatgaccgcaaggaaattgatgagattgtgatcgagttaactgtgcaagtgaagccagtgacccctgtctgtagagtgccgaaggctgtaccagtaggcaagatggcaacactgcactgccaggagagtgagggccacccccggcctcactacagctggtatcgcaatgatgtaccactgcccacggattccagagccaatcccagatttcgcaattcttctttccacttaaactctgaaacaggcactttggtgttcactgctgttcacaaggacgactctgggcagtactactgcattgcttccaatgacgcaggctcagccaggtgtgaggagcaggagatggaagtctatgacctgaacattggcggaattattgggggggttctggttgtccttgctgtactggccctgatcacgttgggcatctgctgtgcatacagacgtggctacttcatcaacaataaacaggatggagaaagttacaagaacccagggaaaccagatggagttaactacatccgcactgacgaggagggcgacttcagacacaagtcatcgtttgtgatctgagacccgcggtgtggctgagagcgcacagagcgcacgtgcacatacctctgctagaaactcctgtcaaggcagcgagagctgatgcactcggacagagctagacactcattcagaagcttttcgttttggccaaagttgaccactactcttcttactctaacaagccacatgaatagaagaattttcctcaagatggacccggtaaatataaccacaaggaagcgaaactgggtgcgttcactgagttgggttcctaatctgtttctggcctgattcccgcatgagtattagggtgatcttaaagagtttgctcacgtaaacgcccgtgctgggccctgtgaagccagcatgttcaccactggtcgttcagcagccacgacagcaccatgtgagatggcgaggtggctggacagcaccagcagcgcatcccggcgggaacccagaaaaggcttcttacacagcagccttacttcatcggcccacagacaccaccgcagtttcttcttaaaggctctgctgatcggtgttgcagtgtccattgtggagaagctttttggatcagcattttgtaaaaacaaccaaaatcaggaaggtaaattggttgctggaagagggatcttgcctgaggaaccctgcttgtccaacagggtgtcaggatttaaggaaaaccttcgtcttaggctaagtctgaaatggtactgaaatatgcttttctatgggtcttgtttattttataaaattttacatctaaatttttgctaaggatgtattttgattattgaaaagaaaatttctatttaaactgtaaatatattgtcatacaatgttaaataacctatttttttaaaaaagttcaacttaaggtagaagttccaagctactagtgttaaattggaaaatatcaataattaagagtattttacccaaggaatcctctcatggaagtttactgtgatgttccttttctcacacaagttttagcctttttcacaagggaactcatactgtctacacatcagaccatagttgcttaggaaacctttaaaaattccagttaagcaatgttgaaatcagtttgcatctcttcaaaagaaacctctcaggttagctttgaactgcctcttcctgagatgactaggacagtcggtacccagaggccacccagaagccctcagatgtacatacacagatgccagtcagctcctggggttgcgccaggcgcccccgctctagctcactgttgcctcgctgtctgccaggaggccctgccatccttgggccctggcagtggctgtgtcccagtgagctttactcacgtggcccttgcttcatccagcacagctctcaggtgggcactgcagggacactggtgtcttccatgtagcgtcccagctttgggctcctgtaacagacctctttttggttatggatggctcacaaaatagggcccccaatgctattttttttttttaagtttgtttaattatttgttaagattgtctaaggccaaaggcaattgcgaaatcaagtctgtcaagtacaataacatttttaaaagaaaatggatcccactgttcctctttgccacagagaaagcacccagacgccacaggctctgtcgcatttcaaaacaaaccatgatggagtggcggccagtccagccttttaaagaacgtcaggtggagcagccaggtgaaaggcctggcggggaggaaagtgaaacgcctgaatcaaaagcagttttctaattttgactttaaatttttcatccgccggagacactgctcccatttgtggggggacattagcaacatcactcagaagcctgtgttcttcaagagcaggtgttctcagcctcacatgccctgccgtgctggactcaggactgaagtgctgtaaagcaaggagctgctgagaaggagcactccactgtgtgcctggagaatggctctcactactcaccttgtctttcagcttccagtgtcttgggttttttatactttgacagcttttttttaattgcatacatgagactgtgttgactttttttagttatgtgaaacactttgccgcaggccgcctggcagaggcaggaaatgctccagcagtggctcagtgctccctggtgtctgctgcatggcatcctggatgcttagcatgcaagttccctccatcattgccaccttggtagagagggatggctccccaccctcagcgttggggattcacgctccagcctccttcttggttgtcatagtgatagggtagccttattgccccctcttcttataccctaaaaccttctacactagtgccatgggaaccaggtctgaaaaagtagagagaagtgaaagtagagtctgggaagtagctgcctataactgagactagacggaaaaggaatactcgtgtattttaagatatgaatgtgactcaagactcgaggccgatacgaggctgtgattctgcctttggatggatgttgctgtacacagatgctacagacttgtactaacacaccgtaatttggcatttgtttaacctcatttataaaagcttcaaaaaaacccaaaaaaaaaaaaaaaaaaaaaaaaaaaaaaaaaaaaaaaaaaaaaaaaaan

SEQ ID NO: 860 - DNA, 2317 bp, Homo sapiens
  misc_feature (550)..(550): n equals a,t,g, or c
  misc_feature (2167)..(2167): n equals a,t,g, or c
  misc_feature (2252)..(2252): n equals a,t,g, or c
  misc_feature (2282)..(2282): n equals a,t,g, or c
ggtcagcctggccctccagctccctgaacacggcagcaaggacatcggaaacgtccctggcaactgttcagaaaacccctgtcagaacggaggcacttgtgtgccgggcgcagacgcccacagctgtgactgcgggccagggttcaaaggcagacgctgcgagctcgcctgtataaaggtgtcccgcccctgcacaaggctgttctccgagacaaagkcctttccagtctgggagggaggcgtctgtcaccacgtgtataaaagagtctaccgagttcaccaagacatctgcttcaaagagagctgtgaaagcacaagcctcaagaagaccccaaacaggaaacaaagtaagagtcagacactggagaaatcttaaggatttaagacgttcttgttacactccaccaacctcacgagtttctaacacccaggaagatgaggtctaaaaactggatgaaaaaggacaccctgagaaaaggtcctagctggagtcagtcccctctgtgacctctctcctcaggcctctagaggacagatggccaggcctgtngcacacaccagcccaccctgagagacccctctgggaccaaccacctgtgagtcctgcgatgcgtttaagcagcctgtgccctcacccaagctgcagttcctgaaggtgtagtctgtgtctctgcggatgagatgacagctcgccattccccggaatcagtgaggctgtcagtcagccacgcttctgcagtatgcagaaacctgttcttagactccaaagccagagaaagaattctcccttcgaggcccaacaaattgagaaggaactgtgatggaccacttccaaaacagagacggrggcaggggctgaagggcagagaccaggtgatgtcagaaggaaagccgggttgcagacacagccgcccctgctctggtcctccagcgtgtttatgacgctcgtgcaggtcgacgagccatcctatggactagttaacactaaggtggagttcagacttttttagacaacggcgcgactggcagcctttctctatcaagggtcagacggtaaacgttttcagctttgcagaccagaggtccctgtggctacagtagcgcagacacagccacaggcatgtcattgaatggctgcggctatgttccaataaaaacttatttacaataacaggtggtggccaaattggcccatgggccttatttggtgaaccctgttctatgagatcacctaggcttcagccttaaacagtggaagccatcccctgaatgacaagtcacaagggtatcaaagaaagacccctgaattttcatggaaaaagctattcagacccctgcttggaaagctaaggcacactgccacgaagcagcaaggacgccttacaagtctcagtgcaacagagatggacacctgggctgggctggacaatgtttaaggttccttttagtccatgactcaagtgatactgttttaggctatcaggtagtaaacacgatcttagacatccccatctttgtaagcagaacagtacggcacttcaccacatctgcttcccaccatgcttctaagcagctgtcttccccctgctaatgttacaaccaaagcagccaccccacctcctctcgtgttgagcctcacgaccgctgacccagctggaaagccagcgccctgccgcgtcaccctgactctgctcagagccagcattccagccacaaagagggcctccttcctttcctctttcataaaaatgttttttgaagagttagagtatattttaggctttttatctttattaaaatttcatgtgcatgtgtctgtgtattctgcaatttgtcattttcagaaagaaggaacaggcaattcgagaagtttcacctgtactcccgagctgttccccaggctccagacccacttgagagcagaaggtggagctcaatgaagggtctcgagctcagygaagggtcactgggtgaactgagagaaaccacgttcmcaaacrcgtactgcggacttcctgccgccctgggacctgttactgtttgtccatgtaagctacagcattactagcagatgctaagatcgagtggtatcactggaaaagtaggtgaatcctactaggaaactttctactccctactaggacctcaagcccctcagccacacagnaaatgctaatatgctccagtgttagcttagaagccttgtgtcaacaagaactggctcctgagtcccaagcttggtgccacacagnaaatgctaatatgctccagtggtagcttanaagccttgtgtcaacaagaactggctcctgagtcc

SEQ ID NO: 861 - DNA, 1538 bp, Homo sapiens
ttgtttcacccacaattccaactgcctgatcagagaacttggatgtcagctattgaaaacatggcagaaaagctagagagcttcagtgccctgaaacctgaggccagtgagctcttacagtcagtgccctctatgttcaacttcagggcgcctcccaatgccctgccagagaaccttctgcggaagggaaaggagcgctatacctgcagatactgtggcaagatttttccaaggtctgcaaacctaacacggcacttgagaacccacacaggagagcagccttacagatgcaaatactgtgacagatcatttagcatatcttctaacttgcaaaggcatgttcgcaacatccacaataaagagaagccatttaagtgtcacttatgtgataggtgttttggtcaacaaaccaatttagacagacacctaaagaaacatgagaatgggaacatgtccggtacagcaacatcgtcgcctcattctgaactggaaagtacaggtgcgattctggatgacaaagaagatgcttacttcacagaaattcgaaatttcattgggaacagcaaccatggcagccaatctcccaggaatgtggaggagagaatgaatggcagtcattttaaagatgaaaaggctttggtgaccagtcaaaattcagacttrctggatgatgaagaagttgaagatgaggtgttgttagatgaggaggatgaagacaatgatattactggaaaaacaggaaaggaaccagtgacaagtaatttacatgaaggaaaccctgaggatgactatgaagaaaccagtgccctggagatgagttgcaagacatccccagtgaggtataaagaggaagaatataaaagtggactttctgctctagatcatataaggcacttcacagatagcctcaaaatgaggaaaatggaagataatcaatattctgaagctgagctgtcttcttttagtacttcccatgtgccagaggaacttaagcagccgttacacagaaagtccaaatcgcaggcatatgctatgatgctgtcactgtctgacaaggagtccctccattctacatcccacagttcttccaacgtgtggcacagtatggccagggctgcggcggaatccagtgctatccagtccataagccacgtatgacgttatcaaggttgaccagagtgggaccaagtccaacagtagcatggctctttcatataggactatttacaagactgctgagcagaatgccttataaacctgcagggtcactcatctaaagtctagtgaccttaaactgaatgatttaaaaaagaaaaraaagaaaaaagaaactatttattctcgatattttgttttgcacagcaaaggcagctgctgacttctggaagatcaatcaatgcgacttaaagtgattcagtgaaaacaaaaaacttggtgggctgaaggcatcttccagtttaccccaccttagtgtatgggtgggtgagaagggcagttgagatggcagcattgatatgaatgaacactccatagaaact

SEQ ID NO: 862 - DNA, 751 bp, Homo sapiens
  misc_feature (498)..(498): n equals a,t,g, or c
  misc_feature (715)..(715): n equals a,t,g, or c
gcgggcgggcggagaggagagagtggcgcgcagtccagcgagggcgggggttggctatgtggggggtggtgcaccccgcagtctagacagtctgatccgggctgggggcgtgtacactcggcgcacctgcgagactacagagcctcgggccggcacgtgtggggagtgtggacacgtctgctgcgccccgcttctcgctgctgaggggaagggagggggcgggcaggtgcagcggccgggctagtgggagggggcggcggccatggagcgggtgaacgacgcttcgtgcggcccgtctggctgctacacataccaggtgagcagacacagcacggagatgctgcacaacctgaaccagcagcgcaaaaacggcgggcgcttctgcgacgtgctcttgcgggtaggcgacgagagcttcccagcgcaccgcscagatgctggccgcctgcagcgagtactttgagtcggtgttcagcgcccagttggcgacaggcggantgcggacgggggtccggctgatgtagggggcgcgacggcagcaccaggcggcggggcgggggcaagccgggagctggagatgcacactatcagctccaaggtatttggggacattctggacttccgccttacactttcccgcattcgttgggttgccgctttggaagaagcttttcccccgaaacttccatgaacgggcccgccaaagtttccttgncttgaatgaaggttccggtttaatccgaagaatctt

SEQ ID NO: 863 - DNA, 1293 bp, Homo sapiens
gcgcagcgttccatcttctctttgatttcctggcctttaaaaatgacatcagtttctggaagaagaagaagagcatgatcggcatgtccaccaaggcagtgctctggcgctgcttcagcaccgtggtcatctttttgttcctgctggacgagcagacgagcctgctggtgctggtcccggcgggtgttggagccgccattgagctgtggaaagtgaagaaggcattgaagatgactattttttggagaggcctgatgcccgaatttcagtttggcacttacagcgaatctgagaggaaaaccgaggagtacgatactcaggccatgaagtacttgtcatacctgctgtaccctctctgtgtcgggggtgctgtctattcactcctgaatatcaaatataagagctggtactcctggttaatcaacagcttcgtcaacggggtctatgcctttggtttcctcttcatgctgccccagctctttgtgaactacaagttgaagtcagtggcacatctgccctggaaggccttcacctacaaggctttcaacaccttcattgatgacgtctttgccttcatcatcaccatgcccacgtctcaccggctggcctgcttccgggacgacgtggtgtttctggtctacctgtaccagcggtggctttatcctgtggataaacgcagagtgaacgagtttggggagtcctacgaggagaaggccacgcgggcgccccacacggactgaaggccgcccgggctgccgccagccaagtgcaacttgaattgtcaatgagtatttttggaagcatttggaggaattcctagacattgcgttttctgtgttgccaaaatcccttcggacatttctcagacatctcccaagttcccatcacgtcagatttggagctggtagcgcttacgatgcccccacgtgtgaacatctgtcttggtcacagagctgggtgctgccggtcaccttgagctgtggtggctcccggcacacgagtgtccggggttcggccatgtcctcacgcgggcaggggtgggagccctcacaggcaagggggctgttggatttccatttcaggtggttttctaagtgctccttatgtgaatttcaaacacgtatggaattcattccgcatggactctgggatcaaaggctctttcctcttttgtttgagagttggttgttttaaagcttaatgtatgtttctattttaaaataaatttttctggctgtggcaaaaaaaaaaaaaaaaaaaaaaaaaaaaaaaaaaaaaaaaaaaaaaaaaaaa

SEQ ID NO: 864 - DNA, 1391 bp, Homo sapiens
  misc_feature (1199)..(1199): n equals a,t,g, or c
  misc_feature (1330)..(1330): n equals a,t,g, or c
  misc_feature (1339)..(1339): n equals a,t,g, or c
  misc_feature (1347)..(1347): n equals a,t,g, or c
  misc_feature (1368)..(1369): n equals a,t,g, or c
gcccgagcctgcgayggctcttccccaccggaggctcagtccgtggctgcgtcaaaggcatcaaggccctgggcaagtatgtggacctcaagcggctgaacacgacaggcgtgagcgccggctgcaccgccgacctgctggtggggcgcgccatgactttccatggccacggcttccttcgcctggcgctctcgaacgtggcaccgctcactggcaacgtctactccggcttcggcttccacagcgcccaggacagtgccctgctctactaccgggcgtccccggatgggctatgccaggtgtccctgcagcagggccgtgtgagcctacagctcctgaggactgaagtgaaaactcaagcgggcttcgccgatggtgccccccattacgtcgccttctacagcaatgccacgggagtctggctgtatgtcgatgaccagctccagcagatgaagccccaccggggaccaccccccgagctccagccgcagcctgaggggcccccgaggctcctcctgggaggcctgcctgagtctggcaccatttacaacttcagtggctgcatcagcaacgtcttcgtgcagcggctcctgggcccacagcgcgtatttgatctgcagcagaacctgggcagcgtcaatgtgagcacgggctgtgcacccgccctgcaagcccagaccccgggcctggggcctagaggactgcaggccaccgcccggaaggcctcccgccgcagccgtcagcccgcccggcatcctgcctgcatgctgcccccacacctcaggaccacccgagactcctaccagtttgggggttccctgtccagtcacctggagtttgtgggcatcctggcccgacataggaactggcccagtctctccatgcacgtcctcccgcgaagctcccgaggcctcctcctcttcactgcccgtctgaggcccggcagcccctccctggcgctcttcctgagcaatggccacttcgttgcacagatggaaggcctcgggactcggctccgcgcccagagccgccagcgctcccggcctggccgctggcacaaggtctccgtgcgctgggagaagaaccggatcctgctggtgacggacggggcccgggcctggagccaggaggggccgaccggcagcaccagggggcagagcacccccagccccacaccctctttgtgggcggctcccggncagcagccacagcttcaaacttccggtgaccgtcgggttcaacggctgtgtgaagagactgaagcttgcacgggaggcccctgggggcccccacacggatggcaaggggtcaacaccttgcatctttgggnccccctggnaggccggncctggtcttttccaaggcaannggggggaagttatcaactttta

SEQ ID NO: 865 - DNA, 1890 bp, Homo sapiens
tgtctcatccagttcctttgcggtcctcttcttcagcacatgccaaagctgttcctcacggcctgtgagacaagagcatcttggatgtaggacaatggaagagttagatgccttattggaggaactggaacgctccacccttcaggacagtgatgaatattccaacccagctcctcttcccctggatcagcattccagaaaggagactaaccttgatgagacttcggagatcctttctattcaggataacacaagtcccttgccggcgcagctcgtgtatactaccaatatccaggagctcaatgtctacagtgaagcccaagagccaaaggaatcaccaccaccttctaaaacgtcagcagctgctcagttggatgagctcatggctcacctgactgagatgcaggccaaggttgcagtgagagcagatgctggcaagaagcacttaccagacaagcaggatcacaaggcctccctggactcaatgcttgggggtctsgagcaggaattgcaggaccttggcattgccacagtgcccaagggccattgtgcatcctgccagaaaccgattgctgggaaggtgatccatgctctagggcaatcatggcatcctgagcattttgtctgtactcattgcaaagaagagattggctccagtcccttctttgagcggagtggcttggcctactgccccaacgactaccaccaacttttttctccacgctgtgcttactgcgctgctcccatcctggataaagtgctgacagcaatgaaccagacctggcacccagagcacttcttctgctctcactgcggagaggtgtttggtgcagaaggctttcatgagaaggacaagaagccatattgccgaaaggatttcttagccatgttctcacccaagtgtggtggctgcaatcgcccagtgttggaaaactacctttcagccatggacactgtctggcacccagagtgctttgtttgtggggactgcttcaccagtttttctactggctccttctttgaactggatggacgtccattctgtgagctccattaccatcaccgccggggaacgctctgccatgggtgtgggcagcccatcactggccgttgtatcagtgccatggggtacaagttccatcctgagcactttgtgtgtgctttctgcctgacacagttgtcgaagggcattttcagggagcagaatgacaagacctattgtcaaccttgcttcaataagctcttcccactgtaatgccaactgatccatagcctcttcagattccttataaaatttaaaccaagagaggagaggaaagggtaaattttctgttactgaccttctgcttaatagtcttatagaaaaaggaaaggtgatgagcaaataaaggaacttctagactttacatgactaggctgataatcttattttttaggcttctatacagttaattctataaattctctttctccctctcttctccaatcaagcacttggagttagatctaggtccttctatctcgtccctctacagatgtattttccacttgcataattcatgccaacactggttttcttaggtttctccattttcacctctagtgatggccctactcatatcttctctaatttggtcctgatacttgtttcttttcacgttttcccatttccctgtggctcactgtcttacaatcactgctgtggaatcatgataccacttttagctctttgcatcttccttcagtgtatttttgtttttcaagaggaagtagattttaactggacaactttgagtactgacatcattgataaataaactggcttgtggtttcaataaaaaaaaaaaaaaaaaaaaaaactcgagggggggcccgtacccaatcgcccta

SEQ ID NO: 866 - DNA, 2643 bp, Homo sapiens
  misc_feature (68)..(68): n equals a,t,g, or c
  misc_feature (73)..(73): n equals a,t,g, or c
  misc_feature (2558)..(2558): n equals a,t,g, or c
catttggcttaagctccagctccaccgcggtggcggccgctctagaactagtggatcccccgggttgnaggtnattcggcacgagagtgcgcgggctgccccgggctcctccctgccgcctcctctcagtggatggttccaggcaccctgtctggggcagggagggcacaggcctgcacatcgaaggtggggtgggaccaggctgcccctcgccccagcatccaagtcctcccttgggcgcccgtggccctgcagactctcagggctaaggtcctctgttgctttttggttccaccttagaagaggctccgcttgactaagagtagcttgaaggaggcaccatgcaggagctgcatctgctctggtgggcgcttctcctgggcctggctcaggcctgccctgagccctgcgactgtggggaaaagtatggcttccagatcgccgactgtgcctaccgcgacctagaatccgtgccgcctggcttcccggccaatgtgactacactgagcctgtcagccaaccggctgccaggcttgccggagggtgccttcagggaggtgcccctgctgcagtcgctgtggctggcacacaatgagatccgcacggtggccgccggagccctggcctctctgagccatctcaagagcctggacctcagccacaatctcatctctgactttgcctggagcgacctgcacaacctcagtgccctccaattgctcaagatggacagcaacgagctgaccttcatcccccgcgacgccttccgcagcctccgtgctctgcgctcgctgcaactcaaccacaaccgcttgcacacattggccgagggcaccttcaccccgctcaccgcgctgtcccacctgcagatcaacgagaaccccttcgactgcacctgcggcatcgtgtggctcaagacatgggccctgaccacggccgtgtccatcccggagcaggacaacatcgcctgcacctcaccccatgtgctcaagggtacaccgctgagccgcctgccgccactgccatgctcggcgccctcagtgcagctcagctaccaacccagccaggatggtgccgagctgcggcctggttttgtgctggcactgcactgtgatgtggacgggcagccggcccctcagcttcactggcacatccagatacccagtggcattgtggagatcaccagccccaacgtgggcactgatgggcgtgccctgcctggcacccctgtggccagctcccagccgcgcttccaggcctttgccaatggcagcctgcttatccccgactttggcaagctggaggaaggcacctacagctgcctggccaccaatgagctgggcagtgctgagagctcagtggacgtggcactggccacgcccggtgagggtggtgaggacacactggggcgcaggttccatggcaaagcggttgagggaaagggctgctatacggttgacaacgaggtgcagccatcagggccggaggacaatgtggtcatcatctacctcagccgtgctgggaaccctgaggctgcagtcgcagaaggggtccctgggcagctgcccccaggcctgctcctgctgggccaaagcctcctcctcttcttcttcctcacctccttctagccccacccagggcttccctaactcctccccttgcccctaccaatgcccctttaagtgctgcaggggtctggggttggcaactcctgaggcctgcatgggtgacttcacattttcctacctctccttctaatctcttctagagcacctgctatccccaacttctagacctgctccaaactagtgactaggatagaatttgatcccctaactcactgtctgcggtgctcattgctgctaacagcattgcctgtgctctcctctcaggggcagcatgctaacggggcgacgtcctaatccaactgggagaagcctcagtggtggaattccaggcactgtgactgtcaagctggcaagggccaggattgggggaatggagctggggcttagctgggaggtggtctgaagcagacagggaatgggagaggaggatgggaagtagacagtggctggtatggctctgaggctccctggggcctgctcaagctcctcctgctccttgctgttttctgatgatttgggggcttgggagtccctttgtcctcatctgagactgaaatgtggggatccaggatggccttccttcctcttacccttcctccctcagcctgcaacctctatcctggaacctgtcctccctttctccccaactatgcatctgttgtctgctcctctgcaaaggccagccagcttgggagcagcagagaaataaacagcatttctgatgccaaaaaaaaaaaaaaaaaaaaaaaaaaaaaaaaaaaaaactcgagggggggcccggtacccaattcgccctatagtgagtcgtattacaattcactggccgtcgttttacaacgtcgtgactgggaaaaccctggcgttacccaacttaatcgccttgcagcacatccccctttcgccagctggcgtaatagcgaagaggcccgnaccgatcgccttcccaacagttgcgcaagcctgaatggcsaawggccaaattggaaagccgttaaaaattttggttaaaaattcg

SEQ ID NO: 867 - DNA, 1512 bp, Homo sapiens
  misc_feature (1418)..(1418): n equals a,t,g, or c
gaattcggcacgagagaacgaggaaaaaaaggaagggagaggaaaagaaaaaaacctaataaaggagaaagtaaagaagcaatacctgacagcaaaagtctggaatccagcaaagaaatcccagagcaacgagaaaacaaacagcagcagaagaagcgaaaagtccaagataaacagaaatcggtatcagtcagcactgtacactagagggttccatgagattattgtagactcatgatgctgctatctcaaccagatgcccaggacaggtgctctagccattaggaccacaaatggacatgtcagttattgctctgtctaaacaacattcccagtagttgctatattcttcatacaagcatagttaacaacaaagagccaaaagatcaaagaagggatactttcagatggttgtcttgtgtgcttctctgcatttttaaaagacaagacattcttgtacatattatcaataggctataagatgtaacaacgaaatgatgacatctggagaagaaacatcttttccttataaaaatgtgttttcagctgttgttttaagaagcaaaagatagttctgcaaattcaaagatacagtatcccttcaaaacaaataggagttcagggaagagaaacatccttcaaaggacagtgttgttttgaccgggagatctagagagtgctcagaattagggcctggcatttggaatcacaggatttatcatcacagaaacaactgttttaagattagttccatcactctcatcctgtatttttataagaaacacaagagtgcataccagaattgaatataccatatgggattggagaaagacaaatgtggaagaaatcatagagctggagactacttttgtgctttacaaaactgtgaaggattgtggtcacctggaacaggtctccaatctatgttagcactatgtggctcagcctctgttaccccttggattatatatcaacctgtaaacatgtgcctgtaacttacttccaaaaacaaaatcatacttattagaagaaaattctgattttatagaaaaaaaatagagcaaggagaatataacatgtttgcaaagtcatgtgttttctttctcaatgagggaaaaacaattttattacctgcttaatggtccacctggaactaaaagggatactattttctaacaaggtatatctagtaggggagaaagccaccacaataaatatatttgttaatagtttttcaaaaaaaaaaaaaaaaaactcgagggggggcccggtacccaattcgccctatagtgagtcgtattacaattcactggccgcgttttacaacgtcgtgactgggaaaaccctggcgttacccaacttaatcgccttgcagcacatcccctttcgccagctggcgtaatagcgaagaggcccgnaccgatcggcctttccaacagttgcgcagcctgaatggcgaatggcaaaatggaagcggtaatatttgggtaaaaatcgcggtaaaattttggt

SEQ ID NO: 868 - DNA, 3125 bp, Homo sapiens
  misc_feature (3113)..(3113): n equals a,t,g, or c
  misc_feature (3121)..(3121): n equals a,t,g, or c
  misc_feature (3124)..(3124): n equals a,t,g, or c
ggkgctttacctcgtcccccgcctctggagggcagcctggtgggggttgggcaggtgcggagggcagcagtcagtcatcggctgggctctgaggacagtccagagtgggccctgctttgtgctcgggagggccccgtcatgactttcgagggccccagctgtgtccactgtacctcacaggttccatcagccctggcgcccaggcgcatctgactcggcaccccctgcaggcaccatggcccagagccgggtgctgctgctcctgctgctgctgccgccacagctgcacctgggacctgtgcttgccgtgagggccccaggatttggccgaagtggcgggcacagcctgagccccgaagagaacgaatttgcggaggaggagccggtgctggtactgagccctgaggagcccgggcctggcccarccgcggtcaagctgccccgagactgtgcctgttcccaggagggcgtcgtggactgtggcggkattgacctgcgtgagttcccgggggacctgsctgagcacaccaaccacctatctytgcagaacaaccagctggaaaagawctamcctgaggagctctcccggctgcaccggctggagacactgaacctgcaaaacaaccgcctgacttcccgagggctcccagagaaggcgtttgagcatctgaccaacctcaattacctgtacttggccaataacaagctgaccttggcaccccgcttcctgccaaacgccctgatcagtgtggactttgctgccaactatctcaccaagatctatgggctcacctttggccagaagccaaacttgaggtctgtgtacctgcacaacaacaagctggcagacgccgggctgccggacaacatgttcaacggctccagcaacgtcgaggtcctcatcctgtccagcaacttcctgcgccacgtgcccaagcacctgccgcctgccctgtacaagctgcacctcaagaacaacaagctggagaagatccccccgggggccttcagcgagctgagcagcctgcgcgagctatacctgcagaacaactacctgactgacgagggcctggacaacgagaccttctggaagctctccagcctggagtacctggatctgtccagcaacaacctgtctcgggtcccagctgggctgccgcgcagcctggtgctgctgcacttggagaagaacgccatccggagcgtggacgcgaatgtgctgacccccatccgcagcctggagtacctgctgctgcacagcaaccagctgcgggagcagggcatccacccactggccttccagggcctcaagcggttgcacacggtgcacctgtacaacaacgcgctggagcgcgtgcccagtggcctgcctcgccgcgtgcgcaccctcatgatcctgcacaaccagatcacaggcattggccgcgaagactttgccaccacctacttcctggaggagctcaacctcagctacaaccgcatcaccagcccacaggtgcaccgcgacgccttccgcaagctgcgcctgctgcgctcgctggacctgtcgggcaaccggctgcacacgctgccacctgggctgcctcgaaatgtccatgtgctgaaggtcaagcgcaatgagctggctgcttggcacgaggggcgctggcgggcatggctcagctgcgtgagctgtacctcaccagcaaccgactgcgcagccgagccctgggcccccgtgcctgggtggacctcgcccatctgcagctgctggacatcgccgggaatcagctcacagagatccccgaggggctccccgagtcacttgagtacctgtacctgcagaacaacaagattagtgcggtgcccgccaatgccttcgactccacgcccaacctcaaggggatctttctcaggtttaacaagctggctgtgggctccgtggtggacagtgccttccggaggctgaagcacctgcaggtcttggacattgaaggcaacttagagtttggtgacatttccaaggaccgtggccgcttggggaaggaaaaggaggaggaggaagaggaggaggaggaggaagaggaaacaagatagtgacaaggtgatgcagatgtgacctaggatgatggaccgccggactcttttctgcagcacacgcctgtgtgctgtgagccccccactctgccgtgctcacacagacacacccagctgcacacatgaggcatcccacatgacacgggctgacacagtctcatatccccaccccttcccacggcgtgtcccacggccagacacatgcacacacatcacaccctcaaacacccagttcagccacacacaactaccctccaaaccaccacagtctctgtcacacccccactaccgctgccacgccctctgaatcatgcagggaagggtctgcccctgccctggcacacacaggcacccattccctccccctgctgacatgtgtatgcgtatgcatacacaccacacacacacacatgcacaagtcatgtgcgaacagccctccaaagcctatgccacagacagctcttgccccagccagaatcagccatagcagctcgccgtctgccctgtccatctgtccgtccgttccctggagaagacacaagggtatccatgctctgtggccaggtgcctgccaccctctggaactcacaaaagctggcttttattcctttcccatcctatggggacaggagccttcaggactgctggcctggcctggcccaccctgctcctccaggtgctgggcagtcactctgctaagagtccctccctgccacgccctggcaggacacaggcacttttccaatgggcaagcccagtggaggcaggatgggagagccccctgggtgctgctggggccttggggcaggartgaagcagaggtgatggggctgggctgagccagggaggaaggacccagctgcacctaggagacacctttgttcttcaggcctgtgggggaagttccgggtgcctttattttttattcttttctaaggaaaaaaatgataaaaatctcaaagctgatttttcttgttatagaaaaactaatataaaagcattatccctaaaaaaaaaaaaaaaaaactggggggggnccccgganccna

SEQ ID NO: 869 - DNA, 1138 bp, Homo sapiens
  misc_feature (1008)..(1008): n equals a,t,g, or c
  misc_feature (1013)..(1013): n equals a,t,g, or c
  misc_feature (1086)..(1086): n equals a,t,g, or c
  misc_feature (1126)..(1126): n equals a,t,g, or c
  misc_feature (1129)..(1129): n equals a,t,g, or c
  misc_feature (1137)..(1137): n equals a,t,g, or c
ggcacgagaaacatgagaggctgtgtgagaagctgcagccgccggcagaggagacctcagcatcatctagagcccagcgctggccctgcctccgcctgccccgccgccgccgtcgccgtttctgttcctgctactgtcccacctaaacaactcccgttacacggacaagtgaacatctgtggctgtcctctccttttcttcctcctcttccaactccttctcctcctcccacttcccagccgcagcagaaagcccccaacccaactgacactggcacaactgcaaacggtgtcatccgcacaactttatctcgctcctcgggctcccctaaggcattggacccatcgccgcgtcttttattttttgcaaagttgcatcgctgtacatatttttgtccccgccamctccctctgtctctggagtgccctacagccccgcaaactcctcctggagctgcgccctagtgcccctgctgggcagtggcgttcccccccatcctcccgcgcccagcccctgctgctctgggcagacgatgctgaagatgctctcctttaagctgctgctgctggccgtggctctgggcttctttgaaggagatgctaagtttggggaaagaaacgaagggagcggagcaaggaggagaaggtgcctgaatgggaaccccccgaagcgcctgaaaaggagagacaggaggatgatgtcccagctggagctgctgagtgggggagagatgctgtgcggtggcttctaccctcggctgtcctgctgcctgcggagtgacagcccggggctagggcgcctggagaataagatattttctgttaccaacaacacagaatgtgggaagttactggaggaaatcaaatgkgcactttgctctccacattctcaaagcctgktccactcacctgaagagaagtcttggaaagagacctagtacttcctctgctctgcaaagactattgcaaagaattcttttacacttggccgcgcccataattccaaggnttccnttcaaacaactggcggatgaatttttgcttttactaatgccaggaaaagaatgggtggggtttggggcttttnccaaaatttttccaaggaaaaaccaaggtcaagaaggganccnagcaattnt

SEQ ID NO: 870 - DNA, 1849 bp, Homo sapiens
  misc_feature (1781)..(1781): n equals a,t,g, or c
  misc_feature (1795)..(1795): n equals a,t,g, or c
  misc_feature (1801)..(1801): n equals a,t,g, or c
  misc_feature (1810)..(1810): n equals a,t,g, or c
  misc_feature (1836)..(1836): n equals a,t,g, or c
agaacggccttccccacatcttccagcacctgcgcgcctgaatccgtcccacccaggcccagacgcaggcttcttctcctcgggtcttggtcctgcatcctctctctcccagagcctccgttagggggtgggaaaggactttgccataggtcgctgaggccaccatctgctctcttactggccaagggcgtaaaaagatagtcytcccattagctagagagcaaaccccagaaagcctattggctgcgccgtccgcgggccttggtccgctttgaaggcgggctgcggctgcgagaggagggcgggcgggaggctagctgttgtcgtggttgctcggaggcacgtgtgcagtcccggaagcggcgaggggaaactgctccgcgcgcgccgcgggaggaggaaccgcccggtcctttagggtccgggcccggccgggccatggattcaatgcctgagcccgcgtcccgctgtcttctgcttcttcccttgctgctgctgctgctgctgctgctgccggccccggagctgggcccgagccaggccggagctgaggagaacgactgggttcgcctgcccagcaaatgcgaagtgtgtaaatatgttgctgtggagctgaagtcagcctttgaggaaaccggcaagaccaaggaggtgattggcacgggctatggcatcctggaccagaaggcctctggagtcaaatacaccaagtcggacttgcggttaatcgaagtcactgagaccatttgcaagaggctcctggattatagcctgcacaaggagaggaccggcagcaatcgatttgccaagggcatgtcagagacctttgagacattacacaacctggtacacaaaggggtcaaggtggtgatggacatcccctatgagctgtggaacgagacttctgcagaggtggctgacctcaagaagcagtgtgatgtgctggtggaagagtttgaggaggtgatcgaggactggtacaggaaccaccaggaggaagacctgactgaattcctctgcgccaaccacgtgctgaagggaaaagacaccagttgcctggcagagcagtggtccggcaagaagggagacacagctgccctgggagggaagaagtccaagaagaagagcagcagggccaaggcagcaggcggcaggagtagcagcagcaaacaaaggaaggagctgggtggccttgagggagaccccagccccgaggaggatgagggcatccagaaggcatcccctctcacacacagcccccctgatgagctctgagcccacccagcatcctctgtcctgagacccctgattttgaagctgaggagtcaggggcatggctctggcaggccgggatggccccgcagccttcagcccctccttgccttggctgtgccctcttctgccaaggaaagacacaagccccaggaagaactcagagccgtcatgggtagcccacgccgtcctttcccctccccaagtgtttctctcctgacccagggttcaggcaggccttgtggtttcaggactgcaaggactccagtgtgaactcaggaggggcaggtgtcagaactgggcaccaggactggagccccctccggagaccaaactcaccatccctcagtcctccccaacagggtactaggactgcagccccctgtagctcctctctgcttacccctcctgtggacaccttgcactctgcctggcccttcccagagcccaaagagtaaaaatgttctggttctgaaaaaaaaaaaaaaaaaactcgaggggggcccggncccaattcgccctnttgggnggggaatanaattacttggccggggtttacaacgnggggatggaaaaa

SEQ ID NO: 871 - DNA, 891 bp, Homo sapiens
aaggtacgcctgcaggtaccggtccggaattcccgggtcgacccacgcgtccgggagcgaccgctacaatggatcctcccgcaggctttgtgcgcgctgggaatccagctgtcgccgccccgcagagccccctgtccccggagggcgctcatttccgggccgcccaccacccgcgtagcaccggcagccgctgtcccggcagtctccagccgtcccgcccgcttgtggccaactggctccagtcactccccgaaatgccagtcgacttcactgggtactggaagatgttggtcaacgagaatttcgaggagtacctgcgcgccctcgacgtcaatgtggccttgcgcaaaatcgccaacttgctgaagccagacaaagagatcgtgcaggacggtgaccatatgatcatccgcacgctgagcacttttaggaactacatcatggacttccaggttgggaaggagtttgaggaggatctgacaggcatagatgaccgcaagtgcatgacaacagtgagctgggacggagacaagctccagtgtgtgcagaagggtgagaaggaggggcgtggctggacccagtggatcgagggtgatgagctgcacctggagatgagagtggaaggtgtggtctgcaagcaagtattcaagaaggtgcagtgaggcccaggcagacaaccttgtcccaaggaatcagcaggatgtgtgggccaggatccccctctttgcacagcatgaggcaaaaatgtccagccacccccaggcatctgttagcagagtctgtctcttggctttgtcacttttccttttcttaaaacaaagccatgccaataaagtgatctgtgttcaaaaaaaaaaaaaaaaaaaaaaaaaaaaaaaaaaaaaaaaaaaa

SEQ ID NO: 872 - DNA, 1306 bp, Homo sapiens
  misc_feature (1282)..(1282): n equals a,t,g, or c
  misc_feature (1295)..(1295): n equals a,t,g, or c
  misc_feature (1298)..(1298): n equals a,t,g, or c
aattcggcacgaggcggagtggctgccctgcgcggggacactcagagcccggtgggcgggaggaaggcggcatgccccagacggtgatcctcccgggccctgcgccctggggcttcaggctctcagggggcatagacttcaaccagcctttggtcatcaccaggattacaccaggaagcaaggcggcagctgccaacctgtgtcctggagatgtcatcctggctattgacggctttgggacagagtccatgactcatgctgatgcgcaggacaggattaaagcagcagctcaccagctgtgtctcaaaattgacaggggagaaactcacttatggtctccacaagtatctgaagatgggaaagcccatcctttcaaaatcaacttagaatcagaaccacaggaattcaaacccattggtaccgcgcacaacagaagggcccagccttttgttgcagctgcaaacattgatgacaaaagacaggtagtgagcgcttcctataactcgccaattgggctctattcaactagcaatatacaagatgcgcttcacggacagctgcggggtctcattcctagctcacctcaaaacgagcccacagcctcggtgccccccgagtcggacgtgtaccggatgctccacgacaatcggaatgagcccacacagcctcgccagtcgggctccttcagagtgctccagggaatggtggacgatggctctgatgaccgtccggctggaacgcggagtgtgagagctccggtgacgaaagtccatggcggttcaggcggggcacagaggatgccgctctgtgacaaatgtgggagtggcatagttggtgctgtggtgaaggcgcgggataagtaccggcaccctgagtgcttcgtgtgtgccgactgcaacctcaacctcaagcaaaagggctacttcttcatagaaggggagctgtactgcgaaacccacgcaagagcccgcacaaagcccccagagggctatgacacggtcactctgtatcccaaagcttaagtctctgcaggcgtggcacgcacgcacgcacccacccacgcgcacttacacgagaagacattcatggctttgggcagaaggattgtgcagattgtcaactccaaatctaaagtcaaggctttagacctttatcctattgtttattgaggaaaaggaatgggaggcaaatgcctgctatgtgaaaaaaacatacacttagctatgttttgcaactctttttggggctagcaataatgatatttaaagcaataattttttgnatgtcatacttcncantttacatg

SEQ ID NO: 873 - DNA, 2129 bp, Homo sapiens
  misc_feature (1049)..(1049): n equals a,t,g, or c
gtgctgctctgccagttcatggaggaccgcagtgcccaggctgggaactgctggctccgtcaagcgaagaacggccgctgccaggtcctgtacaagaccgaactgagcaaggaggagtgctgcagcaccggccggctgagcacctcgtggaccgaggaggacgtgaatgacaacacactcttcaagtggatgattttcaacgggggcgcccccaactgcatcccctgtaaagaaacgtgtgagaacgtggactgtggacctgggaaaaaatgccgaatgaacaagaagaacaaaccccgctgcgtctgcgccccggattgttccaacatcacctggaagggtccagtctgcgggctggatgggaaaacctaccgcaatgaatgtgcactcctaaaggcaagatgtaaagagcagccagaactggaagtccagtaccaaggcagatgtaaaaagacttgtcgggatgttttctgtccaggcagctccacatgtgtggtggaccagaccaataatgcctactgtgtgacctgtaatcggatttgcccagagcctgcttcctctgagcaatatctctgtgggaatgatggagtcacctactccagtgcctgccacctgagaaaggctacctgcctgctgggcagatctattggattagcctatgagggaaagtgtatcaaagcaaagtcctgtgaagatatccagtgcactggtgggaaaaaatgtttatgggatttcaaggttgggagaggccggtgttccctctgtgatgagctgtgccctgacagtaagtcggatgagcctgtctgtgccagtgacaatgccacttatgccagcgagtgtgccatgaaggaagctgcctgctcctcaggtgtgctactggaagtaaagcactccggatcttgcaactccatttcggaagacaccgaggaagaggaggaagatgaagaccaggactacagctttcctatatcttctattctagagtggtaaactctctataagtgttcagtgttgacatagcctttgtgcaaaaaaaaaaaaaaaaaaanaagaaaaagaaaaaaagaaaaatatattgtccatactgtaaataagtgtatgcttatttatttggggggaaaactatacattaaaggacctttgtcctaaagctctctcccaggccaccttgttactcattggacacggagaggcattcattgtgaggtctactggatgaggcccatagttgagacttgtagacatttatttatactgtgtcatgttttataatttatacataaaatgtctggttgactgtataccttgtttttgaagaaatttattcgtgaaaggaagagcagttgttatttattgtgaggtctcttgcttgtaaagtaaaagctttttttccttgtaaaccatttaagtccattccttactattcactcactcatctgtctcccttcatttcactgttagactcttttccactttcaacaaacttgcatgtcagtttctgtcatgtttatttattggattctctgctgcctgatctgtacatacatgatccctcgggttttgtttacaaggaaccttgactgaccaaaaggcattataactctgactcaaatacaaggtacagaagataagcatctttgaggaaactcctacttcagttcttttgttatgatgaagacatttgtgagagaggagatgattagaattctagtaatgtacttttaagatgttacagatacaaagaaatgatgtgggtgtcaggagactaaaggatgttgaaggctacacattcaaccttttgttaggtgtttcctttaagctactcagctgtaccttttaaattagttctttttcaaccagtatatcactaaaagttatatcaaagctttatcagttcaagtttcttgcttttcataatacttttttctgatgcaattttatattttcaaacatggcaagttaaaatataaattcatttaaatatatagttttgtacttttctaccatgtaaatgtgcaatgtatataaaagttataatgtgtatttgtaaataaatgatgagtgaaaaaataaaaaaattttaaaaagccaaaaaaaaaaaaaaaaaaaaaaaaaaaaaaaaaaaaaaa

SEQ ID NO: 874 - DNA, 1202 bp, Homo sapiens
  misc_feature (1196)..(1197): n equals a,t,g, or c
gcggcggcggtcggtcctgcctgtaacggcggcggcggctgctgctccagacacctgcggcggcggcggcgaccccgcggcgggcgcggagatgtggcccctggtagcggcgctgttgctgggctcggcgtgctgcggatcagctcagctactatttaataaaacaaaatctgtagaattcacgttttgtaatgacactgtcgtcattccatgctttgttactaatatggaggcacaaaacactactgaagtatacgtaaagtggaaatttaaaggaagagatatttacacctttgatggagctctaaacaagtccactgtccccactgactttagtagtgcaaaaattgaagtctcacaattactaaaaggagatgcctctttgaagatggataagagtgatgctgtctcacacacaggaaactacacttgtgaagtaacagaattaaccagagaaggtgaaacgatcatcgagctaaaatatcgtgttgtttcatggttttctccaaatgaaaatattcttattgttattttcccaatttttgctatactcctgttctggggacagtttggtattaaaacacttaaatatagatccggtggtatggatgagaaaacaattgctttacttgttgctggactagtgatcactgtcattgtcattgttggagccattcttttcgtcccaggtgaatattcattaaagaatgctactggccttggtttaattgtgacttctacagggatattaatattacttcactactatgtgtttagtacagcgattggattaacctccttcgtcattgccatattggttattcaggtgatagcctatatcctcgctgtggttggactgagtctctgtattgcggcgtgtataccaatgcatggccctcttctgatttcaggtttgagtatcttagctctagcacaattacttggactagtttatatgaaatttgtggcttccaatcagragactwtacaaccyccyaggaaagctgtagaggaccccttaatggtatgtggttatttcactcttaatcctttaccagatcataatttgatctggcccgcaaaacagktagaatgccctgtctatgccttaggaagaatctaggkttttkkcctctttttttctttccttggcatctctactcttgattattcatcaaggaaattatgggcctggnntgccg

SEQ ID NO: 875 - DNA, 1075 bp, Homo sapiens
ggccgggcaccggggcggcgggttggtctacgctgtgcgcggcggacgtcggaggcagcggggagcggagcggggccgccggggcctctccagggccgcagcggcagcagttgggccccccgccccggccggcggaccgaagaacgcaggaagggggccggggggacccgcccccggccggccgcagccatgaactccaacgtggagaacctacccccgcacatcatccgcctggtgtacaaggaggtgacgacactgaccgcagacccacccgatggcatcaaggtctttcccaacgaggaggacctcaccgacctccaggtcaccatcgagggccctgaggggaccccatatgctggaggtctgttccgcatgaaactcctgctggggaaggacttccctgcctccccacccaagggctacttcctgaccaagatcttccacccgaacgtgggcgccaatggcgagatctgcgtcaacgtgctcaagagggactggacggctgagctgggcatccgacacgtactgctgaccatcaagtgcctgctgatccaccctaaccccgagtctgcactcaacgaggaggcgggccgcctgctcttggagaactacgaggagtatgcagctcgggcccgtctgctcacagagatccacgggggcgccggcgggcccagcggcagggccgaagccggtcgggccctggccagtggcactgaagcttcctccaccgaccctggggccccagggggcccgggaggggctgagggtcccatggccaagaagcatgctggcgagcgcgataagaagctggcggccaagaaaaagacggacaagaagsgggcgctgcggcggctgtagtgggctctcttcctccttccaccgtgaccccaacctctcctgtcccctccctccaactctgtctctaagttatttaaattatggctggggtcggggagggtacagggggcactgggacctggatttgtttttctaaataaagttggaaaagcaaaaaaaaaaaaaaaaaaaaaaaaaaaaaaagtcgtatcgatgtcgagcgatcatgatgaatgat

SEQ ID NO: 876 - DNA, 3733 bp, Homo sapiens
  misc_feature (3266)..(3266): n equals a,t,g, or c
tttttttttttttttttttttttttaaaatgaattctttttattgcaaacaaacgtctaaattaatttctccacccactttctttagaaagaaaaagaaatcagcaggctaaggagatacccattcaagaactgacatgattaaaaattaagatataaatgggtgactcacaatttcattagcttacaaagatggtggagttaactactacaagcacactagttatacagtattttgtgggagaagggcatacagacatggctaacttcatatagatcccattagacaactggatttacaacaagtttttttaataagaaatgggcaaagccagctttcttttcagaatcaaaatgcagaacaaatggaaaaattatggtattaaccttcacaagtttgagcctccacaaataatgcaaccaagttttacatttttaacagcccttctacatacactccatcttctctatcttagttccaagttttagttttcaatcccaattataccaattccattgttattttaagaaaaaaccttcccagttattgtcagaaactatgatttagcttaccccctccactacccagcaaactacagagaggatggagtgtaatatgagcagtacagagtcttaatgcaattcatgaggaccacttagtccttacatgaatctggttgctaacatttctattatattgtgacaatgactcccgactgttattctctgtgagaaatggggggagtaaattcttaataaaagacaccaggtacaaagcaacattttacttctgttgtgataaaaaaaaaaaaaagtcacattttacagataaaatgtagaaccctgaaatactgacacattctcttatcgtgcacaatgctgaggttctcttacgattcacttttaaactgcaattaaaaatgtacaaaaaagaaaagaaaaaaaatcaacccacaaagcttctaaaaaaggaacccgcaggcacttcctcttgtggaatgtttaaaaagttagcctactaaagaaaacagtcgacttcttgtgaaggttttggagaaatatgtatcagttcgttttatttgggtattcaataatatccttggtgataatgctgactccatggcttctgaccccagaattgaccctgctgccactggttgtagccctgagattgatttttgtagccacgattgtttcctcgtcctctgaagttctggttgtagttccctctgttgggcattccacctctgttgtagttccctctgtttgagtaactaccacggccaggaaaaacaggggcacgagggtatggatagccgattccaccacttcctccaccgccaccacctctctgtggcatgttgcccctcctattatatccgccacgattcccaggggctcctcctctgaaatttccaccacgcatattgaatcctccacgtcctctatggccaccacctctgttaaactggttcttgccactcttatttttattgcttttctttgagccagtgttctgtttcttttctggtggaagagcctttttgctttcttccttatattgctccaagagtttttgggcttcttccttctgaagttcaacataggttatttcatcaaagcactcagctacctctgggagggtaaagtttcctttcattttgaggaccgcatgttctggtaggtctttcccctctacttctgctttcttctgtgttctttgcttatagtcttcatcttttgggcaaactacaacagcttttcgctggaagcctgcaaacaggcacatttttctcctctgggcagcagcagacacatttgtctgatccagaataaaatttcgcttctttcgggcagcaatctcaataaatttcccaagacactggggggctctctgcaacagtgtgttcagttttccagtatctgccatttgcttcttaaaacctgccaccatcatcttatccataatagtatttgtgccaagaatgttatatttccctggattttctgctgcatgtttagtaacccaggtagtttttccagctcctggcaagccaatcatcatcacaacttcacaatctttcttctcttcaggcccctttggtcctctaactcgatcctctaaggggacgttctggatgaaagtatactcttcaggtattggaaaatatggcttttccttctgaccaaaattaaattcaactgcacagttgtggcagagaacatgcgggaacagtggccgtccagcaagaacttccttactgattttgaaggcaacgccaagatcttgtccattcttagcatacgagagttctacttcatcactttcaaagttagcaaaacatgtaatcacatcattttcatcaaacttttctccataatcttcagtctcacagttgcatgtttttattccttttagagaatacccataagaaaattcttcttcaccaagtaacattccacttgtagttagtgaccagccaatacgaacttcatgtatgtcaatatcttttgtatataaatgccttactgggatcttctctgtaaccttcatctcaaaacacactttgccttttgacacaccataggatgctcttcctccagcccaaagaaaagcaaaactctccattgtaagggaagaagcactgagacgatctcttgatattttaaaatgtagatcacaattataagtatcaagacaaaccactgtgtcatcgaagtgttcatcttcttcttcaacaggtggctgaggagatttggctctgctatacttgttctcttcaatgtactcaaaatatccacggccatgatcttctcgtggtcttttaacacccctctttttatctccgcctttctgttctgttttgccgtcccctcccgcctgctgctggccctgcctcgccccgggcggcgccaccgtcaccgcgaacagcgaggtggggccgctgctcttccccgcggcctccttggcggccccgcgctgctgttggggctgttgctgctgcgtcgccggcggttgaggctgctgctccccgtgcccgttctcgtcgcccgcgccttcctcttcgtccccgagctcatcttccccttcctggaaaccctgatcgtcgccgttctcgtcttccgaggcggcctcctcctcctccatcgggcccgagtcggccgcccccgcggccccgttctcctctcctagctccatctggtcgccgtccagagcggagattccttcctcctcctcttcctcttcytcctcctcttcatcgccgncggccgcggcctcctgctcgaggcctgctcccgagcgcccagcggaatccccgcccaggtctaggctgccgttcccgggctccatggcggggcggcccccggcctcctcgtcgtccagcgcagcctggagtcgctccatgagctcggccttgagacccttgtcagaaaggcgtcgcttcttgagctcctctttcagctccgacaccttcagcttttttacattaacaggcgaggaactcatggtgagggccccgattcaccgctaggcgctgcctcaaactcggctccgctcactcggccactggtggcggctgctgcggctgctcctcggcccgggcggcggctgcggctgcggctggagatgggttcgtgctgcagagcggatccgcctggtgtcgaacggcgccaattcctttcaccgagttcgcgagggagacgcggagactcgcctggcgcgagcgagcacg

SEQ ID NO: 877 - DNA, 3352 bp, Homo sapiens
gcaaaattttcccccgggggagtttccggaacccccaaccggccggttccccggaaggaaaaaaattaaaaggttggggaaaaaatgaaacggatgaaggtgataaagcacaagatggagaaaatgaaaaaaatagtgaaaaggaacaggatagtgaagtgagtgaggataccaaatcagaagaaaaggagactgaagagaacaaagaactcactgatacatgtaaagaaagagaaagtgatactgggaagaagaaagtagaacatgaaatttccgaaggaaatgttgccacagccgcagcagctgctcttgcctcagcggctaccaaagccaagcacctggctgcagtggaagaaagaaagatcaagtccctggtagctctcttggttgagacacaaatgaagaaactagagatcaaacttcgacattttgaagagctggaaactatcatggacagagagaaagaagctctagaacaacagaggcagcagttgcttactgaacgccaaaacttccacatggaacagctgaagtatgctgaattacgagcacgacagcaaatggaacagcagcagcatggccagaaccctcaacaggcacaccagcactcaggaggacctggcctggccccacttggagcagcagggcaccctggcatgatgcctcatcaacagccccctccctaccctctgatgcaccaccagatgccaccacctcatccaccccagccaggtcagataccaggcccaggttccatgatgcccgggcagcacatgccaggccgcatgattcccactgttgcagccaacatccacccctctgggagtggccctacccctcctggcatgccaccaatgccaggaaacatcttaggaccccgggtacccctgacagcacctaacggcatgtatccccctccaccacagcagcagccaccgccaccaccacctgcagatggggtccctccgcctcctgctcctggcccgccagcctcagctgctccttagcctggaagatgcagggaacctccacgcccaccaccatgagctggagtggggatgacaagacttgtgttcctcaactttcttgggtttctttcaggatttttcttctcacagctccaagcacgtgtcccgtgcctccccactcctcttaccacccctctctctgacactttttgtgttgggtcctcagccaacactcaaggggaaacctgtagtgacagtgtgccctggtcatccttaaaataacctgcatctcccctgtcctggtgtgggagtaagctgacagtttctctgcaggtcctgtcaactttagcatgctatgtctttaccatttttgctctcttgcagttttttgctttgtcttatgcttctatggataatgctatataatcattatctttttatctttctgttattattgttttaaaggagagcatcctaagttaataggaaccaaaaaataatgatgggcagaagggggggaatagccacaggggacaaaccttaaggcattataagtgaccttatttctgcttttctgagctaagaatggtgctgatggtaaagtttgagacttttgccacacacaaatttgtgaaaattaaacgagatgtggaaggagaacctcagtgattttattccctagtgaggcctctgagggcctccacactgcctggcagaacataccactgaactagtatgtgctagaggagggcacaaacatccgctccttccctaggcctgctggctctggttttctatgcagatgattcattggattgggggtgagtgttttgtttttctgggggcagtgtgagctttgagggttggaatattgggaggcattccttagtttcctcaactagcctggaaagttaggagtctagggtaattaccccccaatgagtctagcctactattcactgctttgtgtgcatttttttctccctctttaaaaaaccctttaaaagaaaaaaaaaagtagatagtgctaaatattttagctcatgaaacttggttaggatggctgggggtacaagtccccaaactacctcttgttacagtagccagggagtggaatttcgtcaaccggtacttttaaggttaggatgggacgggaaaagtgaagcaggatattagctccttataccttctcccttccatttctgagatctcacattccatctatcacagggttttcaaagagatgctgagggtaacaaggaactcacttggcagtcagagcatcatgctttgaggtttggggtgctcaggctgggagggtagaatgccattccagaggacaagccacaaaaatgccttaatttgagctcgtatttacccctgctgataagtgacttgagagttcccggttttttcctcttgtccttccctcccttctgtccttccatgtgtggggaaagggtgtttttggtagagcttggtttccaaagcgcctggctttctcacttcacattctcaagtggcagtttcattatttagaatgcaaggtggacatcttttggatatctttttctatatattttctaaagctttacatatgagagggtatagggaggtgtttataaaacacttgagaacttttttccttaatatcagaaagcaaaaaaataaaaccacaattgagatttgcctttcaaaccctcaggtttgcctctaaccaggtgtccctggtcaccatcagagtactggaatacgggaaccgaggagaccttggtccttttgtttttgttctggactcttgggagtggaaatgagaatgagtttattcctactggagcttagttccaatgcatttggctccagaaagaccccagtgccttttgacaatggccagggttttacctacttcctgccagtctttcccaaaggaaactcattccaaatacttcttttttcccctggagtccgagaaggaaaatggaattctggttcatactgtggtcccttgtaacctcaggtctttaatgtgatcactttcaaatttaaaagatccaggtggaaatatttttactatagtaataattctacaaaatacctgaattcttaacactgttatatttcagtataagtggtggctttttcttttcatgtctttgatctggttttattcctgtaattcagccacctgattttgtgaggggggggaataatatgtggtttttgtacaaacatgtttctcagtgtgttgttattttggaaaaaatgaggggagggagtttggcaagaatggagaaaatgaatgaagaaggcctaatctctctctttttcagtgaataaatggaacaccatttctggaaaaaaaaaaaaaaaaaaaaaaaaaaaaa

SEQ ID NO: 878 - DNA, 1504 bp, Homo sapiens
cccacgcktccgctccagttaggagccttgatgccggaggggacagtgggtcgccgagagcgcccggagggaaccgcctggccttcggggaccaccaattttgtctggaaccaccctcccggcgtatcctactccctgtgccgcgaggccatcgcttcactggaggggtcgatttgtgtgtagtttggtgacaagatttgcattcacctggcccaaaccctttttgtctctttgggtgaccggaaaactccacctcaagttttcttttgtggggctgccccccaagtgtcgtttgttttactgtagggtctcccgcccggcgcccccagtgttttctgagggcggaaatggccaattcgggcctgcagttgctgggcttctccatggccctgctgggctgggtgggtctggtggcctgcaccgccatcccgcagtggcagatgagctcctatgcgggtgacaacatcatcacggcccaggccatgtacaaggggctgtggatggactgcgtcacgcagagcacggggatgatgagctgcaaaatgtacgactcggtgctcgccctgtccgcggccttgcaggccactcgagccctaatggtggtctccctggtgctgggcttcctggccatgtttgtggccacgatgggcatgaagtgcacgcgctgtgggggagacgacaaagtgaagaaggcccgtatagccatgggtggaggcataattttcatcgtggcaggtcttgccgccttggtagcttgctcctggtatggccatcagattgtcacagacttttataaccctttgatccctaccaacattaagtatgagtttggccctgccatctttattggctgggcagggtctgccctagtcatcctgggaggtgcactgctctcctgttcctgtcctgggaatgagagcaaggctgggtaccgtgyaccccgctcttaccctaagtccaactcttccaaggagtatgtgtgacctgggatctccttgccccagcctgacaggctatgggagtgtctagatgcctgaaagggcctggggctgagctcagcctgtgggcagggtgccggacaaaggcctcctggtcactctgtccctgcactccatgtatagtcctcttgggttgggggtgggggggtgccgttggtgggagagacaaaaagagggagagtgtgctttttgtacagtaataaaaaataagtattgggaagcaggcttttttcccttcagggcctctgctttcctcccgtccagatccttgcagggagcttggaaccttagtgcacctacttcagttcagaacacttagcaccccactgactccactgacaattgactaaaagatgcaggtgctcgtatctcgacattcattcccacccccctcttatttaaatagctaccaaagtacttcttttttaataaaaaaataaagatttttattaggtaaaaaaaaaaaaaaaaaaaaaaaaaaaaaaaaaaaaaaaaaaaaaaaaaaa

SEQ ID NO: 879 - DNA, 1606 bp, Homo sapiens
  misc_feature (1601)..(1601): n equals a,t,g, or c
acccacgcgtccggccgccaggtcaagtttgacttccaggcgcagtcccccaaggagctgactctgcagaagggtgacattgtctacatccacaaggaggtggacaagaactggctggagggagaggctgtggcccagtacaccttcaagggggacctggaggtggagctgtccttccgcaagggagagcacatctgcctgatccgcaaggtgaacgagaactggtacgagggacgcatcacgggcacggggcgccaaggcatattccctgccagctacgtgcaggtgtctcgtgaaccccggctccggctctgtgacgacggcccccagctccccacgtctccccgcctgaccgctgccgcccgctcagcccgtcaccccagctccccctcagccctgcgcagcccagctgaccccaccgacttggggggacagacctccccccgtcgcactggcttctccttccccacccaggagcctagaccccagacccagaatcttggcacccctggtccagctctgtcccactctcgaggtcccagccatcccctggacctggggacctcctctcctaacacctctcagatacactggaccccgtaccgggcgatgtaccagtacaggccccagaacgaagacgagctggagctgcgcgagggggacagggtggatgtcatgcagcagtgtgacgatggctggtttgtgggtgtctcccggaggacccagaaattcggaacgttccctggaaattacgttgccccggtgtgagtggtctccatggcaacttggagccagccaggatggggtggggagcggtggcactcgtgggagggagaggacccccgcccacatcctccttccccaggacctgagctcccagcatctgcagacgacccccgcagcmtttccctcggacccccctcgaagccccctggactgattcccacccacgactcacaggcattcctcccacagccctttcatttcctccccaccccactccccaaatacagaggtctgctttgaagcggagaccatttccaggccttattgagaccagaccccaagtcccccacccccatcctgctccagcgtttcctctaacagggaccagctctccgctttgcccccacggggttcctctaaccagaaccagcttcctagcctcgtagagaccaaaggccgcccccgcctgctggggttcctcccagcaccccagcttgctggctgccctctttgccttctggcctccagctgggtgtgggggggcggagcaaggcgggggacagacgcagcaccttcttagcgatctaggcctggcaagagctctggccccaaggcctcctcttcccaggggctgccaagtcctggccctggccctggcatatcaccccgcactgtggggccaggcaccactagcctggctcaaatattccccagggagactgctgtgtgctgcccgcctgcctgctggctctcccccagccccacatcccctctggaagagaatgtaaaataaacctggacacaagggaaaaaaaaaaaaaaaaaaaaaaaaaaaaaaaaaaaaaaaaaaaaaaaaaaaaaaaaaaaaaaaaaanggggg

SEQ ID NO: 880 - DNA, 2743 bp, Homo sapiens
  misc_feature (2386)..(2386): n equals a,t,g, or c
  misc_feature (2674)..(2674): n equals a,t,g, or c
  misc_feature (2740)..(2743): n equals a,t,g, or c
ggtttctccgagcaggcctggccgcgctctccccgcttcttcgcagtcttcggccctctcctgtcgccgccatgagcactggcaccttcgtcgtgtcgcagccgctcaattaccgcggcggggcccgcgtggagccggcggacgcctccggtaccgagaaagctttcgagccagcaaccggccgagtgatagctactttcacatgttcaggagaaaaggaagtaaatttggctgttcaaaatgcaaaggctgcttttaaaatatggagtcaaaaatctggcatggagcgttgccgaatccttttggaggctgccaggataataagggaacgggaggatgaaattgctactatggagtgcatcaacaatggcaagtccatctttgaggcccgcttggacatcgacatttcctggcagtgcctggagtattatgcgggcttggctgcatccatggctggtgaacacatccagctcccaggtggatcgtttggttataccagaagagaaccacttggggtatgtgtgggaataggagcatggaactacccctttcagattgcctcttggaagtcggctccagcattagcctgtggtaatgccatggtctttaaaccttctccctttacacctgtttctgcattgctactggctgaaatctacagtgaggctggtgtacctcctgggctcttcaatgtggtgcagggaggggctgccacaggccagtttctgtgtcagcatcccgatgtggccaaagtctccttcactggaagtgtgcccactggcatgaagatcatggagatgtcagctaaaggaatcaaacctgttaccttggaacttggaggcaaatctccactcatcatcttctcagactgtgatatgaacaatgctgtaaagggggcgctgatggccaacttcctcacacaaggccaggtttgctgtaatggcacaagagtatttgtgcagaaagaaattcttgataaatttacagaggaagtggtgaaacagacccaaaggattaaaattggagatccccttctggaagatacaaggatgggtccactcatcaaccgaccacacctggagcgagtccttgggtttgtcaaagtggcaaaggagcagggtgctaaagtgttatgtggtggagatatatatgtacctgaagatcccaaattaaaggatggatattacatgagaccttgtgtattaactaattgcagagacgacatgacctgtgtgaaggaagagatctttgggcctgttatgtccattttatcatttgacactgaagctgaggttctagaaagagccaatgataccacttttggactagcagctggcgtctttaccagggacatccaacgggctcatagagtggtagctgagcttcaggctgggacgtgcttcattaacaactataacgtcagcccagtggagttgccctttggtggatataagaagtcaggatttggcagagagaacggccgtgtgacaatcgaatattattcacagctgaagactgtgtgtgtggagatgggtgatgtggaatctgctttttgaaaacctgcagtgaaacctattgacatggccacgctgtggaatgatgtgaattggccctgtttacagaggcagtacaactgaatgttattttacatccagaattttggcgttcagtataagagaatggttcatgttactctttctctctccatcagcttcctcactgaaaatgtgcattaagtgccttgtagatactaatcaagaaagctgtgattctcctcaaagcgtatttttgtgaaatcttttaagagccagtaacatacttctagagaacaggaaaagagactaggataatacatcttccacacatttggcccactgataatgttaattctctggcgtatttcaaagaacttgttcctggctgatccaagtgcagtggtatttacaactaattgatcacaaccagtttgtagatttctttgttccttctccattcccactgcttcacttgcctagtcttgaagaaaaaaaacaaaaaacaaaaaaaaaccttgttcctttataggttcctggtagaatcagtagagatgatttcagctcattgacatttttttaagctatatccccttgtcattccattgagaaagctgacaactgggatagggaggggattagataatagatggggtcaaattctgtgtgaatgtgaacttgcctagtaagcactttgtctctgttcactactgcgatagaggaaatctatctccctatcttgggtccttgaactacagcctgctgtcttacaccagtggagctaccctttaaatgtacaaattatttgtatgctaatgtaatatggtgaaattaaaataaatcacactgttaanaaaaaaaaaccttgttcctttataggttcctggtagaatcagtagagatgatttcagctcattgacatttttttaagctatatccccttgcattccattgagaaagctgacaactgggatagggaggggattcgataatagatggggtcaaattctgtgtgaatgtgaacttgcctagtaagcactttgtctctgttcactactgcgatagaggaaatctatctccctatcttgggtccttgaactacagcctgctgtcttacaccagtggagctaccctttaaatgnacaaattatttgtatgctaatgtaatatggtgaaattaaaataaatcacactggtaaaaaaaaaannnn

SEQ ID NO: 881 - DNA, 1410 bp, Homo sapiens
gcctggtggtagaggggaagggaggaggtcagacctgtcactctcctctgctctcctctggctcagaacttcctgaatgctggcagctttmctgagatccagggctttctgcagctgcggggttcaggacggaagctttggaaacgmtttttctgcttcttgcgccgatctggcctctattactccaccaagggcacctctaaggatccgaggcacctgcagtacgtggcagatgtgaacgagtccaacgtgtacgtggtgacgcagggccgcaagctctacgggatgcccactgacttcggtttctgtgtcaagcccaacaagcttcgaaatggccacaaggggcttcggatcttctgcagtgaagatgagcagagccgcacctgctggctggctgccttccgcctcttcaagtacggggtgcagctgtacaagaattaccagcaggcacagtctcgccatctgcatccatcttgtttgggctcccyacccttgagaagtgcctcagataataccctggtggccatggacttctctggccatgctgggcgtgtcattgagaacccccgggaggctctgagtgtggccctggaggaggcccaggcctggaggaagaagacaaaccaccgcctcagcctgcccatgccagcctccggcamgagcctcagtgcagccatccaccgcacccaactctggttccacgggcgcatttcccgtgaggagagccagcggyttattggacagcagggcttggtagacggcctgttcctggtccgggagagtcagcggaacccccagggctttgtcctctctttgtgccacctgcagaaagtgaagcattatctcatcctgccgagcgaggaggagggccgcctgtacttcagcatggatgatggccagacccgcttcactgacctgctgcagctcgtggagttccaccagctgaaccgcggcatcctgccgtgcttgctgcgccattgctgcacgcgggtggccctctgaccaggccgtggactggctcatgcctcagcccgccttcaggctgcccgccgcccctccacccatccagtggactctggggcgcggccacaggggacgggatgaggagcgggagggttccgccactccagttttctcctctgcttctttgcctccctcagatagaaaacagcccccactccagtccactcctgacccctctcctcaagggaaggccttgggtggccccctctccttctcctagctctggaggtgctgctctagggcagggaattatgggagaagtgggggcagcccaggcggtttcacgccccacactttgtacagaccgagaggccagttgatctgctctgttttatactagtgacaataaagattattttttgatacaaaaaaaaaaaaaaaaaaaaa

SEQ ID NO: 882 - DNA, 2442 bp, Homo sapiens
  misc_feature (1)..(1): n equals a,t,g, or c
nggaacaaaagctggagctccaccgcggtggcggccgctctagaactagtggatcccccgggctgcaggaattcggcacgagctggagtccggggagtggcgttggctgctagagcgatgccgggccggagttgcgtcgccttagtcctcctggctgccgccgtcagctgtgccgtcgcgcagcacgcgccgccgtggacagaggactgcagaaaatcaacctatcctccttcaggaccaacgtacagaggtgcagttccatggtacaccataaatcttgacttaccaccctacaaaagatggcatgaattgatgcttgacaaggcaccartgctaaaggttatagtgaattctctgaagaatatgataaatacattcgtgccaagtggaaaarttatgcaggtggtggatgaaaaattgcctggcctacttggcaactttcctggcccttttgaagaggaaatgaagggtattgccgctgttactgatatacctttaggagagattatttcattcaatattttttatgaattatttaccatttgtacttcaatagtagcagaagacaaaaaaggtcatctaatacatgggagaaacatggattttggagtatttcttgggtggaacataaataatgatacctgggtcataactgagcaactaaaacctttaacagtgaatttggatttccaaagaaacaacaaaactgtcttcaaggcttcaagctttgctggctatgtgggcatgttaacaggattcaaaccaggactgttcagtcttacactgaatgaacgtttcagtataaatggtggttatctgggtattctagaatggattctgggaaagaaagatgccatgtggatagggttcctcactagaacagttctggaaaatagcacaagttatgaagaagccaagaatttattgaccaagaccaagatattggccccagcctactttatcctgggaggcaaccagtctggggaaggttgtgtgattacacgagacagaaaggaatcattggatgtatatgaactcgatgctaagcagggtagatggtatgtggtacaaacaaattatgaccgttggaaacatcccttcttccttgatgatcgcagaacgcctgcaaagatgtgtctgaaccgcaccagccaagagaatatctcatttgaaaccatgtatgatgtcctgtcaacaaaacctgtcctcaacaagctgaccgtatacacaaccttgatagatgttaccaaaggtcaattcgaaacttacctgcgggactgccctgacccttgtataggttggtgagcacacgtctggcctacagaatgcggcctctgagacatgaagacaccatctccatgtgaccgaacactgcagctgtctgaccttccaaagactaagactcgcggcaggttctctttgagtcaatagcttgtcttcgtccatctgttgacaaatgacagatcttttttttttccccctatcagttgatttttcttatttacagataacttctttaggggaagtaaaacagtcatctagaattcactgagttttgtttcactttgacatttggggatctggtgggcagtcgaaccatggtgaactccacctccgtggaataaatggagattcagcgtgggtgttgaatccagcacgtctgtgtgagtaacgggacagtaaacactccacattcttcagtttttcacttctacctacatatttgtatgtttttctgtataacagccttttccttctggttctaactgctgttaaaattaatatatcattatctttgctgttattgacagcgatataattttattacatatgattagagggatgagacagacattcacctgtatatttcttttaatgggcacaaaatgggcccttgcctctaaatagcactttttggggttcaagaagtaatcagtatgcaaagcaatcttttatacaataattgaagtgttccctttttcataattactctacttcccagtaaccctaaggaagttgctaacttaaaaaactgcatcccacgttctgttaatttagtaaataaacaagtcaaagacttgtggaaaataggaagtgaacccatattttaaattctcataagtagcattcatgtaataaacaggtttttagtttgttcttcagattgatagggagttttaaagaaattttagtagttactaaaattatgttactgtatttttcagaaatcmaactgcttatgaaaagtactaatagaacttgttaacctttctaaccttcacgattaactgtgaaatgtacgtcatttgtgcaagaccgtttgtccacttcattttgtataatcacagttgtgttcctgacactcaataaacagtcattggaaagagtgccagtcagcagtcatgcaaaaaaaaaaaaaaaaaaaaaaaaaaaaaaaaaaaa

SEQ ID NO: 883 - DNA, 1594 bp, Homo sapiens
  misc_feature (139)..(139): n equals a,t,g, or c
ggcattctgaggcttaaaggaaactcacaggccggcaaagggcccctcccttttgcccattcaccctggctggcctgcctttctcttgccagatgaagttgggaagggtaacaaccactgcgtcccctgcaaggcaggncacttccagaatacctcctcccccagcgcccgctgccagccccacaccaggtgtgagaaccaaggtctggtggaggcagctccaggcactgcccagtccgacacaacctgcaaaaatccattagagccactgcccccagagatgtcaggaaccatgctgatgctggccgttctgctgccactggccttctttctgctccttgccaccgtcttctcctgcatctggaagagccacccttctctctgcaggaaactgggatcgctgctcaagaggcgtccgcagggagagggacccaatcctgtagctggaagctgggagcctccgaaggcccatccatacttccctgacttggtacagccactgctacccatttctggagatgtttccccagtatccactgggctccccgcagccccagttttggaggcaggggtgccgcaacagcagagtcctctggacctgaccagggagccgcagttggaacccggggagcagagccaggtggcccacggtaccaatggcattcatgtcaccggcgggtctatgactatcactggcaacatctacatctacaatggaccagtactggggggaccaccgggtcctggagacctcccagctacccccgaacctccataccccattcccgaagagggggaccctggccctcccgggctctctacaccccaccaggaagatggcaaggcttggcacctagcggagacagagcactgtggtgccacaccctctaacaggggcccaaggaaccaatttatcacccatgactgactgagtctgagaaaaggcagaagaaggggggcacaagggcaccttctcccttgaggctgccctgcccacgtgggattcacaggggcctgagtagggcccggggaagcagagccctaagggattaaggctcagacacctctgagagcaggtgggcactggctgggtacggtgccctccacaggactctccctactgcctgagcaaacctgaggcctcccggcagacccacccaccccctggggctgctcagcctcaggcacggacagggcacatgataccaactgctgcccactacggcacgccgcaccggagcacggcaccgagggagccgccacacggtcacctgcaaggacgtcacgggcccctctaaaggattcgtggtgctcatccccaagcttcagagaccctttggggttccacacttcacgtggactgaggtagaccctgcatgaagatgaaattatagggaggacgctccttccctcccctcctagaggagaggaaagggagtcattaacaactagggggttgggtaggattcctaggtatggggaagagttttggaaggggaggaaaatggcaagtgtatttatattgtaaccacatgcaaataaaaagaatgggacctaaaaaaaaaaaaaaaaaaaaaaaaaaaaaaaaaaaagg

SEQ ID NO: 884 - DNA, 1668 bp, Homo sapiens
  misc_feature (51)..(51): n equals a,t,g, or c
  misc_feature (1583)..(1583): n equals a,t,g, or c
  misc_feature (1593)..(1593): n equals a,t,g, or c
  misc_feature (1662)..(1662): n equals a,t,g, or c
gacgcctgcaggtaccggtccggaattcccgggtacggctgcgagaagacnttcagaaggggccgccgggggtgccctgcaagctgttccgcgcgtcctgcccgtctgtccccgcgggtcgtcgcccgccacagccgcgccatgaccacccagcagatagacctccagggcccggggccgtggggcttccgcctcgtgggcggcaaggacttcgagcagcctctcgccatttcccgggtcactcctggaagcaaggcggctctagctaatttatgtattggagatgtaatcacagccattgatggggaaaatactagcaatatgacacacttggaagctcagaacagaatcaaaggctgcacagacaacttgactctcactgtagccagatctgaacataaagtctggtctcctctggtgacggaggaagggaagcgtcatccatacaagatgaatttagcctctgaaccccaggaggtcctgcacataggaagcgcccacaaccgaagtgccatgccctttaccgcctcgcctgcctccagcactactgccagggtcatcacaaaccagtacaacaacccagctggcctctactcttctgaaaatatctccaacttcaacaatgccctggagtcaaagactgctgccagcggggtggaggcgaacagcagacccttagaccatgctcagcctccaagcagccttgtcatcgacaaagaatctgaagtttacaagatgcttcaggagaaacaggagttgaatgagcccccgaaacagtccacgtctttcttggttttgcaggaaatcctggagtctgaagaaaaaggggatcccaacaagccctcaggattcagaagtgttaaagctcctgtcactaaagtggctgcgtcgattggaaatgctcagaagttgcctatgtgtgacaaatgtggcactgggattgttggtgtgtttgtgaagctgcgggaccgtcaccgccaccctgagtgttatgtgtgcactgactgtggcaccaacctgaaacagaagggccatttctttgtggaggatcaaatctactgtgagaagcatgcccgggagcgagtcacaccacctgagggttatgaagtggtcactgtgttccccaagtgagccagcagatctgaccactgttctccagcaggcctctgctgcagctttttctctcagtgttctggccctctcctctcttgaaagttctctgcttactttggttttccctctgcttgtaaaacattgagtcccctccctgccttggttaattgactcacaccagctgtgcgatgcccgcttttacaattaaaggaaaactgttktgttcagtgtcaccttgtcagcaacactgtgtcccttcgccccrccgttcttctctgctgcatttggacatcagccaaatttgaacccaatcaaatataacgtgtctgacactgattttgtttttactcaataaatgtatagactacaaaaaaaaaaaaaaagggcggccgctcttagaggatccctcgaggggcccaagcttacgcgtggcatgcgaacgtcatagctctactccctatagtggagtncgtattatanagctaggcactgggccgtcgtttttacaacgttcgtgaactggggagattctgctaagcttggggatcntttgtg

SEQ ID NO: 885 - DNA, 2430 bp, Homo sapiens
gcggagggggtggaggtttgtctccgctgtttcatctctatggctgtcagaggtgggcggctttgaccgagaggctgctggagctcgtgtttggacgcgatgtttcgtctgaactcactttctgctttggcagaactggctgtgggttctcgatggtaccatggaggatcacagcccatccagatccggcgaagactaatgatggtggctttcctgggagcatctgcagtaactgcaagtactggtcttttgtggaagagggcccatgcagaatctccaccatgtgtagacaacctaaaaagtgacatcggtgataaagggaagaataaagatgaaggggatgtttgtaaccatgagaaaaagactgcagatcttgcccctcacccagaagagaaaaagaagaaacgttctggattcagagacagaaaagtgatggaatatgagaataggattcgagcctactccacgccagacaaaatcttccgatattttgccaccttgaaagtcatcagtgagcctggtgaagcagaagtgtttatgacaccagaagattttgtgcgatccataacacccaatgaaaaacaaccagaacacttgggtctggatcaatatataataaaacgctttgatggaaagaaaatttcccaggaacgagaaaaatttgctgatgaaggcagtatattttacacccttggagaatgtgggctcatatccttttcagactacattttcctcacaactgttctttccactcctcagagaaattttgaaattgccttcaagatgtttgatttgaatggagatggagaagtagatatggaagaatttgaacaggttcagagcatcattcgctcccaaaccagtatgggtatgcgccacagagatcgtccaactactggcaacaccctcaagtctggcttgtgttcagccctcacaacctacttttttggagctgatctgaagggaaagctgacaatcaaaaacttcctcgaatttcagcgtaaactgcagcatgatgttctgaagcttgagtttgaacgccatgaccctgtggatgggagaattactgagaggcagtttggtggcatgctacttgcctacagtggggtgcagtccaagaagctgaccgccatgcagaggcagctcaagaagcacttcaaagaaggaaagggtctgacatttcaggaggtggagaacttctttactttcctaaagaacattaatgatgtggacactgcattgagtttttaccatatggctggagcatctcttgataaagtgaccatgcagcaggtggccaggacagtggctaaagtggagctctcagaccacgtgtgtgatgtggtgtttgcactctttgactgtgatggcaatggcgaactgagcaataaggaatttgtttccatcatgaagcaacggctgatgagaggcctggaaaagcccaaagacatgggtttcactcgcctcatgcaggccatgtggaaatgtgcacaggaaactgcctgggacttcgctttacccaaacagtaaccccacactgcaagaggggacccctccacccccagtaccctggaccccctccgcagagtctcggcagagccctttgtgctgctgcttctggaagtagtcycccttcctcccgggatgacctcaggactctgtcggtttcccctctttacccttccccgtccccgtgttctgctgggctctgattctgcccaatgagtatccccataggttctcaaaaacatgaacaagtctgtaaagctcagacatttgtcagcctcaacagcaccacccattcaagcatcctgtggataaagaattcagggaaccatccacacacctgccaaccctgggaagcatccagttctcaaatcgtttttgctatggatttatactaacaagaacattccttgacttccctcctgctggtgttttaaagccacaagtagggaagatatctggcaggcagaaagaagtctgtgatgataaacaatgatgaggatgacctaggcaccctacgctagtgtgagaagcctgcgccccaggaaggatctgtgttagtccctgggatggctccaaggcctgctctaggaaggcagcatgctcagtgggaacacagcaagattcagaatttaaagtagttgcttcatggctctgtgcactcccttttcttcctcgcagcctccctaagatgactccagtgtgaccctgtgcttagtgagcaatagtgattgagctcatgttccctgcaagtgccatttcctctccaggatgggcctctaaagctgaggcctggctcagagcctgtttgccctctgtcttaaacaattgtaaatatcacttaaattataaccatttgcaataaacatccccaaagttaaaaaaaaaaaaaaaaaaaaaaaaaaaaaawaaaaaaaaaaaaaa

SEQ ID NO: 886 - DNA, 1259 bp, Homo sapiens
  misc_feature (732)..(732): n equals a,t,g, or c
accgtgtgaaccaaacaatctcttttcaaaacagggtatactttggtttatttaaacaggtaagaaagcggtccctacttctgaggagaaaatgtggtttctgacttttaggtacatcacgatatcaccagtctgaatgagtttccttttctgtaaagcagaaagtgtcattttcttttcctccagtgttcagttgctcctcttcgaaatcctgccttccctgccccagtacccccaggagaagattccaaagatgtagccgccccacacagacagccactcacctcttcagaacgaattgacaaacaaattcggtacatcctcgacggcatctcagccctgagaaaggagacatgtaacaagagtaacatgtgtgaaagcagcaaagaggcactggcagaaaacaacctgaaccttccaaagatggctgaaaaagatggatgcttccaatctggattcaatgaggagacttgcctggtgaaaatcatcactggtcttttggagtttgaggtatacctagagtacctccagaacagatttgagagtagtgaggaacaagccagagctgtgcagatgagtacaaaagtcctgatccagttcctgcagaaaaaggcaaagaatctagatgcaataaccacccctgacccaaccacaaatgccagcctgctgacgaagctgcaggcacagaaccagtggctgcaggacatgacaactcatctcattctgcgcagntttaaggagttcctgcagtccagcctgagggctcttcggcaaatgtagcatgggcacctcagattgttgttgttaatgggcattccttcttctggtcagaaacctgtccactgggcacagaacttatgttgttctctatggagaactaaaagtatgagcgttaggacactattttaattatttttaatttattaatatttaaatatgtgaagctgagttaatttatgtaagtcatatttatatttttaagaagtaccacttgaaacattttatgtattagttttgaaataataatggaaagtggctatgcagtttgaatatcctttgtttcagagccagatcatttcttggaaagtgtaggcttacctcaaataaatggctaacttatacatatttttaaagaaatatttatattgtatttatataatgtataaatggtttttataccaataaatggcattttaaaaaattcaaaaaaaaaaaaaaaaaaaaaaaaaaaaaaaaaaaaaaaaaaaaagggcggccgc

SEQ ID NO: 887 - DNA, 2067 bp, Homo sapiens
  misc_feature (5)..(5): n equals a,t,g, or c
  misc_feature (2058)..(2058): n equals a,t,g, or c
  misc_feature (2063)..(2063): n equals a,t,g, or c
aaaanaaagaaatttgccctgccatgatttgcacctgatattcagggatcactctcaaaataaattgccccaggttattgcctcatacaccgccaccggccccgagcagctcactctcgcccctggtcagctgattttgatccgaaaaaagaacccaggtggatggtgggaaggagagctgcaagcacgtgggaaaaagcgccagataggctggttcccagctaattatgtaaagcttctaagccctgggacgagcaaaatcactccaacagagccacctaagtcaacagcattagcggcagtgtgccaggtgattgggatgtacgactacaccgcgcagaatgacgatgagctggccttcaacaagggccagatcatcaacgtcctcaacaaggaggaccctgactggtggaaaggagaagtcaatggacaagtggggctcttcccatccaattatgtgaagctgaccacagacatggacccaagccagcaatgaatcatatgttgtccatccccccctcaggcttgaaagtcctcaaagagacccactatcccatatcactgcccagaggatgatgggagatgcagccttgatcatgtgacttccagcatgatcacctactgccttctgagtagaagaactcactgcagagcaktttacctcattttaccttagttgcatgtgatcgcaatgtttgagttattacttgcagagataggagcaaaaattacaaaaacacacagggtagtgggtccttttgtggctttcctagttactcaaattgactttcccccacctttgcacaggtgctttcaatagttttaaaattatttttaaatatatattttagctttttaataaacaaaataaataaatgacttctttgctattttggttttgcaaaaagacccactatcaaggaatgctgcatgtgctattaaaaattgttccaaatgtccataaatctgagacttgatgtattttttcattttgtccagtgttaccaactaaattgtgcagtttggggcttttcccccttaccatagaagtgcagaggagttcagtatctctgttttaaagacgtatagaatgagcccaattaaagcgaaggtgtttgtgcttgtttgtgtgtatcagctgtaccttgttgagcatgtaatacatcctgtacataagaaattagttctttccatggcaaagctattaccttgtacgatgctctaatcatattgcatttaattttattttgcacagtgaccttgtagccacatgagaaagcactctgtgtttttgttcggtctcagatttatctggttgagttggtgttttgtttggggtttttaattttgcgtgtttgcatagcataaaatcagtagacaacaccactgaggtcgttacgatcaacgatatccacagtctctttttagtctctgttacatgaagttttattccagttacttttcatggaatgacctattttgaacaagtaattttcttgacaagaaagaatgtatagaagtctccctgcaattaatttccaatgtttacattttttaactagactgtggaatttctacagattaatatgaaatggagctcatggtccgtttgtgtgttagatatgctgtagctgaagccctgtttgtcttttaaacactagttggaagctctcaataaaaatgcctgctgctcacagcacagaaaatggggcagggggagcctcaagcacaatctagctgtcctcctaaagactctgtaatgctcactcccctcgcgttctcccggcgctgtcgggaggctgtgctggtggtcgtgtagaggtccttctcctttcacatggtgcagagagcgaggacctctcctcctcgttcagttgcacttcagtattttcacggatatgaatgtaaaatatataaatatataaactgcggctttaacaactgtaatacaaccttttgaattagttccgtgtatagataattaaattcttcatacaaaagttaaaaaaaaaaaaaaaaaaaaaaaaaaaaaaaaaaaaaaaaaaaaaaaaaaaaaanggggnggcc

SEQ ID NO: 888 - DNA, 2548 bp, Homo sapiens
  misc_feature (2525)..(2525): n equals a,t,g, or c
  misc_feature (2530)..(2530): n equals a,t,g, or c
  misc_feature (2544)..(2544): n equals a,t,g, or c
  misc_feature (2547)..(2548): n equals a,t,g, or c
gattaaatttcattaatgtcagtgattaaaactagattcattgtaaataagttgaatttacaaattaatttttagaacagatatatttcaataccataacatttataataaagttccatttcaatttagacagcatataaaacataatatgtagcattctttacagggaaaaggatttatctgatgcccctctgtatgacccaatatcaacctcactttattgtggcatatgtaaaattaactttggcaatgattaattatatattctcatgaaattattttacctttttcaagaaagagaatgcgaacttcctaaaatagatgtacacttagttcctgatcgcaagaaagaccagtataaagttggagaggtgttgaaattctcctgcaaaccaggatttacaatagttggacctaattccgttcagtgctaccactttggattgkctcctgacctcccaatatgtaaagagcaagtacaatcatgtggtccacctcctgaactcctcaatgggaatgttaaggaaaaaacgaaagaagaatatggacacagtgaagtggtggaatattattgcaatcctagatttctaatgaagggacctaataaaattcaatgtgttgatggagagtggacaactttaccagtgtgtattgtggaggagagtacctgtggagatatacctgaacttgaacatggctgggcccagctttcttcccctccttattactatggagattcagtggaattcaattgctcagaatcatttacaatgattggacacagatcaattacgtgtattcatggagtatggacccaacttccccagtgtgtggcaatagataaacttaagaagtgcaaatcatcaaatttaattatacttgaggaacatttaaaaaacaagaaggaattcgatcataattctaacataaggtacagatgtagaggaaaagaaggatggatacacacagtctgcataaatggaagatgggatccagaagtgaactgctcaatggcacaaatacaattatgcccacctccacctcagattcccaattctcacaatatgacaaccacactgaattatcgggatggagaaaaagtatctgttctttgccaagaaaattatctaattcaggaaggagaagaaattacatgcaaagatggaagatggcagtcaataccactctgtgttgaaaaaattccatgttcacaaccacctcagatagaacacggaaccattaattcatccaggtcttcacaagaaagttatgcacatgggactaaattgagttatacttgtgagggtggtttcaggatatctgaagaaaatgaaacaacatgctacatgggaaaatggagttctccacctcagtgtgaaggccttccttgtaaatctccacctgagatttctcatggtgttgtagctcacatgtcagacagttatcagtatggagaagaagttacgtacaaatgttttgaaggttttggaattgatgggcctgcaattgcaaaatgcttaggagaaaaatggtctcaccctccatcatgcataaaaacagattgtctcagtttacctagctttgaaaatgccatacccatgggagagaagaaggatgtgtataaggcgggtgagcaagtgacttacacttgtgcaacatattacaaaatggatggagccagtaatgtaacatgcattaatagcagatggacaggaaggccaacatgcagagacacctcctgtgtgaatccgcccacagtacaaaatgcttatatagtgtcgagacagatgagtaaatatccatctggtgagagagtacgttatcaatgtaggagcccttatgaaatgtttggggatgaagaagtgatgtgtttaaatggaaactggacggaaccacctcaatgcaaagattctacaggaaaatgtgggccccctccacctattgacaatggggacattacttcattcccgttgtcagtatatgctccagcttcatcagttgagtaccaatgccagaacttgtatcaacttgagggtaacaagcgaataacatgtagaaatggacaatggtcagaaccaccaaaatgcttacatccgtgtgtaatatcccgagaaattatggaaaattataacatagcattaaggtggacagccaaacagaagctttattcgagaacaggtgaatcagttgaatttgtgtgtaaacggggatatcgtctttcatcacgttctcacacattgcgaacaacatgttgggatgggaaactggagtatccaacttgtgcaaaaagatagaatcaatcataaagtgcacacctttattcagaactttagtattaaatcagttctcaatttcatttttwatgtattgttttactcctttttattcatacgtaaaattttggattaatttgtgaaaatgtaattataagctgagaccggtggctctcttcttaaaagcaccatattaaawcctggaaaactaaaaaaaaaaaaaaaggggcccgtttttaaaaggatccaagnttacntacccgggcatgcnaann

SEQ ID NO: 889 - DNA, 1616 bp, Homo sapiens
  misc_feature (551)..(551): n equals a,t,g, or c
gctgagaccctcctgcagccttctcaagggacagccccactctgcctcttgctcctccagggcagcaccatgcagcccctgtggctctgctgggcactctgggtgttgcccctggccagccccggggccgccctgaccggggagcagctcctgggcagcctgctgcggcagctgcagctcaaagaggtgcccaccctggacagggccgacatggaggagctggtcatccccacccacgtgagggcccagtacgtggccctgctgcagcgcarccacggggaccgctcccgcggaaagaggttcagccagagcttccgagaggtggccggcaggttcctggcgttggaggccagcacacacctgctggtgttcggcatggagcagcggctgccgcccaacagcgagctggtgcaggccgtgctgcggctcttccaggagccggtccccaaggccgcgctgcacaggcacgggcggctgtccccgcgcagcccgggcccgggtgamcgtcgagtggctkcgcgtccgcgacgacggctycaamcgcacytccntcatcgactccaggctggtgtccgtccacgagagcggctggaaggccttcgacgtgaccgaggccgtgaacttctggcagcagctgagccggccccggcagccgctgctgctacaggtgtcggtgcagagggagcatctgggcccgctggcgtccggcgcccacaagctggtccgctttgcctcgcagggggcgccagccgggcttggggagccccagctggagctgcacaccctggaccttggggactatggagctcagggcgactgtgaccctgaagcaccaatgaccgagggcacccgctgctgccgccaggagatgtacattgacctgcaggggatgaagtgggccgagaactgggtgctggagcccccgggcttcctggcttatgagtgtgtgggcacctgccggcagcccccggaggccctggccttcaagtggccgtttctggggcctcgacagtgcatcgcctcggagactgactcgctgcccatgatcgtcagcatcaaggagggaggcaggaccaggccccaggtggtcagcctgcccaacatgagggtgcagaagtgcagctgtgcctcggatggtgcgctcgtgccaaggaggctccagccataggcgcctagtgtagccatcgagggacttgacttgtgtgtgtttctgaagtgttcgagggtaccaggagagctggcgatgactgaactgctgatggacaaatgctctgtgctctctagtgagccctgaatttgcttcctctgacaagttacctcacctaatttttgcttctcaggaatgagaatctttggccactggagagcccttgctcagttttctctattcttattattcactgcactatattctaagcacttacatgtggagatactgtaacctgagggcagaaagcccaatgtgtcattgtttacttgtcctgtcactggatctgggctaaagtcctccaccaccactctggacctaagacctggggttaagtgtgggttgtgcatccccaatccagataataaagactttgtaaaacatgaataaaacacattttattctaaaa

SEQ ID NO: 890 - DNA, 809 bp, Homo sapiens
  misc_feature (807)..(807): n equals a,t,g, or c
ctggaacagccagaaggaagtcctggagaggacccgggcggagttggacacggtgtgcagacacaactaccagttggagctccgcacgaccttgcagcggcgagtggagcccacagtgaccatctccccatccaggacagaggccctcaaccaccacaacctgctggtctgctcagtgacagatttctatccagcccagatcaaagtccggtggtttcggaatgaccaggaggagacaaccggcgttgtgtccaccccccttattaaggaacggtgactggacyttccagatcctggtgatgctggaaatgactccccagcrtggagaygtctacacctgccacgtggagcaccccagcctccagarccccatcaycgtggagtggcggctyctgcactgactcctgagactattttaactgggattggttatcacttttctgtracgcctgcttgtscctgcccagaattcccagctgyctgtgtcagcytgtccccctgagatcaragtcctacagtggctgtcacgcagccaccaggtcatctcctttcatccccaccyyraggcgmtggctgtgacyctrcttcctgcactgacccasagccwctgcctgtgcacggccagctgcgtctactcaggycccaaggggtttctgtttctattctytcctcagactgctcaagagaagcacatgaaaamcattacctgacttyagagcttttttacataattaaacatgatcctgagttaaaaaaaaaaaaaaaaaaaaaaaaaaaaaaaaaaaagggcggccgctctaaaagatncc

SEQ ID NO: 891 - DNA, 514 bp, Homo sapiens
  misc_feature (360)..(360): n equals a,t,g, or c
  misc_feature (385)..(385): n equals a,t,g, or c
  misc_feature (514)..(514): n equals a,t,g, or c
gggcgcgggccgaccgggcgcaccgaccatggcctccaaatgccccaagtgcgacaagaccgtgtacttcgccgagaaggtgagctccctggggaaggactggcacaagttctgcctcaagtgcgagcgctgcagcaagacgctgacgcccgggggccacgccgagcatgacgggaagccgttctgccacaagccgtgctacgccaccctgttcggacccaaaggcgtgaacatcgggggcgcgggctcctacatctacgagaagcccctggcggaggggccgcaggtcaccggccccatcgaggtccccgcggcccgagcagaggagcggaaggcgagcggccccccgaaggggcccancagagccttcagtgtcaccactttnaccggggagcccaacacgtgcccgcgctgcagcaagaaggtgtacttcgctgagaaggtgacagtctctgggcaaggattggcaccggccctgcctgcgctgcgagcgctgcggtaagacactgacccn

SEQ ID NO: 892 - DNA, 1514 bp, Homo sapiens
gccagctcgaaattaaccctcactaaagggaacaaaagctggagctccaccgcggtggcggccgctctagaactagtggatcccccgggctgcaggaattcggcacgagggagacctctatctgcacttcttccaaggcctgagcggtttgatctggctggacttgtcccagaaccgcctgcacaccctgcctgccccaaaccctgcgcaacctccccaagagcctacaggtgctgcgtctccgtgacaattacctggccttctttaagtggtggagcctccacttcctgcccaaactggaagtcctcgacctggcaggaaaccagctgaaggccctgaccaatggcagcctgcctgctggcacccggctccggaggctggatgtcagctgcaacagcatcagcttcgtggcccccggcttcttttccaaggccaaggagctgcgagagctcaaccttagcgccaacgccctcaagacagtggaccactcctggtttgggcccctggcgagtgccctgcaaatactagatgtaagcgccaaccctctgcactgcgcctgtggggcggcctttatggacttcctgctggaggtgcaggctgccgtgcccggtctgcccagccgggtgaagtgtggcagtccgggccagctycagggcctyagcatctttgcacaggacctgcgcctctgcctggatgaggccctctcctgggactgkttcgccctctcgctgctggctgkggctytgggcctgggtgtgcccatgctgcatcacctctgtggctgggacctctggtactgcttccacctgtgcctggcctggcttccctggcgggggcggcaaagtgggcgagatgaggatgccctgccctacgatgccttcgtggtcttcgacaaaacgcagagcgcagtggcagactgggtgtacaacgagcttcgggggcagctggaggagtgccgtgggcgctgggcactccgcctgtgcctggaggaacgcgactggctgcctggcaaaaccctctttgagaacctgtgggcctcggtctatggcagccgcaagacgctgtttgtgctggcccacacggaccgggtcagtggtctcttgcgcgccagcttcctgctggcccagcagcgcctgctggaggaccgcaaggacgtcgtggtgctggtgatcctgagccctgacggccgccgctcccgctacgtgcggctgcgccagcgcctctgccgccagagtgtcctcctctggccccaccagcccagtggtcagcgcagcttctgggcccagctgggcatggccctgaccagggacaaccaccacttctataaccggaacttctgccagggacccacggccgaatagccgtgagccggaatcctgcacggtgccacctccacactcacctcacctctgcctgcctggtctgaccctcccctgctcgcctccctcaccccacacctgacacagagcaggcactcaataaatgctaccgaaggctaaaaaaaaaaaaaaaaa

SEQ ID NO: 893 - DNA, 1328 bp, Homo sapiens
tctaatacgactcactatagggaaagctggtacgcctgcaggtaccggtccggaattcccgggtcgacccacgcgtcckctcttcactgcccgtctgaggcccggcagcccctccctggcgctcttcctgagcaatggccacttcgttgcacagatggaaggcctcgggactcggctccgcgcccagagccgccagcgctcccggcctggccgctggcacaaggtctccgtgcgctgggagaagaaccggatcctgctggtgacggacggggcccgggcctggagccaggaggggccgcaccggcagcaccagggggcagagcacccccagccccacaccctctttgtgggcggcctcccggccagcagccacagctccaaacttccggtgaccgtcgggttcagcggctgtgtgaagagactgaggctgcacgggaggcccctgggggcccccacacggatggcaggggtcacaccctgcatcttgggccccctggaggcgggcctgttcttcccaggcagcgggggagttatcactttagacctcccaggagctacactgcctgatgtgggcctggaactggaggtgcggcccctggcagtcaccggactgatcttccacttgggccaggcccggacgcccccctacttgcagttgcaggtgaccgagaagcaagtcctgctgcgggcggatgacggagcaggggagttctccacgtcagtgacccgcccctcagtgctgtgtgatggccagtggcaccggctagcggtgatgaaaagcgggaatgtgctccggctggaggtggacgcgcagagcaaccacaccgtgggccccttgctggcggctgcagctggtgccccagcccctctgtacctcgggggcctgcctgagcccatggccgtgcagccctggccccccgcctactgcggctgcatgaggaggctggcggtgaaccggtcccccgtcgccatgactcgctctgtggaggtccacggggcagtgggggccagtggctgcccagccgcctaggacacagccaaccccggcccctggtcaggcccctgcagctgcctcacaccgccccttgtgctcgcctcataggtgtctatttggactctaagctctacgggtgacagatcttgtttctgaagatggtttaagttatagcttcttaaacgaaagaataaaatactgcaaaatgtttttatatttggcccttccacccatttttaattgtgagagatttgtcaccaatcatcactggttcctccttaaaaattaaaaagtaacttctgtgtaaaaaaaaaaaaaaaaaaaaaaaaaaaaa

SEQ ID NO: 894 - DNA, 3263 bp, Homo sapiens
  misc_feature (3233)..(3233): n equals a,t,g, or c
agaagcaggagggagaagggcagacaggggtcggttgagccagggtagaaaccaaggggagccagggtagaaaccaaggggtcagggctgggctggaggacacggctgaggtcctcccaaaactgggccratgtggtgtgacatccccaccagcctcagatgagacgggccaggacgcccagccacagcaagccctgtccctttgccggatccccaaacactagagaagctctcctaacccaaggcggagaatgaaggtggtggcggcagaggaggagggcagcagctgagaggccagggacagggtgcctcgccaagctgtctgaggtctgtcccaggtggcccaggtggtgcaggtagaacagggtgaggagagggggtcggctcarcaggaggaggctgtggctgcagagcctggrggagcttttaggtgttgagatggggcagctctgaatcctagaccctggaatagcctgtcccttttctctgggtctcgtggtggagccatgatctgggctgctctcttggggacactgggtggtggttacacagttgacctctgcctggctcccccttggtgcaactcctgcctccatcccccttgctggggtcccctcatccacttgagggcgcctgagggccaggarcagcaggcaaggagcctgggtctaggctaagggggtgtgtgcccacctcctccctgacccttaacactcctgtcctgcccagaccaacagagagagctgtccctgagaccccggagagaagcagctgccgaaagctgcagcctttccgcactctgagaccatgatcttcctcctgccaggggagagccacccacaggccatgtccagccccacttccctcagcccccagggcttccttctggcccctctgaggattccctagggctgccccgcagaggggcttccccaagctctgttttgaagcctgcaatgtggaaaagtgagaagtcagagggaacaggacaggtgcagccgggctctgaggccacacctcacacctcgctgttccccaacatcccctgagcagtgtgagctcatctcaccagatgagaagaggccctgtgcatttcttttgtttgtttgttgctgttttcccccacccatccagttctcctcagcaaagcaaattccttaacacctttggtggagaatttcttacccagacttggggctgtgatgcccttcagtgcgtggtgagtgcagcgtgtgtgcgtgtgcctgtgtgtgaactgggkgccagtggtgggtgtggggtcaatgcagtgaggctctctgggtgaggctcccaacctggcagtccccagcctcccagcatctgtgagcgtctgttggactttacagaagagcctcatcccgtctgcccctcactctgccctggaatcaacatcttccgagtccttcttgggggaaatagcagagccccacttaactccataaactgcttcccattccgcagcccagttctgattgttgaggtgtcgcgtcgttccaggtcccccagtcccctctttctcctgtcctctctctgtccttcacctccccactccagccccggctcagttcagggaaatgctgttccayatcagccctctgctctctgaggcagccgcgcctctgactcggagctacttgaaacttctgctcttgctaggattggagtctacctatctcttccatttgtcccagctggagttctggaactttcctcctcggggtgggggtgggggttgttaaggatgctggggggcctggggaaggaaggagttcagaggaagggtgtcccctgtcctcttgatgtcaccctccgctcctgggacacgtgctctctctgtctctgggtcttctggctgtgcacgtttgtgtgtccttgtaaatatgttttaggaagaaagcaaaagggactgaactagcctctggtaggattgcaggggtccagccttgcctgtttccgaagcccccacactgcctttcgccccactgagactggtcccctcaaaaggtagacaaaacagcagctccctgtggagctgaagggcggcctcaaagtggctttttgttagacaaggttaaggtttcctcatgagcaaggttgcagatcggtccttcctcagctccttgatttgtgaccttgaccaaggggcctgccacccagcccctccagtgccctctcctcgatgcctcgctccttcctgcccccactcccctggcttaggcaggtaggggaattagggccatgctggaagaagcttaaccatgtgttcaaagaacggtttcttgcttgcttggtcctggaactccccttggctgccccaggcctccttggcccatgggtgctgggggaggtggatgtcagatctggtaggttgcagcagagaaaataaatgtgccttgagagaccactcagagagggtccaagggtgatggagaaggaagcatggcctgggagcttggaagggaggggtggtgggtggcggcatcttgactgccccctgttgtcccacacgtggggggtggtcaccccccttcactccagcccgcctgccttcagccttccatgagcttcacctgcttccaacttcactttggagggggtggggtccgttggcatcaacacggggaccctctgcttcaccaaagcccgagccctcagcccctggggagaacaaatggctgagctttgatacctggggtcgtcgagaggctgcgggctggcggcagtcccaggggagagacaccacagaaggagacccagacatcccgaggaagttcccagcagagcaaactgctttccagcctgaagcctgcttaaactgtgtgatgtgcaataactgagcttagagttaggaattgtgttcaagtgcttggatttccgtctgtagatttaactgctgaaattgtatctctcagtaattttagatgtcttttaaaaaattgaaaaacaaagtgttagactgtgtgcgtgtgcgttgatgggcactcaagagtcccgtgagtcatccagccctgcctttcccctgcgcccccatcctctcacgtcccgcccygcctccacttggggaccctgcctcgtgtcgtctttatctgcctattactcagcctaaggaaacaagtacactccacacatgcataaaggaaatcaaatgttatttttaagaaaatggaaaataaaaactttataaacaccaaaaaaaaaaaaaaaaaaacccngggggggggccggtaacccatttcgcctaa

SEQ ID NO: 895 - DNA, 1519 bp, Homo sapiens
  misc_feature (76)..(76): n equals a,t,g, or c
  misc_feature (81)..(81): n equals a,t,g, or c
agggttgagatgtgtataaggagacagctattaccatggtgatgcggttttggcagtacatcaatgggcgtggatngcggnttgactcacggggatttccaagtctccaccccattgacgycaatgggagtttgktttggcaccaaaatcaacgggactttccaaaatgtcgtaacaactccgccccattracgcaaatgggcggtaggcgtgtacggtgggaggtctatataagcagagctcgtttagtgaaccgtcagatcgcctggagacgccatccacgctgttttgacctccatagaagacaccgggaccgatccagcctccggactctagcctaggccgcgggacggataacaatttcacacaggaaacagctatgaccactaggcttttgcaaaaagctatttaggtgacactatagaaggtacgcctgcaggtaccggtccggaattcccgggtcgacccacgcgtccggaatgtgtgagggtgggtgggaggctaggtttttggctaggagttctgaaataggctcaggccacttttttcagacttttaagtgtgtatgtaagtgtgggtatgtgtgtttttaagtgtgtgtgtttaaaaataatgttttatcttccctccctgttccttaccgttttcattttccaacagtctactagagaaaaacatggttggccttgagaacataaaggaagaggcatgtatttgacatggtatttttccctttctttatgttataattgagtagtagccctctaatttgtagtttgggcaagtacagccaacaccctgactcttaaccttattatgagaacttcctttttacccctttttttgtttttgtgcaaaacagagatggggttgaggaaggagggttggcgagcaaggccagcttctgccctacagaattgggtgtgtcttttttttcaagtgaggctttgggaaagtgttcaaatgagagcagtcttaaggtctctaagagatggggaatgtgctatgtatatcctgcctgtgaaagcccaaaccatatgggagaagctagaggatactaaaaacaatgaaattgtgatttggaagtttagaacattgttttaaaaattacattataaatgtaagacatgctttttatgtgtatatccgaagggaaacagctacatcctcaagtttttgcagcctatatgacttgagattggagcttgtgaatttaacagtactggtgccatgagaatgagcaaagcctagccaatggatactattgtgtttagattgttcatctttggtagctttaggttcttgatcgaggttcttaagatttctaagtcctttataaaaataggtcaagagtcctgttgttatggaggcttgattatcccagatattaggagtgaacatttttaataaatctttcagaaaatcttggctagaaagaattctaagttagttgtctaaccactgaaaactacctagccagagactgtctcttatacacatctcaacggtcatggctaaa

SEQ ID NO: 896 - DNA, 2427 bp, Homo sapiens
  misc_feature (17)..(18): n equals a,t,g, or c
  misc_feature (33)..(33): n equals a,t,g, or c
  misc_feature (2279)..(2279): n equals a,t,g, or c
  misc_feature (2350)..(2350): n equals a,t,g, or c
  misc_feature (2369)..(2369): n equals a,t,g, or c
  misc_feature (2394)..(2394): n equals a,t,g, or c
  misc_feature (2416)..(2416): n equals a,t,g, or c
ccgattcattaatgcanntggcagacaggtttnccgactggaaagcgggcagtgagcgcaacgcaattaatgtgagttagctcactcattaggcaccccaggctttacactttatgcttccggctcgtatgttgtgtggaattgtgagcggataacaatttcacacaggaaacagctatgaccatgattacgccaagctcgaaattaaccctcactaaagggaacaaaagctggagctccaccgcggtggcggccgctctagaactagtggatcccccgggctgcaggaattcggcacgagatgtcgcgggcctcgctgggactccctgggagatgaggccgcgaggtctcccgccgctcctggtggtgctcctgggctgctgggcctccgtgagcgcccagaccgatgccaccccggcggtgacgacagagggcctcaactccaccgaggcagccctggccaccttcggaactttcccgtcgaccaggccccccgggactcccagggctccagggccctcctccggccccaggcctaccccagtcacggacgttgctgttctctgtgtctgtgacttatccccagcacagtgtgacatcaactgctgctgtgatcccgactgcagctccgtggatttcagtgtcttttctgcctgctcagttccagttgtcacgggcgacagccagttttgtagtcaaaaagcagtcatctattcattgaattttacagcaaacccacctcaaagagtatttgaacttgttgaccagattaatccatctattttctgcattcatattacaaactataaacctgcattatcctttattaatccagaagtacctgatgaaaacaattttgatacattgatgaaaacatctgatggttttacattgaatgctgaatcatatgtttccttcacaaccaaactggatattcctactgctgctaaatatgagtatggggttcctctgcagacttcagattcgtttctgagatttccttcgtccctgacatcatctctgtgcactgataataaccctgcagcgtttctggtgaaccaggctgttaagtgcaccagaaaaataaatttagaacagtgtgaagaaattgaagccctcagcatggctttttacagcagcccggaaattctgagggtacctgattcaagaaaaaaggtccctatcactgttcagtccatcgtcattcagtctctaaataaaacgctcacccgacgggaggacactgatgtgctgcagccgactctcgtcaacgctggacactttagcctttgcgtgaatgttgttcttgaggtaaagtacagcctcacatacacagatgcaggtgaagtcaccaaagctgatctctcattcgttctggggacagttagcagcgtagtggtcccactgcagcaaaagtttgaaattcattttcttcaggaaaatacccagccagtccctctcagtggaaaccctggttatgtcgtggggctcccattagctgctggattccagcctcataaggggtctgggattattcagaccacaaatagatatggacagcttactattcttcatagcacaactgagcaagactgcttagcactggagggggtccggaccccagtattatttggttacactatgcaatctggctgtaaactaagactgactggagctctcccgtgtcagctcgtagcacagaaggtgaagagcctgctgtggggccagggcttcccagattacgtggccccttttggaaattcccaggcccaggacatgctggactgggtgcccatccacttcatcacccagtcattcaacaggaaggattcctgccagctcccaggggctttggttatagaagtgaagtggactaaatacggatccctgctgaatccacaggccaaaatagtcaatgtaactgcaaatctaatttcatcctcctttcctgaggccaactcaggaaatgaaaggacgattcttatttccactgcggttacttttgtggatgtgtctgcacctgcagaggcaggcttcagagctccaccagccatcaatgccaggctgccctttaacttcttcttcccgtttgtttgacaatgctcagatgcatcagttccttaatatacacgtgaaatttgaaaactgtacattcggtgagattaaattttatatacaactagcaaaaaaaaaaaaaaaaaaastcgagggggggcccggtacccaattcgccctatagtgagtcgtattacaattcactggccgtcgttttacaacgncgtgactgggaaaaccctggcgttacccaacttaatcgccttgcagcacatccccctttcgccagctggcntaatagcgaagaggcccgnaccgatcgcccttcccaacagttgngcagcctgaatggcaaatggcnaattgtaagcg

SEQ ID NO: 897 - DNA, 1800 bp, Homo sapiens
  misc_feature (362)..(362): n equals a,t,g, or c
  misc_feature (1788)..(1788): n equals a,t,g, or c
  misc_feature (1794)..(1795): n equals a,t,g, or c
ggcgcttgcgcgccaagacggctcggatgccggcggtctctgctgaagagagaagatggcgcttgacggaccagagcaggtatggcgggtgcagtggcggcccggcaggttacggggctgggtgcggacgagcgtgatctgagtggagagcgggccggggcaggagcgtcgggtgggtcggaggtgcctggaccagtccatgctggacgctgcctgcraccggatctgctgtgtcagcgccgccctcggtgagtcagggcaaggctgggagaggaagacgcggtakaagcggatgaaktgagggaagcgatgggcgcgggaatggccggcccacgggtcgcaggagacgggacgccagcttntggctccgttccgctggctccttcgtcagtactgacacctcgggcttgtagagcacttcacgcagcmaaagcgccccccgtctatatcatatcgcctctcggtcctcctaaaagtcgtatgagatggagctggaggaggggaaggcaggcagcggactccgccaatattatctgtccaagattgaagaactccagctgattgtgaatgataagagccaaaacctccggaggctgcaggcacagaggaacgaactaaatgctaaagttcgcctattgcgggaggagctacagctgctgcaggagcagggctcctatgtgggggaagtagtccgggccatggataagaagaaagtgttggtcaaggtacatcctgaaggtaaatttgttgtagacgtggacaaaaacattgacatcaatgatgtgacacccaattgccgggtggctctaaggaatgacagctacactctgcacaagatcctgcccaacaaggtagacccattagtgtcactgatgatggtggagaaagtaccagattcaacttatgagatgattggtggactggacaaacagatcaaggagatcaaagaagtgatcgagctgcctgttaagcatcctgagctcttcgaagcactgggcattgctcagcccaagggagtgctgctgtatggacctccaggcactgggaagacactgttggcccgggctgtggctcatcatacggactgtacctttattcgtgtctctggctctgaattggtacagaaattcataggggaaggggcaagaatggtgagggagctgtttgtcatggcacgggaacatgctccatctatcatcttcatggacgaaatcgactccatcggctcctcgcggctggaggggggttctggaggggacagtgaagtgcagcgcacgatgctggagttgctcaaccagctygacggctttgaggccaccaagaacatcaaggttatcatggctactaataggattgatatcctggactcggcactgcttcgcccagggcgcattgacagaaaaattgaattcccaccccccaatgaggaggcccggctggacattttgaagattcattctcggaagatgaacctgacccgggggatcaacctgagaaaaattgctgagctcatgccaggagcatcaggggctgaagtgaagggcgtgtgcacagaagctggcatgtatgccctgcgagaacggcgagtccatgtcactcaggaggactttgagatggcagtagccaaggtcatgcagaaggacagtgagaaaaacatgtccatcaagaaattatggaagtgagtggacagcctttgtgtgtatctctccaataaagctctgtgggccaagtcaaaaaaaaaaaaaaaaaaaaaaaaaaaaaaaaaaaaaaaaaaaaaaaaaaaaaaangggggnnccccc

SEQ ID NO: 898 - DNA, 2897 bp, Homo sapiens
  misc_feature (1148)..(1148): n equals a,t,g, or c
  misc_feature (1430)..(1430): n equals a,t,g, or c
  misc_feature (1588)..(1588): n equals a,t,g, or c
cggcccccctcaagacctagtggatccccccggccctssagggaactttcccagtccccgaggcggatcgggtgttgcatccatggagcgagctgagagctcgagtacagaacctgctaaggccatcaaacctattgatcggaagtcagtccatcagatttgctctgggcmggtggtactgagtctaagcactgcggtraaggagttagtagaaaacagtctggatgctggtgccactaatattgatctaaagcttaaggactatggagtggatctyattgaagtttcagrcaatggatgtggggtagaagaagaaaacttcgaaggcttaactctgaaacatcacacatctaagattcaagagtttgccgacctaactcaggttgaaacttttggctttcggggggaagctctgagctcactttgtgcactgagcgatgtcaccatttctacctgccacgcatcggcgaaggttggaactcgactgatgtttgatcacaatgggaaaattatccagaaaaccccctacccccgccccagagggaccacagtcagcgtgcagcagttattttccacactacctgtgcgccataaggaatttcaaaggaatattaagaaggagtatgccaaaatggtccaggtcttacatgcatactgtatcatttcagcaggcatccgtgtaagttgcaccaatcagcttggacaaggaaaacgacagcctgtggtatgcacaggtggaagccccagcataaaggaaaatatcggctctgtgtttgggcagaagcagttgcaaagcctcattccttttgttcagctgccccctagtgactccgtgtgtgaagagtacggtttgagctgttcggatgctctgcataatcttttttacatctcaggtttcatttcacaatgcacgcatggagttggaaggagttcaacagacagacagtttttctttatcaaccggcggscttgtgacccagcaaaggtctgcagactcgtgaatgaggtctaccacatgtataatcgacaccagtatccatttgttgttcttaacatttctgttgattcagaatgcgttgatatcaatgttactccagataaaaggcaaattttgctacaagaggaaaagcttttgttggcagttttanagacctctttgataggaatgtttgatagtgatgtcaacaagctaaatgtcagycagcagccactgctggatgttgaaggtaacttaataaaaatgcatgcagcggatttggaaaagcccatggtagaaaagcaggatcaatccccttcattaaggactggagaagaaaaaarrgacgtgtccatttccagactgcgagaggcctttyctcttcgtcacacaacagagaacaagcctcacagcccaaagactccagaaccaagaaggagycctctaggacagnaaaaggggtatgyygtcttctagcacttcagrtgccatctctgacaaaggcgtcctgagacctcagaaagaggcagtgagttccagtcasggacccagtgaccctacggacagagcggaggtggagaaggactcggggcayggcagcacttccgtggnattctgaggggttcagcatcccagacacgggcagtcactgcagcagcgagtatgyggccagctccccaggggacaggggctcgcaggaacatgtggactctcaggagaaagcgcctgraactgacgactctttttcagatgtggactgccattcaaaccaggaagataccggatgtaaatttcgagttttgcctcagccaactaatctcgcaaccccaaacacaaagcgttttaaaaaagaagaaattctttccagttctgacatttgycamaagttagtaaatactcaggacatgtcagcctctcaggttgatgtagctgtgaaaattaataagaaagttgtgcccctggacttttctatgagttctttagctaaacgaataaagcagttacatcatgaagcacagcaaagtgaaggggaacagaattacaggaagtttagggcaaagatttgtcctggagaaaatcaagcagccgaagatgaactaagaaaagagataagtaaaacgatgtttgcagaaatggaaatcattggtcagtttaacctgggatttataataaccaaactgaatgaggatatcttcatagtggaccagcatgccacggacgagaagtataacttcgagatgctgcagcagcacaccgtgctccaggggcagaggctcatagcacctcagactctcaacttaactgctgttaatgaagctgttctgatagaaaatctggaaatatttagaaagaatggctttgattttgttatcgatgaaaatgctccagtcactgaaagggctaaactgatttccttgccaactagtaaaaactggaccttcggaccccaggacgtcgatgaactgatcttcatgctgagcgacagccctggggtcatgtgccggccttcccgagtcaagcagatgtttgcctccagagcctgccggaagtcggtgatgattgggactgctcttaacacaagcgagatgaagaaactgatcacccacatgggggagatggaccacccctggaactgtccccatggaaggccaaccatgagacacatcgccaacctgggtgtcatttctcagaactgaccgtagtcactgtatggaataattggttttatcgcagatttttatgttttgaaagacagagtcttcactaaccttttttgttttaaaatgaaacctgctacttaaaaaaaatacacatcacacccatttaaaagtgatcttgagaaccttttcaaaccagatggagcattgcttgcaaatttttttctatatgtttgcatgcgctcgtgtgtgtgtgtccaggc

SEQ ID NO: 899 - DNA, 1499 bp, Homo sapiens
  misc_feature (69)..(70): n equals a,t,g, or c
  misc_feature (1491)..(1492): n equals a,t,g, or c
ggtctgtcgagcctggctggcgtcaaggtggagaggcagacgttcggggaagccaccaagcagccgggnntcaccttcatcgcggccaagttcgacggcatcctgggcatggcctacccccgcatctcggtcaacaatgtgcttcccgwctttgataacctgatgcagcagaagctggtggagaagaacatcttctctttctacctgaacagggaccccggcgcgcagcctgggggtgagctcatgctgggcggcacagactccaagtactacaagggtcccctgtcctacctcaacgtgacccgcaaggcgtactggcaggtccacatggaacaggtggacgtgggcagcagcctgaccctgtgcaaggggggctgcgaggccatcgtggacacgggcacctcgctcatcgtgggccccgtggacgargtgcgcgagctgcagaagccatcggggccgtgccgttgatccagggcgagtacatgatcccctgtgagaargtgtccaccttgcccgaggtcaccctgacgctgggcggcaaamcctacaagctgtcgtcagaggactacacgctcaaggtgtcgcagggcgggaagtccatctgcttgagcggcttcatgggcatggacatccccccgcccggcgggccgctctggatcctgggggacgtcttcatcggccgctactacaccgtgttcgaccgggaccagaaccgcgtgggcctggccgaggccaccaggctctagctgcccgcccgctggggaggacggggtccggcaggaggaggctggccgccccgccctcccggccacccctgccgcacacactcacgctcagactcacactcaaagcccagctctgcaggcgccgggctgtcgggctgccgttttgttctgtggtttccccggccttggtgtgtctgtctgtctagtagagggcggggtgcggggcagcagccactaggctgaccccgagtctggagccacgtcactgactgggaagccccagcctggctcggccgccatcgtcttgcacgcgggaccccctcccccggcccaggtagttcccccccccccccccagccccgtgcttcgggggcctggctgcccaggcaggacttctggactgagcccccaccccaggccaggctgttctctgggcttctcctcctggggtctggtctggggtccagagcggggcactgctggcctgtcttcccgtgtggcccatcgtggaagggacccgccgaggcccaaggacaagcaggaagggcttggaagggtcgggactcagggacaaaaggcagccttgtgatgcctttggggtcctcctggggcttgaccccatctaggagggcatttgctggtgccgggttggkgaagaaggggaggggggggctggtgccaccttctgtgagcttttcccctcttgagtgaccaggagccgaagtgaacgtggaaatacagtcgtctgggcctcaaaaaaaaaaannaaaacca

SEQ ID NO: 900 - DNA, 1787 bp, Homo sapiens
  misc_feature (22)..(22): n equals a,t,g, or c
  misc_feature (48)..(48): n equals a,t,g, or c
  misc_feature (89)..(89): n equals a,t,g, or c
  misc_feature (97)..(97): n equals a,t,g, or c
  misc_feature (120)..(120): n equals a,t,g, or c
  misc_feature (307)..(307): n equals a,t,g, or c
  misc_feature (1775)..(1776): n equals a,t,g, or c
  misc_feature (1782)..(1782): n equals a,t,g, or c
actttccattgacgtcaatggntggagtatttacggtaaactgcccanttggcagtacatcaagtgtatcatatgccaagtacgccccntattgacntcaatgacggtaaatggcccgcntggcattatgcccagtacatgaccttatgggactttcctacttggcagtacatctacgtattagtcatcgctattaccatggtgatgcggttttggcagtacatcaatgggcgtggatagcggtttgactcacggggatttccaagtctccaccccattgacgtcaatgggagtttgttttggcacnaaaatcaacgggactttccaaaatgtcgtaacaactccgccccattgacgcaaatgggcggtaggcgtgtacggtgggaggtctatataagcagagctcgtttagtgaaccgtcagatcgcctggagacgccatccacgctgttttgacctccatagaagacaccgggaccgatccagcctccggactctagcctaggccgcgggacggataacaatttcacacaggaaacagctatgaccactaggcttttgcaaaaagctatttaggtgacactatagaaggtacgcctgcaggtaccggtccggaattcccgggtcgacccacgcgtccgggcaagtgcaccaccatgactggctagttttgttttttggtttttggtttttggtttttggttttttttttttttggttggttggttgttttttacaggcggggtctcactatattgtccaggctagaaraattttctaatggtctattacacctcccgttttggcaagtaaattcagaataattttaggttcttttgttattcagtagttttgcagacttaaaagtgtaaatttagaattagaagatgaagctatagtagtaagaatctcaagctgaagggctttggggagccaaagcagcatattagagcataggcttgaacttaaatctcagctcagtcacctgcaggactttaggcaccagtgatttcacccttctgagcctgtttctttattcgtaaaatgattataataattctttcacagcgttgtgaggattaagtgaaatgtgttaaatgcctactacagtaggtgctcagatatttatttttatttttttattatgcacattgtttttcctgcctttttatggctgtctaaagtctagggaaaagggaagactggttaatgatgagtagaaaaaacttgtaagctaatcattcactgacttattttccttccattttctggtttttaaaattagccacaccacaggaaacccacatttttagatggaaagagcaagaaaattgtgtcagtgctcttagttattttcatcttaatggtatagtgaaaagacattgacttgagatgatactaaggaagctttggctcactctcacttgaagaggggatcttggtgttgtagtacttggactgtacaaatgttttactgacttttcttactgctgtaaaggaatcaggcagttgggtattgatatgttatttggtgctctcattcatggcaaaggatttgataaataaaagttctttaaacactaaagcaaaatcaaatgagcaaaactaaggatgaaatgtaatattcatcagaacaaggatcactgagaaaaaatattcagaaacaactttaataaaacctgaattgaaataactgcaaaaaaaaaaaaaaaaaaaaaaaaaaaaaaaaaaaaaaaaaaaaaaaaaaaaaaaaaaaaaaaaaaaaaaaaaaagggnngcccgnttaaa

SEQ ID NO: 901 - DNA, 437 bp, Homo sapiens
  misc_feature (423)..(423): n equals a,t,g, or c
  misc_feature (436)..(436): n equals a,t,g, or c
gcaaggacctgtatgtakgtggctgattttagggggtgagcaggagtgagggagggaggagaatgagacagctccctgtgttgagtaggwccactgtgggtagttagggctgtcgccctgggatcactctgaggagacataaagattatggcttaggctaagcgcggtggcctgtaatcccaacactgtgggaggctgaggcgggtggatcacctgaggtcaggagttcgagaccagcctggccaacatggcaaaccatgtctctactaaaaatacaaaaattagccgggttggtggtgtgtgcccatagtcccagctacttgggaggatgagacaggagaattgcttgaacccgggaggcggaggttgcagtgagccgagatggagccactgcactccagcctgggtgacagagcgagactncgtctcaaaaaana

SEQ ID NO: 902 - DNA, 2361 bp, Homo sapiens
cggcacgagggtgatccgcctccgcytcctcccgacgccggcgccgctttctggaaggttcgtgaaggcagtgagggcttaccgttattacactgcggccggccagaatccgggtccatccgtccttcccgagccaacccagacacagcggagtttgccatgcccgagaatgtggcaccccggagcggggcgactgccggggctgccggcggccgcgggaaaggcgcctatcaggaccgcgacaagccagcccagatccgcttcagcaacatttccgccgccaaagcggttgctgatgctattagaacaagccttggaccaaaaggaatggataaaatgattcaagatggaaaaggtgatgtaaccattacaaatgatggtgctaccattctgaaacaaatgcaagtattacatccagcagccagaatgctggtggagctgtctaaggctcaagatatagaagcaggagatggcaccacatcagtagtcatcattgctggctccctcttagattcttgtaccaagcttcttcagaaagggattcatccaaccatcatttctgagtcattccagaaggccctggaaaagggcattgaaatcttgactgacatgtctcgacctgtggaactgagtgacagagaaactttgttaaatagtgcaaccacttcactgaactcaaaggtggtttctcagtattcaagtctgctttctccaatgagtgtaaatgcagtgatgaaagtgattgacccagccacagccaccagtgtagatcttagagatattaaaatagttaagaagcttggtgggacaattgatgactgtgagttggtggaagggctggttctcacccaaaaagtgtcaaattctggcataaccagagttgaaaaggccaagattgggcttattcagttttgcttatctgctcccaaaacagacatggataatcaaatagtggtttctgactatgcccagatggaccgagtgctgcgagaagagagagcctatattttaaatttagtgaagcaaattaaaaaaacaggatgtaatgtccttctcatacagaaatctattctaagagatgctcttagtgatcttgcattacactttctgaataaaatgaagatcatggtgattaaggatattgaaagagaagacattgaattcatttgtaagacaattggaaccaagccagttgctcatattgaccaatttactgctgacatgctgggttctgctgagttagctgaggaggtcaatttaaatggttctggcaaactgctcaagattacaggctgtgccagccctggaaaaacagttacaattgttgttcgtggttctaacaaactggtgattgaagaagctgagcgctccattcatgatgccctatgtgttattcgttgtttagtgaagaagagggctcttattgcaggaggtggtgctccagaaatagagttggccctacgattaactgaatattcacgaacactgagtggtatggaatcctactgcgttcgtgcttttgcagatgctatggaggtcattccatctacactagctgaaaatgccggcctgaatcccatttctacagtaacagaactaagaaaccggcatgcccagggagaaaaaactgcaggcattaatgtccgaaagggtggtatttccaacattttggaggaactggttgtccagcctctgttggtatcagtcagtgctctgactcttgcaactgaaactgttcggagcattctgaaaatagatgatgtggtaaacactcgataatctggataactgactagcaccattatgatcaccagtattgtggctggaatggaagaagatcaccttggtgttccttgtttggaagattatttcctctgaatttctgggcttggtcttccagttggcatttgcctgaagttgtattgaaacaatttaatgaaaatattaaatatttggtttcaaaaggcagatttatcttctcccaacattctgttatttctgatacttttgaaaaactaataaaaactaataaaagaagcgtaaaaagtgagtttacatgttgaggaaaaaaatggcccaatatgctcatcactgataaatgctccctggccttaaaaactaccaacatataatatatatgctgtcttaaaagttaatgatccaagtggcacctctctgaacctactttggcttgggaggctgcccagttaaaacaaaaataagttaatggtacagaaagagaatgaaaaatgaaagcctccttttatcctatcatcctaattccttttcccagtaataatgactgctgtgttggattccttctgcaaataaaagtgtatacatatatgtagcaaaaaaaaa

SEQ ID NO: 903 - DNA, 2253 bp, Homo sapiens
aagctggagctccccgcggtggcggccgctctagaactagtggatcccccgggctgcaggaattcggcacgctgaaaccctgggcggcggcaagctgtgcgacctcttctgcggccggcctgggcaggtgtcttcctcgagaggcaggcaggggatcccggacccttatacaggatgctgtgttctttgctcctttgtgaatgtctgttgctggtagctggttatgctcatgatgatgactggattgaccccacagacatgcttaactatgatgctgcttcaggaacaatgagaaaatctcaggcaaaatatggtatttcaggggaaaaggatgtcagtcctgacttgtcatgtgctgatgaaatatcagaatgttatcacaaacttgattctttaacttataagattgatgagtgtgaaaagaaaaagagggaagactatgaaagtcaaagcaatcctgtttttaggagatacttaaataagattttaattgaagctggaaagcttggacttcctgatgaaaacaaaggcgatatgcattatgatgctgagattatccttaaaagagaaactttgttagaaatacagaagtttctcaatggagaagactggaaaccaggtgccttggatgatgcactaagtgatattttaattaattttaagtttcatgattttgaaacatggaagtggcgattcgaagattcctttggagtggatccatataatgtgttaatggtacttctttgtctgctctgcatcgtggttttagtggctaccgagctgtggacatatgtacgttggtacactcagttgagacgtgttttaatcatcasctttctgttcagtttgggatggaattggatgtatttatataagctagcttttgcacagcatcaggctgaagtcgccaagatggagccattaaacaatgtgtgtgccaaaaagatggactggactggaagtatctgggaatggtttagaagttcatggacctataaggatgacccatgccaaaaatactatgagctcttactagtcaaccctatttggttggtcccaccaacaaaggcacttgcagttacattcaccacatttgtaacggagccattgaagcatattggaaaaggaactggggaatttattaaagcactcatgaaggaaattccagcgctgcttcatcttccagtgctgataattatggcattagccatcctgagtttctgctatggtgctggaaaatcagttcatgtgctgagacatataggcggtcctgagagagaacctccccaggcacttcggccacgggatagaagacggcaggaggaaattgattatagacctgatggtggagcaggtgatgccgatttccattataggggccaaatgggccccactgagcaaggcccttatgccaaaacgtatgagggtagaagagagattttgagagagagagatgttgacttgagatttcagactggcaacaagagccctgaagtgctccgggcatttgatgtaccagacgcagaggcacgagagcatcccacggtggtacccagtcataaatcacctgttttggatacaaagcccaaggagacaggtggaatcctgggggaaggcacaccgaaagaaagcagtaytgaaagcagccagtcggccaagcctgtctctggccaagacacatcagggaatacagaaggttcacccgcagcggaaaaggcccagctcaagtytgaagccgcaggcagcccagaccaaggcagcacatacagccccgcaagaggtgtggctggaccacgtggacaggatccggtcagcagcccctgtggctagaggaacaccagcacaaacgacagcctcaagtctccttcgagctttgtaaagtaatctcacaagctgccaaagaacacatcccaagcagtaatcacagatgatgaagcaccttacaggacccctccaccctcaaacgcgcatgtccagagaagtattaatgccttaatagactactgaaggttaactatttacatcattctaaaaatattttaagctgtattacagtgctataaattctccttttaaggaaaaaagtaatagattgtttccttaccgtgtttgaaaggaaaaaaaataaatccatagtaactaaaaaaaaaaaaaaagggcggccgctctaaaggatccctcgaggggcccaagcttacgcgtgcatgcgacgtcatagctctctccctatagtgagtcgtattataagctagg

SEQ ID NO: 904 - DNA, 1254 bp, Homo sapiens
  misc_feature (1041)..(1041): n equals a,t,g, or c
  misc_feature (1139)..(1139): n equals a,t,g, or c
  misc_feature (1189)..(1189): n equals a,t,g, or c
  misc_feature (1197)..(1198): n equals a,t,g, or c
cttttaacattcaaaattgggatttcccaatgtgacacatcatgaatgcaaacccctccagcccatcagacgccaggctgcctactggtaatctgtgtatagtatataaacatgtaaaaataggttgtattttactctatgtatgatgctaatcaatgaacactttatttattttacagagaaaacttatctgtgaactttactatatatctgtttattttactttattttttttttaaataaaaagggttttaaatgctatgcagtcattagtagaaaattttttaggactctgcctgctctgtaactatcttaatatgatctggcagaaactcgcatgtatccaagtaaagtagtttagctaaagaaaggttcttcattgcttttctgttcacagttgtggctctgttttttaagaatgtaacttgtttttagattatacttgcatctgtgactttactaccagccacgttgacacaaaacaggttctggttcaggtaaagttgcgtcagtcacctgcagcagaaatccctcttcattcctcttctctgtgttcattcctcttctgtgctgttctgaagcttctaccaatactctttccatattgtctttttcagtgaagagaaatgcattcaagattaggtccctcctgtctatccagtttcaggattttatgttgttttatacacagttatttcagtatagaaactggctttattgccaagtgtttttttaaacatgttttaactctcatatgagcaaactgtccaacttcagtttttcataagattaaacttcttacgatcaaatttgtctcttgcaatgatgtgatgagttgccaaataattgagattattttaaaatgttttgttcatattcttgttttataattaaaatttacattcagtgtgtatgggtttttttttttattttgactcttaatgtaaggtggatatttctgtcattttacatggtttcttactgagattttatatataaattataaaatgtttaccaaaaaaaaaaaaaaagggcggccgntctagaggatccaagcttacgtacgcgtgcatgcgacgtcatagctcttctatagtgtcacctaaattcaattcactggccgtcgttttacaacgtcntgactgggaaaaccctggcgttacccaacttaatcgccttgcagcacatncccctttnnccagctggcgtaatagcgaagaggcccgcaccgatcgcccttcccaacaagttgct

SEQ ID NO: 905 - DNA, 907 bp, Homo sapiens
acccacgcgtccggttagtcttagactggctggtgcagcgaaacctcgatggcttggtggcaatggctggctcctggatggccctgaggaggtgttacaagcagaggcgtgcagcaccacggaggatggggccgaacccctgctctgtccctcgggctatgagtgccacatcctgagcccaggtgacgtggccgaagtatccccaaccgtgggcagtgcgtcaagcagcgccggcaagcagatgggcgaatcctacgacacaaactttacaaagaatatccagaaggtgactcaaagaatgtggcagaacctggaaggggacaacagargcactttcagtaaagcaacggcaagcagctaggttgcaagaacattcctctactttctgctaagccttggaaacagttgggaaaagtagtttgaccctcacagttcacattcagctcagcagagcaagaccccagagatgcttagagacaggacacctggccatcaaacccagtttggcccagcctggttgggtgactttgtgggagccacttaacagctctgggtccctgttttaccatcctgggagcaaggccctgcagctccacgagacctttaccccgggaagaagccgccrcccatgaaagcatttctgaagcccctttctaagacaaggctcagcatcttgatatttttgacagattcctcccaagtctggctctgggaggtatgtacccatctcaaatgttcccaagataaattcatccttcaggaaatggaaatgaacttgcttactaatgtgtgattcctagttgtagccaccggatgtgctgaggcctaaatgttagcaggtgggaggaggccacagaacaataaaaacaaccaaataaraaaaaaaaaaaaaaaaaaaaaaaaaaaa

SEQ ID NO: 906 - DNA, 1522 bp, Homo sapiens
  misc_feature (11)..(11): n equals a,t,g, or c
  misc_feature (14)..(14): n equals a,t,g, or c
  misc_feature (1497)..(1497): n equals a,t,g, or c
  misc_feature (1517)..(1518): n equals a,t,g, or c
taaaccccatntgnaatacccctcactatagttgaaagctggtacccctgcaggtaccggtccggaattcccgggtcgacccacgcgtccgcgwgaggtggcccattctcggcgggcggccggcggaggcggccccgggggtcccggcggctctggggactttctactcatctacctggccaatctggaggccaagagcaggcaggtggccgcgctgctgcctccccggggccgaaggagtgccaacgacgagctcttccgggcgggctccagactcaggcgacagctggccaagctggccatcatcttcagccacatgcacgcagagctgcacgcactcttccccgggggaaagtactgtggacacatgtaccagctcaccaaggcccccgcccacaccttctggagggaaagttgcggagcccggtgtgtgctgccctgggctgagtttgagtccctcctgggcacctgccaccctgtggaaccaggctgcacagccctggccttgcgcaccaccattgacctcacctgcagcgggcacgtgtccatcttykagttcgacgtcttcaccaggctctttcagccatggccaacactcctcaagaactggcagctcctggcagtcaaccacccaggctacatggccttcctcacctatgatgaggtccaagagcgtctgcaggcctgcagggacaagccaggcagttacatcttccggcccagctgtactcgcctggggcagtgggccatcggctatgtgagctcagatggcagcatcctgcagaccatccctgccaacaaacccctgtcccaggtgctcctggagggacagaaggacggcttctacctctacccagatggaaagacccacaacccagacctgactgagctcggccaggcagaaccccagcagcgcatccacgtgtcagaggagcagctgcagctctactgggccatggactccacatttgagctctgcaagatctgtgctgagagcaacaaggatgtgaagattgagccgtgcgggcacctgctctgcagctgctgcctggctgcctggcagcactcggacagccagacctgccccttctgccgctgcgagatcaagggctgggaggccgtgagtatctaccagttccacggtcaggctactgctgaggactcagggaacagcagtgaccaggaaggcagggagttggagctggggcaggtgcccctttcggctcctccattgcccccacggccagatctgccccccaggaagcccagaaatgcccagccgaaagtgagactcctaaaggggaactcccctccagctgcgctgggaccccaggaccctgccccggcctgaaggccagggcacccagatgtgctgctcaagggagccccaagggctggaagggggttgtgaaaccgaaataaactgccaagcctggtctgtcaaaaaaaaaaaaaaagggcggccgctctagaggatccaaggttacgtacgcgtgnaagcgaacgtcgaagcgttnnccct

SEQ ID NO: 907 - DNA, 1069 bp, Homo sapiens
ttaaacatgaagttcatttacgtttcatatataccttatacacatagcctgaaggtaattttacacaatattttaattaattaatttgtcctacgatttaattctttaaaactttttaaattttattataaaataacacttccaggatacggacttgctgtgggaggaatatgtaatcaggccactcaaaaatgcctgcacttgaggctgagcatttaaaaatgaatgttcatatgtaacaaaaattaaatgatgtattttttgtattaaaattaaagaaatatgttggataatcattataataaagaatatgctctaagaatggggataaaagctgttgggcgccccttggtaccaccatttcatagaagatcatagttgtaaacaagcagaaggatgatgcaatytctgacatawttaaaaccgggtaaaccmcaataagtgtgttccagcaatttgtcaagttatttgtccaggtctatcatagctactgagcaaatgggttggcatgaatagttatgtccttaatgtgtacatcattaagaggtcggtatgtcttctcatttactggcaacttctccaactcatctagagtttccagaccatctattacctttccaaatacggtgtatttcatgtccaaatgtggctgtttgccataggtgatgaagaactgagatccattggtgttcgggccattattagccatagatacaacacctctaacattgtgcttaagatattcactgtattcatcctcaaacttcttgccccaaatactgttgcctcctcttccagttcctcacatgttttgggtgtcctctcacagaagacttcaattttaatatcacctacatctgtatgcagtgtcacagacatttttcctcttagtggtttcaggaaggactacgtgatttctcagtcttacagcgagctcaaaaataagtctttgggcttcaccacttcgtctagcacagccgttgttaaaacaggaaaaatgcaatcgcagatgccagcagaggtctgttggttcaaaacccgggaattccggaccggtggwgcaggcgcc

SEQ ID NO: 908 - DNA, 1696 bp, Homo sapiens
  misc_feature (1689)..(1689): n equals a,t,g, or c
  misc_feature (1691)..(1691): n equals a,t,g, or c
gcggccgcgcaggtgcctgccctttgcgcctgcgcccagctcgccctgcctagccaggtgcgccccgccccctgcctgcccggccaccttcgggagccgcttccaataggcgttcgccattggctctggcgacctccgcgcgttgggaggtgtagcgcggctctgaacgcgctgagggccgttgagtgtcgcaggcggcgagggcgcgagtgaggagcagacccaggcatcgcgcgccgagaaggccgggcgtccccacactgaaggtccggaaaggcgacttccgggggctttggcacctggcggaccctcccggagcgtcggcacctgaacgcgaggcgctccattgcgcgtgcgcgttgaggggcttcccgcacctgatcgcgagaccccaacggctggtggcgtcgcctgcgcgtctcggctgagctggccatggcgcagctgtgcgggctgaggcggagccgggcgtttctcgccctgctgggatcgctgctcctctctggggtcctggcggccgaccgagaacgcagcatccacgacttctgcctggtgtcgaaggtggtgggcagatgccgggcctccatgcctaggtggtggtacaatgtcactgacggatcctgccagctgtttgtgtatgggggctgtgacggaaacagcaataattacctgaccaaggaggagtgcctcaagaaatgtgccactgtcacagagaatgccacgggtgacctggccaccagcaggaatgcagcggattcctctgtcccaagtgctcccagaaggcaggattctgaagaccactccagcgatatgttcaactatgaagaatactgcaccgccaacgcagtcactgggccttgccgtgcatccttcccacgctggtactttgacgtggagaggaactcctgcaataacttcatctatggaggctgccggggcaataagaacagctaccgctctgaggaggcctgcatgctccgctgcttccgccagcaggagaatcctcccctgccccttggctcaaaggtggtggttctggcggggctgttcgtgatggtgttgatcctcttcctgggagcctccatggtctacctgatccgggtggcacggaggaaccaggagcgtgccctgcgcaccgtctggagctccggagatgacaaggagcagctggtgaagaacacatatgtcctgtgaccgccctgtcgccaagaggactggggaagggaggggagactatgtgtgagctttttttaaatagagggattgactcggatttgagtgatcattagggctgaggtctgtttctctgggaggtaggacggctgcttcctggtctggcagggatgggtttgctttggaaatcctctaggaggctcctcctcgcatggcctgcagtctggcagcagccccgagttgtttcctcgctgatcgatttctttcctccaggtagagttttctttgcttatgttgaattccattgcctcttttctcatcacagaagtgatgttggaatcgtttcttttgtttgtctgatttatggtttttttaagtataaacaaaagttttttattagcattctgaaagaaggaaagtaaaatgtacaagtttaataaaaaggggccttcccctttagaataaaaaaaaaaaaaaaaaaaaaaaaaaaaaaaaaaaaaaaaaaaaaaaaaaaananaaaaa

SEQ ID NO: 909 - DNA, 2082 bp, Homo sapiens
tcgacccacgcgtccggcaactccctgtgtgccaggcggggctgggccccgctgcggctggctggcgtttggcgctctcatcgagggagcgcttcgctttgaaatctacccactccttttttttttttttttttaaaccaggtatgatgatgtcaaacgtgatgctgatgctacagttacagcccctgctggcgcagcctctctgattctctctccctctccgcgtccagtgctgggctttttcagacaagtgcatctcctaaccaggtcacatttcagccgcgacccactctccgccagtcaccggaggcagaccgcgggaggagagctgaggacagccgcgtgcgcttcgccagcagcggggtgggaggaaggacattaaaatactgcagaagtcaagaccccccaggtcgaacccagaccacgatgcgcgccccgggctgcgggcggctggtgctgccgctgctgctcctggccgcggcagccctggccgaaggcgacgccaaggggctcaaggagggcgagacccccggcaatttcatggaggacgagcaatggctgtcgtccatctcgcagtacagcggcaagatcaagcactggaaccgcttccgagacgaagtggaggatgactatatcaagagctgggaggacaatcagcaaggagatgaagccctggataccaccaaggacccctgccagaaggtgaagtgcagccgccacaaggtgtgcattgcccagggctaccagcgggccatgtgcatcagtcgcaagaagctggagcacaggatcaagcagccgaccgtgaaactccatggaaacaaagactccatctgcaagccctgccacatggcccagcttgcctctgtctgcggctcagatggccacacttacagctctgtgtgtaagctggagcaacaggcgtgcctgagcagcaagcagctggcggtgcgatgcgagggcccctgcccctgccccacggagcaggctgccacctccaccgccgatggcaaaccagagacttgcaccggtcaggacctggctgacctgggagatcggctgcgggactggttccagctccttcatgagaactccaagcagaatggctcagccagcagtgtagccggcccggccagcgggctggacaagagcctgggggccagctgcaaggactccattggctggatgttctccaagctggacaccagtgctgacctcttcctggaccagacggagctggccgccatcaacctggacaagtacgaggtctgcatccgtcccttcttcaactcctgtgacacctacaaggatggccgggtctctactgctgagtggtgcttctgcttctggagggagaagcccccctgcctggcagagctggagcgcatccagatccaggaggccgccaagaagaagccaggcatcttcatcccgagctgcgacgaggatggctactaccggaagatgcagtgtgaccagagcagcggtgactgctggtgtgtggaccagctgggcctggagctgactggcacgcgcacgcatgggagccccgactgcgatgacatcgtgggcttctcgggggactttggaagcggtgtcggctgggaggatgaggaggagaaggagacggaggaagcaggcgaggaggccgaggaggaggagggcgaggcaggcgaggctgacgacgggggctacatctggtagacgccctcagaagccggctgccgggggggactcaacagcagagctctgagcagcagcaggcaacttcgagaacggatccagaaatgcagtcagaaggaccctgctccacctggggggactgggagtgtgagtgtgcatggcatgtgtgtggcacagatggctgggacgggtgacagtgtgagtgcatgtgtgcatgcatgtgtgtatgtgtgtgtgtgtgtggcatgcgctgacaaatgtgtccttgatccacactgctcctggcagagtgagtaacccaaaggcccttcggcctccttgtagctgttttctttccttttgttgttggttttaaaatacattcacacacaaatacaaaaaaaaaaaaaaaaaagggcggcc

SEQ ID NO: 910 - DNA, 1357 bp, Homo sapiens
  misc_feature (3)..(3): n equals a,t,g, or c
gcnggccgtggtgctggacgagggcagtgcctcggtggcggagctccggcccgacagcccggctcatgtgctgctggccgcgctgctgcacgagacccgcgcggggcccactgccgtgtacttcctgcgaggaggcttcgacggcttccagggctgctgtcccgatctgtgctctgaggcccccgcccctgcgctgccgccaacaggggacaaaaccagccgctccgactccagggctcctgtctacgaccagggtggccctgtggagatcttgccctacctgttcctgggcagctgcagtcactcgtcagacctgcaggggctgcaggcctgtggcatcacagccgtcctcaacgtgtccgccagctgccccaaccactttgagggccttttccgctacaagagtatccctgtggaggacaaccagatggtggagatcagtgcctggttccaggaggccataggcttcattgactgggtgaagaacagcggaggccgggtgctggtgcactgccaggcgggtatctcgcgctctgccaccatctgtctggcatacctcatgcagagtcgccgtgtgcggctggacgaggcctttgacttcgttaagcagcgccggggggtcatctcccccaacttcagtttcatggggcagctgctgcagtttgagacccaggtgctgtgtcactgaggtggtgcccctctgcctgcctgccccactgtgctggcaggagctgactgtggactggtgggctcccctctgggccagcacagtcccctcacctctggcagggctgctacctcctcagagtttcagaagcccccacatgggggctctaggaatgccggcatgctggtctttccgacctggtgctcttctgctgggggactgaggctggccctcattcggggtcgggaaccaagggtgtgtctgctctttccctccccatcctctggcagaaatcagctagacgctataccgtggactctccctggtccaccaccatgttgaagcccttggcagcctgagagctccaaggaacaagctgtgacaaccaggagccctgtctgtgggttcgtctgcccagggcctggagcccaagccctgtgttcctggggaagctggggacttgggaagtgatgggtgtgtcatgttgcgtgtgtctgtctgtgagcctttcacacctgtgctggcgctggaaaattatttgtgctcagctgacatttaacactccctcccccgcttcctcctagccctgtgggcaggggttggaaacttagcactttatatttatacagaacattcaggatatgtcaataaaatattgttatatttaaaaaacaaaaaaaaaaaaaaaaa

SEQ ID NO: 911 - DNA, 2315 bp, Homo sapiens
  misc_feature (2278)..(2278): n equals a,t,g, or c
gcaaggggtcggccgcgcctcttcctgtccccgccctgccggctgccccaggccagtggagtggcagccccagaactgggaccaccgggggtggtgaggcggcccggcactgggagctgcatctgaggcttagtccctgagctctctgcctgcccagactagctgcacctcctcattccctgcgcccccttcctctccggaagcccccaggatggtgaggtggtttcaccgagacctcagtgggctggatgcagagaccctgctcaagggccgaggtgtccacggtagcttcctggctcggcccagtcgcaagaaccagggtgacttctcgctctccgtcagggtgggggatcaggtgacccatattcggatccagaactcaggggatttctatgacctgtatggaggggagaagtttgcgactctgacagagctggtggagtactacactcagcagcagggtgtcctgcaggaccgcgacggcaccatcatccacctcaagtacccgctgaactgctccgatcccactagtgagaggtggtaccatggccacatgtctggcgggcaggcagagacgctgctgcaggccaagggcgagccctggacgtttcttgtgcgtgagagcctcagccagcctggagacttcgtgctttctgtgctcagtgaccagcccaaggctggcccaggctccccgctcagggtcacccacatcaaggtcatgtgcgagggtggacgctacacagtgggtggtttggagaccttcgacagcctcacggacctggtggagcatttcaagaagacggggattgaggaggcctcaggcgcctttgtctacctgcggcagccgtactatgccacgagggtgaatgcggctgacattgagaaccgagtgttggaactgaacaagaagcaggagtccgaggatacagccaaggctggcttctgggaggagtttgagagtttgcagaagcaggaggtgaagaacttgcaccagcgtctggaagggcagcggccagagaacaagggcaagaaccgctacaagaacattctcccctttgaccacagccgagtgatcctgcagggacgggacagtaacatccccgggtccgactacatcaatgccaactacatcaagaaccagctgctaggccctgatgagaacgctaagacctacatcgccagccagggctgtctggaggccacggtcaatgacttctggcagatggcgtggcaggagaacagccgtgtcatcgtcatgaccacccgagaggtggagaaaggccggaacaaatgcgtcccatactggcccgaggtgggcatgcagcgtgcttatgggccctactctgtgaccaactgcggggagcatgacacaaccgaatacaaactccgtaccttacaggtctccccgctggacaatggagacctgattcgggagatctggcattaccagtacctgagctggcccgaccatggggtccccagtgagcctgggggtgtcctcagcttcctggaccagatcaaccagcggcaggaaagtctgcctcacgcagggcccatcatcgtgcactgcagcgccggcatcggccgcacaggcaccatcattgtcatcgacatgctcatggagaacatctccaccaagggcctggactgtgacattgacatccagaagaccatccagatggtgcgggcgcagcgctcgggcatggtgcagacggaggcgcagtacaagttcatctacgtggccatcgcccagttcattgaaaccactaagaagaagctggaggtcctgcagtcgcagaagggccaggagtcggagtacgggaacatcacctatcccccagccatgaagaatgcccatgccaaggcctcccgcacctcgtccaaacacaaggaggatgtgtatgagaacctgcacactaagaacaagagggaggagaaagtgaagaagcagcggtcagcagacaaggagaagagcaagggttccctcaagaggaagtgagcggtgctgtcctcaggtggccatgcctcagccctgaccctgtggaagcatttcgcgatggacagactcacaacctgaacctaggagtgccccattcttttgtaatttaaatggctgcatcccccccacctctccctgaccctgtatatagcccagccaggccccaggcagggccaacccttctcctcttgtaaataaagccctgggatcactgtgaaaaaaaaaaaaaaaaaaaaaaaaaaaaaaaaaaaaaaaaaaaaagggttccctcggggtcgncggtcccaaaaaaaaaaaaaaagggttccctcggggt

SEQ ID NO: 912 - DNA, 957 bp, Homo sapiens
ggagagagggagagagagagaaagaagagcaggaaagatcccgaaaggaggaagaggtggcgaaaaatcaactgccctgctggatttgtctttctcagcaccttggcgaagccttgggtttctttcttaaaggactgatttttagaactccacatttgaggatcacagtcaccttctatatagcaccatccccaggatgcaggagccggggcagattgtggagacctacacggaggaggatcctgagggagccatgtctgtagtctctgtggagacctcagatgatgggaccactcggcgcacagagaccacggtcaagaaagtagtgaagactgtgacaacacggacagtacagccagtcgctatgggaccagacgggttgcctgtggatgcttcatcagtttctaacaactatatccagactttgggtcgtgatttccgcaagaatggcaatgggggacctggtccctatgtggggcaagctggcactgctacccttcctaggaacttccactaccctcctgatggttatagtcgccactatgaagatggttatccaggtggcagtgataactatggcagtctgtcccgggtgacccgcattgaggagcggtataggcccagcatggaaggctaccgggcacctagtagacaggatgtgtatgggccccaaccccaggttcgggtaggtgggagcagcgtggatctgcatcgctttcatccagagccttatgggctagaggatgaccagcgtagtatgggctatgatgacctggattatggtatgatgtctgattatggcactgcccgtcggactgggacaccctctgaccctcgtcggcgcctcaggagctatgaagacatgattggtgaggaggtgccatcggatcaatactactgggctcctttggcccagcatgagcgaggaagtttagcaagcttggatagcctgcgcaa

SEQ ID NO: 913 - DNA, 1082 bp, Homo sapiens
cgggtcgacccacgcgtccgctcccaggcccgcgaacttggccattcagccgccgctgtccccgctgcgcgccctcgcgcctctgcctgagaagccaggcgctgttcccccaccccagaagaggatggcaaaggtggctaaggacctcaacccaggagttaaaaagatgtccctgggccagctgcagtcagcaagaggtgtggcatgtttgggatgcaaggggacgtgttcgggcttcgagccacattcatggaggaaaatatgcaagtcttgcaaatgcagccaagaggaccactgcctaacatctgacctagaagacgatcggaaaattggccgcttgctgatggactccaagtattccaccctcactgctcgggtgaaaggcggggacggcatccggatttacaagaggaaccggatgatcatgaccaaccctattgctactgggaaagatcccacttttgacaccatcacctacgagtgggctccccctggagtcacccagaaactgggactgcagtacatggagctcatccccaaggagaagcagccagtgacaggcacagagggtgccttttaccgccgccgccagctcatgcaccagctccccatctatgaccaggatccctcgcgctgccgtggacttttggagaatgagttgaaactgatggaagaatttgtcaagcaatataagagcgaggccctcggcgtgggagaagtggccctcccggggcagggtggcttgcccaaggaggaggggaagcagcaggaaaagccagagggggcagagaccactgctgctaccaccaacggcagtctcagtgacccgtccaaagaagtggaatacgtctgcgagctctgcaagggagcggcccctcctgacagccccgtggtctactcggacagggcaggctacaacaagcagtggcaccccacctgctttgtgtgtgccaagtgctccgagccgctggtggacctcatctacttctggaaggatggtgcaccctggtgcggccgctctagaggatccmagcttacgtacgcgtgcatgcgacgtcatagctcttctatagtgtcaccta

SEQ ID NO: 914 - DNA, 497 bp, Homo sapiens
  misc_feature (175)..(175): n equals a,t,g, or c
  misc_feature (273)..(273): n equals a,t,g, or c
gggagccgctgagcgggccgacggtcattttgtgaagcggcgaaggaggtggtggctgcgttgggctccgggaagccgttcgggctggggctgtcggccgcggggcggaggcactcgcgcggggggtaattcggggtctgggttctggtgccgcgcagctttccccgtctaaaanttggttttaattggttgcccacaggattgacttggcctctacttcttgttaaggaaattcatctcttgttttatcaggtgtgtgtggtttcagcgcancatggctgtggtcatccgtttgcaaggtctcccaattgtggcggggaccatggacattcgccacttcttctctggattgaccattcctgatgggggcgtgcatattgtarggggtraactgggtgargctttcatcgtttttgccactgatgaagatgcaaggcttggtatgatgcgcacaggtggtacaattaaagggtcaaaagtaacactattgttgagta

SEQ ID NO: 915 - DNA, 2070 bp, Homo sapiens
  misc_feature (2068)..(2069): n equals a,t,g, or c
gctttgaattctaacggctgagctcttggaagacttgggtccttgggtcgcaggcatcatggaccgatctaaagaaaactgcatttcaggacctgttaaggctacagctccagttggaggtccaaaacgtgttctcgtgactcagcaatttccttgtcagaatccattacctgtaaatagtggccaggctcagcgggtcttgtgtccttcaaattcttcccagcgcgttcctttgcaagcacaaaagcttgtctccagtcacaagccggttcagaatcagaagcagaagcaattgcaggcaaccagtgtacctcatcctgtctccaggccactgaataacacccaaaagagcaagcagcccctgccatcggcacctgaaaataatcctgaggaggaactggcatcaaaacagaaaaatgaagaatcaaaaaagaggcagtgggctttggaagactttgaaattggtcgccctctgggtaaaggaaagtttggtaatgtttatttggcaagagaaaagcaaagcaagtttattctggctcttaaagtgttatttaaagctcagctggagaaagccggagtggagcatcagctcagaagagaagtagaaatacagtcccaccttcggcatcctaatattcttagactgtatggttatttccatgatgctaccagagtctacctaattctggaatatgcaccacttggaacagtttatagagaacttcagaaactttcaaagtttgatgagcagagaactgctacttatataacagaattggcaaatgccctgtcttactgtcattcgaagagagttattcatagagacattaagccagagaacttacttcttggatcagctggagagcttaaaattgcagattttgggtggtcagtacatgctccatcttccaggaggaccactctctgtggcaccctggactacctgccccctgaaatgattgaaggtcggatgcatgatgagaaggtggatctctggagccttggagttctttgctatgaatttttagttgggaagcctccttttgaggcaaacacataccaagagacctacaaaagaatatcacgggttgaattcacattccctgactttgtaacagagggagccagggacctcatttcaagactgttgaagcataatcccagccagaggccaatgctcagagaagtacttgaacacccctggatcacagcaaattcatcaaaaccatcaaattgccaaaacaaagaatcagctagcaaacagtcttaggaatcgtgcagggggagaaatccttgagccagggctgccatataacctgacaggaacatgctactgaagtttattttaccattgactgctgccctcaatctagaacgctacacaagaaatatttgttttactcagcaggtgtgccttaacctccctattcagaaagctccacatcaataaacatgacactctgaagtgaaagtagccacgagaattgtgctacttatactggttcataatctggaggcaaggttcgactgcagccgccccgtcagcctgtgctaggcatggtgtcttcacaggaggcaaatccagagcctggctgtggggaaagtgaccactctgccctgaccccgatcagttaaggagctgtgcaataaccttcctagtacctgagtgagtgtgtaacttattgggttggcgaagcctggtaaagctgttggaatgagtatgtgattctttttaagtatgaaaataaagatatatgtacagacttgtattttttctctggtggcattcctttaggaatgctgtgtgtctgtccggcaccccggtaggcctgattgggtttctagtcctccttaaccacttatctcccatatgagagtgtgaaaaataggaacacgtgctctacctccatttagggatttgcttgggatacagaagaggccatgtgtctcagagctgttaagggcttatttttttaaaacattggagtcatagcatgtgtgtaaactttaaatatgcaaataaataagtatctatgtcaaaaaaaaaaaaaagggggggccgttttanng

SEQ ID NO: 916 - DNA, 2055 bp, Homo sapiens
  misc_feature (2054)..(2054): n equals a,t,g, or c
gggcggagggactggccagtcccctcctccgcgccggccccaaccctgtcgctgccgccgcgctccgagtccccattcccgagcggccccctgaggacaaccagagcttccagtacgaccacgaggccttcctgggcaaggaggactccaagaccttcgaccagctcaccccggacgagagcaaggagaggctagggaagattgttgatcgaatcgacaatgatggggatggctttgtcactactgaggagctgaaaacctggatcaaacgggtgcagaaaagatacatctttgataatgtcgccaaagtctggaaggattatgatagggacaaggatgataaaatttcctgggaagaatacaaacaagccacctatggttactacctaggaaaccccgcagagtttcatgattcttcagatcatcacacctttaaaaagatgctgccacgtgatgagagaagattcaaagctgcagacctcaatggtgacctgacagctactcgggaggagttcactgcctttctgcatcctgaagagtttgaacatatgaaggaaattgtggttttggaaaccctggaggacatcgacaagaacggggatgggtttgtggatcaggatgagtatattgcggatatgttttcccatgaggagaatggccctgagccagactgggttttatcagaacgggagcagtttaacgaattccgggatctgaacaaggacgggaagttagacaaagatgagattcgccactggatcctccctcaagattatgatcaygcacaggctgaggccaggcatctggtatatgaatcagacaaaaacaaggatgagaagctaactaaagaggaaatattggagaactggaacatgtttgtyggaagccaagctaccaattacggggaagatctcacaaaaaatcatgatgagctttgatagacactcaccagaatatggcagactgtcataggcattctgttattgtcttggattgttgctacaattgtctaatttacagcagttgtgatcccacaaaaagcaagtttatacctcagattggggtataaaaattgtttttcgctcagtatttactggaaaatggacatcactagtctttcagtaagatttctctcaaaacacgtgaaaaccttggtaaattgcaattctttctggggatatattggtacaacatgacttaaaacttttttttttctattaaaacttaaaggggaacaaaacttgaaaaagccctgttcttcagaaggtgagtgggttgagggaggcagtaatatgaagtgactgctgtgtattttaactaccagattttttatatttgccactgttaaatagttggaaaggggaaattctgattaagcgaaagtggtatcatcctaggtaagcttatttcagaacaagtctaatatttcagattctttcttttcgactttatactctgagttattacttactgtaagtggtgtatatgaaacctccatgcattttccagtatggatctgctaatatgcacagtaaatccatgtctttgtttgtttttctattaaaaagcaatcaagaaagataatgtgaaaaagaaaggaatttagaggtagggaaaagatgaatgtcagacatttgaagaactatagtaaaatgataaacactaaatatacttgagaaaactttcttaatatgccaatgaggtaggcctgatctttgaaatagtgaataggaatacaatgcatttcctcagtgatcactgattagaatgagttggtgggatccttgggaagccaaacggagcggagttctggatcatgtcccatccagtccagtgaatccacgacccgcagacctgyccccccgcaacagcttataccatggaatgaggacaaggtgatactctgagctgtggactgaactggcagacacaacctgtacagattgaaatttcaccttgtaaggaggaagtgaatgaaataaaggatccccctaaggaaaaaaaaaaaaaaaaaaaaaaaaaaattcctggggccgcgaacatcgtgccgaatnt

SEQ ID NO: 917 - DNA, 1513 bp, Homo sapiens
  misc_feature (1050)..(1050): n equals a,t,g, or c
  misc_feature (1424)..(1424): n equals a,t,g, or c
  misc_feature (1468)..(1468): n equals a,t,g, or c
  misc_feature (1490)..(1490): n equals a,t,g, or c
ttttttttttttttttttttttttttttttttctgataaaattatgttttaattgcctatggcatatattacataatggctcaaaattaatagtctggctgaaattaagaaaaacagctgatgatgacttagtaaatccttaattttaagtaagcttttggccaaaagtcaggggtagaattgactcaaaattaacagccttcaccatcttttattcattctgctgtgatacaactaaaatggccagtaaattctcccctgggtctcaggtaacagttttccaaaagtgaagtatcactttctctgcacagtggtgaaagccggcatttggatgggctggatcgggtggacaggctgaaacactggcttctttctcacttcagagtgtgttttcactgcagggagcagctgattccttttgatgatctgtaaggccagctgagtattaccattctgcagttcaaggtagactgccagcaagatggcctcagggggcacctctttaggatggatcattgaagccgcctggtggagacactttcgggctttgtcatattcgctcctcaggcagtaagcgctgccaaggttgaacagcatcacagtcctggcagagttgacggaactggggtagcactgaggggcccgcttaccagaggattccattgcttcattttcacctttgtctgatccttggtcctgctcatttgaagagatccctaaggagacatcagtgacattctccgggttcaagtgagtaatggcatcagatattctgtcgagagagatgagggcttctgcagcatataaatgtcccaaaaacttaagagatcctgrcagcttgggctgctgaagaagtttatmtgcatgattcaaagccatgaggttatcacccaaagccagagccacgtaggcactgcaagcaagtatggagcacytgatttttgactgatgagtccacacmtcagattctgrgccattctgagcttcttgacaycttttaatccagaccactgaaattagcatctgcacctgtaatcccagcactttggnagtccaaggcaggtggatcacttgaggtcaagagttggagaccagcctggccaacacgatgaaaccccgtcttatctaatttttgtccttctgtaaaagtttctagggcagcagcatagtttttttcatggtattcacatattccttttctcagcatagcagtggaattatttggattgagttctagagacttctttgcatcagcaacagcaacacagtaattcccaagaagaatgtgacaataagctctttgacaataatactgtgcatcatctggtttctgttccaaagccttagtcagctcctctaacgccgcctgggggtcctcgtcgattagggcatccgagaagctctggaaaaacctctgggatgtntgagttcctgctgcagccgccgccatccctcgtagtcgctgttntgccgccggagctgctactatncacggttaccacctccaccaccg

SEQ ID NO: 918 - DNA, 1264 bp, Homo sapiens
ggcggctgggaggaatcggtcctccactgtcccagccggccccgcgccggcgtgtcgcctcccgtccccctagcagcacgctgcgtggctgctcgctggctatttaggacggaagctcggttggtgtttctccagaagtttcccccttgggcggtggtggaggtggtaaccgtgatagtagcagctccggcggcagcaacagcgactacgagggatggcggcggctgcagcaggaactgcaacatcccagaggtttttccagagcttctcggatgccctaatcgacgaggacccccaggcggcgttagaggagctgactaaggctttggaacagaaaccagatgatgcacagtattattgtcaaagagcttattgtcacattcttcttgggaattactgtgttgctgttgctgatgcaaagaagtctctagaactcaatccaaataattccactgctatgctgagaaaaggaatatgtgaataccatgaaaaaaactatgctgctgccctagaaacttttacagaaggacaaaaattagatagtgcagatgctaatttcagtgtctggattaaaaggtgtcaagaagctcagaatggctcagaatctgaggtgtggactcatcagtcaaaaatcaagtatgactggtatcaaacagaatctcaagtagtcattacacttatgatcaagaatgttcagaagaatgatgtaaatgtggaattttcagaaaaagagttgtctgctttggttaaacttccttctggagaggattacaatttgaaactggaacttcttcatcctataataccagaacagagcacgtttaaagtactttcaacaaagattgaaattaaactgaaaaagccagaggctgtgagatgggaaaagctagaggggcaaggagatgtgcctacgccaaaacaattcgtagcagatgtaaagaacctatatccatcatcatctccttatacaagaaattgggataaattggttggtgagatcaaagaagaagaaaagaatgaaaagttggagggagatgcagctttaaacagattatttcagcagatctattcagatggttctgatgaagtgaaacgtgccatgaacaaatcctttatggagtcgggtggtacagttttgagtaccaactggtctgatgtaggtaaaaggaaagttgaaatcaatcctcctgatgatatggaatggaaaaagtactaaataaattaatttgctctcaaaaaaaaaaaaaaaaaaaaaaaaactcga

SEQ ID NO: 919 - DNA, 1017 bp, Homo sapiens
  misc_feature (952)..(952): n equals a,t,g, or c
  misc_feature (965)..(965): n equals a,t,g, or c
  misc_feature (981)..(981): n equals a,t,g, or c
gagacgacacacggtagcccacaggccacgacagacgctggatgccctcctaccgccagacacctccccagaggccttggacctccttaggcgactcctggtgttcgccccggacaagcggttaagcgcgacccaggcactgcagcacccctacgtgcagaggttccactgccccagcgacgagtgggcacgagaggcagatgtgcggccccgggcacacgaaggggtccagctctctgtgcctgagtaccgyagccgcgtmtattagatgatcctggagtgtggaggcagcagcggcacctcgagagagaagggcccggagggtgtctccccaagccaggcacacctgcacaaacccagagccgaccctcagctgccttctaggacacctgtgcagggtcccagacccaggccccagagcagcccaggccatgaccctgccgagcacgagtccccccgtgcagccaagaacgttcccaggcagaactccgctcccctgctccaaactgctctcctagggaatggggaaaggccccctggggcgaaggaagcgccccccttgacactctcgctggtgaagccaagcgggaggggagctgcgccctccctgacctcccaggctgcggctcaggtggccaaccaggccctgatccggggtgactggaaccggggcggtggggtgagggtggccagcgtacaacaggtccctccccggcttcctccggaggcccggcccggccggaggatgttcagcacctctgccttgcagggtgcccaggggggtgccagggctttgcttggaggctactcccaagcctacgggactgtctgcactcggcactggccacctgccctgctggaggggcaccatgtgtgagccgccgtactccttcactgccctctgttctgccagccttccagcccttcagctctgacctagctctgttgctgncgtgagtcagganttgccgttctcggganaatagcctgccgccatgctctcatagatgtgccaaa

SEQ ID NO: 920 - DNA, 1005 bp, Homo sapiens
  misc_feature (984)..(984): n equals a,t,g, or c
gtatttttccagtttttacttatttatgtttgcattttatgtttaacatacttaaaactttttttggtattttgtgaagacaaatccatatgctgtttggttaatgtatacagaacacattgtgaaatacagattatagaagattcctctcataggatattactgcttatagaaatgctggacgttttcaatagtgattttgtctttaacttgaattgtagctttggacttgaagctactrctaaaggtagcaggaattttaacatgctgacagttaagtactcaaacatttgttaacaagttacattttaacttttacactggtaattcttaaaattactttgktacttgaagtgatagattagtaacctgtataacagktttccaaaataattgtcaactgaaaatgtgatatcaccaaatcgatgkcttgktctgtgtcttagcttgatgaagaaatctctggaattgtggaagtggttggaagagtaaccgccaaggccaccatcttgtgtacatcttatgtccagtttaaagaagatagccatccttttgatcttggactttacaatgaagctgtgaaaattatccatgacttccctcagttttatcctttagggattgtgcaacatgattgatcttgatggattttcatacgattgtaaatgagctatattaaagtctattaaaggaagcccttcttgtttgagggagagatttctgtgctttctcatatttaatttgctgtttttaagatattccaacctagagtttttgatggaactgatatattgacagttctcaccgaagtccttttataaagaattgctactccaatatatggtcagattagatgcaagaataaagcagttgtccgagtctaagtttctattttattaataaaaactaaaatggtacgtactatcggtcatttcattttcattcttttaatcatgtattcaagcacaaacttgaaatttcatngccataatggtcaggatttgg

SEQ ID NO: 921 - DNA, 1559 bp, Homo sapiens
ggtttacattaatatatacagtgttaggaggagcataaagaggaaaacaccattgtggcaaagtaatcctgtggaaaccagagagagagagatttgataaagtcttggtgactgacctgagtacgaaaccagwggtggwggtagtgggaatctttagattaatgaatattgatttattcataagctacaaaattcaaagggcacccagtttctctttctagaggtaattactatgttcagattcctgggacctttccaggtatctgatgtataaatacctctctctctttccctctctttctaacacagatattagtattcctctgtgtcttactttatccccttaatagtatatcttggaaatcattgttttctttaaaaaaatgttttaattgaggtaagcattcattatacagtaaatgtcttgttccttttaactggctgcataccctgtcaacctatggctgtgccaacactggagagagtctgggttgagtatagtctttttgccattataaacagggttgcagtgaacattcatgtgtatacttctttgtacctatgtatgagtgtatcctggataaattcctaaaagtgacgccactggattggaggtcattttttttttaaactttttattttgaaataattatagattcataagaagttgcaaaaacaggacagagaggccccagttgcccttcacctagtttctcccaatgatagcatcttacataacatgatacagcatggtatatcatatcaaaaccagcacattggtacaatctacaaaccttattcagatttcaccagttttacatgcccttgtgtgcatgtgtgtctgtgtctttgtggttttatgtgcttttatcaggagtagatttgtataacctcaaacaagatgcagaactgttctgtcagcacaaagatcccttgtgctacctcatagtcacaccaaacctcctctcctccttttgtcatcacggcattcctaactgttgacaagcagctaatctgttctccatctctgtaactttgttattttgagaatataattgaaatcgtatagcatgtaaccattgagatgggttttttcactcaccgtaattcccttgaagatcatccaagttgttgcatgtgtcaatggttgttcctttttatttctgagtaatgttccatgatatgaatgtaccacagtttgtttaaccattcacccactgaaggacgtttggattgtttctaagttttgactgtggcaagtaaagatgctatgaacattcatgtacacatgaatttgtaggcatatgtttttattttgctgggagaaaagcccaagaatgcagttgctgggttgtatggtattgtatgattgtttttcttttaagaaactgccaaattattttccagaatgactgtaccactgtacattcttattagctatgtatgagagatgtagtttctccaaatcctcaccagcatttaatattgtcaggattaaaaaaatgttttttacttgttaaaaaaaaaaaaaaaaaaaaaaaaaaaaaaaaaaaactcga

SEQ ID NO: 922 - DNA, 1884 bp, Homo sapiens
  misc_feature (75)..(75): n equals a,t,g, or c
gcgttaggacccggagcgcgggcggactgggggcggcggggctaggacccagcggctccggcagagcggaagcgncggcgggagcttccgggagggcggctcgcaggcaccatgactcctgtgaggatgcagcactccctggcaggtcagacctatgccgtgcccctcatccagccagacctgcggcgagaggaggccgtccagcagatggcggatgcctgcagtacctgcagaaggtctctggagacatcttcagcaggatctcccagcrggtagagcagagccggagccaggtgcaggccattggagagaaggtctccttggcccaggccaagattgagaagatcaagggcagcaagaaggccatcaaggtgttctccagtgccaagtaccctgctccagagcrcctgcaggaatatggctccatcttcacgggcgcccaggaccctggcctgcagagacgcccccgccacaggatccagagcaagcaccgccccctggacgagcgggccctgcaggagaagctgaaggactttcctgtgtgcgtgagcaccaagccggagcccgaggacgatgcagaagagggacttgggggtcttcccagcaacatcagctctgtcagctccttgctgctcttcaacaccaccgagaacctgtasaagaagtatgtcttcctggaccccctggctggtgctgtaacaaagacccatgtgatgctgggggcagagacagaggagaagctgtttgatgcccccttgtccatcagcaagagagagcagctggaacagcaggtcccagagaactacttctatgtgccagacctgggccaggtgcctgagattgatgttccrtcctacctgcctgacctgcccggcattgccaacgacctcatgtacaktgccgacctgggccccggcattgccccctctgcccctggcaccattccrgaactgcccaccttccacactgaggtagccgagcctctcaaggcagacctacaagatggggtactaacagcaccaccaccacccccaccgcccccaccacctcccccagctcctgaggtgctggccagtgcayccccactcccaccctcaaccgcggcccctgtaggccaaggcgccaggcaggacgacrgcagcagcagcgcgtctccttcagtccagggagctcccagggaagtggtcgacccctccggtggccgggccactctgctagagtccatccgccaagctgggggcatcggcaaggccaagctgcgcagcrtgaaggagcgaaagctggagaagaagaagcagaaggagcaggagcaagtgagagccacgagccaaggtgggcacttgatgtcggatctcttcaacaagctggtcatgaggcgcaagggcatctctgggaaaggacctggggctggtgaggggcccggaggagcctttgcccgcgtgtcagactccatccctcctctgccgccaccgcagcagccacaggcagaggaggacgaggacgactgggaatcstagggggctccatgacaccttcccccccagacccagacttgggccgttgctctgacatggacacagccaggacaagctgctcagacctgcttccctgggagggggtgacggaaccagcactgtgtggagaccagcttcaaggagcggaaggctggcttgaggccacacagctggggcggggacttctgtctgcctgtgctccatggggggacggctccacccagcctgcgccactgtgttcttctcttaagaggcttccagagaaaacggcacaccaatcaataaagaactgagcagaaaccaacagtgtgcttttaataaaggatctctagctgtgcaggaaaaaaaaaaaaaaaaaaaaaaaaaaaaa

SEQ ID NO: 923 - DNA, 734 bp, Homo sapiens
  misc_feature (588)..(588): n equals a,t,g, or c
gttgcccttagggacggctgtgggcctgctgggggtgggggcccgaagcgccagagatggctgctcagcgagggatgcccagctccgccgtgagggtcctggaagaggcgttgggcatgggtttgacggcagccggggacgcgagggacacggcggacgcggtggcggctgagggcgcctactacctggaacaggtcaccataactgaagcatctgaagatgactatgaatatgaagagataccagatgacaattttagcatcccagaaggtgaagaagatctggcaaaagcaattcagatggcccaagaacaggctacagatactgaaattttggaacggaaaacagttcttccttcaaagcatgcagtacctgaagtaatagaagactttctctgcaatttcttgatcaaaatgggaatgaccagaactcttgattgctttcagtctgaatggtatgagttaatacagaaaggagtgactgaacttagaactgttgggaatgttccagatgtctacacccagattatgcttttggaaaatgagaacaaaaatttaaagaaagatttgaagcactacaaacaagcanctkagtatgktattttttaaatgacattttcttctttttcttttggactaaataaaagarttgartgaarctgatatatgtaatataccagagccttaattttttggaaaccggaatttttccaggtggtaaagatgtgagagggc

SEQ ID NO: 924 - DNA, 868 bp, Homo sapiens
  misc_feature (858)..(858): n equals a,t,g, or c
  misc_feature (864)..(864): n equals a,t,g, or c
acccacgcgtccgaaaccgttttagtttaaaatagatcatttgatttaataaactattttaaaattgactgttttgtaaactgcatattcataaagtgtttatagtctgtagttaaattttatgttactgttaacgaattaatttatttaatttcttccttcatgttcctaatcattttcatttcacttaattttagtttatgtcatwgtaatctgacatttactcatcagcaaattacaatgcaaaagaaaaaatatttttaagaaatattcatatttttctttatggaaataagtgtgtttaaatgcacaagataggaaaggacgaacctgatctcttatactagtatccttaatcatttttattgccacaactaacctcctcggactcctgcctcactcatttacaccaaccacccaactatctataaacctagccatggccatccccttatgagcgggcgcagtgattataggctttcgctctaagattaaaaatgccctagcccacttcttaccacaaggcacacctacaccccttatccccatactagttattatcgaaaccatcagcctactcattcaaccaatagccctggccgtacgcctaaccgctaacattactgcaggccacctactcatgcacctaattggaagcgccaccctagcaatatcaaccattaaccttccctctacacttatcatcttcacaattctaattctactgactatcctagaaatcgctgtcgccttaatccaagcctacgttttcacacttctagtaagcctctacctgcacgacaacacataaaaaaaaaaaaaaaaaaaaaaaaaaaaaaaaatttgggggggggcccnggcccnaaat

SEQ ID NO: 925 - DNA, 889 bp, Homo sapiens
  misc_feature (6)..(7): n equals a,t,g, or c
  misc_feature (861)..(861): n equals a,t,g, or c
tttttnntttttttttttttttttttttttttttttttttttttttttttttttttttttttaaatattcattatccttcattaaaaattttaagttacaaacattttgattgatagtcagtcatggtggtgcacctagtccttactctgaaaccaaatatcctgccatctggggactttcaccagccctgtcggttatcttaccgcaacaccaaagaggaggctcagccttccccagttccctgagttcacattgattcaattctacagctcactagacctgcccaagacaggaccaatcaatgtcccgggagggcagagagggtggtggggccacacttagccatatggaaagacagtattctcagatgagggcaggacttttttgtgggagaggacgcctagctttcagtcctaaaggaagtgatttccctggtaaagggaaggtgattttgccaaggctggagtctaaaggaagatggaactgtctttcaggcgtctccagcagaccctctacagacccgtgttcctgaaggcagagtcctgaaggcagaatacccctgtggcagtggcacagctcagagtgtcccatagacactgattttggccacggagatgctctctgtgtagtggttccggcctttctcatacaggacgtagagctggggggcctgctcctctccatccatgctgccctccaggttgccagggatgaatagccactggggcctggccatagctggactgtytctttycgccatgakgtaccattgctgaaagctcatcgcagggtcaggttcacttcgcactctggatgtgctgtgttgagaagaagacatgtccgagctgtgactacagctnctgcagtctacaggatcacgagctcagg

SEQ ID NO: 926 - DNA, 833 bp, Homo sapiens
  misc_feature (788)..(788): n equals a,t,g, or c
gccgcgatgctggtggcggcggccgcggagcggaacaaggatcccatcttgcacgtgctgcggcagtacctggatccggcccagcgtggcgtccgcgtcctcgaggtggcctcgggctccggccagcacgcagcgcacttcgcgcgggccttccccctggccgagtggcagccgtcggacgtggaccagcgctgcctggacagcatcgcggccaccacgcaagcccagggcctgaccaacgtgaaggccccgctacacctggacgtgacgtggggctgggagcactggggcgggatcctgccacagtcgctggacctgttgctctgcatcaacatggcccatgtcagccccctgcgctgcacggaggggctcttcagagcagcaggacacctgctcaaacccagggccctgctcatcacctacgggccctatgccatcaatgggaagatctccccccagagcaacgtggactttgacctgatgctcagatgcaggaacccagaatgggggcttcgggacacagccctcctggaggacctgggaaaggccagtggcctgctcctggagaggatggtggacatgccagccaacaacaaatgcctgatcttccggaaaaactaagcccctccttcacccccgcacacctgcatccctgccggaggctctgtgaggcacgaaccctgcctccctaggccggaccttgtggacgacagccccacccagtctgtgctctcagccgctgccgaagggcccagcctgctcagaataaagcatgtcctgctgccggnaaaaaaaaaaaaaaaaaaaaaaaaaaaaaaaaaaaaaaaaaaaaa

SEQ ID NO: 927 - DNA, 1170 bp, Homo sapiens
  misc_feature (7)..(7): n equals a,t,g, or c
  misc_feature (9)..(9): n equals a,t,g, or c
  misc_feature (11)..(11): n equals a,t,g, or c
  misc_feature (1154)..(1154): n equals a,t,g, or c
  misc_feature (1162)..(1162): n equals a,t,g, or c
  misc_feature (1168)..(1168): n equals a,t,g, or c
aagtcancngncagtcacggtcggattcccgggtcgacccacgcgtccgtctaagacttacaggcctctctcttggaaattctgatcgggggtccgggttagggcccagggttgtatattcttaacagatacttagtgattgttttcaggaaagtttgaaagtcactgctctgagttcccgtgttctttgcaatgctgttttctttccttagaacactttgcaggccccagccctcagcaggattcaaccttcatgtttcagcttccacagcctacctcccatcccctttccctgggccgtgtcgcagcactggttcactcactgatctacaattgcccagtgacctctctgtaccctccttggaaggcaagctccctggggtagggcaccctttgacamccctggctggtctcaggccctgcctctttccccactaggtgggttcagtagaagaattccaaggccaagaacgaagcgtcatcctcatctccaccgtgcgaagcagccagagctttgtgcagctggatctggactttaatctgggtttccttaagaaccccaagaggttcaatgtagctgtgacccgggccaaggcctgctcatcatcgtggggaacccccttctcctgggccatgaccctgactggaaagtattcctggagttctgtaaagaaaacggagggtataccgggtgtcccttccctgccaaactggacctgcaacagggacagaatttactgcaaggtctgagcaagctcagcccctctacctcagggccccacagccatgactacctcccccaggagcgggagggtgaagggggcctgtctctgcaagtggagccagagtggaggaatgagctctgaagacacagcacccagccttctcgcaccagccaagccttaactgcctgcctgaccctgaaccagaacccagctgaactgcccctccaagggacaggaaggctgggggagggagtttacaacccaagccattccaccccctcccctgctggggagaatgacacatcaagctgctaacaattgggggaaggggaaggaagaaaactctgaaaacaaaatcttgttctatgcaaaaaaaaaaaaaaaaaaaaaaaaaaaaaaaaaaaaaaaaaaaaaaaaaaaaaaaaaaanaaaaaaanaaaaanaa

SEQ ID NO: 928 - DNA, 1510 bp, Homo sapiens
  misc_feature (49)..(49): n equals a,t,g, or c
  misc_feature (51)..(51): n equals a,t,g, or c
  misc_feature (1470)..(1470): n equals a,t,g, or c
acttcgccgttcccgcccgccgccttctgttcgcggttgcgggccgacngnttcctctgacgcggcagacagccctcgctgtcgcctccagtggttgtcgaacttgcgggcggcccccctccgcggcggcccgtcgtgctgccctctcggggggggtttgcgcgagcgtcgctccgcctgggcccttgcggtgctcctggagcgctccgggttgtccctcaggtgcccgaggccgaacggtggtgtgtcgttcccgcccccggcgccccctcctccggtcgccgccgcggtgtccgcgcgtgggtcctgagggagctcgtcggtgtggggttcgaggcggtttgagtgagacgagacgagacgcgcccctcccacgcggggaagggcgcccgcctgctctcggtgagcgcacgtcccgtgctcccctctggcgggtgcgcgcgggccgtgtgagcgatcgcggtgggttcgggccggtgtgacgcgtgcgccggccggccgccgaggggctgccgttctgcctccgaccggtcgtgtgtgggttgacttcggaggcgctctgcctcggaaggaaggaggtgggtggacgggggggcctggtggggttgcgcgcacgcgcgcaccggccgggcccccgccctgaacgcgaacgctcgaggtggccgcgcgcaggtgtttcctcgtaccgcagggccccctcccttccccaggcgtccctcggcgcctctgcgggcccgaggaggagcggctggcgggtggggggagtgtgacccaccctcggtgagaaaagccttctctagcgatctgagaggcgtgccttgggggtaccggatcccccgggccgccgcctctgtctctgcctccgttatggtagcgctgccgtagcgacccgctcgcagaggaccctcctccgcttccccctcgacggggttgggggggagaagcgagggttccgccggccaccgcggtggtggccgagtgcggctcgtcgcctactgtggcccgcgcctccccccttccgagtcgggggaggatcccgccgggcccgtcctcgcgaggccccccggccggccgtccggccgcrtcggggcctcgmcgcgctctaccttacctacctggttgatcctgccagtagcatatgcttgtctcaaagattaagccatgcatgtctaagtacgcacggccggtacagtgaaactgcgaatggctcattaaatcagttatggttcctttggtcgctcgctcctctcctacttggataactgtggtaattctagagctaatacatgccgacgggcgctgacccccttcgcgggggggatgcgtgcatttatcagatcaaaaccaacccggtcagcccctctccggccccggccggggggcgggcgccggcggctttggtgactctagataacctcgggccgatcgcacgccccccgtggcggcgacracccattcgaaagtctgctnctagaagtggaacagactgagaagggcaaacattcctggg

SEQ ID NO: 929 - DNA, 1304 bp, Homo sapiens
  misc_feature (15)..(15): n equals a,t,g, or c
cagtaccggtccggnaattcccgggtcgacccacgcgtccggtccgcgagctgccgtcggctccgcggggggggcgggccgggcaccccggggcgcggaggagcgctcctcgcttctctccttcccccctgccgcactccgccggaccctcccgccggcccgcgccgctgcactcgccctctcctctcgccccccggcaaactttcggcccctccccgcccctcgcccgttattcgtcgtggctcaagcccggccamgccgccccaagggctcctcccgacctcccggcctgccgctccggccactgcgggatccagaaacatgtcgaccacacttctgtccgccttctacgatgtcgacttcttgtgcaagacagagaaatccctggccaacctcaacctgaacaacatgctggacaagaaggcggtggggacgcctgtggccgccgcccccagctcgggcttcgcgccgggattcctccgacggcactcggccagcaacctgcatgcactcgcccaccccgcgcccagccccggcagctgctcgcccaagttcccgggcgccgctaacggcagcagctgcggcagcgcggcggccggcggtccgacctcctacggcacccttaaggagccgtcggggggcggcggcacagccctgctcaacaaggagaacaaattccgggaccgctcgtttagcgagaacggcgatcgcagccagcacctcctgcacctgcagcagcagcagaaggggggcggcggctcccagatcaactccacgcgctacaagaccgagctgtgccggcccttcgaggagagcggcacgtgcaagtacggcgaaaagtgccagttcgcgcatggcttccacgagctgcgcagcctgactcgccatccgaagtacaagaccgagctgtgccgcacctttcataccatyggcttctgcccctatgggccgcgctgccacttcatccacaacgcggacgagcggcggcccgcgccgtcggggggcgcctccggggacctgcgtgcctttggcacgcgcgatgcgttgcacctgggcttcccgcgggagccgcggcccaagytgcaccacagcctcagcttctcgggcttcccgtcgggccaccatcagcccccgggcggcctcgagtcgccgctgctgctcgacagccccacgtcgcgcacgccgccgccgccctcctgctcttcggcctcgtcctgctcctcctccgcctcctcctgttcctcggcctccgcggcctccacgccctcgggcgccccgacatgctgcgcctccgcggcggccgc

SEQ ID NO: 930 - DNA, 1521 bp, Homo sapiens
  misc_feature (3)..(3): n equals a,t,g, or c
  misc_feature (13)..(13): n equals a,t,g, or c
  misc_feature (15)..(15): n equals a,t,g, or c
  misc_feature (26)..(26): n equals a,t,g, or c
  misc_feature (34)..(34): n equals a,t,g, or c
  misc_feature (1521)..(1521): n equals a,t,g, or c
tantaggggaaancntgggtacgccntgcaaggntaccgggtccgggaaattcccggggtctgacccacgmgtccgtccatgagaaggatcttagactctgccgagtttatcaaattcacggtcattagaccatttccaggacttgtgattaataaccagctggttgatcagagtgagtcagaaggccccgtgatacaagaatcagctgaaccaagccagttggaagttccagccacagaagaaataaaagagactgatggaagctctcagatcaagcaagaaccagaccccacgtggtagacctcttccctcctaggcttaaagtatcagtggttgagaagagcttttcggacctgttactaccccaagctgtgtaatatacttgtataacagaaataccttctatacaaacctttttttctacttttagatagaaatgtctactttttcagcagttctgtgaattaaagagcagagtgactgtgggtctggaatggctggtgtacttgggaatgtactatcaggattttacagcaatgctgggaaatgacagggaaaatgacaggaatgaatctcaccagattttttatgtactcagcagagccttgagttacggtgtttattttccaatcaagtgaagatatctcctacttctcctactggaacatctcagcttctgcagtgaagaaaaattcctgtgatagttcagttctttagtttttctatttgaaaaaaaaaaatcatttaaatgatcctttgttcacggctctccttaatgactgagtgaacagttcctatctgtatatttgactaaaccttttcctaagctatctctcatggttcctatgtttttttatcataattaaaagcaaaaccatctggatcacctaacagtcagaggtcagtatctcagcgtgtgaattatagaggaaatacagagagaacctcttccacttttacttttcgtccaaataaaatgcatggtgtaccagaagttgaagatcgggttgaggattggggctagctcgatgacactaaggccccaacatcgcgggacctgctgtggcgcggattcttaggaacgctgttctagccggccccctctccaggggtcgccgtggccggcattatttcctagttcttcttgtaaccctgaggtgccagcgcggggagtgaggaggggtcagggggctaaggatgcaacctctgacgttctgcgccttcctaggagagtcttacatgtgttgagatttcacaagcaatgcgagttgtaaaataccagctctacaagaagctaggctctgtgacggcatagttttcagtagctttatcacaatattcacaatggagaattatatgacatggtagcagaaataggcccttttatgtgttgcttctattttacctcaaattgtagatatagggtaatcaataaaatccatccatgcctttcacacactaaaaaaaaaaaaaaaaaaaaaaaaaaaaaccccggggggggccccgtccccattggcccn

SEQ ID NO: 931 - DNA, 3036 bp, Homo sapiens
gattcgcgagcgccgccctttttttttttttttttttttttttttttttttttttttttttttttttttttttttttttttttttttttggggataaaagtctttattgaacaaccttatctcactcagtaacaaaagagcaggaggcgacaattcccccagaagtctgcagccgtgtccacccttggcagcaggatgcatggcctgctgataacatcagctrcagttcagagcccctggtggtcacttagagatcataattggggttcttccgaaggataacaaaaccttccagaatgggggtaacaggaagaaactcctcagtggccaattctgcccgttccccgtgggccaacaacactggggttgtatgcgtctggaaccctgtgatagtcttcggcttgccagcctggcccaccacatccactgcctggcccacacggacagacactggcaatggccgcagctcctcatcaaacgtaaccagcattcggggctgcatggcagccaccagcccatacaatacatagtgtgatttgcctagaataatgtttcgaacatccaggaaagagacaagcacagtgagcagtccagccacggccacctggctcataagctgccggtcgctgtggtaggggcagagggtaagggtgcccttccctaaatgtgtcaggccctgtgccaagcgcaccatgaagaggttgtttgggtccttggcatgatattgagctaactggcgcagcattgcagccagacgggcattattggtaccactgcccaccatgcccatggcaaaaatggagttataggaaacttctggatcagcatcatgagagaatttgcttagggtatccaggatgttgagtcgtggatttgaaacagagatgagggccagtgctaaaggtacagccctccggagtgtaggctccccatatctcagcaagtggccaaaggttcgtaatgccatctctgcaccaatctcctcccccatagcaataagggcaatccccagaacagccactccctgatgtgctcccatgtcagcaggggcttccttcttgtccttgtctttcttttccttcttgtctttgtcttcctccttctctttggagtcaaagtgttcgctacaaatgtggagcagctgctgcaccttcagcacattcccagagcctgcatatgcacacacatccaccagtgtgttggcaaaactgcggaatggctctgacacaacctccagtgcagccaggattgcctcgatggcctcacccttccccaggtggttgagacccagtccaagaggaagccaacgagcataagtatccttgagctcagtctctgacttctccatgatggtctgaaggatagtggaagttacatctccattgcaggaccctactgctatcattccacaggctaaagctgtgacacctgccacctccatgctggactttgaatctcccatcacaggcagcagcagtgttaggacatcttcacgatttgagccagcataagccaagcctagcccaaagatggaaccaagtctcatggtgttgctgttgtggagaacatagtctgagagcagtgccagagcagggtcacactcattccggaccccagagttcactatgccacaggcaagaagagctcctgacttaatgtagtcctcagaggagtacaggtacttgtcaatctgggtgaggccaccatccacatcccacagcagaatcatcccaagagatgcagctgcactcaacattccgtggtccttgttcttgtaaagccatttgttgccatcatctgttagcagcttgtcttggccaaaagctgcattcacaaagccattcacaaaagaggaggccaggttcatgcgggcagagtccacctgagagccactgcccccaaacctgttgttctctaggtgggttttgtagatgtcatcaggcaccttgggctccatgatgtccagctcccgagctaaggccaagaagttgctgttgagctgtacattggacatgatctctgtcaggtcctcatactcctcgacatcttcactcagctccaggaacaccccatgccggcctagcatgaatgccatctgtttctgtactaccacatccttgcaggaggtgaagatgtcttctaccaactccatgtcattgagcatcaatgccaatctcagagcttcagggaagcggctaaactttcggaacacacccagggcacaacgcagtagggctgagttctcaggctcaggcacgtaattcacacaactggtgagataaaggcagacctttgcatatgcattttcatcaatgtccttctccagcatgtccacctgctcaatttccataagcaggtcgcaagcctcatgctctgcattgtgggccatgttataggggacgatttccttcaccagagtgagcagaggctcccgctggaccttctctgcgtcatccagctcctgccactccttagccacttctcctgccagatgcctgacatactcatgaccccatgatgccaattcctcctgggagcccactagccgatacttgaggcactcacgctccccactcatggtcatggccaaaacggagatgatgtcagcagcaaaacgcttattctccccaggggccatgttctcatagatttccttcagtttgccatagtgtggacgcagaaatttgagaggcttgggcactgaagtcatggaagttgtagaagaacgaatctgccttcgcaattcctccagcgctggtcgatacagggatgtatccttctcccctagtcgttccacgagcatctccagttcatcttgaagctgtttatcctcttcagacagctcctgttctttgtccttgtccccggcatcccgccgctccttgccgctcggcttctcgtccgtgccgccgggggccgccgctggagactgctggggctgcaccggcgccttgtcccggcctccctcctccatctccgccgccactgccggccctgcgcgcgcacccgctcgcaccgccctttttccctcgtgcc

SEQ ID NO: 932 - DNA, 1971 bp, Homo sapiens
  misc_feature (88)..(88): n equals a,t,g, or c
  misc_feature (126)..(126): n equals a,t,g, or c
gggagcctgagccctgcggaacctcggcgcycggccccaccccgcccgtacctgcacttatttattgttgttatttcttaccgcgganccccgcagtcgggtcctcccgcccgctcccgcgcagcnctagcattctccagtccctcagtcccttcccgcgcggtgcgccgcagccgaggcgatgcgcctcattcagaacatgtgcaccatcgccgagtaccccgcgccgggcaacgccgcggcctccgactgctgtgtgggcgccgccggccgccgcctggtcaagatcgccgtggtgggcgccagcggcgtgggcaagaccgcactggtggtccggttcctcaccaaacgattcatcggtgactatgaaagaaatgcaggtaatctctatactagacaagttcagatagaaggtgaaaccctggctcttcaggttcaagacactccaggtattcaggtccatgagaacagcctgagctgcagtgaacagctgaataggtgcattcgctgggcagatgctgtggtgatcgttttctccatcactgactacaagagctatgaactcatcagccagctccaccagcacgtgcagcagctacacctgggcacccggctgcctgtggtggtcgtggccaacaaagctgacctgttgcacatcaaacaggttgaccctcagcttggactgcagctagccagcatgctaggctgctcattctatgaagtgtctgtcagtgaaaattataatgatgtctacagcgccttccacgtcctctgtaaagaggtcagtcacaaacagcagcctagcagtacacccgagaagcgaagaacctccctcattcccaggcccaagtcacccaacatgcaggacctgaagaggaggtttaagcaagccctctctgccaaagtgaggactgtcacctccgtctgaagcaggaggagcactcaagggggtttggtcttcccaggaagagggcctgaggttctcctagtgcaggaacgttgaatattggcaatgattcctggttccagaaagggctggagcagaagggccaagagggcctgtggaactgctacagaaaaggaagtgttgttctgagcagggggacaggattgatgaggcttgaaagagcccactgagccactctctgaatatgtgaaatgtactctgtgtcttttcctttagagtggggagggggcataatcgtttcggtttctgcattcaactaccttgtaaatggtggtccgttgcagtttcaccaaatgtattgatgtgatttacagtgggaatgaaagaacagattaagcattgataggctttcttttttcccccttttttcttttttctcttttcttctttcttttcctctttttccccaagaggaagaattgcttttctcttaccagtatgatttgtaactctggaacactattcttacagaatgcctttctaacctgaaggatacccagatttctttctttatgtacaagatggaaaatcccctacccctcaaaaacaggttgagtttatgggccagaatattytgtataccagacattggtaagctctcatggtttacaggaaggctctggttccccctcacaggatgagcatgctcagttgggcgtgtgtggaggagctgtgaacttcacgctcttcaaccccagactttgactgtatagttttttgtttttttaactgttccatcaggaaaaaaatgtgtcagttgattttggtgtgacttgtgtaaatggttcatggcaatgacgttgggttgcttcctaggcctggctgagttgtgcctaagggtggctgaaatactaaaacacttatcttacagcaagtgaacaggggctacctgccacatcccctccacagatgcactttaaaaagccactcatgctttggcttaaactgtaattaatttattttatgtacaataaatcgcatttgaaaaagaaaaaaaaaaaaaa

SEQ ID NO: 933 - DNA, 3984 bp, Homo sapiens
  misc_feature (11)..(11): n equals a,t,g, or c
  misc_feature (1156)..(1156): n equals a,t,g, or c
  misc_feature (3940)..(3940): n equals a,t,g, or c
gccgctgccgnccgcttctcgccagcgtcgttgctgcgggggattgtgggagtctccgcgtcgccgctcgctgggagagaggtacctctccttttccctctccctttccctaagagttgtctgctggttctcagcttgaagaagattctgcagtccttattgatcctttttcttggcgttaccattttttgaagcaaagttaacctagctttctagtttgagctttctttttggccgtctttaaaaaaaattttttttttaatctataaaatagacaagagctagttctacaatgtccaagtcattccagcagtcatctctcagtagggactcacagggtcatgggcgtgacctgtctgcggcaggaataggccttcttgctgctgctacccagtctttaagtatgccagcatctcttggaaggatgaaccagggtactgcacgccttgctagtttaatgaatcttggaatgagttcttcattgaatcaacaaggagctcatagtgcactgtcttctgctagtacttcttcccataatttgcagtctatatttaacattggaagtagaggtccactccctttatcttctcaacaccgtggagatgcagaccaggccagtaacattttggccagctttggtctgtctgctagagacttagatgaactgagtcgttatccagaggacaagattactcctgagaatttgccccaaatccttctacagcttaaaaggaggagaactgaagaaggccctaccttgagttatggtagagatggcagatctgctacacgggagccaccatacagagtacctagggatgattgggaagaaaaaaggcactttagaagagatagttttgatgatcgtggtcctagtctcaacccagtgcttgattatgaccatggaagtcgttctcaagaatctggttattatgacagaatggattatgaagatgacagattaagagatggagaaaggtgtagggatgattctttttttggtgagacctcgcataactatcataaatttgacagtgcagtatgagagaatgggacgtggtcctggccccttacaagagagatctctctttgagaaaaagagaggcgctcctccaagtagcaatattgaagacttccatggactcttaccgaaggnttatccccatctgtgctctatatgtgatttgccagttcattctaataaggagtggagtcaacatatcaatggagcaagtcacagtcgtcgatgccagcttcttcttgaaatctacccagaatggaatcctgacaatgatacaggacacacaatgggtgatccattcatgttgcagcagtctacaaatccagcaccaggaattctgggacctccacctccctcatttcatcttgggggaccagcagttggaccaagaggaaatctgggtgctggaaatggaaacctgcaaggacctagacacatgcagaaaggcagagtggaaactagcagagttgttcacatcatggattttcaacgagggaaaaacttgagataccagctattacagctggtagaaccatttggagtcatttcaaatcatctgattctaaataaaattaatgaggcatttattgaaatggcaaccacagaggatgctcaggccgcagtggattattacacaaccacaccagcgttagtatttggcaagccagtgagagttcatttatcccagaagtataaaagaataaagaaacctgaaggaaagccagatcagaagtttgatcaaaagcaagagcttggacgtgtgatacatctcagcaatttgccgcattctggctattctgatagtgctgttctcaagcttgctgagccttatgggaaaataaagaattacatattgatgaggatgaaaagtcaggcttttattgagatggagacaagagaagatgcaatggcaatggttgaccattgtttgaaaaaagccctttggtttcaggggagatgtgtgaaggttgacctgtctgagaaatataaaaaactggttctgaggattccaaacagaggcattgatttactgaaaaaagataaatcccgaaaaagatcttactctccagatggcaaagaatctccaagtgataagaaatccaaaactgatggttcccagaagactgagagttcaaccgaaggtaaagaacaagaagagaagtccggtgaagatggtgagaaagacacaaaggatgaccagacagagcaggaacctaatatgcttcttgaatctgaagatgagctacttgtagatgaagaagaagcagcagcactgctagaaagtggcagttcagtgggagacgagaccgatcttgctaatttaggtgatgtggcttctgatgggaaaaaggaaccatcagataaagctgtgaaaaaagatggaagtgcttcagcagcagcaaagaaaaagcttaaaaagcgtcgttttccagggagtatggaaggttttgtcactctagatgaggttggtgatgaggaagattcggaacttcagaaacttcgtaaatcgggcatggcatttaaatctggtgacaaaaatgatgatggtttggttgaaattaaggtggacaagatcgaggaacttgatcaagaaaacgaagcagcgttgggaaatggaattaaaaatgaggaaaacacagaaccaggtgctgaatcttctgagaacgctgatgatcccaacaaagatacaagtgaaaacgcagatggtcaaagtgatgagaacaaggacgactatacaatcccagatgagtatagaattggaccatatcagcccaatgttcctgttggtgagatttaagtctttgttcttcaccttcctcactctcctcaaaacaaactcttaggttttaaaataagattttaaagttggtcttacataagctgtgatagcattttaaatttgctttgtttctatggggaacaatttataaatcttaattgatatattttcctctcatgcatgtctctgattttgtattattttctgttgttattccacaatgtgttcccttttttcgtaaaatttcttgcaagttacacgcttttgttttgcttttctgtgttgtttttctgtattatatttctttttttaagaatacagttaggtgagacctcaaacatcaattaggtaaaagcaaaatatggttcggtttttgttttttatcttaggctgtattggacttctcaaaaacatgttgtttcatttaaattatgttgacaggtgaaattgtgaatactaaataaaatcttcagtttaatttgtaagaatgtatgtttgtatttctaggtatagactatgtgatacctaaaacagggttttactgtaagctgtgttcactcttttatacaaatgaagaagttgcaaagaatactcattgcagcagccttcctcattatcagaaattaaagaaatttctgaataaattggcagaagaacgcagacagaagaaggaaacttaagatgtgcaaggagatttaatgatttcaaagaaaataatggttctttgtttttaatgttaaccttttttaaatacaatactgatagttagaagaaaactattgtactcttttgttttagtggagaaataatagatgtctgttcatgtgttaagtgttatagcaaaaaaaatacacatatggttaagttaatgaatagtttttgttttatcagaatggcaacagacagaagtactttgtagagattgacttcctaagctacttaagacaacttgcaccactaagaaaaaaatgtagaaccatttggaaaaatgaaatttagtagttccaagtttcaaagaaatgtcaacattttattccattcaataaagaacaaaaccaaaaaaaaaaaaaaaaaaaaaaaaaaaaagggcggccgctctaaaggatccctcgaggggcccaagcttacgcgtgcatgcnacgtcatagctctctccctatagtgagtcgtattataagctagg

SEQ ID NO: 934 - DNA, 1643 bp, Homo sapiens
tagcccgggcggatcccccgggctgcagggtccaaattcagccagcaacagtccttcgtacagattctycaggaggtgaatgactttgcaggccagcgggagctggtggctgagaacctcagtgtccgtgtatgtcttgagctgaccaagtactcacaagagatgaaacaggagaggaagatgcacttccaagaagggcggcgggcccagcagcagctggaaaatggctttaaacagctggagaatagtaagcgtaaatttgagcgggactgccgggaggcagagaaggcagcccagactgctgaacggctagaccaggatatcaacgccaccaaggctgatgtggagaaggccaagcagcaagcccaccttcggagtcacatggccgaagaaagcaaaaacgaatatgcggctcaactgcagcgcttcaaccgagaccaagcccacttctatttttcacagatgccccacccctctcccccctggggggccccgtaccctcggcattgcctaacggacccccgtccccccgctccggccgtgaccccttggccatactgagcgagatcagtaagtcggtcaaaccgaggctagcatccttccgcagccttcgaggcagcmgtgggacagtggtgaccgaggattttagccacttgcccccagagcagcagcgaaaacggcttcaacagcagttggaagaacgcatcgtgaacttcagaaggaggttgaccagagggaagccctaaagaaaatgaaggatgtctatgagaagacacctcagatgggggaccccgccagcttggagccccagatcgctgaaaccctgagcaacattgaacggctgaaattggaagtgcagaagtatgaggcgtggctggcagaagctgaaagtcgagtccttagcaaccggggagacagcctgagccggcacgcccggcctcccgacccccccgctagcgccccgccagacagcagcagcaacagcgcatcacaggacaccaaggagagctctgaagagcctccctcagaagagagccaggacacccccatttacacggagtttgatgaggatttcgaggaggaacccacatcccccataggtcactgtgtggccatctaccactttgaagggtccagcgagggcactatctctatggccgagggtgaagacctcagtcttatggaagaagacaaaggggacggctggacccgggtcaggcggaaagagggaggcgagggctacgtgcccacctcctacctccgagtcacgctcaattgaaccctgccagagacgggaagaggggggctgtcggctgctgcttctgggccacggggagccccaggacctatgcactttatttctgaccccgtggcttcggctgagacctgtgtaacctgctgccccctccacccccaacccagtcctacctgtcacaccggacggacccgctgtgccttctaccatcgttccaccattgatgtacatactcatgttttacatcttttctttctgccgctcggctccggccattttgttttatacaaaaatgggaaaaaaaaaaaagaaattatataaaaaaaaaaaaaaaaaaattgggggggggccccgtaaccaattggccttagggggggggtttaaaatt

SEQ ID NO: 935 - DNA, 960 bp, Homo sapiens
agatggctcagcgacttcttctgaggaggttcctggcctctgtcatctccaggaagccctctcagggtcagtggccacccctcacttccagagccctgcagaccccacaatgcagtcctggtggcctgactgtaacacccaacccagcccggacaatatacaccacgaggatctccttgacaacctttaatatccaggatggacctgactttcaagaccgagtggtcaacagtgagacaccagtggttgtggatttccacgcacagtggtgtggaccctgcaagatcctggggccgaggttagagaagatggtggccaagcagcacgggaaggtggtgatggccaaggtggatattgatgaccacacagacctcgccattgagtatgaggtgtcagcggtgcccactgtgctggccatgaagaatggggacgtggtggacaagtttgtgggcatcaaggatgaggatcagttggaggccttcctgaagaagctgattggctgacaagcagggatgagtcctggttcccttgcccgcgtgggaccccaatagaactcagcccttccatgccagcccttcctgctgcctccctcctgtctggctcctggggcccatgcttagagcccaggctccagccctgagtgcttccgagctggcggactgcccaggggccatcagaggatggtggtgctgctgctgatccggggaccgctgtcttccctcccatacgcctttcatccctccttctagggcctatggcagttctcccaggatgtgtggcgagagcctgggccagcccacagcgttcctagtcaggcagccacaccttggtcctcatcttggtcccttccaatctgaaacctcgtgcctggctcgtctgccacctacatttctctttccagctgctgttttgtaaaaaaaaaaaaaaagaagttttgccctatatgagtcgattgtcgac

SEQ ID NO: 936 - DNA, 3491 bp, Homo sapiens
gcggacgcktgggtggaccttgctgctgctgctactgctgtttccaggggctgcagagcatggactgttaaatcttgcacttcttctgagtgagctgaattcttgccgccaggatggggaaacagaacagcaagctgcgcccggaggtcatgcaggacttgctggaaagcacagactttacagagcatgagatccaggaatggtataaaggcttcttgagagactgccccagtggacatttgtcaatggaagagtttaagaaaatatatgggaactttttcccttatggggatgcttccaaatttgcagagcatgtcttccgcaccttcgatgcaaatggagatgggacaatagactttagagaattcatcatcgccttgagtgtaacttcgagggggaagctggagcagaagctgaaatgggccttcagcatgtacgacctggacggaaatggctatatcagcaaggcagagatgctagagatcgtgcaggcaatctataagatggtttcctctgtaatgaaaatgcctgaagatgagtcaaccccagagaaaagaacagaaaagatcttycgccagatggacaccaatagagacggaaaactctccctggaagagttcatccgaggagccaaaagcgacccgtccattgtgcgcctcctgcagtgcgacccgagcagtgccggccagttctgagccctgcgcccaccaatcgaattgtagagctgcttgtgttcccttttgattcttctttttaacaatttttttttttttttgccaaacaatatcaatggtgatgccgtcccctgtgcggtctgatgcgccttcctccgtgacgccttcagcttcttttgtcgtggatgcttcgtgggaatgcccagagccccagtgtgcttgtggagagcatggacagacttcgtggtgttcattgtttgatgatttttaatcgttactattatttttttttattctaatgtctctgttctaaaacgtaagactcgggggttggggcaaaagaagggaaacccatccagtcctgtgattctattgcaagcttcaaggggcttttgtttgaaagacaaaactccccacctgggtctgttgtcacacgtgccgtaggggtgatggatggcaccggatgctggattccccaagaacaagttaccctctggggtgaggctattccagcgagctgggacatttccccatgggggcccactcccctctcttccccagcaggctgtagtttctaagctgtgaacatttcaagataaattaacagaggagaggaaaaagatggctcagctattttttcacaggtttacactagttgagctaatatgcgtgtctttggaaattaaacacaaatggtaacatattccaaaaccagacccatcttgttgcctattgtgataaaataaaaagacggctgtatataacatattgggtaatgcagaccaaattaagtgttttgccttgtttaaatgaaatgcatgtttagtgagcactaatacaatcttattccagaagactgtttttagtagcttattgtgaagtaagacaactataatgaatgtctgtcttgtttggaagtcatatctgtctttgcacaaatgtaccaatcgacaagtatattttatatattccataaaaatacaaagtaaccctgactagggcccaactttaattttgaatgcatttccagagtggccatgcctagagggcagatgcagagcaggtggtagtgggacaggacaattggagcacaggaatgttaacatgtatgacaggggaccagtagggtggtttccctctcaggcccagcagcccattgacagcattagactggcggcatggtgcttttctgagcagatcaatactctgcagactcgaaaaaacatcacrtacattcttggaacttcccagtggtttaatctrtgtgcatggttagggagccaggtctggaatattcagtttccctgcccctgttaaagaatcagaggttgggcagtcatcaaattcatcataaagacatgggcaagtgtgtctgtggtttccaaggcccccctatggagaatccaaaagtattttccattgccgtgctctttgaatgcagacttctatttccagaagtgacagcacaagtctgagttgctgtttggtctggtgacctcagacacactaatttgaattgaaagctaagagtaaaaatttgctggttacaggcgagtcatactcttgcaagtagttagcaaagggaggcccaaattctcaaggttgttgatggggaacttgccactaagagaaggcagagaggtccctagtgggtatatttgctgccaagccacttgccaaagaagaggaaccacagaaagagagacatcatgaccaggagaaaaatgtgactagacatgctaacctccaggtttttatatatgacttgagtctgctgtaattggcagcagaaatccaaatttgtatggtagaccaaaaagaaccaaatccatagggtgaaattttgagacctagactctgtaaaaataatcctagtcttcctccaggggtcagttcctcacagtggttctgtaccaaaacttgccaaattcctccatggccaagtgttaaaatctgtgtttggaaaatagcgaattaacctaagacacagaaggcagactgggtgaggagacctagcatgccctattggcagtgctcaggagctgcatcccacttttccctgctctgaatcgaagtcctagttccttcctttgattctcctttggtaggtggaatcagttaatgttttgagaaacctgcctgggctctgccyttagtcatgacatctcgctgagccagacccactctgttccttggaacctagagctggagtgaggagtagaggtctccggctattccagaaagaaaagtgagccacatgcaggctgatgaatgccgacacttccagaatgtatagaaatagtccctgtcctggcctgccactgaccctgtctgtattttctcggaggttgtttttctccttctccttcccaggaaggtctttgtatgtcgaatccagtgcactcaagtttggccaagggactccacagcacccagaagactgcatgcctcaaggtttatgtcactcctctgctgggctgttcattgtcattgctgtgttcagggacctttggaaataaaacctgttctgtcccaaataaaaccagcctgtgatgttcaagggactggaataaagtggcttacgacctgaaggattctacagagtgctcaactgttcatacatcattcagagtgggagggagctgggggtgctgtcccatcccatctgtatgcccacggtggatttaataatatataatttataaatcatagcctatggagtggcccgtaaatcagttgactgtgtagctcttgcctggcattaaagcatgtttttggtttaaaaaaaaaaaaaaaaaaaaaaaaaaaaaaaaaaaa

SEQ ID NO: 937 - DNA, 1224 bp, Homo sapiens
gctccgcaggcggaccgggggcaaaggaggtggcatgtcggtcaggcacagcagggtcctgtgtccgcgctgagccgcgctctccctgctccagcaaggaccatgagggcgctggaggggccaggcctgtcgctgctgtgcctggtgttggcgctgcctgccctgctgccggtgccggctgtacgcggagtggcagaaacacccacctacccctggcgggacgcagagacaggggagcggctggtgtgcgcccagtgccccccaggcacctttgtgcagcggccgtgccgccgagacagccccacgacgtgtggcccgtgtccaccgcgccactacacgcagttctggaactacctggagcgctgccgctactgcaacgtcctctgcggggagcgtgaggaggaggcacgggcttgccacgccacccacaaccgygcctgccgctgccgcaccggcttcttcgcgcacgctggtttctgcttggagcacgcatcgtgtccacctggtgccggcgtgattgccccgggcacccccagccagaacacgcagtgccagccgtgccccccaggcaccttctcagccagcagctccagctcagagcagtgccagccccaccgcaactgcacggccctgggcctggccctcaatgtgccaggctcttcctcccatgacaccctgtgcaccagctgcactggcttccccctcagcaccagggtaccaggagctgaggagtgtgagcgtgccgtcatcgactttgtggctttccaggacatctccatcaagaggctgcagcggctgctgcaggccctcgaggccccggagggctggggtccgacaccaagggcgggccgcgcggccttgcagctgaagctgcgtcggcggctcacggagctcctgggggcgcaggacggggcgctgctggtgcggctgctgcaggctgcgcgtggccaggatgcccgggctggagcggagcgtccgtgagcgcttcctccctgtgcactgatcctggccccctcttatttattctacatccttggcaccccacttgcactgaaagaggcttttttttaaatagaagaaatgaggtttcttaaagcttatttttataaagctttttcataaaaaaaaaaaaaaaaaaagggcggccgctctagaggatccctcgaggggcccaagttacgcgtgcatgcgrcgtcatagctstctcccctatagtgagtcgta

SEQ ID NO: 938 - DNA, 1676 bp, Homo sapiens
  misc_feature (1641)..(1645): n equals a,t,g, or c
gatctccatttggcatacsmctcactatagggaaagctggtacgcctgcaggtaccggtccggaattcccgggtcgacccacgcgtccgcccggtttgacgcacacggcaccaaactgtttgatttaattttggatgagatcgttcttgcagcaagatgttaataagacaaaatctagccttagattgtaagcaaaagaaatcaaggtcaagatctggaagcaagaagaaaatgctaacattacctcatggtgctgacgaggtttacattctccgatgcaggttttgtggcctagtctttcgaggacccttgtctgttcaggaagactggattaagcacttacaacgacatattgtaaacgctaatcttccacggactggagctggcatggtggaagtcacgtcactacttaaaaagcctgcctccattacagaaacttcattttctctactaatggccgaagcagcttcatagaaccaggaaaccttttaaatagccagtttgaattggatgtaaatttgaaattctttttttttaagccacattaaattatctgtttataaatactaaagcaggaaaatggggggaaagtgaattacagtgacatcagagcaaattgaatacttaaaacagtaagtagtctatatattttatatagggtggaaratgtgtttttaaggyttatgaagttttgttggttaactgtgttcactcagtaaaagagcagtacatgtaagcagccattaataaactgttgcacatggatacttatagacagacttattggacaattatgttttttgcagtgttaccagaatcaaggctctgtttattccccacaagacttgcatagaaaaataagatattatattttgtttgtatgtatttagtgttttgtataataccaagaaccgctgactaaatttactcaaattagggcattaaatatcatgtacttcatagtttgagactgttcactcaaatagggcagagtactattctatctagatgtgtaagtgttttttttaaaatcacatggaacggttttttttatactaaaaagtggagggagatttgtttaaacaagtatttctaaaagaaatatgtacatagttctggaaattatttgtggtaaggaaatattctttactccagttgcatttctcagacaataaagtggtgcatccatgctacctcctactttgtcaacaaagatgctatttaccctttacatttttgtatcataatagattttaaaaatctaatgttctttattgcaagacattcttttgttaacaggtttgtttctttttaatgttttacctaaaatttgacatgcttacaggacaggtttgcctcttactttatttaacattgtagaaatgtaattaataaacaatgctcactacacagtttagaatagacgttctcatttatattatcttccaaatttgatcagttagcaaaacttaatacaccaattaaaatatttctacatatgagaatgkttacaatttaaattttagaacttggtttggatgtgattatatgtacsaaaatcgtgtaacactatgctcatgctaagaaccgacataacagaattactgaaataaatgtgctgtgaggaatggaaaaaaaaannnnnaaaaaaaaaaaggggggcccttttaaaggaa

SEQ ID NO: 939 - DNA, 1770 bp, Homo sapiens
ggctggagtgcagtggcgtgatcttggctcactgcaacctctgcctcccaggttcaagctattctccagcctcaaccttccaagtaactgggattacaggcatgcaccaccacacccggctagtttttgtatttttagtagagatgggktttcaccatgttggccaggctggtctcgaactcctgacctcaagtgatctgcccgccttggcctcccaaagtgctggaattacaggcgtgagccactgcgcccagcttccatttcttctttgaaaagtaggaggggttggaattgtcaccctggaggttcatggttgctarattattgattctgttgctggattcaggaracctgttagctggctagttcacagcaagtattgggtgtttggaggggggctgcagagccccttctcaggccccaggagggccagctgccctccctaccccctcttttggacactagcgggcatgttctgctgggaaaacagacagtgtaacctgacttcgagggctgcaggctgaatctctttcagatgtactggctccttgagaggcctagcagatctctactctgtgggtccctttcggagctggggctcaggtttgacccagccactctgaccggagacagcgcagaaatcaccaggagcatttgtttgttttcctttgctgtccagacagtggcccaccgtctgcttcagtctgagcgtggccctgcactagtgagactgatgtggccacaggttcagagaatcagtgcgcctgagtgggagagcagagcgggaggggatttggaggcaggcgggctgtggacagggaggggggaggacatcttccgagctgtcagcgggaggccttcttgaaggtctttcaggagcaargccagaggccgtgggagtkggcggggcctggggctgggagtcaggggtctgargcctcatcttggcccggcctctgcttccgggagaacttggccaattcccttctcctttctgaaccttggtggccccagctgtcacttgagattagcaaggacctccctggtcccagcaggagtgagtggctttgggcagggggtggagtgcagattgcactgccacgtcacccagctcagaaggcccaggtgtggtccagctgtggacttgattgtgaactcctggggaagggctctggtcctttgcctcagttagcgggacccccaccagtgccctgggtgcccctgctggcccctcctctcgctgaccccagccccagtttctggctgcaactcacagaggccccaggctcctgtggccccatcaccagcagctcctgctgtcatttcctgagcctcgcaagcccctaatcctgctccttcctgtcctggcccccagctccctcaagccccactcctgcatcccattctccctggacatcacccctcccaccccttggctcaatttccttcctgtcgtggcttggtcctttggtcattgccctggtcttttcttgtccccttcctgattctgcccttctccaggcccacacggggaacytcctaaccgctgagccctgaaaggtaggcgggtttaggatgagtggctacagggaggagaatggtgtggggagagagatatggaggaaagaatattaggggacaggccgggcacggtggctcacgcctgtaatcccagcactttgggaggccaaggcgggcggatcacttgaggtcaggagttggagaccaccctggccaacatggtgaaaccctgtctctaatgaaaaaaaa

SEQ ID NO: 940 - DNA, 432 bp, Homo sapiens
  misc_feature (421)..(422): n equals a,t,g, or c
gggcggcccaggccgcgggtgaggaggcgccaccaggcgtgcggtccgtcaaggtggtcctggtgggsgacggcggctgcgggaagacgtcgctgctgatggtcttcgccgatggggccttccccgagagctacacccccacggtgtttgagcggtacatggtcaacctgcaagtgaaaggcaaacctgtgcacctccacatctgggacacagcagggcaagatgactatgaccgcctgcggcccctgttctaccctgacgccagcgtcctgctgctttgcttcgatgtcaccagcccgaacagctttgacaacatctttaaccgggtgctggctttgtgattatccatatcaagagctcaggctggggagcaagagagtggtccactgagagggccagaactctccaaggtcacacattnnccccacatgg

SEQ ID NO: 941 - DNA, 1765 bp, Homo sapiens
agtttggagaccaccgcgaatraagtttgcattttcctctgttcttgagcccagcttcttctcgtctcccaccccagcttcccggcattggaagaagggaccgtcctcttccttgtcttggccacccaaatcctggtatcgaaagggttgaacggaccggaagtgtgcagcagcgacgggtccccagctaatcgacgccggaagtagcaattactagacaagcattccgccgccggcttcgctatggcggcaattcccccagattcctggcagccacccaacgtttacttggagaccagcatgggaatcattgtgctggagctgtactggaagcatgctccaaagacctgtaagaactttgctgagttggctcgtcgaggttactacaatggcacaaaattccacagaattatcaaagacttcatgatccaaggaggtgacccaacagggacaggtcgaggtggtgcatctatctatggcaaacagtttgaagatgaacttcatccagacttgaaattcacgggggctggaattctcgcaatggccaatgcggggccagataccaatggcagccagttctttgtgaccctcgcccccacccagtggcttgacggcaaacacaccatttttggccgagtgtgtcagggcataggaatggtgaatcgcgtgggaatggtagaaacaaactcccaggaccgccctgtggacgacgtgaagatcattaaggcatacccttctgggtagacttgctaccctcttgagcagctcttctgagatggccccagtgaaccagcttctagatgacatagaatgacatgtaatgctaaattcattttggctttgcaagtcatgaagcttaggaggcctggcatcttgggtgagttagagatggaagtacattttaataggatgcttcttttctcttcccccagtgcctaggttgccagagcatttgcacaaatgcccctgtttatcaataggtgactacttactacacatgaaccataatgctgcttcttgtgcatgtctgctctgatatacgtcgaacaatgtagcagccactgtcatttctcagtggttttgcctaaccaaacttcttcctaaggagatttatattctggcctacacagcagtccttgatggctgacagccacagaattccaaaccaagtagtgtctgtcagccctcttaactctgtgcacgccctatttcagtcttttacatttgttcttctagggaatgtatgcatctctatatatattttccctctcaaaaccagaacatcaacagtgctgtttctgacacttcagacatcccacgcaaagccacattgaatttttgccaaatgaaaaacacatccaacaatcaagtttctaagaaggtgtcaagtggggaataataataatgtataataatcaagaaattagtttattaaaaggaagcagaagcattgaccattttttcccagagaagaggagaaatctgtagtgagcaaaggacagaccatgaatcctccttgagaagtagtactctcagaaaggagaagcgccactcaagttcttttaacccaagactttagagaaattaggtccaagatttttatatgttcagttgtttatgtataaaaataactttctggattttgtggggaggagcaggagaggaaggaagttaatacctatgtaatacatagaaacttccacaataaaatgccattgatggttgaaaaaaaaaaaaaaagsgcggccgyyytaaggatccagct

SEQ ID NO: 942 - DNA, 2291 bp, Homo sapiens
ggctttacggctgcgagaagacgacagaagggagagatgaatatgatgatctctcagatttgaatgcagtacaaatggagagtgttcgagaatgggaaatgcagtttaaagaaaaatatgattatgtaggcagactcctaaaaccaggagaagaaccatcagaatatacagatgaagaagataccaaggatcacaataaacaggattgaactttgtaaacaaccaaagtcaggggccttcagaactgcaattcttactccctttcacagactgtccggagtctttgggtttgattcacctgctgcgaaaaacattcaacaaattgtgtacaagataaattaatctcactatgaagatttgaataactagacattatttatgctgccaaactcatttgttgcagttgtttgtaatgtctagtggggcttcatcatcctgaaaagaaggagacagggatttttttaaagagcaagaaagtcacaatattacttctttccttccttttttccttctttcctttcttctttctctttctttctttttaaaatatattgaagacaaccagatatgtatttgctactcaagtgtacagatctcctcaagaaacatcaagggactcctgtgtcacatactgtgtttttattttaacatgggtgagggaggcgacctgatcaggggaggtgggggtacacatcaatttgagttgttcaggctactgaaacattaaaatgtgaattcccaaacttttctttttggctttgtcagggaaaagaaaaatatctttataaagaaatctttggaaattaggagaaggaatttcaggtgggtttaagtcagagctagttccccaacagaaagatcatttgaaaccagtttttatcccttctctttccttccctttccctaaatcaaatcaatattaattgtgccttatttcacttaacatagacttgaattatttttagggaaagcccctataatgaattcagaaatcactacaagcagcattaagactgaagttggaatattctgttgaccataaaaccttgatatcattctgtgtatatagaatgtaaaaggaatattacagtgttaactgccatatatgtaatatacacaaactcaattagcattgtaatggccaaatgcattcccccatgcttttctgttttcaaaaaaattgaaaaacaaatcaactcttatccccaacagctgcctaattttaggagtctgaccctccacatctcactggtgtgggtgcatggggctgtggagtgggtgtcagtatggatgtgtctgaatgtgtgaggccttggaagggactctttctgcagatactgtaaatacaagtaccattttaataaagcatgtacaataaaccaaaaaagcttgagttggactttatatacagaactgtaagccagtgcattatgatacagttgtaagattgtgcatttgattcaagataaggaaaaatcttggaaatgaaaagcaggcactggttaaccaagttgtacacattgtaccacattcagcataactttaggaagaaattccactttgtgaacattctccagaaatccaagattattcaggtaagaattggtatattaaatgtacatctttttactttctattttgatgccaactgattatactagacaattagcactccaggtggttattgaacacaaaacagtaaaagaatattgcactgatagatactaaattattattttattaggttgaaaaagcccttactaaaagcccctcatatatcaattactttatttcattatgactacttaggttccgggctggggacaagttcacttaaaaaggcaatgttatttaacaggtcaccagttaagacttctgctttgtagatacatgcagaagccatcaaacaagggggagcttttaactgcaacaataagctaaagtatgtaaaatactacattctattcagtcttggagtgttttgtagaaagttatcttcagccaaatctttgctgaagactggttgtggagtgttggtaaatgctttgtgtttttatgtaaaatattttctaaacaaaaaatgttaaaagtacatgtcctctgtagtaaactgatatctatatatatgaatcattcaagcctaaagtctagtaataaactgtacttgtgaatagagaaaccctaaatattcatgcagwaaaaattatgcggtctgttaagaaaaatgagtaatttgtgttttggacttgaaataaacagtgttctgtagataattcctcaaaaaaaaaaaa

SEQ ID NO: 943 - DNA, 3121 bp, Homo sapiens
  misc_feature (3108)..(3108): n equals a,t,g, or c
  misc_feature (3114)..(3115): n equals a,t,g, or c
gaggatttacctctagagcaggtcattttgagcctctccatggtgctgcagctgtccctccgctgataccttcatctcagcataagccagaagctctgccttcaaacaccaaaccactgcctccacccccaactcaaaccgaagaagaggaagatccagcaatgaagccacagtctgtactcaccagagttaagatgtttgaaaacaaaagatctgcatccttagagaccaagaaggatgtaaatgacactggcagttttaagcctccagaagtagcatctaaaccttcaggtgctcccatcattggtcccaaacccacttctcagaatcaattcagtgaacatgacaaaactctgtacaggatcccagaacctcaaaaacctcaactgaagccacctgaagatattgttcggtccaatcattatgaccctgaagaagatgaagaatattatcgaaaacagctgtcatactttgaccgaagaagttttgagaataagcctcctgcacacattgctgccagccatctctccgagcctgcaaagccagctcattctcagaatcaatcaaatttttctagttattcttcaaagggaaagcctcctgaagctgatggtgtggatagatcatttggcgagaaacgctatgaacccatccaggccactccccctcctcctccattgccctcgcagtatgcccagccatctcagcctgtcaccagcgcgtctctccacatacattctaagggagcacatggtgaaggtaattcagtgtcattggattttcagaattccttagtgtccaaaccagacccacctccatctcagaataagccagcaactttcagaccaccaaaccgagaagatactgctcaggcagctttctatccccagaaaagttttccagataaagccccagttaatggaactgaacagactcagaaaacagtcactccagcatacaatcgattcacaccaaaaccatatacaagttctgcccgaccatttgaacgcaagtttgaaagtcctaaattcaatcacaatcttctgccaagtgaaactgcacataaacctgacttgtcttcaaaaactcccacttctccaaaaactcttgtgaaatcgcacagtttggcacagcctcctgagtttgacagtggagttgaaactttctctatccatgcagagaagcctaaatatcaaataaataatatcagcacagtgcctaaagctattcctgtgagtccttcagctgtggaagaggatgaagatgaagatggtcatactgtggtggccacagcccgaggcatatttaacagcaatgggggcgtgctgagttccatagaaactggtgttagtataattatccctcaaggagccattcccgaaggagttgagcaggaaatctatttcaaggtctgccgggacaacagcatccttccacctttagataaagagaaaggtgaaacactgctgagtcctttggtgatgtgtggtccccatggcctcaagttcctgaagcctgtggagctgcgcttaccacactgtgatcctaaaacctggcaaaacaagtgtcttcccggagatccaaattatctcgttggagcaaactgtgtttctgtccttattgaccacttttaactcttgaaatataggaacttaaataatgtgaaactggattaaacttaatctaaatggaaccactctatcaagtattataccttttttagagttgatactacagtttgttagtatgaggcatttgtttgaactgataaagatgagtgagcatgcccctgaaccatggtcggaaaacatgctacacactgcatgtttgtgattgacgggactgttggtattggctagaggttcaaagatattttgctttgtgatttttgtaatttttttatcgtcactgcttaacttcacatattgatttccgttaaaataccagccagtaaatgggggtgcatttgaggtctgttctttccaaagtacactgtttcaaactttactatggccctggcctagcatacgtacacattttattttattatgcatgaagtaatatgcacacattttttaaatgcacctggaatatataaccagtgttgtggatttaacagaaatgtacagcaaggagatttacaactgggggagggtgaagtgaagacaatgacttactgtacatgaaaacacatttttcttagggaaggatacaaaagcatgtgagactggttccatggcctcttcagatctctaacttcaccatattaccacagacatactaaccagcagaaatgccttaccctcatgttcttaattcttagctcattctccttgtgttactaagtttttatggcttttgtgcattatctagatactgtatcatgacaaagactgagtacgttgtgcatttggtggtttcagaaatgtgttatcacccagaagaaaatagtggtgtgatttggggatatttttttcttttcttttcttttcttttttttttttttttgacaaggggcagtggtggttttctgttctttctggctatgcatttgaaaattttgatgttttaaggatgcttgtacataatgcgtgcataccacttttgttcttggtttgtaaattaacttttataaactttaccttttttatacataaacaagaccacgtttctaaaggctacctttgtattctctcctgtacctcttgagccttgaactttgacctctgcagcaataaagcagcgtttctatgacacatgcaaggtcattttttttaagaaaaaggatgcacagagttgttacatttttaagtgctgcatttaaaagatacagttactcagaattctctagtttgattaaattcttgcaaagtatccctactgtaatttgtgatacaatgctgtgccctaaagtgtatttttttactaatagacaatttattatggcacatcagcacgatttctgtttagataatacaccactacattctgttaatcattaggtgtgactgaatttcttttgccgttattaaaaatctcaaatttctaaatctccaaaataaaactttttaaaataaaaaaaaaaaaaaaaaaaccccgggggggggncccggnnccaatt

SEQ ID NO: 944 - DNA, 5358 bp, Homo sapiens
aactagtggatcccccgggctgcaggaattcggcacgagaagaaagtgaagggaggttgagttgtggtaatcatccaggataaagatggtgatagagcagttcaccatgcagcttttggagatgaaggcgctgttatagaagtactacatcgaggtagtgctgatttgaatgctcgaaacaagcgccgacagacaccacttcatattgctgtcaataaaggtcatcttcaagttgtgaagactttattggactttggctgtcatcccagtctccaggattctgaaggtgatacccctcttcatgatgcaataagtaagaaacgtgatgatatcctagcagttcttttggaagctggagcagatgttaccatcacaaacaataatggatttaatgctctgcatcatgctgcactaaggggaaatcccagtgcaatgcgtgttttactatctaaattaccaagaccatggattgtggatgagaagaaagatgatggttatactgccttacatctggctgcccttaataatcacgtagaagtggctgaactgttggtacatcagggtaatgcaaacctggatatccagaatgtraaccaacaaactgccctacaccttgctgttgaacgacagcatacccagattgtwaggcttttggtccgtgcaggtgccaagcttgatattcaggataaggatggggatactcctttgcatgaagctctaaggcatcacactttgtctcagctacgtcagctccaagatatgcaagatgtggggaaggtggatgctgcctgggagccatccaaaaacacgttaataatgggacttggtacccagggggcagagaagaagagtgcagcatctattgcctgtttcttggcagccaatggtgctgacctgagcattcgaaataagaagggtcaatcgccacttgatctctgtcctgatccgaatctctgcaaagcactggcaaagtgtcataaggaaaaagtcagtggtcaagtgggttctcggagtccttctatgattagtaatgattctgaaaccttagaagagtgtatggtgtgctcagatatgaagagagatactctttttggtccatgtggacatattgctacctgttctttatgttctccacgtgtcaagaaatgcctcatctgtaaagaacaggttcaatccaggacaaagattgaagaatgtgtggtatgctctgacaagaaagcagctgttctttttcaaccctgtggccacatgtgtgcttgtgagaactgtgctaacctgatgaaaaagtgtgtgcagtgtcgagcagtagttgaacgaagagtgcctttcattatgtgctgtggagggaaaagttcagaagatgccactgatgatatctcaagtgggaatattccagtattacaaaaggacaaggataataccaatgtcaatgcagatgtgcaaaagttgcagcaacagttacaagacattaaagagcagacaatgtgccctgtgtgtctagatcgtctgaagaatatgattttcctttgtggtcacggaacctgtcaactctgtggagaccgcatgagtgaatgtcctatctgtcgcaaggctattgaacgaaggattcttttgtattaactaagacacatggtgtattttgttagctaatgtatctagtcatgagatcttaatargcttttgatctagttggaagttctgatgagttaatttctaatatcatagtttctttactagagtataattgggctgtaaatgtaccagaacaaaaaaccctacaaaatggtgttggaaattgtgtwttttgtttttgttttaaatttgaaacatcaaattcatgtaactcataggataatttacctttggcttctaagaggaaagtcctttaaggatatccttttttaaaaaattgcatttttctcttataatttgtaaatttgttggatctcaaaagacataattctttgtgatcagttatccttcatttcatcgtggttttacacagtgagttgataacaggttctctgagaagtcatgcatcaaataaaagaggcaggtcaaacaattatgtcacatggtaaattataaaatgacagtacaagttccagatagttaagggaataccgaagggatgattctttttttaagataacaggaagttacccacatgtttgtttctgaattcttagagtaaatggaagcatagaatgagggaataatgactttgcatttctcttgttttctagattcaaaaggaacattgtttaacttgaatcagattaccagtttcaaggtgactgatagacaagaaaaggaaaaataagcaataatagtgggcaactgaagagaaaaaaaaaacgagtatctattaactggccactaacagttgcctttcttacattaatttatacactattttgttcagccagtgtttttaaaaaaaatctatgaaaagtgtacttccggttttctgtgattacttatctgggcttgatctgaccagtgaaatgacattgccctatttggacctctgaggttctatttagctttgcagatgtacatagtatcccagtgatctgcaaaattaatgccttttccaagaaaaaatcttttcttctctgtatcagttaattctgacagtgttagtgattctgtcttcattataggccttatttccattatctctttctttatagtattttttgttataaagaaaacagtctttctgtgtatacctacggatgagggtattatttaaactgccaacaatatccaagacatggtcaataacctaattataaatactttagaaagagtgaccaggacatgtatagaaatgtctgcttacctgtagactttaaaaacaaacaaaaaaaacaaacaaaatttttggagcatttaatcattttttttctccttttatctcctttgtaatcttattgtctcctgagtaaatatacacataaatgtttggggattcattgctgctagattatatcaggtgtttacatagtgtctactatatgctgttgataagctttttcctaaaaatagttatcctcttttgtagtttttttccctcctttaaatctggctagcttttcttacttcagtttttatagaacaccaactaaatttgaaagtatgaagtctctagccctcttacactgtttctggctgtttaatccttgctgcctttgcaagtcctggtgaaagcaatggggagctttgctggctggttttgtagtctcaacaattccatgtctgtgtttagctgagtaactgctatcatttagaacagtaaaatttttatagatttcaaatttgaaaattcatgtacactcagttatctaataaggggccaccgacgctgtttttaaaactattttgaagttataaaaaggtagaacatctgactgatgatgttcacataaagagacagacagactatcatgttgcagacatgaaaacagcatgtcaggtttttcctttccttccatgccatgggctacccatctcttcccactagatcacctggtgaggagggagcacctggctgactcatgcagagtttggccaatcagagaattgtgtggtctccagctctactttccttaaacaaatcctttctgttttctgagctgcagtgctaaaacagatccctaaaaggtaatagcatcttccagactagtttaattatttcctttataagaatatgacataaatttttattatagaaataatgtcattataattttagtgctagtacttgtgggttttctgtatttgtatcaccttgaaatttgttccatgaatagaaaatacttctttattcatgttttcaatcacttagaattattttaaatttattttgggtttgtgagagataataagattaagaacttcatcatttcagtgactttcctccaactctctgaatctgctacctcttattatatgtcccttagcagtacttttccagttaggttcgttaccctsctcattagctaaacctctttatcttgtgcctcaaaagagcttttacttttcttagaaacatttataaaaaaaaaaaaaactgacacgcattcattcaaaaaagtatttattgggctttagggattagatacacaacagtggaaaaatggcatcttagcacactcagaatttattgtgcagcagttgtgtattttaaggaatctgtagttaaaaggaagagatccaaaggtcctgataacatttcctaacgtttcagaagagttgtcattgagtagtgtttggatttcctctctgtatccctcaccctaccattttctcctttattcttctaagattgttagcgttgttactcaaaacatacacatacaacataccagatggtgctgttctaatggtatttgttcacgtaatttaacgttcttactgcttatactatatacatatttaattttgttgggagcaagaaggttttcaagaaaagataattttgtattagtgtaggaatatattagacaaatgtttagttggtcaaattatgcataagatatttgtaactttaaacattgcaaattgaccagctagctatggaagcataaaattaattgataattaatgttggaaatacatttctaaaatttatatttttatggtgttagcctgtaagagcattttagcatattgaaatgcatgctgcttaagatgtgtctggttcaaatatcaaaacttgctgggtcatttttacatagtagaaacatactgtctatgtgttgcccaattgctgtttgtccactctgaattctggaccctttttggactaagaattagttaaattcatgaactaagagaattagagatggggtagagtaggatcaggacagtggggttacaacagataggaaaggaaagtcagcatttgagtgtagagaaaaaaagaggatcatacagatgtcatcaaattataggctttaatacaggttgctttttttaatccaaaaggaaaagcacttatcctatcagaatgtctaccatgttttatagtartaatttgtgtaaaaaattgaatttttgaatagttttttgtattttttgtgatgaaaaactcataacataaaatttaccatattaactgtttctaaagaatacagttcagccatgtgaagtacatttacactgttgtgaaacagatctccagaactttttsatcttgcaaaactgaaactccatacccattaaacaactcccctttttgwtttctcctcagtggaatagaattttgactccatataagatcagaaaacacctaaattccttagttgtatgtgtttgcaagatctaaggtcatggtaaagcataagttcc

SEQ ID NO: 945 - DNA, 3905 bp, Homo sapiens
  misc_feature (3387)..(3387): n equals a,t,g, or c
  misc_feature (3396)..(3396): n equals a,t,g, or c
  misc_feature (3791)..(3791): n equals a,t,g, or c
  misc_feature (3894)..(3894): n equals a,t,g, or c
gcagctttccatcgacactaggccctttagaccagcctctgaagggaatcctagcgatgatcctgagcctttgccagcacatcggcaggcacttggagagaggctttatcctcgtgtacaagcaatgcaaccagcatttgcaagtaaaatcactggcatgttgttggaattatccccagctcagctgcttctccttctagcaagtgaggattctctgagagcaagagtggatgaggccatggaactcattattgcacatggacgggaaaatggagctgatagtatcctggatcttggattagtagactcctcagaaaaggtacagcaggaaaaccgaaagcgccatggctctagtcgaagtgtagtagatatggatttagatgatacagatgatggtgatgacaatgcccctttgttttaccaacctgggaaaagaggattttatactccaaggcctggcaagaacacagaagcaaggttgaattgtttcagaaacattggcaggattcttggactatgtctgttacagaatgaactatgtcctatcacattgaatagacatgtaattaaagtattgcttggtagaaaagtcaattggcatgattttgctttttttgatcctgtaatgtatgagagtttgcggcaactaatcctcgcgtctcagagttcagatgctgatgctgttttctcagcaatggatttggcatttgcaattgacctgtgtaaagaagaaggtggaggacaggttgaactcattcctaatggtgtaaatataccagtcactccacagaatgtatatgagtatgtgcggaaatacgcagaacacagaatgttggtagttgcagaacagcccttacatgcaatgaggaaaggtctactagatgtgcttccaaaaaattcattagaagatttaacggcagaagattttaggcttttggtaaatggctgcggtgaagtcaatgtgcaaatgctgatcagttttacctctttcaatgatgaatcaggagaaaatgctgagaagcttctgcagttcaagcgttggttctggtcaatagtagagaagatgagcatgacagaacgacaagatcttgtttacttttggacatcaagcccatcactgccagccagtgaagaaggattccagcctatgccctcaatcacaataagaccaccagatgaccaacatcttcctactgcaaatacttgcatttctcgactttacgtcccactctattcctctaaacagattctcaaacagaaattgttactcgccattaagaccaagaattttggttttgtgtagagtataaaaagtgtgtattgctgtgtaatattactagcaaattttgtagatttttttccatttgtctataaaagtttatggaagttaatgctgtcatacccccctggtggtaccttaaagagataaaatgcagacattccttgctgagtttatagcttaaaggcctaaggagcactagcaacatttggctatattggtttgctagtcaccaacttctgggtctaaccccagccaaagatgacagcagaacaacataatttacactgtgatttatctttttgctgagggggaaaaaatgtaaatgttctgaaaattcactgctgcctttgtggaaactgtttcagcaaaggttcttgtatagagggaatagggaatttcaaaataaaaaattaagtatgttctgtgttttcattttaactttttttatggtgtttaatttgtggttggctgcaactgtgtatcatgtatatggaacttgtaaaaaagttctcgacattcagatcttaagagatgaaatcacttttacctataaaaaccacttttattgcggtttgactgcattgagctctaggatattaaatgatatcactaatattttgcatgtaatttgctcatttgagtgagggcactttttttgtacatatgatggggccaatgcacaatacttttatcacaatcaactttttctttgtatccctatttcaatgagcagtcagtctcaagaggttactgcacttcagttctaactagacatttgtactaaggtatttcagttatgtaaactcagcctgggcactttctgataactgtaaaatgttttataagatcatgattattgaagatacattttggaaaattttaaatgttcgtgagcagcttaactacttttgtatctagccttttttaagtatcttgttacatttacttttttaaataaagaaattacagaagaaatgtcaagtaatattgaagaaacaatagtttttatttatgtagttgtacatttttaaactaagggcaatacactgacatggttatgtgcataaaaattttgacttaaagaactggaagtttatatacacctggactataagaaacagaagaaaatcagtccacattttacagttagcagagaatcctaaatggcactggcctggccaccttttcattttacaaatgggggaagtgaagtgtgaccccttacttggcataggaagttaacttacacctaataactgacaggtttttgttttgatgacctattaattatgtagcctaggattaatatcccaaaattactctggtttaagtagctttattcagtggcataataacactgttttcttccttaagtcttcaatgaagtgacttaaaacagtcactttacatattaaaaatgaggagagcaattctctggaatctctcctttcagttcctttgtaggatttctggccttgaggatagtcttcatgttcaaaggcactatgcttttattatataacttccttcagaagactgaaccacatgatattctcagccctgttaacactaaaaatatttaaaactgaatgatagtagtgactcattgtattacttaaaacttatataacacgctgtattagatgtgtgtaaattagccaaaggttattttacaaagtgagacattggtttttatgtctaaatgctatttctgaataaatgaaatagtaattagatcaagagctgattagcatcaatgtgtttgaaagatataaaatttatacatcaccttaacctctgtatgcacatgatgggattgataaaatattaaatgagaacaaactagatatgattaggacatttgaaaccctaattgtgaatttatttttaatagttactgaaatgaaaatatttaaaataatgcacaatgtcttaagtcttcctaaatcaagattttggttaaaaaatacttctaataatagtaaaagattttttttttaagtaaatcataaaacggttctaaatgtaaaataaagacatgtaaaataaagttctcttttggtcttgtttagtgtttaaatctaccaattgaaaccaaatttagnaagagaagnccaagaatgacctttacttgagtgttttcagagtttgctactactatttttttccctaaatcatctggataccaagactatccagtaaaatggataactgggcagacttgagagggtattttaaaggaatgatttcactatttagtagctgcccccaaacaacatccctcccataaagatactatttttacattttaaaggtagtcagcaattcctatgtttaaactcaagttgagataatcccttgaggcagtagtttccatgcttctgtatgttgtaagrttcwtttgtaaagtttgttaatgcagattcttaagcattcctcatcctcktgcctcctttctgaattcagtaagtctttggtggaggccagggaatcttcatggcagatcatnccaggtgattctgaaacactgcccaaagaatatttcctttttatttacaaatataaatgtcccgctgaagtccctgagggccaaacctttcctacttagaacngcttacaatct

SEQ ID NO: 946 - DNA, 2129 bp, Homo sapiens
gcaccgtgcctggttatgtctgcctgtgcaatcccggcttccactacgatgcttcccacaagaagtgtgaggatcacgatgagtgccaggacctggcctgtgagaatggcgagtgcstcaacacggagggctccttccactgcttctgcakccccccgctcaccctggacctcarccagcagcgytgcatgaacagcaccagcagcacggaggacctccctgaccacgacatccacatggacatctgctggaaaaaagtcaccaatgatgtgtgcagcgaacccctgcgtgggcaccgcaccacctacacggaatgctgctgccaggacggcgaggcctggagccagcagtgtgctctgtgtcccccgaggagctctgaggtctatgctcagctgtgcaacgtggctcgcattgaggcagagcgggaggccggggtccacttccggccaggctatgagtatggccccgggcccgatgacctgcactacagcatctatggcccagatggggcccccttctacaactacctgggccccgaggacaccgtccctgagcctgccttccccaacacagccggtcactcagcggaccgcacacccatccttgagtctcctttgcagccctcagaactccagccccactacgtggccagccatccagagcccccagccggcttcgaagggcttcaggcggaggagtgcggcatcctgaacggctgtgagaatggccgctgtgtgcgcgtgcgggagggctacacctgtgactgttttgagggcttccagctggatgcggcccacatggcctgcgtagatgtgaatgagtgtgatgacttgaacgggcctgctgtgctctgtgtccatggttactgcgagaacacagagggctcctaccgctgccactgctccccgggatatgtggctgaggcagggcccccccactgcactgccaaggagtagcagtcaggggtcagtgtggcaactacctggaaatggcctccagtcacaggcaggggccttgaggatgatttcctagctgggaagacaccgtgacatcaggccagaggtttccaatcagccttgcctgctttcatctctcccagcttagcctctggctgtaagcttcggtcattgcctccatgcccttgcttggctcaagcaccaccaatcgctttaatgcttcagccaccgcatgaggccctgtccaccacctttcctggccttgctatgggatgcttaccaaaggatggccctcatccaccctcccaagctgtgcgagcatgcaaggccccatggcctcacactgcagacacccctttccagccacaatccaccatcatcctgacgatcccacaactgggacagaggctacatctgccctagggaggtccttcagaatctgtggagcaagaaaggatttggggaagcttggggactgactccagagccccctcctaagaaccatcaccaccactcagccaatctgttctgggccctgattttgccacacctccatcctgtagcccattctctgaccccaaggagtggcagaagatcccttcactcagagaagcaaggctgatattagcttgttgaatgtaagagacacaaatgaagaagaacaaagagcctgagaaagcagcaagaggacatgatgaaaaatacgtggagttgatgagaaaggggagccaaggctttatacgtctaaagaaaatattcagtagctgaatccgcccagtgatagcctgtgggcaccagcagcaagggctgccatgggatacagyacccatctacaaagacctctattacataaacactgcttcttacaggaaacaaacctcttctgggatctccttttgtgaaaaccagtttgatgtgctaaaagtaaaaagtctattttccagtgtggtcttgttcagaagcagccagatttccaatgttgtttttcccctccactcagaaacccctgccctttcccttcagaaaacgatggcaggcattcctctgagtttacaagcagagactcactccaacccaaactagctgggagttcagaaccatggtggaataaagaaatgtgcatctggaaaaaaaaaaaaacccacgcgtccgcccacgcgtccgcccacgcgt

SEQ ID NO: 947 - DNA, 1166 bp, Homo sapiens
  misc_feature (1113)..(1113): n equals a,t,g, or c
  misc_feature (1144)..(1144): n equals a,t,g, or c
  misc_feature (1146)..(1146): n equals a,t,g, or c
gcgtcccggctcatcacccggcctgtggcccactcccaccgccagctggaaccctggggactacgacgtccctcaaaccttgcttctaggagataaaaaggcctcacctcctgccggctccgcccggcccggcccacctcgcccccacctcggcgcccacccattgtcccctcgcgcagtcaccgagcgcagatcccgcgctctcgattggaacgcctscccatcactcagccacactcaggggctggacgcctcactcccgtttccgagccataaaaggtctaggaccgcttcccccgagccagcgcagcgtttgacgtcatcgtgcgtgtggtgcccctgctgccggggctggtgattggaggaaaccccgtgtctgcggagcggctgtagcctgtgagcagcgagatccagggacagagtctcagcctcgccgctgctgccgccgccgccgcccagagactgctgagcccgtccgtccgccgccaccacccactccggacacagaacatccagtcatggataaaaatgagctggttcagaaggccaaactggccgagcaggctgagcgatatgatgacatggcagcctgcatgaagtctgtaactgagcaaggagctgaattatccaatgaggagaggaatcttctctcagttgcttataaaaatgttgtaggagcccgtaggtcatcttggagggtcgtctcaagtattgaacaaaagacggaaggtgctgagaaaaaacagcagatggctcgagaatacagagagaaaattgagacggagctaagagatatctgcaatgatgtactgtctcttttggaaaagttcttgatccccaatgcttcacaagcagagagcaaagtcttctatttgaaaatgaaaggagattactaccgttacttggctgaggttgccgctggtgatgacaagaaagggattgtcgatcagtcacaacaagcataccaagaagcttttgaaatcagcaaaaaggaaatgcaaccaacacatcctatcagactgggtctggcccttaacttctctgtgttctattatgagattctgaactccccagagaaagcctgctctcttgcaaagacagcttttgatgaanccattgctgaacttgattagaaaaaaatgtnantgtgttccatttaaaatttt

SEQ ID NO: 948 - DNA, 2230 bp, Homo sapiens
gaaccccacgcgtccgcggacgcgtgggcttcagagggagacgctgttgcggcagctggagacgaaccagctggacatggacgccacgctggaggagctgtcggtgcagcaggagacggaggaccagaactacggcatcttcctggagatgatggaggctcgcagccgtggccatgcgtccccactggcggccaacgggcagagcccatccccgggctcccagtcaccagtggtgcctgcaggcgctgtgtccacggggagctccagccccggcacaccccagcccgccccacagctgcccctcaatgctgccccaccatcctctgtgccccctgtaccaccctcagaggccctgcccccacctgcgtgcccctcagcccccgccccacggsgcasatcatctctaggctgtttgggacgtcacctgccaccgaggcagcccctccacctccagagccagtcccggccgcacagggcccagcaacggtccagagtgtggaggactttgttcctgamgamcgcctggamcgmagcttcctggaagacacaacccccgccagggacgagaagaaggtgggggccaaggctgcccagcaggacagcgacagtgatggggaggccctgggcggcaacccgatggtggcagggttccaggacgatgtggacctcgaagaccagccacgtgggagtcccccgctgcctgcaggccccgtccccagtcaagacatcactctttcgagtgaggaggaagcagaagtggcagctcccacaaaaggccctgccccagctccccagcagtgctcagagccagagaccaagtggtcctccataccagcttcgaagccacggagggggacagctcccacgaggaccgcagcacccccctggccaggcggtgtctctgttcgcacaggtccggagaagcgcagcagcaccaggccccctgctgagatggagccggggaagggtgagcaggcctcctcgtcggagagtgaccccgagggacccattgctgcacaaatgctgtccttcgtcatggatgaccccgactttgagagcgagggatcagacacacagcgcagggcggatgactttcccgtgcgagatgacccctccgatgtgactgacgaggatgagggccctgccgagccgcccccaccccccaagctccctctccccgccttcagactgaagaatgactcggacctcttcgggctggggctggaggaggccggacccaaggagagcagtgaggaaggtaaggagggcaaaaccccctctaaggagaagaagaagaagaagaaaaaaggcaaagaggaagaagaaaaagctgccaagaagaagagcaaacacaagaagagcaaggacaaggaggagggcaaggaggagcggcgacggcggcagcagcggcccccgcgcagcagggagaggacggctgccgatgagctggaggctttcctggggggcggggccccgggcggccgccaccctgggggtggcgactacgaggagctctaggccggcgtgggcagtggccgccctggggcggggggcgtgcctgtcactgcctggggaggcatttgcctctgtaccatcgcctttgccgctgccccgtggctgccgtgtgcgcttctgagctggaagaggccgggcattggtggtccccaggctgggccctgcaggtgctgggccttcaggcccagtgtgagcctgctctgcaagaagggaggggacagctggcttcagccaggctcggtggacaccctggccctctcggggcagagccgccagtgtttctcagggatgtgactgaggcccaggagggacctgtgagggtctgtttacagaggctgggcaggggccgcttggctgtggggtgtgcgctgccccggcacctgcttgccctccgcgctcatctggggccgcagcatgcctatggttccgcttccggccgggagccctgaacacgggtgtgcagactcaccctaaagggcggcccaggccccacgctagaaggctggcgagaccgaaggcagcatgtgaggcctctcctgggagtgggggttgtgtttcccacagtggcctcagctgcgcccccgctcaggtgagcccgaaggcaggagccgggaggcactcctcccaaacactccactcagaccataaagcactcctgtttcaaaaaaaaaaaaaaaaaaaaaaaaaaaaagggcgccgctcgcgatctagaacc

SEQ ID NO: 949 - DNA, 2976 bp, Homo sapiens
tgggaagcatgacccgggtggcgggacaagacttgcttcccggccacgcgcgctcggccggccgtggggcggggcataggccgtgacgtggtgtcgcgtatcgagtctccgcccccttcccgcctccccgtatataagacttcgccgagcactctcactcgcacaagtggaccggktgggtgctagtcggcaccagaggcaagggtgcgaggaccacggccggctcggacgtgtgaccgcgcctagggggtggcagcgggcagtgcggggcggcaaggcgaccatggagcttttgcggactatcacctaccagccagccgccagcaccaaaatgtgcgagcaggcgctgggcaagggttgcggagcrgactcgaagaagaagcggccgccgcagccccccgaggaatcgcagccacctcagtcccaggcgcaagtgcccccggcggcccctcaccaccatcaccaccattcgcactcggggccggagatctcgcggattatcgtcgaccccacgactgggaagcgctactgccggggcaaagtgctgggaaagggtggctttgcaaaatgttacgagatgacagatttgacaaataacaaagtctacgccgcaaaaattattcctcacagcagagtagctaaacctcatcaaagggaaaagattgacaaagaaatagagcttcacagaattcttcatcataagcatgtagtgcagttttaccactacttcgaggacaaagaaaacatttacattctcttggaatactgcagtagaaggtcaatggctcatattttgaaagcaagaaaggtgttgacagagccagaagttcgatactacctcaggcagattgtgtctggactgaaataccttcatgaacaagaaatcttgcacagagatctcaaactagggaacttttttattaatgaagccatggaactaaaagttggggacttcggtctggcagccaggctagaacccttggaacacagaaggagaacgatatgtggtaccccaaattatctctctcctgaagtcctcaacaaacaaggacatggctgtgaatcagacatttgggccctgggctgtgtaatgtatacaatgttactagggaggcccccatttgaaactacaaatctcaaagaaacttataggtgcataagggaagcaaggtatacaatgccgtcctcattgctggctcctgccaagcacttaattgctagtatgttgtccaaaaacccagaggatcgtcccagtttggatgacatcattcgacatgacttttttttgcagggcttcactccggacagactgtcttctagctgttgtcatacagttccagatttccacttatcaagcccagctaagaatttctttaagaaagcagctgctgctctttttggtggcaaaaaagacaaagcaagatatattgacacacataatagagtgtctaaagaagatgaagacatctacaagcttaggcatgatttgaaaaagacttcaataactcagcaacccagcaaacacaggacagatgaggagctccagccacctaccaccacagttgccaggtctggaacacccgcagtagaaaacaagcagcagattggggatgctattcggatgatagtcagagggactcttggcagctgtagcagcagcagtgaatgccttgaagacagtaccatgggaagtgttgcagacacagtggcaagggttcttcggggatgtctggaaaacatgccggaagctgattgcattcccaaagagcagctgagcacatcatttcagtgggtcaccaaatgggttgattactctaacaaatatggctttgggtaccagctctcagaccacaccgtcggtgtccttttcaacaatggtgctcacatgagcctccttccagacaaaaaaacagttcactattacgcagagcttggccaatgctcagttttcccagcaacagatgctcctgagcaatttattagtcaagtgacggtgctgaaatacttttctcattacatggaggagaacctcatggatggtggagatctgcctagtgttactgatattcgaagacctcggctctacctccttcagtggctaaaatctgataaggccctaatgatgctctttaatgatggcacctttcaggtgaatttctaccatgatcatacaaaaatcatcatctgtagccaaaatgaagaataccttctcacctacatcaatgaggataggatatctacaactttcaggctgacaactctgctgatgtctggctgttcatcagaattaaaaaatcgaatggaatatgccctgaacatgctcttacaaagatgtaactgaaagacttttcgaatggaccctatgggactcctcttttccactgtgagatctacagggaasccaaaagaatgatctagagtatgttgaagaagatggacatgtggtggtacgaaaacaattcccctgtggcctgctggactgggtggaaccagaacaggctaaggcatacagttcttgactttggacaatccaagagtgaaccagaatgcagttttccttgagatacctgttttaaaaggtttttcagacaattttgcagaaaggtgcattgattcttaaattctctctgttgagagcatttcagccagaggactttggaactgtgaatatacttcctgaaggggagggagaagggaggaagctcccatgttgtttaaaggctgtaattggagcagcttttggctgcgtaactgtgaactatggccatatataattttttttcattaatttttgaagatacttgtggctggaaaagtgcattccttgttaataaactttttatttattacagcccaaagagcagtatttattatcaaaatgtctttttttttatgttgaccattttaaaccgttggcaataaagagtatgaaaacgcaraaaaaaaaaaaaaaaaaaaaaaaaaaaaaaaaaaaaa

SEQ ID NO: 950 - DNA, 2888 bp, Homo sapiens
  misc_feature (266)..(266): n equals a,t,g, or c
cttggtgaaaagccacgtccatgcttctacggcatttctcttcaaaggtcacaacccgcggaaggcgccgtgcgccggttgctatacaggccgcacttcacaccccgtgcctccccgcctttcctggctcctccgcccagatccccggcgctcccgcgttcggtgacggccgggtaggctgtaggcagcgcaatgccaagacagagctgctggcggcggcgggcgaatctccctgcaccatgagcctcggctccggccccgtwcgntaagcacagcgcacgccgccctccatttgccccggggcctcggctgcgaagatagcggcggccggacaggaagctcgaggaaagcgctgggccgggtctctacgaacacgtgaaggaaaagcagctccgtccacaacgccgcttcggggctcctagggagtcgggccccgggccgccaccgtcacctcggccgctgccgctgtcgccatcgccttgtttccccatcccccgccatggccgaggacctctctgcggccacgtcctacaccgaagatgatttctactgccccgtctgtcaggaggtgctcaaaacgcccgtgcggaccacggcctgtcagcacgttttctgtagaaaatgtttcctgactgcaatgagggaaagcggagcacattgtcccctatgtcgtggaaatgtgactagaagagagagagcatgtcctgaacgggccttagaccttgaaaatataatgaggaagttttctggtagctgcagatgctgtgcaaaacagattaaattctatcgcatgagacatcattacaaatcttgtaagaagtatcaggatgaatatggtgtttcttctatcattccaaactttcagatctctcaagattcagtagggaacagcaataggagtgaaacatccacatctgataacacagaaacttaccaagagaatacaagttcttctggtcatcctacttttaagtgtcccctgtgtcaagaatcaaattttaccagacagcgtttactggatcactgtaacagtaatcacctatttcagatagttcctgtgacatgtcctatttgtgtgtctcttccttggggagatcctagccagattaccagaaatttcgttagtcatctaaatcagagacatcaatttgattatggagaatttgtgaatcttcagctagatgaagaaacccaataccaaactgctgttgaagaatcttttcaagtaaacatctgaaggctgtagacatctctgcatctttgtacctgcaagtgccatctttaagggggaaactacatgaagtcaccgttacagtaacttgatgtgtatattaataaaagtaattcagtcattttagtttttgattgaaaataaaggtagggcttctaaaaacttcatcatcttgataagttaaaaaatgaaagttatgacattagctttaaaggtgtaaaaaagatgtttcactaatgtaacggtgaaagagaatccctgttgtactttatctttttgtaatattatttttgaatttttcattatgttgcttttgaaatttgatgcattcctcccatttactttattattgtacacatttaacacacagtagcaaattttgaacgatgtgattgatataacctaacaaatctgagccagttattattagagttgcagaatagaaacttgaagtgctaaatggaataatccaaaggaaattttttaaatgcaggttctagctgaaaaattcaactataagaaaattgtatttatataacatttactatttttgaagactagtgagatttctgtaataattttaattctttaaaaagtgaaagcttgttgtaaagatattttctttttgttattagaaggaaatacaaagagaaaaatttctttctttcatgggcatttgataatttcagtctttgactgatttgtaagcctagaatatactaagctgaataacagctctttggcctcagaattttcagtagccagtatttctgattaactaagttgaaactcttattagaaactttcagttggtgatattgtattctagaagatataaatgagaggtttggcttcatctcagtttagaaatttattcaaagctaaagatgtatatatacatatacttttgtgtgtatatatacacatatgtgtgtatgcagtttgtcaggttatatatagaatttctattaaggattttttaaatggacaagcaatagggggttgaagtgtttatctgatttgtttaaaattttgtatatcaccaaatttttaaaaagtgatagtcacagtgctaagttatctagttggctactattacaccttaaaaattgagtttacacacacacaattacctgtttatatggtgctcatttgttattctcaaatataatgtgtgaccgtgatatagtgagaaagattctaccaaccactgtttcactactttttagttaaaattgggtatgttcttaatattcattagtgagaatcacaaagtattttgtagaaggcccaaatcacagaataaaggactaagagtggatttgctgacattccatactaatatacattgtttatgctttctttaaaataactagaagaacataaaagaaagagaatctcagaagtagtttgctgctaatatatacatatattgtataaaaaggtatattttggttttgttaaaacccttgttgacttttctacactgaacattttttttaacttgatttaataaaaatgttaattttggaagtgcagttttgtaaaaacctttttcagtcaaacagtaaagactttatttatggattgtaataacaaccacaagaaaagccatacatcttaatgaacatacgcctttgwtctgtcaaaaaaaaaa

SEQ ID NO: 951 - DNA, 2123 bp, Homo sapiens
  misc_feature (1628)..(1628): n equals a,t,g, or c
  misc_feature (2116)..(2116): n equals a,t,g, or c
  misc_feature (2118)..(2118): n equals a,t,g, or c
  misc_feature (2121)..(2123): n equals a,t,g, or c
ccgctctaatacgactactatagggaaagctggtacgcctgcaggtaccggtccggaattcccgggtcgacccacgcgtccgctgatagctcgatgtgacggagtctcggattgcaaagacggggaggacgagtaccgctgtgtccgggtgggtggtcagaatgccgtgctccaggtgttcacagctgcttcgtggaagaccatgtgctccgatgactggaagggtcactacgcaaatgttgcctgtgcccaactgggtttcccaagctatgtgagttcagataacctcagagtgagctcgctggaggggcagttccgggaggagtttgtgtccatcgatcacctcttgccagatgacaaggtgactgcattacaccactcagtatatgtgagggagggatgtgcctctggccacgtggttaccttgcagtgcacagcctgtggtcatagaaggggctacagctcacgcatcgtgggtggaaacatgtccttgctctcgcagtggccctggcaggccagccttcagttccagggctaccacctgtgcgggggctctgtcatcacgcccctgtggatcatcactgctgcacactgtgtttatgacttgtacctccccaagtcatggaccatccaggtgggtctagtttccctgttggacaatccagccccatcccacttggtggagaagattgtctaccacagcaagtacaagccaaagaggctgggcaatgacatcgcccttatgaagctggccgggccactcacgttcaatgaaatgatccagcctgtgtgcctgcccaactctgaagagaacttccccgatggaaaagtgtgctggacgtcaggatggggggccacagaggatggagcaggtgacgcctcccctgtcctgaaccacgcggccgtccctttgatttccaacaagatctgcaaccacagggacgtgtacggtggcatcatctccccctccatgctctgcgcgggctacctgacgggtggcgtggacagctgccagggggacagcggggggcccctggtgtgtcaagagaggaggctgtggaagttagtgggagcgaccagctttggcatcggctgcgcagaggtgaacaagcctggggtgtacacccgtgtcacctccttcctggactggatccacgagcagatggagagagacctaaaaacctgaagaggaaggggacaagtagccacctgagttcctgaggtgatgaagacagcccgatcctcccctggactcccgtgtaggaacctgcacacgagcagacacccttggagctctgagttccggcaccagtagcaggcccgaaagaggcacccttccatctgattccagcacaaccttcaagctgctttttgttttttgtttttttgagatggagtctcgctctgttgcccaggctggagtgcagtggcgaaatccctgctcactgcagcctccgcttccctggttcaagcgattctcttgcctcagcttccccagtagctgggaccacaggtgcccgccaccacacccaactaatttttgtatttttagtagagacagggtttcaccatgttggccaggctgctctcaaacccctgacctcaaatgatgtgcctgcttcagcctnccacagtgctgggattacaggcatgggccaccacgcctagcctcacgctcctttctgatcttcactaagaacaaaagaagcagcaacttgcaagggcggcctttcccactggtccatctggttttctctccaggggtcttgcaaaattcctgacgagataagcagttatgtgacctcacgtgcaaagccaccaacagccactcagaaaagacgcaccagcccagaagtgcagaactgcagtcactgcacgttttcatctctagggaccagaaccaaacccaccctttctacttccaagacttattttcacatgtggggaggttaatctaggaatgactcgtttaaggcctattttcatgatttctttgtagcatttggtgcttgacgtattattgtcctttgattccaaataatatgtttccttccctcataaaaaaaaaaaaaaaaaaaaaaaaaaaaaaaaaaaaaaaaaaaaaaaaaaaaaaaananaannn

SEQ ID NO: 952 - DNA, 4031 bp, Homo sapiens
gattcaatctccagtttcctgttcttgctggggctggggtctctcctttaacaaagacacgccgcgcggccgagtccaggggctgcagaggcctggcgcgcgcacgcgcacgcgcacgcccaccgcgcggcttcccgcgtccccggtgctgaggagagagcgatccgagggactgcgccgcccggacggcctgcagagcgctgccatcatgagtgaaattcgtaaggacaccttgaaggccattctgttggagttagaatgtcattttacatggaatttacttaaggaagacattgatctgtttgaggtagaagatacaattgggcaacagcttgaatttcttaccacaaaatctagacttgctctttataacctattggcctatgtgaaacacctaaaaggccaaaataaagacgcccttgagtgcttggaacaagcagaagaaataatccagcaagaacactcagacaaagaagaagtacgaagcctggtcacttggggaaactatgcctgggtgtattatcacatggaccagcttgaagaagctcagaagtatacaggtaagatagggaatgtctgtaagaaattgtccagtccttctaactacaagttggagtgtcctgagactgactgtgagaaaggctgggcactcttgaaatttggaggaaagtattatcaaaaggctaaagcggcttttgagaaggctctggaagtggagcctgacaatccagaatttaacatcggctatgctatcacagtgtatcggctggatgattctgatagagaagggtctgtaaagagcttttctctggggcctttgagaaaggctgttaccctgaacccagataacagctatattaaggtttttctggcactgaagcttcaagatgtacatgcagaagctgaaggggaaaagtatattgaagaaatcctggaccaaatatcatcccagccttacgtccttcgttatgcagccaagttctataggagaaaaaattcctggaacaaagctctcgaacttttaaaaaaggccttggaggtgacaccaacttcttctttcctgcatcaccagatgggactttgctacagggcacaaatgatccaaatcaagaaggccacacacaacagacctaaaggaaaggataaactaaaggttgatgagctgatttcatctgctatatttcatttcaaagcagccatggaacgagactctatgtttgcatttgcctacacagacctggccaacatgtaygctgaaggaggccagtatagcaatgctgaggacattttccggaaagctcttcgtctggagaacataaccgatgatcacaaacatcagatccattaccactatggccgctttcaggaatttcaccgtaaatcagaaaatactgccatccatcattatttagaagccttaaaggtcaaagacagatcaccccttcgcaccaaactgacaagtgctctgaagaaattgtctaccaagagactttgtcacaatgctttagatgtgcagagtttaagtgccctagggtttgtttacaagctggaaggagaaaagaggcaagctgctgagtactatgagaaggcacaaaagatagatccagaaaatgcagaattcctgactgctctctgtgagctccgactttccatttaaatacatactctaggaaattagctctaagtttttcccttcattttgggttctcctgtttgttttttttttattattttaatcccttgtttattatagagctaatatttattgaatagttattgtgtaccaagcattgtgctaaatactttatatgcattatgatgaatcttgtgcggttttctttctttttttctttttaattaaaatactataatccattgagaaatagcaatattctagctattgtaacttctaaaaatggtatggccattagatctgtgctttttatctctgctctttgaatttctcatattatatagtaaatatattcctacgtaaacctttgatacctagatcaggaatactcttccaggagtacaaaattacattattgatagttaagctcttaattgtgtagcttgcaaaagacagcactttttagttacagatgttttgactttgatgaggatatttagctatcaatctaatagtcacctaaaatatcttttttgttggaaaaaagtttataataaaaaagtttgtcatctctagtgacttcaataaagaaaaaactagaagaggagaaaaaggatttcctcaaattttaaatatgtaacttcagggattcaatccccaaatgtttattaagtagctagaaataattatgtggaaaaaaatgaataatggaaaatagtgagtctcaaattgttctcttttttttttttaactaaaacaaatctgcaatgaatctagatgcaattaattttattccttccaactaaaattacaatatttttaggttaaaattattgagatataaagcagccattgggaaattgggagaaatgataaacaaatggaaaaagaagatgtccctaacctacacccatagattaccaaggtttcagtgtactagttttgaatctgttctgaatggagtttttataccctcaatttctggcctttggctattttagcatttcaaagtgacttctatgaagctttttttttaatgtgaaattttcagaatgttgtttttttcatgtagatactccaggaagagttaagcactgctttcagttttaatatccaccttgaggggtcgctgcttgagggctcttatcccaggggactttttaattcggatgttacttaatgtggcttctctaatgtagtttctttgattaccgactacacaattatgtaccatcacagtattagtggaaaagtaccatgtgatttaattctccattcctccaatgtaactcttaaaattattatgtatgtgtgtgtgttttactttttgktttttatcatctttaaaatttctattatggtttgattattataaaaataatgaattctcactgtaaatttcaaaaaaaaattacaaaagtatgtgaatttaaaaatgagagcagtccyctcaccctaccacagttccacaccctcaaggtaaacttataacttataatttgatatgtaaacttccagatcttttttctatgcgtaatcagacatacatatatactgcagtgtatctcacgtattaatttttaaaaatcttttgttttacttaattctgtttttattattattattattttgtttgatctattaaggaagaacaaggaagggaatgatctttactcaagaatttcagaaagtcagcactgaagtcctgacctatcagtagacacatttgtccctttcagatattttaggatattctagcaaagcaggccatttctcccacctgaaagtacataacttctatcacttgccacataattaaaagaactcacattaagcggttactcagacagttaatcatagaaaagattatttgcttcatcagttcatagaaaagattatttgcttcatcagttaacttgtttttataaatcagggctgtgttcatacacagaaggggcctgagatttctgcactttaaacaagctcctcctaggtgaggatgctgtggctgttctaattacattttgagtagtaaggtctacagcattgttcctcaaacttggctacgtattggaatcacctaaaaagttaaaacaaaacatggatgtctgggtcccgccccatagagaatgacttaattggcatggggtgcagtccaggcatcatgatttttagatttcccagttggaacttgtgcagcaaagtttgggagctactgatggacatgtgaaaagtaagtataaatggaataaaattaattaggctaataggcttaacccaggaaatcctaagttccttgaatatccagtttgcatttggactcctcatcatatacttggtatataatactctaataaaagctgcctgagttgaaaaaaaaaaaaaaaaaaaaaaaaag

SEQ ID NO: 953 - DNA, 1880 bp, Homo sapiens
  misc_feature (1826)..(1826): n equals a,t,g, or c
agccacgtattgttagtagaattttccagtgttgtgcttggaatggtggagtgttctggttcagtctcctcttgttttatcgagtatttattcctgtgcttcagtcggtaacagcccgaattatcggtgacccatcactacatggagatgtttggtcgtggctggaattcttcctcacgtcaattttcagtgctctttgggtgctccccttgtttgtgcttagcaaagtggtgaatgccatttggtttcaggatatagctgacctggcatttgaggtatcagggaggaagcctcacccattccctagtgtcagcaaaataattgctgacatgctcttcaaccttttgctgcaggctcttttcctcattcagggaatgtttgtgagtctctttcccatccatcttgtcggtcagctggttagtctcctgcatatgtcccttctctactcactgtactgctttgaatatcgttggttcaataaaggaattgaaatgcaccagcggttgtctaacatagaaaggaattggccttactactttgggtttggtttgcccttggcttttctcacagcaatgcagtcctcatatattatcagtggctgccttttctctatcctctttcctttattcattatcagcgccaatgaagcaaagacccctggcaaagcatatctcttccagttgcgcctcttctccttggtggtcttcttaagcaacagactcttccacaagacagtctacctgcagtcggccctgagcagctctacttctgcagagaagttcccttcaccgcatccgtcgcctgccaaactgaaggctactgcaggtcactgagttgcctgccatccaaaggggatgggcgggattggaagaagctgtggcagctcttttccctgttcacctcccgcctgccagggaaggcaggacccgctctgccaagggccctctgcgtattcccttctctctgaggaattgaaatttttgtctctggtgcacgtaaggcagaatgttccctgacaccagtgtgtggatttttaacatcaccgtgagtctgaaaggaccacaggtttttctgcagctattttctagcatttgccagtccctgtgcctggactgattggaacactttgtttttctccctgtgccatttacccttccacctttccatcctgccttctaccacccttggatgaatggattttgtaattctagctgttgtattttgtgaatttgttaattttgttgtttttctgtgaaacacatacattggatatgggaggtaaaggagtgtcccagttgctcctggtcactccctttatagccattactgtcttgtttcttgtaactcaggttaggttttggtctctcttgctccactgcaaaaaaaaaaaaaaaaaaaaaaaaaaaaagcctgaagagatgagataggaggaaagacctcacagccagatctgctgggttttgaggagtgattttctttcttccccttgaaggggaaaaagctattttcattggtacatttaaagtcccccaactatggggaggtaccaattctggacaagtgccactacaacaacactaaacctgaacttttcaactccgttggtggtgggaggcagcgggcagaaatttactgttggccactgccaggtctatttcatatttcaaaggaatattgggtgctgcatataggaactgaaggggtcaatgtattaaacctgtgattggttgttttcctgtcattttgagagactaaatgtggggggcagatgtcaaaatacctgtacaattttaaaatgtcacaattaaacatgagctggtttcccncaaaaaaaaaaaaaaaaaaaaaaaaaaaagtcgtatcgatgtcgagcgatcatg

SEQ ID NO: 954 - DNA, 1537 bp, Homo sapiens
  misc_feature (39)..(39): n equals a,t,g, or c
  misc_feature (78)..(78): n equals a,t,g, or c
  misc_feature (1500)..(1500): n equals a,t,g, or c
  misc_feature (1504)..(1504): n equals a,t,g, or c
  misc_feature (1534)..(1534): n equals a,t,g, or c
tgcttgcaaatgggcagtcttccggtytgagtgagccangggtccacscarcggctgtggtaggcatgagcacagggnagtacccgcagcttgtccccatcytcatattcatccaggcaaatggcacagacatcatactggtctcccttctgatagtcatgtgtaggaatctgtttcagttgctctttggtaagtcgattccgctggagccgtttccggtgctggatacaacgagctatcattactgctcccatggccaaaaccagcagtcccacaatccctgtgaaagggatgaggtaatagcccaaggggaaggtattgtctggaaccagaagcacccgagcccccttctcgtagacaaagagggcacgcaggtactcggagcttctctccccaataaatacagacgggatccagatctgctgctggatttcctcactattccacaccatgttcagaagttcattggaattcacattgtgtactacagcggcaccatatccagccttctgggcatttaggaccttgaggtcaaagttgcagtcgaatcttcgaagcagcgcaataaagactgacccattgaccggggctgggggtggtggggcaatggggctgcaggcattgtctgggtgagcctccacaaggaacccctggaggccctcctggctcaaggtagccccaaacagagctggaaggtctgcaaagtccatgctggcattgtggtccgaggtcgctcgaatgagcccccgggtcggggccgctccccacagcacagcggccacaaccacaggaagcgggaaggctgcagggtgcatggcagcgggaggaaagaggctgaggaggccgcgcgtcctggtagcaaggagcagaagcggagttctgcgccctccctgcccctcctttaggatcccaggggtccaaccacccccaggtcccacttcccagctacatgggggcgccggggaaggaacaccaactcaaagaatgagatatccaacccgtttagtggagctgggtgggaggcactaaatgtatccttttctggtacggggataaaacgcggaaaggggacggagcctaacacaggtgacagaaaaacttcgggaagggtggcggagctcaaggaggtgggacttcctgctaggtgggccgtgttcccagcctctggaaaagggcttccggtagagaaaatcaggccgctttcagcattggatgcttgagatgaaggacttccggtcctctcctccctctggcctccgccgctccttcaaatctcgcgagagtgctcaccacctctcccgtcccctcgcagctgaatagttgctgtgtctatcgcgagagcgctccaacttggcgagccgtactcactcgatctcgcgagaccttcaaacaaactcttctctattttcccgcgattctaattcggtgaaaacagcgcctttcctctggtttccaaatcagttacgccccttctcgcacgcttccatcaagctcctcctntcantccgccttactcccggccgctctgttgctncgc

SEQ ID NO: 955 - DNA, 1702 bp, Homo sapiens
gatgcagccatccggcgtttcgaggagctgatgtggtgcttcacctacaagggccagtggaagatgtcctacttctacgccgacctctcagcaaggagaactgctggtccaaggccacctacatttacatgaaggccgcctacctcagcatgtttgggaaggaggaccacaagccgttcggggacgacgagtggaattatttcgagctgtgccaggcctgaagctcaagattgctgggaaatctctacccacagagaagtttgccatccggaagtcccggcgctacttctcctccaaccctatctcgctgccagtgcctgctctggaaatgatgtacatctggaacggctacgccgtgattgggaagcagccgaaactcacggatgggatacttgagattatcactaaggctgaagagatgctggagaaaggcccagagaacgagtactcagtggatgacgagtgcttggtgaaattgttgaaaggcctgtgtctgaaatacctgggccgtgtccaggaggccgaggagaattttaggagcatctctgccaatgaaaagaagattaaatatgaccactacttgatcccaaacgccctgctggagctggccctgctgcttatggagcaagacagaaacgaagaggccatcaaacttttggaatctgccaagcaaaactacaagaattactccatggagtcaaggacacactttcgaatccaggcagccacactccaagccaagtcttccctagagaacagcagcagatccatggtctcatcagtgtccttgtagctttgtgcagcagttccgggctggaagacagagacagctggacagagctcctgaaaacatttcaaaataccccctccccctgccctgccctgcctttggggtccaccggcactccagttggatggcacaacatagtgtatccgtgcagaagccgagctggcattttcaccagtgtagccaagggcctttgccaagggcagagcaggtggagccctctgcctgccctatcacacatacgggtacttgcttttcactgtgatgtttaagagaatgtatgaacagtttacattttccttagaaatacattgatgggatcacagttggctttaaaaaccaacaacaatcaaccacctgtaagtctttgtcttcacctattatcatctggaggtaaatctctttatatgatgatgccaaagggcaaattgcttttcaaattcagcaagttctcagcttgtgtgacggaaggtccttcagaggacctgaggaatgcctgggagaggctaagcctcaggcttcaatgcttctggggttgggcatgaggatgtacacagacacccactaccttactactcacacttcatttcactccttttgtaaatttccaatttaaaaatcaagcacgtctttttagtgagataaaatctgagctcttctgtagaaaaatcaatctctaccagtagaaaatgccagggcttgatggaagagctgtgtagccctttctatgccaaagccaggaaatttggggggcaggaggaggttctcagaatccagtctgtatctttgctgtatgccaaactgaaaccactgggaataatttatgaaacataaaaatcttctgtacttcactccaaggtacatttgcttactgacagcatttttgttaaaactgttattcttgaaaaaaaaaaa

SEQ ID NO: 956 - DNA, 1477 bp, Homo sapiens
  misc_feature (37)..(37): n equals a,t,g, or c
  misc_feature (64)..(64): n equals a,t,g, or c
  misc_feature (1182)..(1182): n equals a,t,g, or c
cgggggcagattcagggcctgctgctgcccatggaangtggagagatggtcaggggtacccgancaggtctttggctgtggaggtggaatgaggggactcgaggcagggaagctgacaggcttgcaagaaaccagatgagtagggaactggtattgacccagagcctggggcaagcctggccctgtgagtggcagtaggggcctcrggtgagtgggaggttctgccgcccccctggtttccaccttacctgggcaggaagagtggccctgtgcagacatagacgttttggtagctgcgggtcaagctgcggctatatttctccaggttgttccaggcattctggttgaggtggggcacctggtaggagagatagggcttagcaggactgtggctgggacccttcctcctctatcagagggccgccccaggtcctgaggggatggacaggctcagagatatccagtgagacaagcggggggaaactgaggctcaaggaatgaaagtcactccctgaaacccagggctgatagagtgctagccaccaccctctgtccctcccacagcccaggtgtcaaagtcttttctcagctcccaagagtcgaatgaaggaagagcctgtctccacctttcagagaggactgaggcctgtccccagccccacccagggtctcctgggaagaccagcccttccaactaccaacccgttccttttcccagtctgagccacaggaagagcctagcggggaatgycatgaatcgacctccatcctgagctctccaggcctgggacaatggaaagtggatagggggctgtcttcccagaaggaagctgggtcagaggttggtgccccatgggctccacccagagccccatggcagtctccatccattggtgccaggacctgctgggaacaggctgararggtggttggcccartgcacagtgcctggcactaacaacctgatcgtgggccaggtgtctgcctcgaaactgcctgaaggcaggcagggtaggacaatgtctggaggctcacggttttatagactaggggtccccaacccctgggctacagaccggtaccagaaccgggccacacagcaggaggtgagcagcaggcgagcaagggaagcttcatctgtatttacagccacccccccattgatcccacagcagcctgagntccgcctcctgtcagatcagtggcggctggagattgtcataggagctggaaccctatggtgaactgcgcatgtgaggaggttgcgcgcttcttttgaaaacctaatgcctgatctgtcgttgttgcccatcacctccagataggactgtctagttgcaggaaaacaagctcagggctcccacggatcctacattactgtgagttgtatatttcactatatgttacaatgtaataataatagaaataaaatgtacataaatgtaaaaaaaaaaaaaaaaaaaaaaaaaataaaaaa

SEQ ID NO: 957 - DNA, 1790 bp, Homo sapiens
  misc_feature (1727)..(1727): n equals a,t,g, or c
  misc_feature (1736)..(1736): n equals a,t,g, or c
  misc_feature (1746)..(1746): n equals a,t,g, or c
  misc_feature (1761)..(1761): n equals a,t,g, or c
tttttttttttttttcaaacatccaaaggcaactttataataacttgcaagaaagctagagcacaaggaatttgkgacagttcatgtctccaraataacccaggactctccactctgggatttggtcccttgaaaagagagtcaraactaatcattccaggacttcttgggctgcaratgaacgtgaccttgaagatttcctgcttgactttgaggaagacctgaaagcccttcattcagkgcagggttcaccttccccaggtgagaaaggcatcaaaaattcctcaacggcagtatccaccactgattccagccagtgctgcaaaaaatccagggtgacagtggcttgagatagtggagcatgcacatgggcactgtgtgttattaggctgtttttgaccattatctctggcatacttgtaatgctttggtgacttcaacagttttcagatcccctctgtacatttcccccattaaactgttaattggggtcatcgcagcagtgaacatgctcacgggagtctccagtgccgtgctggctggtgtggatgcgttcacttttggcagctttgacgacatggtgcctggtgggagaatggggttggttgccatgtcattggttttttgtccatttttgcttcagaatcatctgttttcctgcttactctggcagccctggagcgtgggttctctgtgaaatattctgcaaaatttgaaacgaaagctccattttctagcctgaaagtaatcattttgctctgtgccctgctggccttgaccatggccgcagttcccctgctgggtggcagcaagtatggcgcctcccctctctgcctgcctttgccttttggggagcccagcaccatgggctacatggtcgctctcatcttgctcaattccctttgcttcctcatgatgaccattgcctacaccaagctctactgcaatttggacaagggagacctggagaatatttgggactgctctatggtaaaacacattgccctgttgctcttcaccaactgcatcctaaactgccctgtggctttcttgtccttctcctctttaataaaccttacatttatcagtcctgaagtaattaagtttatccttctggtggtagtcccacttcctgcatgtctcaatccccttctmtacatcttgwtcaatcctcactttaaggaggatctggtgagcctgakaaagcaaacctacgtmtggacaagatcaaaacacccaagcttgatgtcaattaactctgatgatgtcgaaaaacagtcctgtgactcaactcaagccttggtaacctttaccagctccagcatcacttatgacctgcctcccagttccgtgccatcaccagcttatccagtgactgaragctgccatctttcctctgtggcatttgtcccatgtctctaattaatatgtgaaggaaaatgttttcaaaggttgagaacctgaaaatgtgagattgagtatatcagagcagtaattaataagaagagctgaggtgaaactcggtttaaaaaccaaaaaagaatctctcagttagtaagaaaaggctgaaaacctcttgatacttgagagtgaatataagtctaaatgctgctttgtataatttgttcagctaagggatagatcgatcacactatttaagtgagcccagatcaaaaaagcagattgaaattttccttaggaaaggattctcccaggattggaattgncattccccnttaaactccnccaatggtaatccantttggggaggaagggagaacccaccttgc

SEQ ID NO: 958 - DNA, 1661 bp, Homo sapiens
ggacaccttgggttccgggctgctgggcgggaggcgcacgcgcagaactgttcgccacccgaccgcccgccccttcctctggcgtccaaggtgatatcgcgcgaggttcgcagccaataaggaggcggatgtgacggcccgtttgcagccgccggcagctactgcaaggcaaaagccggagtggacgtgtcttttgaaactgctgctctttcacttctcaggcgtcaccgagagctcagcacccaggctgaactctgtaccatttggaagaatggaagctgatgcatctgttgacatgttttccaaagtcctggagcatcagctgcttcagactaccaaactggtggaagaacatttggattctgaaattcaaaaactggatcagatggatgaggatgaattggaacgccttaaagaaaagagactccaggcactaaggaaagctcaacagcagaaacaagaatggctttctaaaggacatggggaatacagagaaatccctagtgaaagagacttttttcaagaagtcaaggagagtgaaaatgtggtttgccatttctacagagactccacattcaggtgtaaaatactagacagacatctggcaatattgtccaagaaacacctcgagaccaaatttttgaagctgaatgtggaaaaagcacctttcctttgtgagagactgcatatcaaagtcattcccacactagcactgctaaaagatgggaaaacacaagattatgttgttgggtttactgacctaggaaatacagatgacttcaccacagaaactttagaatggaggctcggttcttctgacattcttaattacagtggaaatttaatggagccaccatttcagaaccaaaagaaatttggaacaaacttcacaaagctggaaaagaaaactatccgaggaaagaaatatgattcagactctgatgatgattagagctcaataattctttgtaaattgtctttttttttctgcttcagatttaaatgtgtttttaaaattctattaatgtctatacattggtcacctaaatactcatattctcgagttttatacagttgtatcacatcgaaaagtgtctttactgttttctgtgtggccatcatgtttaagttgaggaaaactcagttcttaaattatctgggaagggtctggattctctatttttgagattgactttatcacaatatgattcttacatctttataccatttacaattgtgttttagatctacagagttagaaattcgaaaactattccaggactaattcttaatcggcattatttatacaagaggtcaagtaacatttactagcgcaatactgcacttgtaaatgaattataaacgctcttctggaatatatttaaataaccattaaagaactgcttattcattctggacactgcatgttgatgttgaatcaactgatgccagcagaaagctattttgatttgtgaacatactgccttatttaaagggtcctgattgcttgtattttaagacattcattaaaaagaaaccaggaaacacttttgaaataacagcataaggaacttcactgtctctgctcaataaaatacctgtaactggaagtttatgtggaaattgtcataaaagcatacatccaacaaaaaaaaaaaaaa

SEQ ID NO: 959 - DNA, 3006 bp, Homo sapiens
agcccgggtccacagccgcactcactccgccgcgctctccgccaccgccaccactgcggccaccgccaatgaaacgcctcccgctcctagtggttttttccactttgttgaattgttcctatactcaaaattgcaccaagacaccttgtctcccaaatgcaaaatgtgaaatacgcaatggaattgaagcctgctattgcaacatgggattttcaggaaatggtgtcacaatttgtgaagatgataatgaatgtggaaatttaactcagtcctgtggcgaaaatgctaattgcactaacacagaaggaagttattattgtatgtgtgtacctggcttcagatccagcagtaaccaagacaggtttatcactaatgatggaaccgtctgtatagaaaatgtgaatgcaaactgccatttagataatgtctgtatagctgcaaatattaataaaactttaacaaaaatcagatccataaaagaacctgtggctttgctacaagaagtctatagaaattctgtgacagatctttcaccaacagatataattacatatatagaaatattagctgaatcatcttcattactaggttacaagaacaacactatctcagccaaggacaccctttctaactcaactcttactgaatttgtaaaaaccgtgaataattttgttcaaagggatacatttgtagtttgggacaagttatctgtgaatcataggagaacacatcttacaaaactcatgcacactgttgaacaagctactttaaggatatcccagagcttccaaaagaccacagagtttgatacaaattcaacggatatagctctcaaagttttcttttttgattcatataacatgaaacatattcatcctcatatgaatatggatggagactacataaatatatttccaaagagaaaagctgcatatgattcaaatggcaatgttgcagttgcatttttatattataagagtattggtcctttgctttcatcatctgacaacttcttattgaaacctcaaaattatgataattctgaagaggaggaaagagtcatatcttcagtaatttcagtctcaatgagctcaaacccacccacattatatgaacttgaaaaaataacatttacattaagtcatcgaaaggtcacagataggtataggagtctatgtgcattttggaattactcacctgataccatgaatggcagctggtcttcagagggctgtgagctgacatactcaaatgagacccacacctcatgccgctgtaatcacctgacacattttgcaattttgatgtcctctggtccttccattggtattaaagattataatattcttacaaggatcactcaactaggaataattatttcactgatttgtcttgccatatgcatttttaccttctggttcttcagtgaaattcaaagcaccaggacaacaattcacaaaaatctttgctgtagcctatttcttgctgaacttgtttttcttgttgggatcaatacaaatactaataagctcttctgttcaatcattgccggactgctacactacttctttttagctgcttttgcatggatgtgcattgaaggcatacatctctatctcattgttgtgggtgtcatctacaacaagggatttttgcacaagaatttttatatctttggctatctaagcccagccgtggtagttggattttcggcagcactaggatacagatattatggcacaaccaaagtatgttggcttagcaccgaaaacaactttatttggagttttataggaccagcatgcctaatcattcttgttaatctcttggcttttggagtcatcatatacaaagtttttcgtcacactgcagggttgaaaccagaagttagttgctttgagaacataaggtcttgtgcaagaggagccctcgctcttctgttccttctcggcaccacctggatctttggggttctccatgttgtgcacgcatcagtggttacagcttacctcttcacagtcagcaatgctttccaggggatgttcatttttttattcctgtgtgttttatctagaaagattcaagaagaatattacagattgttcaaaaatgtcccctgttgttttggatgtttaaggtaaacatagagaatggtggataattacaactgcacaaaaataaaaattccaagctgtggatgaccaatgtataaaaatgactcatcaaattatccaattattaactactagacaaaaagtattttaaatcagtttttctgtttatgctataggaactgtagataataaggtaaaattatgtatcatatagatatactatgtttttctatgtgaaatagttctgtcaaaaatagtattgcagatatttggaaagtaattggtttctcaggagtgatatcactgcacccaaggaaagattttctttctaacacgagaagtatatgaatgtcctgaaggaaaccactggcttgatatttctgtgactcgtgttgcctttgaaactagtcccctaccacctcggtaatgagctccattacagaaagtggaacataagagaatgaaggggcagaatatcaaacagtgaaaagggaatgataagatgtattttgaatgaactgttttttctgtagactagctgagaaattgttgacataaaataaagaattgaagaaacacattttaccattttgtgaattgttctgaacttaaatgtccactaaaacaacttagacttctgtttgctaaatctgtttctttttctaatattctaaaaaaaaaaaaaaggtttacctccacaaattgaaaaaaaaaaagtgaaaaaaatctgtttctaaggttagactgagatatatactatttccttacttatttcacagattgtgactttggatagttaatcagtaaaatataaatgtgtcaagatataatattgtttatacctatcaatgtaaaaacagtgtaataaagctgaagtattctattaccaaaa

SEQ ID NO: 960 - DNA, 779 bp, Homo sapiens
ttacgcatacaaaaaaactttatttacagttgaaaacttaaagacaatcttggattctgaatctctgacacttccatggtctckwgawcaaatggggcagcagcaggcagggaagcaaagacgggggccagtccagattatcttactcaagaacaccaccaagaagaagggaaggcctgattcagtctttgtctggactacatctccccacactgcgagatcaccacaggtagcttgggcttattgttggggcctgtgggaacattctcaatctttctcatcactagaagtccatcgatgatttttccaaacaccacatgcttcccatccagccaatcgcacttagagcaggtgataaagaactgacagccatttgtacttggaccactgttcgccatggaaagcaggcctggagctgagtgtctaagtttaaaattttcatctgcaaatggcccccggtaaatactggcgactccagtaccatctccattaacaaaatctccaccctgaatcatgaaatcctttatgaccctgtggaaggtgcttcctttgtatcctattggaaccccatctttcctgaattctccggtgcagaactgcctaaagttctcggccgtcttaggcacaacgtctgcaaagagctcgatcttcatgcggccaacttcctgaccgccaatactgacatcaaagaacaccacggggttaacaggacttgaatttgccaccgccatggctccgacccggaagcagaagtcgggagcgtgggattccggcgaacc

SEQ ID NO: 961 - DNA, 1862 bp, Homo sapiens
ggcacgagtgctctatgaggtgcagatcccggaggacagccccgttggatcccaggttgccatcgtctctgccagggatttagacattggaactaatggagaaatatcttatgcattttcccaagcatctgaagacattcgcaaaacgtttcgattaagtgcaaaatcgggagaactgcttttaagacagaaactggatttcgaatccatccagacatacacagtaaatattcaggcgacagatggtgggggcctatctggaacttgtgtggtatttgtccaagtgatggatttgaatgacaatcctccggaactaactatgtcgacacttatcaatcagatcccagaaaacttgcaggacaccctcattgctgtattcagcgtttcagatcctgactccggagacaacggaaggatggtgtgctccatccaagatgatcttccttttttcttgaaaccttctgttgagaacttttacactctggtgataagcacggccctggaccgggagaccagatccgaatacaacatcaccatcaccgtcaccgacttcgggacacccaggctgaaaaccgagcacaacataaccgtgctggtctccgacgtcaatgacaacgcccccgccttcacccaaacctcctacaccctgttcgtccgcgagaacaacagccccgccctgcacatcggcagygtcagcgccacagacagagactcgggcaccaacgcccaggtcacctactcgctgctgccgccccaggacccgcacctgcccctcgcctccctggtctccatcaacgcggacaacggccacctgttygcyctcaggtcgctggactacgaggccctgcaggcgttcgagttccgcgtgggcgccacagaccgcggctccccggcgytgagcagcgaggcgctggtgcgcgtgctggtgctggacgccaacgacaactcgcccttcgtgctgtacccgctgcagaacggctccgcgccctgcaccgagctggtgccccgggcggccgagccgggctacctggtgaccaaggtggtggcggtggacggcgactcgggccagaacgcctggctgtcgtaccagctgctcaaggccacggagcccgggctgttcggcgtgtgggcgcacaatggcgaggtgcgyaccgccaggctgctgagsgagcgcgacgcwgccaagcagaggctggtggtgctggtcaaggacaatggcgagcctccgcgctcggccaccgccacgctgcacgtgctcctggtggacggcttctcccagccctacctgctgctcccggaggcggcmccggcccaggcccaggccgactygctcaccgtctacctggtggtggcgttggcctcggtgtcttcgctcttcctcytctcggtgctcctgttcgtggcggtgcggctgtgcaggaggagcagggcggcctcggtgggtcgctgctcggtgcccgagggcccctttccagggcagatggtggacgtgagcggcaccgggaccctgtcccagagctaccagtacgaggtgtgtctgactggagrmtccgggacaaatgagttcaagttcctgaagccaattatccccaacttcgttgctcagggtgcagagagggttagcgaggcaaatcccagtttcaggaagagctttgaattcacttaagtgttaataaggatctactgaggctagtctcgtttaatttgtggaaagtccttttttactgctttgcccattggaggtgtctccttttattagaaagtaaccatcttattccaattctatgcatgttactggtatttataaatgtatgagtttttttgcggtataataaatgtaaattttctttgtattctaaaaa

SEQ ID NO: 962 - DNA, 1302 bp, Homo sapiens
  misc_feature (1299)..(1299): n equals a,t,g, or c
ggaaggatccctttgggaaattctcaggagggggacctgggccaagggcttggccagcatcctgctggcaactccaaggccctgggtgggcttctggaatgagcatgctactgaatcaccaaaggcacgccccacctctctgaagatcttcctatccttttctgggggaatggggtcgatgagagcaacctcctagggttgttgtgagaattaaatgagataaaagaggcctcaggcaggatctggcatagaggaggtgatcagcaaatgtttgttgaaaaggtttgacaggtcagtcccttcccacccctcttgcttgtcttacttgtcttatttattctccaacagcactccaggcagcccttgtccacgggctctccttgcatcagccaagcttcttgaaaggcctgtctacacttgctgtcttccttcctcacctccaatttcctcttcaacccactgcttcctgactcgctctactccgtggaagcacgctcacaaaggcacgtgggccgtggccggctgggtcggctgaagaactgcggatggaagctgcggaagaggccctgatggggcccagccatcccggacccaagtcttcttcctggcgggcctctcgtctccttcctggtttgggcggaagccatcacctggatgcctacgtgggaagggacctcgaatgtgggaccccagcccctctccagctcgaaatcggcagactaggatggaagtgccctgtgagctggggggcccttcaaagggccaaggagaaaacgcaggccgagggaccagccttccaaatgggcttcaagctccaatgacctccgctcgccccctcgaaatgtctggaaaacataatgggcagattttctgtcttcaaagtttccggctaaacctcttcaagttctttattgtttgggactgagacactcagccatgttaatgggtagtttcttttgtatttgccttgaaaggccaaaatatttttatattgccacagacaaagccacctatttaaaaatgaactccatgtccgtcgtttcccaccaggagactatgtaccatgtgtgtgtctctatgtattctggggtcttgaaacaggtttctcatggggatggtcattcaccacggtccagaggggcagaacaggcggcgcttgccttgcccagggggcctggggaacgtgggccctcatctcagatctgcccccagtatgtttaggacgcgagccccagaaggatctgggagtaaacttaacattcactgtgaaaaaaaaaaaaaaaaaactcgagggggggnccg

SEQ ID NO: 963 - DNA, 2826 bp, Homo sapiens
ggcttcccaaaatgttgggtattacaggtgacacaactaaaaaaaaacaaaggtatttatggaattccactgagtggtaatggatgatgcagttcaaataactaaggacacatgttcaaagagcataattaactttttaaaagaagctaataagcatggattcctggttcattcttgttctgctcggcagtggtctgatatgtgtcagtgccaacaatgctaccacagttgcaccttctgtaggaattacaagattaattaactcatcaacggcagaaccagttaaagaagaggccaaaacttcaaatccaacttcttcactaacttctctttctgtggcaccaacattcagcccaaatataactctgggacccacctatttaaccactgtcaattcttcagactctgacaatgggaccacaagaacagcaagcaccaattctataggcattacaatttcaccaaatggaacgtggcttcyagataaccagttcacggatgccagaacagaaccctgggaggggaattccagcaccgcagcaaccactccagaaactttccctccttcaggtaattctgactcgaaggacagaagagatgagacaccaattattgcggtgatggtggccctgtcctctctgctagtgatcgtgtttattatcatagttttgtacatgttaaggtttaagaaatacaagcaagctgggagccattccaattctttccgcttatccaacggccgcactgaggatgtggagccccagagtgtgccacttctggccagatccccaagcaccaacaggaaatacccacccctgcccgtggacaagctggaagaggaaattaaccggagaatggcagacgacaataagctcttcagggaggaattcaacgctctccctgcatgtcctatccaggccacctgtgaggctgcttccaaggaggaaaacaaggaaaaaaatcgatatgtaaacatcttgccttatgaccactctagagtccacctgacaccggttgaaggggttccagattctgattacatcaatgcttcattcatcaacggctaccaagaaaagaacaaattcattgctgcacaaggaccaaaagaagaaacggtgaatgatttctggcggatgatctgggaacaaaacacagccaccatcgtcatggttaccaacctgaaggagagaaaggagtgcaagtgcgcccagtactggccagaccaaggctgctggacctatgggaatattcgggtgtctgtagaggatgtgactgtcctggtggactacacagtacggaagttctgcatccagcaggtgggcgacatgaccaacagaaagccacagcgcctcatcactcagttccactttaccagctggccagactttggggtgccttttaccccgatcggcatgctcaagttcctcaagaaggtgaaggcctgtaaccctcagtatgcaggggccatcgtggtccactgcagtgcaggtgtagggcgtacaggtacctttgtcgtcattgatgccatgctggacatgatgcatacagaacggaaggtggacgtgtatggctttgtgagccggatccgggcacagcgctgccagatggtgcaaaccgatatgcagtatgtcttcatataccaagcccttctggagcattatctctatggagatacagaactggaagtgacctctctagaaacccacctgcagaaaatttacaacaaaatcccagggaccagcaacaatggattagaggaggagtttaagaagttaacatcaatcaaaatccagaatgacaagatgcggactggaaaccttccagccaacatgaagaagaaccgtgttttacagatcattccatatgaattcaacagagtgatcattccagttaagcggggcgaagagaatacagactatgtgaacgcatcctttattgatggctaccggcagaaggactcctatatcgccagccagggccctcttctccacacaattgaggacttctggcgaatgatctgggagtggaaatcctgctctatcgtgatgctaacagaactggaggagagaggccaggagaagtgtgcccagtactggccatctgatggactggtgtcctatggagatattacagtggaactgaagaaggaggaggaatgtgagagctacaccgtccgagacctcctggtcaccaacaccagggagaataagagccggcagatccggcagttccacttccatggctggcctgaagtgggcatccccagtgacggaaagggcatgatcagcatcatcgccgccgtgcagaagcagcagcagcagtcagggaaccaccccatcaccgtgcactgcagcgccggggcaggaaggacggggaccttctgtgccctgagcaccgtcctggagcgtgtgaaagcagaggggattttggatgtcttccagactgtcaagagcctgcggctacagaggccacacatggtccagacactggaacagtatgagttctgctacaaggtggtgcaggagtatattgatgcattctcagattatgccaacttcaagtaagcggcaacaagggtccgtggaccaggaggattgcctttaatattttgtaatattctgttttgttaatataccccaaattgtgtatatatcttataactgttttagaaattggtacataggcttctattacctattaggtggaaattttatatgtaaatgtgttagcactgatagtcctttttccaatgttttattggggaattaaatagtgtgatgtttggattgawaaaaaaaaaaaaaaaaaaaaaaaaaaaaaaaaaaa

SEQ ID NO: 964 - DNA, 2086 bp, Homo sapiens
cgctgtgtcagggactgcgatcctgggtaccacgcgggccccgagggcacctgtgacgatgtgtacgaatgccggaaccggtccttctgcggtgctcacgccgtgtgccagaacctgcccggctccttccagtgcctctgtgaccagggttacgagggggcacgggatgggcgtcactgcgtggatgtgaacgagtgtgaaactacagggtgtatgtggagctgccctgtgtgaaaatgtcgaaggctccttcctctgtgtctgccccaacagcccggaagagtttgaccccatgactggacgctgtgttcccccacgaacttctgctggcaygttcccaggctcgcagccccaggcacctgctagccccgttctgcccgccaggccacctccgccacccctgccccgccgacccagcacacctaggcagggccctgtggggagtgggcgccgggagtgctactttgacacagcggccccggatgcatgtgacaacatcctggctcggaatgtgacatggcaggagtgctgctgtactgtgrrtgagggctggggcagcgctgccgcatccagcagtgcccgggcaccgagacagctgagtaccagtcattgtgccctcacaggccggttcctcatcggcgcactcgtcattrtcgatgcactccagccgctgtgtgtggtagtagtagccgttgctgcaatagcatgagtagcccggggccgtgttcacacacacgccactcttgcacacctggtctcggaagagctgacattcgtccacgtctctccggaggctcaggtctccactgggcgccaggtagccccggccgtgagggcagccgctgtgtcaacactgtgggctcttatcactgtacctgcgagcccccactggtgctggatggctcgcagcgccgctgcgtctccaacgagagccagagcctcgatgacaatctgggagtgtgctggcaggaagtgggggctgacctcgtgtgcagccaccctcggctggaccgtcaggccacctacacagagtgctgctgcctgtatggagaggcctggggcatggactgcgccctctgccctgcgcaggactcagatgacttcgaggccctgtgcaatgtgctacgcccccccgcatatagccccccgcgaccaggtggctttggactcccctacgagtacggcccagacttaggtccaccttaccagggcctcccatatgggcctgagttgtacccaccacctgcgctaccctacgacccctacccaccgccacctgggcccttcgcccgccgggaggctccttatggggcaccccgcttcgacatgccagactttgaggacgatggtggcccctatggcgaatctgaggctcctgcgccacctggcccgggcacccgctggccctatcggtcccgggacacccgccgctccttcccagagcccgaggagcctcctgaaggtggaagctatgctggttccctggctgagccctacgaggagctggaggcggaggagtgcgggatcctggacggctgcaccaacggccgctgcgtgcgcgtccccgaaggcttcacctgccgttgcttcgacggctaccgcctggacatgacccgcatggcctgcgttgacatcaacgagtgtgatgaggccgaggctgcctccccgctgtgcgtcaacgcgcgttgcctcaacacggatggctccttccgctgcatctgccgcccgggattcgcacccacgcaccagccgcaccactgtgcgcccgcacggccccgggcctgagccctggcacccgctggccgcccacccgcgcccgccactcggggcccctgccgcgcatcctgcagcccgcttatgcgtatgtgcacggggccgcccgcctggacctggagaagggacctacggacgcctggaagctgcgacgccctgcactgctcccgcctccaccagcgcctcccactgatgtcgtggtcccgggcctggcccaggggcccctttacatgccctctcccttttataaaattttccattaaaaaccacctattttctaaaaaaaaaaaaaaaaaaaaacaaaaaaaaaaaa

SEQ ID NO: 965 - DNA, 631 bp, Homo sapiens
  misc_feature (531)..(531): n equals a,t,g, or c
  misc_feature (574)..(574): n equals a,t,g, or c
  misc_feature (580)..(580): n equals a,t,g, or c
  misc_feature (588)..(589): n equals a,t,g, or c
  misc_feature (600)..(600): n equals a,t,g, or c
ggcagagcggcacgagcaaagatgagaacagcataatatttgctgctaagtctgctgaagaaaaaaacaactggatggcagcccttatttctcttcattatcgtagtactctagatcgaatgttagattcagtattattgaaagaagaaaatgagcaaccactgagattaccaagtcctgaagtatatcgttttgtagtaaaagactctgaggaaaacattgtttttgaagacaacttgcaaagtagaagtggcatccccattattaaaggaggaactgtagtgaaattaattgaaaggttaacatatcatatgtatgcaggtatgtgaaactcattacaactgctgacctagggcctgggacccaaaagctttttaaggatgctcaaaaatatttgaggcttggggaaaaaatggattgcctccaaaatataaaaaaaaaaaaaaaaaactcgagggggggcccggtacccaattcgccctatagtgagtccgtattacaattcactggccgtccgttttacaacgtcgngactgggaaaaaccctggcgttacccaacttaatcgccttgcngacatncccttttnncaggtggcccncccccccacaagggccggaccgatcgccctt

SEQ ID NO: 966 - DNA, 1394 bp, Homo sapiens
gctcgtcggtgtgactccaacccatgtttccgaggtgtccaatgtaccgacagtagagatggcttccagtgtgggccctgccccgagggctacacaggaaacgggatcacctgtattgatgttgatgagtgcaaataccatccctgctacccgggcgtgcactgcataaatttgtctcctggcttcagatgtgacgcctgcccagtgggcttcacagggcccatggtgcagggtgttgggatcagttttgccaagtcaaacaagcaggtctgcactgacattgatgagtgtcgaaatggascgtgcgttcccaactcgatctgcgttaatactttgggatcttaccgctgtgggccttgtaagccggggtatactggtgatcagataaggggatgcaaagcggaaagaaactgcagaaacccagagctgaacccttgcagtgtgaatgcccagtgcattgaagagaggcagggggatgtgacatgtgtgtgtggagtcggttgggctggagatggctatatctgtggaaaggatgtggacatcgacagttaccccgacgaagaactgccatgctctgccaggaactgtaaaaaggacaactgcaaatatgtgccaaattctggccaagaagatgcagacagagatggcattggcgacgcttgtgacgaggatgctgacggagatgggatcctgaatgagcaggataactgtgtcctgattcatratgtggaccaaaggaacagcgataaagatatctttggggatgcctgtgataactgcctgagtgtcttaaataacgaccagaaagacaccgatggggatggaagaggagatgcctgtgatgatgacatggatggagatggaataaaaaacattctggacaactgcccaaaatttcccaatcgtgaccaacgggacaaggatggtgatggtgtgggggatgcctgtgacagttgtcctgatgtcagcaaccctaaccagtctgatgtggataatgatctggttggggactcctgtgacaccaatcaggacagtgatggagatgggcaccaggacagcacagacaactgccccaccgtcattaacagtgcccagctggacaccgataaggatggaattggtgacgagtgtgatgatgatgatgacaatgatggtatcccagacctggtgccccctggaccagacaactgccggctggtccccaacccagcccaggaggatagcaacagcgacggagtgggagacatctrtgagtctgactttgaccaggaccaggtcatcgatcggatcgacgtctgccccagagaacgcagaggttcaccctggaccgactttcaggggctttaccagacctttggtccttggattcttgaaagggggaatgcccagattcg

SEQ ID NO: 967 - DNA, 543 bp, Homo sapiens
  misc_feature (404)..(404): n equals a,t,g, or c
  misc_feature (473)..(473): n equals a,t,g, or c
  misc_feature (495)..(495): n equals a,t,g, or c
  misc_feature (515)..(515): n equals a,t,g, or c
  misc_feature (532)..(532): n equals a,t,g, or c
gaaaccctacaaatgtaaagaatgtggaaaagcttttcaccgatactcaatccttagtacacataagaaaattcatactggggagaaaccccacaaatgtggagaatgcggaaaagcctttaactggtcctcaactcttattacacataagataattcacagtggagaaaaaccctacaaatatgaagratgtggcaaagcttttaaccagtcctcacaccttatgagacataagaaaattcatagtaagagaaaccttacaaatgtgaacagtgtggcaaggtctttaagaagtcctcaactcttactgcacataagatcattcatactggagagaaaccttacaaatgtgaggaatgtggcaaaggttttagccaactctcaaaccttactaaacacaagangattcatactagagagaaaccctacaaacgtgaagaatgtggcatatcttttaaccagttctcacaacntgctataccataagatggattnacactttgaaatggaacccntaccaaatggtgaaccnatggtgggcaa

SEQ ID NO: 968 - DNA, 1564 bp, Homo sapiens
ggcgtttggaggagactcggatataccttctcagaagctgcacaggaggaaagcagtgacaaagaaagaagttgtcattctttgcacgaaactggatggcttctacagggagccaggcctctgatatagacgagatttttggattcttcaacgatggcgaacctcccaccaaaaagcccaggaagctgcttccaagcttaaaaactaagaagcctcgagaacttgtgctagtgattggaacaggcattagtgctgcagttgcgccccaagttccagccctcaaatcctggaaggggttaattcaggccttactggatgctgccattgattttgatcttttagaagatgaggagagcaaaaagtttcagaaatgtctccatgaagacaagaacctggtccatgttgcccatgaccttatccagaaactctctcctcgtaccagtaatgttcgatccacatttttcaaggactgtttatatgaagtatttgatgacttggagtcaaagatggaagattctggaaaacagctacttcagtcagttctccacctgatggaaaatggagccctcgtattaactacaaattttgataatctcttggaactgtatgcagcagatcaggggaaacagcttgaatcccttgaccttactgatgagaaaaaggtcctcgagtgggctcaggagaagcgtaagctgagcgtgttgcatattcacggagtctacaccaaccctagtggcattgtccttcatccggctggatatcagaacgtgctcaggaacactgaagtcatgagagaaattcagaaactctacgaaaacaagtcatttcttttcctgggctgtggctggactgtggatgacaccactttccaggcccttttcttggaggctgtcaagcataaatctgacctagaacatttcatgctggttcggagaggagacgtagatgagttcaaaaagcttcgagaaaacatgctggacaaggggattaaagtcatctcctatggagatgactatgccgatcttccagaatatttcaagcgactgacatgtgagatctccacaaggggtacatcagcggatggtgagagaaggtcagctaaatggctcatctgcagcacacagtgaaataagaggctgtagtacatgagcgagctagagaaatcaccaccgtttagaccaagctgtaaggccctactacagacagtgtttaacaagtaaacttacaagaacccaacacaattcccagaaagtaacaatagccagaggttgaagggcggggtagaagaggggggaatgttgcagcgtaatccttcataccacctggttcttgatattctgccgcctgttcaagttcaagaataaaagcgacagcaggacccaaatgcagctyccaacccactccccaggctagacatgcttgtgtccacacagsacaccaatgtgatacttccactgaccggctgcagctytgatgaaggactcggggtctggatgccatggaatcactgtggctcttggtgcagtttgtactctatacttgggttttcaattaagcttaatgg

SEQ ID NO: 969 - DNA, 1245 bp, Homo sapiens
  misc_feature (1243)..(1243): n equals a,t,g, or c
ggtggcccgtggctagctcgtcaagttgccgtggcgcggagaactctgcaaaacaagaggctgaggattgcgttagagataaaccagttcacgccggagccccgtgagggaagcgtctccgttgggtccggccgctctgcgggactctgaggaaaagctcgcaccaggtggacgcggatctgtcaacatgggtaaaggagaccccaacaagccgcggggcaaaatgtcctcgtacgccttcttcgtgcagacctgccgggaagagcacaagaagaaacacccggactcttccgtcaatttcgcggaattctccaagaagtgttcggagagatggaagaccatgtctgcaaaggagaagtcgaagtttgaagatatggcaaaaagtgacaaagctcgctatgacagggagatgaaaaattacgttcctcccaaaggtgataagaaggggaagaaaaaggaccccaatgctcctaaaaggccaccatctgccttcttcctgttttgctctgaacatcgcccaaagatcaaaagtgaacaccctggcctatccattggggatactgcaaagaaattgggtgaaatgtggtctgagcagtcagccaaagataaacaaccatatgaacagaaagcagctaagctaaaggagaaatatgaaaaggatattgctgcatatcgtgccaagggcaaaagtgaagcaggaaagaagggccctggcaggccaacaggctcaaagaagaagaacgaaccagaagatgaggaggaggaggaggaagaagaagatgaagatgaggaggaagaggatgaagatgaagaataaatggctatcctttaatgatgcgtgtggaatgtgtgtgtgtgctcaggcaattattttgctaagaatgtgaattcaagtgcagctcaatactagcttcagtataaaaactgtacagatttttgtatagctgataagattctctgtagagaaaatacttttaaaaaatgcaggttgtagctttttgatgggctactcatacagttagattttacagcttctgatgttgaatgttcctaaatatttaatggtttttttaatttcttgtgtatggtagcacagcaaacttgtaggaattagtatcaatagtaaattttgggttttttaggatgttgcatttcgtttttttaaaaaaaattttgtaataaaattatgtatattaaaaaaaaaaaaaaaaaaaaaaaaaaaaaaaaaaaaaaaaaaaaaaangg

SEQ ID NO: 970 - DNA, 1113 bp, Homo sapiens
gctttcgttcaccaagtgtgtgcatgcttgatacgtgtgtgttgttttcattaagatgaatttgtgcgtgccgttttgattgtaaatatctttgggtactctgtcttccttcttatccctctacttcctgccagtgttaacaacctgaatgatagtatcttccggtgctttcgtttccccattgttgtatatgttttctttttaaaggaagccctcctatgacactgaaacagatcctagtgagggattgatgaatgttctaaagaaaatttatgaagatggagacgatgatatgaagcgaaccattaataaagcctgggtggaatcaagagagaagcaagccaaaggagacacggaattttgagactttaaagtcgttttgggaactgtgatgtgatgtggaaatactgatgtttccagtaagggaatattggtgagctgcatatataaatttgacagatagctatttacatagccttctaagtaaaggcaatgaattctccatttcctactggaggatttatttaaataaaatatgcttattaaacactcctgcaaagatggttttattagtaccctggtcattttgttcaaggaagggttatattgcattctcacgtgaaatataaaaagcaagtcttgcccaataaaaacgctacattgtgtgtattttttgttcagctaagaattggaaaagtatttgcttgccttttaagttactgacatcagcttccaccagtgtaaaaattgagtaaaacctgaagttttgcataaaatgcaaatcggtgcctgtgcttgaaggttgctgtagagcatctgaccccttattaccaccttaagcaatgtatatgccatgcattaccatgcactaattcaatcacaggtgtttctatctagatttaaatatatttgtcaatgaatgtggaatagaaaatctaaacatgacaataatagacatatctttgtatggtaccagttagttttgccgtggatcagatggtttataaaagtaataaccataaagcaaaaaataatttgaaagcccgtctattcctatgctcaataaagttaagtttttcttcattaaaaaaaaaaaaaaaaaaaaaaaaaaaa

SEQ ID NO: 971 - DNA, 2322 bp, Homo sapiens
  misc_feature (2264)..(2264): n equals a,t,g, or c
  misc_feature (2291)..(2291): n equals a,t,g, or c
  misc_feature (2303)..(2303): n equals a,t,g, or c
ggttttgctctagtgtttgggtttcttcgcggctgctcaagatgaaccgactcttcgggaaagcgaaacccaaggctccgccgcccagcctgactgactgcattggcacggtggacagtagagcagaatccataagwaggctcaggacctctgacacacccgaccccgcccacccccagccccgggcccatattcttccacttcatttcgggtcctgggccccttacacgtcgtccctctctatctcaccttctccccttcatccctgttacccaagtcattcctaacgccacaaaccagggaacccctaaccccatcactgccttgccctgccagcacccaacccgttttgatgcccattgcccgtccactcgctctcgccttgatcctctcacctcacccagccctaggcccatacacccttcccacctcatcctgcctgatcccttacccttcttccatctgtcatccccagtccacatcaggactcagcttgatatcctaggtcaacatatctgtgccttcgtcctggatctcagtaacacaaaactcagaaccctagcccctcagattaagccaccatccccgatttagggaatggcattagatctacaatcagctggtttcacttggcactggcccatttcatgtgcctcttggaggaactctcagcctggctagtctctgattytagggaawttccaactcaactcagtgattctcaaattattttctgccccaacccacttgaaggctacctggkatatcagaatcggggcagtgtggcggggggtaagagaataatttataaagcccagggtttctggttgggaatacccttctttgtgaaccactgkttttcacccttcccttaagctcctcttttcttcctctgtattccttcctctctacctgccccttctggaataagtgtattgsagtaactaccagtgcatttgatattttcccctaaggtggacagtagagcagaatccattgacaagaagatttctcgattggatgctgagctagtgaagtataaggatcagatcaagaagatgagagagggtcctgcaaagaatatggtcaagcagaaagccttgcgagttttaaagcaaaagaggatgtatgagcagcagcgggacaatcttgcccaacagtcattcaacatggaacaagccaattataccatccagtctttgaaggacaccaagaccacggttgatgctatgaaactgggagtaaaggaaatgaagaaggcatacaagcaagtgaagatcgaccagattgaggatttacaagaccagctagaggatatgatggaagatgcaaatgaaatccaagaagcactgagtcgcagttatggcaccccagaactggatgaagatgatttagaagcagagttggatgcactaggtgatgagcttctggctgatgaagacagttcttatttggatgaggcagcatctgcacctgcaattccagaaggtgttcccactgatacaaaaaacaaggatggagttctggtggatgaatttggattgccacagatccctgcttcatagatttgcatcattcaagcatatcttgtaaaacaaacacatattatgggactaggaaatatttatctttccaaatttgccataacagatttaggtttctttcctttctttgaaggaaagtttaattacattgctcttttattttttccattaagagactcattgcttgggaaatgctttcttcgtactaaaatttgattcctttttttcttatgaaaaacgaactcagtttaaaagtatttttagctcgtatgacttgttttcattcattaataataatttgaaataaaactaaggaaatggaatcttaaaagtctatgacagtgtaactctacagtctcaaaatgacctgataaattgataagacaaagatgagattattggggctgttcatattatgattcagaatcattttctattgtggtattataggttggttaaagtgatggcctttttgatgggttttgttgtgtcttgtgaacaagtcgttactgtgtccattattggaatggaattatcactactgtatcatgagtgggtattttgattctatggttccctcagtattacatcttgacttgtaatcaattatgaatatttcttgatatttaatgtataggacatttatttatactcaataaatatttttcaaaaggaaaaaaaaaaaaaaaaaaaaaaaaaaaaaaaaaggggcggcccgcnctagaggatcccccgaggggggcccangcttacgcgtgncatgcgacgtccaaagccc

SEQ ID NO: 972 - DNA, 683 bp, Homo sapiens
  misc_feature (35)..(35): n equals a,t,g, or c
  misc_feature (592)..(592): n equals a,t,g, or c
  misc_feature (613)..(613): n equals a,t,g, or c
  misc_feature (652)..(652): n equals a,t,g, or c
  misc_feature (666)..(666): n equals a,t,g, or c
  misc_feature (677)..(677): n equals a,t,g, or c
ggcagaggcttcctatagcagccaccgtggctagnttactgtaaatggcaagacggaatcagttccggacattgggttgttttagaaaattgcctgcaagtgtcagggtgataagttaaagctttgtcttttgccctcagaggagctatcccatagtgagtagaagccagagaagctgaccccaggagtccttctttccagcagcaggtcttgagctgcacttctctgtagctacaatccaggcaggaacaagccctaggtacctccggagaggagggcaagagaggaagaatgagttcagctactctagccaccaaactgattatgaattgccctgaaatctgaaaaatttcaattccaatcgtgttcagaatgccaggattccctcaccaactggtactatgagaaggatgggaagctctactgccccaaggactactgggggaagtttggggagttctgtcatgggtgctccctgctgatgacagggccttttatggtggctggggagttcaagtaccacccagagtgctttgcctgtatgagctgcaagktgatcattgaggatggggatgcatatgcactggtgcancatgccaccctctactgtggnaagtgccacaatgaggtggtgctggcacccatgttttgngagactctccacanatttgtttacngagcat

SEQ ID NO: 973 - DNA, 2442 bp, Homo sapiens
  misc_feature (7)..(7): n equals a,t,g, or c
ttacgcnaagctcgaaattaaccctcactaaagggaacaaaagctggagctccaccgcggtggcggccgctctagaactagtggatcccccgggctgcaggaattcggcacgagaagcgcccgccatgcgcgctgcccgcgccgcgccgctgctccagctgctgctcctgctggggccgtggctggaggctgcgggcgttgcggagtcgccgctgcccgccgtggtccttgccatcctggcccgcaatgccgaacactcgctgccccactacctgggcgctctggagcggctggactacccccgggccaggatggccctctggtgtgccacggaccacaatgtggacaacaccacagagatgctgcaggagtggctggcggctgtgggcgatgactatgctgctgtggtctggaggcctgagggcgagcccaggttctacccagatgaagagggtcccaagcactggaccaaagaaaggcaccagtttctgatggagctgaagcaggaagccctcacctttgccaggaactggggggccgactatatcctgtttgcagacacagacaacattctgaccaacaatcagactctgcggcttctcatggggcaggggcttccagtggtggccccaatgctggactcccagacctactactccaacttctggtgtgggatcaccccccagggctactaccgccgcacagccgagtacttccccaccaagaaccgccagcgccggggctgcttccgtgtccccatggtccactccaccttccttgcatccctgcgggctgaaggggcagaccagcttgctttctacccgccacatcccaactacacttggcctttcgacgacatcatcgtcttcgcctatgcctgccaggctgctggggtctccgtccacgtgtgcaatgagcaccgttatgggtacatgaatgtgccggtgaaatcccaccaggggctggaagacgagagggtcaacttcatccacctgatcttagaagcactagtggacggcccccgcatgcaggcctcagctcatgtgactcggccctctaagaggcccagcaagatagggtttgacgaggtctttgtcatcagcctggctcgcaggcctgaccgtcgggaacgcatgctcgcctcgctctgggagatggagatctctgggagggtggtggacgctgtggatggctggatgctcaacagcagtgccatcaggaacctcggcgtagacctgctcccgggctaccaggacccttactcgggccgcactctgaccaagggcgaggtgggctgcttcctcagccattactccatctgggaagaggtggttgccaggggcctggcccgggtcctggtgtttgaggatgacgtgcgctttgagagcaacttcagggggcggctggagcggctgatggaggatgtggaggcagagaaactgtcttgggacctgatctacctcggacggaarcaggtgaaccctgagaaggagacggccgtggaggggctgccgggcctggtggtggctgggtactcctactggacgctggcctatgccctgcgtctggcgggtgcccgcaagctgctggcctcacagcctctgcgccgcatgctgcccgtggacgagttcctgcccatcatgttcgaccagcaccccaacgagcagtacaaggcacacttctggccacgggacctggtggccttctccgcccagcccctgctcgctgcccctacccactatgccggggacgccgagtggctcagtgacacggagacatcctctccatgggatgatgacagcggccgcctcatcagctggagcggctcccaaaagaccctgcgcagcccccgcctggacctgactggcagcagcgggcacagcctccaaccccagccccgagatgagctctaggtccaggtgatgactgcaaagcagtgtccaggagcaggccactactgcccagagagcagaggaggaggttgttggcagggactgcagatcctgtcagacctggccaccaccttgggcatggccactctgccctctggacctgtctttcatcgggagaaaccactcagagatggatcccattccctaaaggtctcacagcaaaggagcaggactcccaggcccctgtaccctgcctggcctgattcagggccttgtggcccccagcttctgtttcaagctgggcagaccccaggatcccttccctccctaaggactcagctgaggggcccctctgcccccttctacctccacctcagcaccctcccccagcttgatgtttgggtctccccagcaccctcctccctggccggtgcaaagtacagggaggtaaagcaggacccttgcagacatgttgcccagcacacagtaggccctcaataaaagccatttgcactttaaawawaaaaaaaaaaaaaaaaaaaaaaaaata

SEQ ID NO: 974 - DNA, 1090 bp, Homo sapiens
attcggaacgaggaaaatggcgctgacgtgagcgcgaactcgcactgcccagagggtggccgccgcctaagctgcagccgccggagccgcagaaacaagaggccgagccgtgtcgaagatggaggagaaaccctcagggcccatcccagacatgctggccactgcagagcccagctccagtgagaccgacaaggaggtgttgtccccggctgtgccagctgcagccccttcctcctccatgtcggaggagccaggccctgagcaggcagccacaccgccagtgtgggaacgtggaggggctggagggatgcagcagggctcctccccagccccagacagctgccagcctggccccggacccagccctggcctgaccagcatagtctccgggaccagcgaggacctgcggcctcccagacgacgcccacctccagggaagcaaatcccttgctccagccctggctgctgcctcagttttcccagcgtccgtgacctggcacagcatctgcgaacccactgcccgcccacacagtccctggaaggcaagctcttccgctgctcagccctgagctgcaccgagaccttccccagcatgcaggagctggtggctcacagcaaactgcactacaaacccaatcgctacttcaagtgtgagaactgcctcctgcgcttccgcacgcaccgctcgctcttcaagcacctgcatgtttgcgcggagcatgcgcagagcccagccccgccgccacccccggccctggaccgagagccgcccgcgccggagcgccccccggaggttgaccccgcatcagcgccgggcctgccgttcccgctgctggaacccttcacgacccccgcccctgcccccaccggaccgttcctgccctacttgaaccctgcgccctttggcctaagccccccgcgcctgcgccccttcctggccgctgcacccgggccgccggcttccagcgccgccgtctggaaaaagagccaaggtgctggcagcagcccccgaagaccccagggcggctccgacgcgccctcagggcacgcggccccgagccgcatcgtgtgggagcacacacgcggccgc

SEQ ID NO: 975 - DNA, 831 bp, Homo sapiens
aaactctacaaatgtgaggaatgtggcaaagcttttaatcaatcttcaaatcttacgacacataagataattcatactaaagagaaaccttccaagagtgaagaatgtgacaaagcatttatctggtcctcaacccttactgaacataagagaattcataccagagagaaaacctacaaatgtgaagaatgtggcaaagcatttagccagccttcacaccttactacacataagaggatgcacactggagagaaaccctacaaatgtgaagaatgtggcaaagcttttagccaatcctcaacccttactacacataagataattcatactggagagaaaccctacaaatgtgaagaatgtggcaargcttttaggaaatcttcaactcttactgaacataagataattcatactggagagaaaccctacaaatgtgaagaatgtggcaaagcatttagccaatcctcaaccctaactagacatacgaggatgcacactggagagaaaccatacaaatgtgaagaatgtgggaaagcttttaatcgatcctcaaagcttactacacataagataattcatactggagagaaaccttacaagtgtgaagaatgtggcaaagcatttatatcatcctcaaccctaaatggacataagagaattcatactagagagaaaccctacaaatgtgaagratgtggscaaagcatttagccartcttycaaccctaactagacataagaggttggcacaccgggagaggaaaccctacaatktgggagatktggccaagctttttaaagrgtcctccggtctttactaaaccttaggtt

SEQ ID NO: 976 - DNA, 305 bp, Homo sapiens
  misc_feature (293)..(294): n equals a,t,g, or c
  misc_feature (296)..(296): n equals a,t,g, or c
  misc_feature (299)..(299): n equals a,t,g, or c
  misc_feature (305)..(305): n equals a,t,g, or c
ctcgtgccgcgcaaaattaaccccctaataaaattaattaaccactcattcatcgacctccccaccccatccaacatctccgcatgatgaaacttcggctcactccttggcgcctgcctgatcctccaaatcaccacaggactattcctagccatgcactactcaccagacgcctcaaccgccttttcatcaatcgcccacatcactcgagggggggcccggtacccaattcgccctatagtgagtcgtattacaattcactggccgtcgttttacaacgtcgtgactgggannantanaaaaan

SEQ ID NO: 977 - DNA, 192 bp, Homo sapiens
  misc_feature (36)..(36): n equals a,t,g, or c
  misc_feature (48)..(48): n equals a,t,g, or c
  misc_feature (64)..(64): n equals a,t,g, or c
  misc_feature (89)..(89): n equals a,t,g, or c
  misc_feature (108)..(108): n equals a,t,g, or c
  misc_feature (133)..(133): n equals a,t,g, or c
  misc_feature (135)..(135): n equals a,t,g, or c
  misc_feature (187)..(187): n equals a,t,g, or c
  misc_feature (191)..(191): n equals a,t,g, or c
gcggaacaactttgacacagaagagtactgcatggncgtgtgtggtancgccatgtcccaaagnttactcaagactacccaggaacctntagcccgagatcctgatanacttcctacaacagcagccagtacncntgatgccggtgacaagcatcttgagacacctggggatgagaatgaacatgcncatnt

SEQ ID NO: 978 - DNA, 287 bp, Homo sapiens
  misc_feature (281)..(281): n equals a,t,g, or c
  misc_feature (283)..(284): n equals a,t,g, or c
  misc_feature (286)..(287): n equals a,t,g, or c
cattattataataaacaccctcaccactacaatcttcctaggaacaacatatgacgcactctcccctgaactctacacaacatattttgtcaccaagaccctacttctaacctccctgttcttatgaattcgaacagcatacccccgattccgctacgaccaactcatacacctcctatgaaaaaacttcctaccactcaccctagcattacttatatgacatgtctccatacccattacaatctccagcattcccccttcaaacctaaaaaaaaaaaaanannann

SEQ ID NO: 979 - DNA, 105 bp, Homo sapiens
  misc_feature (5)..(5): n equals a,t,g, or c
  misc_feature (17)..(17): n equals a,t,g, or c
  misc_feature (53)..(53): n equals a,t,g, or c
  misc_feature (85)..(86): n equals a,t,g, or c
  misc_feature (104)..(104): n equals a,t,g, or c
ttcantttgggggttgntaaagctacatgttcttcaaaggaaccgaataactnatttaaggtgaagcatgtaataacaatttagnngaagtttaaaaaaaaaana

SEQ ID NO: 980 - DNA, 505 bp, Homo sapiens
  misc_feature (5)..(5): n equals a,t,g, or c
  misc_feature (13)..(13): n equals a,t,g, or c
  misc_feature (33)..(33): n equals a,t,g, or c
  misc_feature (79)..(79): n equals a,t,g, or c
  misc_feature (85)..(85): n equals a,t,g, or c
  misc_feature (106)..(106): n equals a,t,g, or c
  misc_feature (123)..(123): n equals a,t,g, or c
  misc_feature (129)..(129): n equals a,t,g, or c
  misc_feature (149)..(149): n equals a,t,g, or c
  misc_feature (152)..(152): n equals a,t,g, or c
  misc_feature (164)..(164): n equals a,t,g, or c
  misc_feature (191)..(191): n equals a,t,g, or c
  misc_feature (198)..(198): n equals a,t,g, or c
  misc_feature (203)..(203): n equals a,t,g, or c
  misc_feature (206)..(206): n equals a,t,g, or c
  misc_feature (245)..(245): n equals a,t,g, or c
  misc_feature (248)..(248): n equals a,t,g, or c
  misc_feature (288)..(288): n equals a,t,g, or c
  misc_feature (297)..(297): n equals a,t,g, or c
  misc_feature (309)..(309): n equals a,t,g, or c
  misc_feature (319)..(319): n equals a,t,g, or c
  misc_feature (326)..(326): n equals a,t,g, or c
  misc_feature (359)..(359): n equals a,t,g, or c
  misc_feature (378)..(378): n equals a,t,g, or c
  misc_feature (387)..(387): n equals a,t,g, or c
  misc_feature (396)..(396): n equals a,t,g, or c
  misc_feature (398)..(398): n equals a,t,g, or c
  misc_feature (427)..(427): n equals a,t,g, or c
  misc_feature (464)..(465): n equals a,t,g, or c
  misc_feature (486)..(486): n equals a,t,g, or c
  misc_feature (503)..(503): n equals a,t,g, or c
tttcncgaacaancccacttgattcctcactgngcttcacaatgagattaatatcacatgttggaacggtgctatgctntaaccnctgtggaaacaaaggacacanacctggctacggtcatnagttancttctgcttactacctgcanacnacccaagggggngacactagtgaaccttctccagtctgnaagctgngatanaanggtcttacattatattgggcagcttgcaatctgccgaancantgacttgcatttccacacttggcttgagcactcaacccanaatgcgaanatagcttttggntgtaagcggnttcctgnatgggatatccctcggtaagggtaaaggagcanaggcaaaggagaaaagcanaaattgcancttatgcangnatcctatgcccttgatggatgagactaanataaaatttttgaaggtaaaaaaaaaaaaaaaagggnnggccgtctaaaggatccctcnagggggccaaacttacncg

SEQ ID NO: 981 - DNA, 618 bp, Homo sapiens
  misc_feature (8)..(8): n equals a,t,g, or c
  misc_feature (15)..(15): n equals a,t,g, or c
  misc_feature (118)..(118): n equals a,t,g, or c
  misc_feature (431)..(431): n equals a,t,g, or c
  misc_feature (506)..(506): n equals a,t,g, or c
  misc_feature (594)..(594): n equals a,t,g, or c
  misc_feature (611)..(617): n equals a,t,g, or c
gctttccnttctagntttgagagacttcctcttggctcccaggaggagggattccctgactttgacacatatggccaccttggcacaaaagccttgtggtatagaaaaacaaatttgnttttatgtcctcttctccctttccatctttcagcatagacttaactcccttaagcccagacatctgttgagacctgacccctagtcattggttaccagtgtgtcaggcaatctggactttccagtgatgccactgagatggcacctgtcaaaagagcagtggttccatttctagattgtggatcttcagataaattctgccattttcatttcacttcctgaaagtcagggtcggcttttgaaaagttgttaaacaacatgctaaatgtgaaatgtcaaccctcactctaaactttccctgttcagagcatcanatgaagacttcattgggttttatagtggctttctgatttttggtagtccattgaagaagggagtttgaaagttgntgtatactgttaacgattgtctgcccatgtcctgcctgaaataccatgattggttatggaaagtatctttaataaagctggatacagnttggcttggaaaaaaannnnnnna

SEQ ID NO: 982 - DNA, 821 bp, Homo sapiens
  misc_feature (13)..(13): n equals a,t,g, or c
  misc_feature (16)..(16): n equals a,t,g, or c
  misc_feature (30)..(30): n equals a,t,g, or c
  misc_feature (244)..(244): n equals a,t,g, or c
  misc_feature (355)..(355): n equals a,t,g, or c
  misc_feature (492)..(492): n equals a,t,g, or c
  misc_feature (548)..(548): n equals a,t,g, or c
  misc_feature (652)..(652): n equals a,t,g, or c
  misc_feature (771)..(771): n equals a,t,g, or c
ccttcccgtgatnctnttcaaggtacgccngcaggtaccggtccggaattcccgggtcgactttgactctgataaggcctccagtgctgcccgcgcggcatggggtaactcctcctacaaaattatcctcaaacagagtgcgaaggagttcgcgaaatacaaccaactgtatccggaccagttcctgccactgcagcgcgacatgattggtaagtttggtgcggccaaagaccagtggttcagntccttcctgctgcaggtggaaaaccattcctcctggcaccgtctgtttgtggacccgttaagccgcgccatgtacagctctgacggcccggattttgagtttgtgcagcanaagcgtaaagaggggctgagtattcatgaggcagtgtggcagctggcgtggaagaagtcagggccggaaatggcttcgctggaagcctggctggaagaacatgagaaatacaggagtgtggcatgagttcaacgcanaaacccgccgacgtcacggcagaacgacgcagccactggtggtggacggtgccggnatgcctggcaatggtgttactgaacgcagccgtcagttacggcattgtcagactgaacgcaccggtgactgtcgccttcaacatgaaacagaccgtggatgcgntttttgacagcgccagtcagaaacaactgtcagaagcgcagtcaaaagccctttcagcgcgttttaacacggcactggaagccagcctgcagcgtggcagcagaaacaccacgcggcantctggtgtcgcctgctgtggtacagggggcacccggatatcacccgggaa

SEQ ID NO: 983 - DNA, 86 bp, Homo sapiens
tttgggaaaataaaagtagtaatatggctgatttttggacaagtgagtttgaaccttgggattaaccttttatttttattttttag

SEQ ID NO: 984 - DNA, 461 bp, Homo sapiens
  misc_feature (421)..(421): n equals a,t,g, or c
gaagtaccatggacagacgcctaccaggggtgacaaagcagtgcagttggattttaaggaaaaattccggaattaatgcatcctaatgaatgttgtccccttcaatggtgttaccttaggagctgaacattcaattcagttacaccactatgactaaaaacagtttggatctcttagtattgcctttgaaactgcaacataagcaactcaacaatattagttgcattcctttatagacataccatgtcaaagacgtttttctatcaagttgtattctttcctgttctataacctttgtcatctgttagactctgtatgtgtgatttgtaaaaagcaggctgaaactatggacatgatttctgaagagcacatctccactgactttcataaagcaaatgtccaatatttatttattgagagntttttagtgcaatctgcgccagtatttttatagattatga

SEQ ID NO: 985 - DNA, 171 bp, Homo sapiens
tctggaaggagactgtattcaccaagtctccctatcaggagttcactgaccacctcgtcaagacccacaccagagtctccgtgcagcggactcaggctccagctgtggctacaacatagggtttttatacaagaaaaataaagtgaattaagcgtaaaaaaaaaaaaaaag

SEQ ID NO: 986 - DNA, 475 bp, Homo sapiens
  misc_feature (433)..(433): n equals a,t,g, or c
ccgagcctctcctctggccgccgcgcgggagagaggccgagatggcagatgagattgccaaggctcaggtcgctcggcctggtggcgacacgatctttgggaagatcatccgcaaggaaataccagccaaaatcatttttgaggatgaccggtgccttgctttccatgacatttcccctcaagcaccaacacattttctggtgatacccaagaaacatatatcccagatttctgtggcagaagatgatgatgaaagtcttcttggacacttaatgattgttggcaagaaatgtgctgctgatctgggcctgaataagggttatcgaatggtggtgaatgaaggttcagatggtggacagtctgtctatcacgttcatctccatgttcttggaggtcggcaaatgcattggcctcctggttaagcacgttttgnggataattttctcttctttaggcaatgattaagttaggcaat

SEQ ID NO: 987 - DNA, 496 bp, Homo sapiens
tggagtctgggatgcagaacatgagtattcatacgaagaccaccagcggctatgcaggtggtctgagctcggcctatgggggcctcacaagccccggcctcagctacagcctgggctccagctttggctctggcgcgggctccagctccttcagccgcaccagctcctccagggccgtggttgtgaagaagatcgagacacgtgatgggaagctggtgtctgagtcctctgacgtcctgcccaagtgaacagctgcggcagcccctcccagcctacccctcctgcgctgccccagagcctgggaaggaggccgctatgcagggtagcactgggaacaggagacccacctgaggctcagccctagccctcagcccacctggggagtttactacctggggaccccccttgcccatgcctccagctacaaaacaattcaattgctttttttttttggtccaaaataaaacctcagctagctctgccaatgtcaaaaaaa

SEQ ID NO: 988 - DNA, 467 bp, Homo sapiens
  misc_feature (271)..(271): n equals a,t,g, or c
  misc_feature (273)..(273): n equals a,t,g, or c
  misc_feature (286)..(286): n equals a,t,g, or c
  misc_feature (306)..(306): n equals a,t,g, or c
  misc_feature (350)..(350): n equals a,t,g, or c
  misc_feature (365)..(365): n equals a,t,g, or c
  misc_feature (394)..(394): n equals a,t,g, or c
  misc_feature (416)..(416): n equals a,t,g, or c
  misc_feature (431)..(431): n equals a,t,g, or c
  misc_feature (445)..(445): n equals a,t,g, or c
  misc_feature (452)..(452): n equals a,t,g, or c
gcagacctttcgggagaaggcagcgatgcctgtggcccagcacctgaacccagtgcaggtgctgcagctggtggaggaaacgctacctgacaactcaattctggtggtggatggtggggacttcgtgggcactgctgcccatctggtacagccccgcggccccctgcgctggctcgatcctggggcctttgggactctgggagttggtgcaggatttgcacttggggccaagctgtgccggccagatgctgaggtctggtgcctggtttgngnctgaagtttttgnctacagcctcatcgaatttnatacattcgtcagacacaagatcccagtgatggccttggtaggnaatgatgctggctgnacacagatttctcgttagcaggtgccctntctggcatcaacgtggcctgtngcctggtctacactnatattacaaggcanccatggntcttggttgcccggt

SEQ ID NO: 989 - DNA, 484 bp, Homo sapiens
  misc_feature (230)..(230): n equals a,t,g, or c
  misc_feature (275)..(275): n equals a,t,g, or c
  misc_feature (289)..(289): n equals a,t,g, or c
  misc_feature (365)..(365): n equals a,t,g, or c
  misc_feature (400)..(400): n equals a,t,g, or c
  misc_feature (414)..(414): n equals a,t,g, or c
  misc_feature (435)..(435): n equals a,t,g, or c
  misc_feature (445)..(445): n equals a,t,g, or c
  misc_feature (454)..(454): n equals a,t,g, or c
ggccttgtcatatgtaatttcactattttccaaggaaatatataggaagcaattatgaaactgagaatagttttatatagaattcttttatttactgataatgcattaacatttttattgaaatgcaatggaatatgtgccaaaacacgtgaaaagcttacataaagaaaggcatcagttgtcgtttggagaaaggtacacatttttttgatggtcctaagtgatatggnattactactagaatcacagatttcttcaactgacctaattttggnatattcactacagntttctaaggatagggactactttcatgtctagtaatacactgtattccccggtaattatcccttaagtcagattgnagaatttgcaagaaactaggtatagaaaaaatgtncaggcaacttttgngggtagctttataaatttaanggtgcttatnaaatgattnaatgaattctttaaataacctatagggaat

SEQ ID NO: 990 - DNA, 466 bp, Homo sapiens
  misc_feature (436)..(436): n equals a,t,g, or c
  misc_feature (458)..(458): n equals a,t,g, or c
  misc_feature (464)..(466): n equals a,t,g, or c
gggcttggtcacttcgtggctaaggtaagaacgtgcttgtggaagacaagtctgtggcttggtgagtctgtgtggccagcagcctctgatctgtgcagggtattaacgtgtcagggctgagtgttctgggatttctctagaggctggcaagaaccagttgttttgtcttgcgggtctgtcagggttggaaagtccaagccgtaggacccagtttcctttcttagctgatgtctttggccagaacaccgtgggctgttacttgctttgagttggaagcggtttgcatttacgcctgtaaatgtattcattcttaatttatgtaaggttttttttgtacgcaattctcgattctttgaagagatgacaacaaattttggttttctactgttatgtgagaacattaggccccagcaacacgtcattgtgtaaggaaaantaaaagtgctgccgtaaccaanataaannn

SEQ ID NO: 991 - DNA, 617 bp, Homo sapiens
  misc_feature (302)..(302): n equals a,t,g, or c
  misc_feature (304)..(304): n equals a,t,g, or c
  misc_feature (321)..(321): n equals a,t,g, or c
  misc_feature (468)..(468): n equals a,t,g, or c
  misc_feature (501)..(501): n equals a,t,g, or c
  misc_feature (534)..(534): n equals a,t,g, or c
  misc_feature (546)..(546): n equals a,t,g, or c
  misc_feature (584)..(584): n equals a,t,g, or c
  misc_feature (587)..(587): n equals a,t,g, or c
  misc_feature (611)..(611): n equals a,t,g, or c
gccaggacctgcgggacaagattcttggtgccaccattgagaactccaggattgtcctgcagatcgacaacgcccgtctggctgcagatgacttccgaaccaagtttgagacggaacaggctctgcgcatgagcgtggaggccgacatcaacggcctgcgcagggtgctggatgagctgaccctggccaggaccgacctggagatgcagatcgaaggcctgaaggaagagctggcctacctgaagaagaaccatgaggaggaaatcagtacgctgaggggccaagtgggaggccaggtcagngnggaggtggattccgctncgggcaccgatctcgccaagatcctgagtgacatgcgaagccaatatgaggtcatggccgagcagaaccggaaggatgctgaagcctggttcaccagccggactgaagaattgaaccgggaggtccgctggccacacggagcagctncagatgagcaggtcgaggttactgacctgcggngcacccttcagggtcttgagaatgagcttgcantcacagcttgancatgaaagcttgccttggaagacacactggcagaaacngangcgcgctttggaacccaacttggngcatat

SEQ ID NO: 992 - DNA, 348 bp, Homo sapiens
  misc_feature (269)..(269): n equals a,t,g, or c
  misc_feature (271)..(271): n equals a,t,g, or c
  misc_feature (273)..(273): n equals a,t,g, or c
  misc_feature (281)..(281): n equals a,t,g, or c
  misc_feature (346)..(346): n equals a,t,g, or c
gcgcaccagctcctccagggccgtggttgtgaagaagatcgagacacgtgatgggaagctggtgtctgagtcctctgacgtcctgcccaagtgaacagctgcggcagcccctcccagcctacccctcctgcgctgccccagagcctgggaaggaggccgctatgcagggtagcactgggaacaggagacccacctgaggctcagccctagccctcagcccacctggggagtttactacctggggacccccctttgcccatgcctccagntncnaaaaccanttcaaattgcttttttttttttgggtccaaaataaaaccttcaagctagctctgcccaaaaaaanaa

SEQ ID NO: 993 - DNA, 560 bp, Homo sapiens
  misc_feature (364)..(364): n equals a,t,g, or c
  misc_feature (428)..(428): n equals a,t,g, or c
  misc_feature (431)..(432): n equals a,t,g, or c
  misc_feature (459)..(459): n equals a,t,g, or c
  misc_feature (479)..(479): n equals a,t,g, or c
  misc_feature (539)..(539): n equals a,t,g, or c
  misc_feature (545)..(545): n equals a,t,g, or c
  misc_feature (549)..(549): n equals a,t,g, or c
  misc_feature (559)..(559): n equals a,t,g, or c
ggcgaccgtggccgggcggaagcggctttctggcctaagctttaacaggcttcgcctgtgcttcctgtttcctcttttaccaaggacccgccaacatgggccgcgttcgcaccaaaaccgtgaagaaggcggcccgggtcatcatagaaaagtactacacgcgcctgggcaacgacttccacacgaacaagcgcgtgtgcgaggagatcgccattatccccagcaaaaagctccgcaacaagatagcaggttatgtcacgcatctgatgaagcgaattcagagaggcccagtaagaggtatctccatcaagctgcaggaggaggagagagaaaggagagacaattatgttcctgaggtctcagncttggatcaggagattattgaagtagatcctgacactaaggaaatgctgaagcttttggacttnggnngtctgtccaaccttcaggtcactcatnctacagttgggatgaatttnaaaacgcctcggggacctgtttgaatttttttctgtattgcttggattaatttttcaatnaaattnttgnctacaacttnt

SEQ ID NO: 994 - DNA, 522 bp, Homo sapiens
  misc_feature (281)..(281): n equals a,t,g, or c
  misc_feature (291)..(291): n equals a,t,g, or c
  misc_feature (302)..(302): n equals a,t,g, or c
  misc_feature (304)..(304): n equals a,t,g, or c
  misc_feature (309)..(310): n equals a,t,g, or c
  misc_feature (329)..(330): n equals a,t,g, or c
  misc_feature (346)..(346): n equals a,t,g, or c
  misc_feature (348)..(349): n equals a,t,g, or c
  misc_feature (413)..(413): n equals a,t,g, or c
  misc_feature (468)..(468): n equals a,t,g, or c
  misc_feature (477)..(477): n equals a,t,g, or c
  misc_feature (488)..(488): n equals a,t,g, or c
  misc_feature (494)..(494): n equals a,t,g, or c
  misc_feature (514)..(514): n equals a,t,g, or c
gtgaatacttataaactgttgttcctggaagttatttattccataaaaaatttgttcttttgtcatgaatttataattcctaaatgaagaccagaaagtacaaattgctgggaggaagaataggctttattaatcaactgatgtcttgatttttctaaatgggaagattgctttatttttaacactaattatgggagcagattcttagcaaacttctttggaaaagttaatgttatgatgtgcattaggctgccccatcgtgtatataaatgaagcagatntgatttttgnattcctacggntnctctnnttttgtaggttgggggtgnncttaaagaaaatacananntttcatatatttaaaaatgtttaaaatgtgacccaccagaacattgtaaatgattaataactancatgaaaatattacaacctaaaagaatttcttaacttcacaagtgttttacttcnacgatgtgnctttgatttanatttgngacacttttttagaaggatntatttttc

SEQ ID NO: 995 - DNA, 489 bp, Homo sapiens
  misc_feature (261)..(261): n equals a,t,g, or c
  misc_feature (374)..(374): n equals a,t,g, or c
  misc_feature (470)..(470): n equals a,t,g, or c
  misc_feature (484)..(484): n equals a,t,g, or c
agggttctttgtttttggggtttggcagagatgtgtttaagtgctgtggccagaagcggggggaggggggggtttggtggaaattttttgttatgatgtctgtgtggaaagcggctgtgcagacattcaattgttattattatgtcctacaagcattaattaattaacacactttagtaagtatgttcgcctgtaatattgaacgtaggtgcgataaataataggatgaggcaggaatcaaagacagatactgcgacatanggtgctccggctccagcgtctcgcaatgctatcgcgtgcataccccccagacgaaaataccaaatgcatggagagctcccgtgagtggttaatagggtgatagacctgtgatncatcgtgatgtcttatttaaggggaacgtgttggctatttaggctttatgaccctgaagtagggaccagatgtcggatacagttcactttagctanccccaagtgttatngggcc

SEQ ID NO: 996 - DNA, 535 bp, Homo sapiens
  misc_feature (2)..(2): n equals a,t,g, or c
  misc_feature (8)..(8): n equals a,t,g, or c
  misc_feature (12)..(12): n equals a,t,g, or c
  misc_feature (15)..(15): n equals a,t,g, or c
  misc_feature (20)..(20): n equals a,t,g, or c
  misc_feature (530)..(530): n equals a,t,g, or c
angcatanaggnaanggtanctgcagtacggtcggattcccgggtcgacccacgcgtccgcaacctcctactcctcattgtacccattctaatcgcaatggcattcctaatgcttaccgaacgaaaaattctaggctatatacaactacgcaaaggccccaacgttgtaggcccctacgggctactacaacccttcgctgacgccataaaactcttcaccaaagagcccctaaaacccgccacatctaccatcaccctctacatcaccgccccgaccttagctctcaccatcgctcttctactatgaacccccctccccatacccaaccccctggtcaacctcaacctaggcctcctatttattctagccacctctagcctagccgtttactcaatcctctgatcagggtgagcatcaaactcaaactacgccctgatcggcgcactgcgagcagtagcccaaacaatctcatatgaagtaccctagccatcattctactatcaacattactaataagtggtcctttaanctctc

SEQ ID NO: 997 - DNA, 811 bp, Homo sapiens
  misc_feature (14)..(14): n equals a,t,g, or c
  misc_feature (40)..(40): n equals a,t,g, or c
  misc_feature (50)..(50): n equals a,t,g, or c
  misc_feature (74)..(74): n equals a,t,g, or c
  misc_feature (108)..(108): n equals a,t,g, or c
  misc_feature (120)..(120): n equals a,t,g, or c
  misc_feature (149)..(149): n equals a,t,g, or c
  misc_feature (156)..(156): n equals a,t,g, or c
  misc_feature (162)..(162): n equals a,t,g, or c
  misc_feature (172)..(172): n equals a,t,g, or c
  misc_feature (176)..(176): n equals a,t,g, or c
  misc_feature (265)..(265): n equals a,t,g, or c
  misc_feature (298)..(299): n equals a,t,g, or c
  misc_feature (306)..(306): n equals a,t,g, or c
  misc_feature (331)..(331): n equals a,t,g, or c
  misc_feature (333)..(333): n equals a,t,g, or c
  misc_feature (363)..(363): n equals a,t,g, or c
  misc_feature (387)..(387): n equals a,t,g, or c
  misc_feature (392)..(392): n equals a,t,g, or c
  misc_feature (411)..(411): n equals a,t,g, or c
  misc_feature (450)..(451): n equals a,t,g, or c
  misc_feature (481)..(481): n equals a,t,g, or c
  misc_feature (495)..(495): n equals a,t,g, or c
  misc_feature (534)..(534): n equals a,t,g, or c
  misc_feature (564)..(564): n equals a,t,g, or c
  misc_feature (568)..(568): n equals a,t,g, or c
  misc_feature (572)..(572): n equals a,t,g, or c
  misc_feature (574)..(574): n equals a,t,g, or c
  misc_feature (597)..(597): n equals a,t,g, or c
  misc_feature (617)..(617): n equals a,t,g, or c
  misc_feature (677)..(677): n equals a,t,g, or c
  misc_feature (702)..(702): n equals a,t,g, or c
  misc_feature (718)..(718): n equals a,t,g, or c
  misc_feature (724)..(724): n equals a,t,g, or c
  misc_feature (734)..(734): n equals a,t,g, or c
  misc_feature (751)..(751): n equals a,t,g, or c
  misc_feature (770)..(771): n equals a,t,g, or c
  misc_feature (779)..(779): n equals a,t,g, or c
  misc_feature (781)..(781): n equals a,t,g, or c
ttgcgggaaaacanaaaatggcttgttaaggcttccccanccgcggggtngggcggggccccggcttctttagnaaacttaaggtggggaattcccccccgggggccnttggcaaagggnaaatttccgggcaaccggaggtccccacngcccaanaaaagntccgccggtnggtncttaagtttttggtttttccgaacggccccgggaacccggcggttaaaaggaaagaaccgaatggaatggttttgggggccaaccgggnaaagggttgggaagaagggggaattccgtgggnnggaaaanggtcccgggggctttggccctgggncnttggcttcgggcccgaatgaaaagtgccanaagggttttttttctggactggcnaaaanttcaaaaatggggggcttnaagggtaattcggttcaatctaaccccagaagaaagcannaacccaagttggcgaaggctttttggttgnactttggattcaanaaagaatgaaagtcaaaattggcccttgaaaaaagaccngaagaaaactattggggacacaagatatgnttgnaagnantcaaaggtcaaaaccaacggttnaaatgggaattgggtggttnaacatacttgggcccaataagtccttgacacgggcaatgatggctttggacggcttaaangacttcctttggatgaacaaggaanaaattgtcaagtcttntaaggntggaatcgtncaatggatacattgcgnggcttcagggaagatcggnnaagctctnanttgttacagaatactaaaggttaagaccag

SEQ ID NO: 998 - DNA, 623 bp, Homo sapiens
  misc_feature (439)..(439): n equals a,t,g, or c
  misc_feature (554)..(554): n equals a,t,g, or c
gcggagctggccagaaaggaggagatggacaagctcctggacaagatctcagaactggaaggaaacttgcaaacactgaggaattccaattctacttaacaggaatcattccatgactggacaataattaacccccctcccattgtcctccctcccctgtcctcaacaccccacccctcccccttccagcctggggacaggtgccccgactccccccacccctccaccccacctcccccagcttcagggaccagagggctcatatcacaggcccccttaagatggcctgggcagacagaggtggctagaagggcagcctctttcttgccccatggggctgaggcacagaggccgagggctgccgagggctggcctggtggtcgacggacacaagcacctgcagatcaaactgccagactttacacactccagcttttgnctctggactggaacggggctggggctctccagcatctgcaactgggggctgttcctgccatggggcacctggtggccctggcctcttgattgagatttacttctcggccttcctntccccatcattgggccgcttgtgatttgaccttccgctggggggtggggcgtgctcaacactcccatcc

SEQ ID NO: 999 - DNA, 458 bp, Homo sapiens
  misc_feature (272)..(273): n equals a,t,g, or c
  misc_feature (297)..(297): n equals a,t,g, or c
  misc_feature (318)..(318): n equals a,t,g, or c
  misc_feature (327)..(327): n equals a,t,g, or c
  misc_feature (335)..(335): n equals a,t,g, or c
  misc_feature (345)..(345): n equals a,t,g, or c
  misc_feature (349)..(349): n equals a,t,g, or c
  misc_feature (372)..(372): n equals a,t,g, or c
  misc_feature (383)..(383): n equals a,t,g, or c
  misc_feature (385)..(385): n equals a,t,g, or c
  misc_feature (390)..(390): n equals a,t,g, or c
  misc_feature (392)..(392): n equals a,t,g, or c
  misc_feature (408)..(408): n equals a,t,g, or c
  misc_feature (414)..(414): n equals a,t,g, or c
  misc_feature (420)..(420): n equals a,t,g, or c
  misc_feature (432)..(432): n equals a,t,g, or c
  misc_feature (434)..(434): n equals a,t,g, or c
  misc_feature (452)..(452): n equals a,t,g, or c
aattcggcacgagggtgttcagttgtggcggttgctggtcagtaacagccaagatgctgcggaatctgctggctcttcgtcagattgggcagaggacgataagcactgcttcccgcagcattttaaaaataaagttccggagaagcaaaaactgttccaggaggatgatgaaattccactgtatctaaagggtggggtagctgatgccctcctgtatagagccaccatgattcttacagttggtggaacagcatatgccatatatgagcttnntgtggcttcattttcccaagaagnaggagttacttcagtcatccnagcaatcgnttgggttnagtttcattnagtncttttatgggaccagtaatctgntaaataaccgngnttttntnttgggggtcaatattntattgncttgtngtaattgcaccnantaaaaggagttttttccnagaaaa

SEQ ID NO: 1000 - DNA, 284 bp, Homo sapiens
  misc_feature (274)..(275): n equals a,t,g, or c
  misc_feature (278)..(280): n equals a,t,g, or c
aaatgccaaatatcgcgcctccatcctttatacttctaaaataaaatctctagtccaaacacactgacagtattatgtttgcctgaatgtgaaacattcctccttttttcttccataaataatttgtttgcttcccaaagatgtatgttttggaaaaaaattgcctgtagtctggttgtgaagaacactgagtcagttgatggtgtgtcttgtcctccagaccaggcagcaacatggtatttattttaatcattaaagtacaacatgagttgtnnaannnaaaa

SEQ ID NO: 1001 - DNA, 299 bp, Homo sapiens
  misc_feature (292)..(292): n equals a,t,g, or c
  misc_feature (294)..(294): n equals a,t,g, or c
  misc_feature (296)..(297): n equals a,t,g, or c
  misc_feature (299)..(299): n equals a,t,g, or c
ggtttctcactgcaagaaataaaatgtcaggcagtgaatgaattatattttcagaagtaaagcaaagaagctataacatgttatgtacagtacactctgaaaagaaatctgaaacaagttattgtaatgataaaaataatgcacaggcatggttacttaatattttctaacaggaaaagtcatccctatttccttgttttactgcacttaatattatttggttgaatttgttcagtataagctcgttcttgtgcaaaattaaataaatatttctcttaccttaaaaaaaacnancnntn

SEQ ID NO: 1002 - DNA, 773 bp, Homo sapiens
  misc_feature (330)..(330): n equals a,t,g, or c
  misc_feature (342)..(343): n equals a,t,g, or c
  misc_feature (370)..(370): n equals a,t,g, or c
  misc_feature (373)..(373): n equals a,t,g, or c
  misc_feature (382)..(382): n equals a,t,g, or c
  misc_feature (396)..(396): n equals a,t,g, or c
  misc_feature (400)..(400): n equals a,t,g, or c
  misc_feature (406)..(406): n equals a,t,g, or c
  misc_feature (431)..(431): n equals a,t,g, or c
  misc_feature (433)..(433): n equals a,t,g, or c
  misc_feature (444)..(444): n equals a,t,g, or c
  misc_feature (495)..(495): n equals a,t,g, or c
  misc_feature (512)..(512): n equals a,t,g, or c
  misc_feature (517)..(517): n equals a,t,g, or c
  misc_feature (561)..(561): n equals a,t,g, or c
  misc_feature (569)..(569): n equals a,t,g, or c
  misc_feature (602)..(602): n equals a,t,g, or c
  misc_feature (610)..(610): n equals a,t,g, or c
  misc_feature (631)..(631): n equals a,t,g, or c
  misc_feature (639)..(639): n equals a,t,g, or c
  misc_feature (641)..(641): n equals a,t,g, or c
  misc_feature (645)..(645): n equals a,t,g, or c
  misc_feature (660)..(660): n equals a,t,g, or c
  misc_feature (667)..(667): n equals a,t,g, or c
  misc_feature (669)..(669): n equals a,t,g, or c
  misc_feature (715)..(715): n equals a,t,g, or c
  misc_feature (717)..(717): n equals a,t,g, or c
  misc_feature (729)..(729): n equals a,t,g, or c
  misc_feature (749)..(749): n equals a,t,g, or c
  misc_feature (772)..(773): n equals a,t,g, or c
ggcggagggattggggatcgggatggagtcatgccaaaaatggacatcatttctggaacacttggcaaagcctttggttgtgttggagggtacatcgccagcacgagttctctgattgacaccgtacggtcctatgctgctggcttcatcttcaccacctctctgccacccatgctgctggctggagccctggagtctgtgcggatcctgaagagcgctgagggacgggtgcttcgccgccagcaccagcgcaacgtcaaactcatgagacagatgctaatggatgccggcctccctgttgtccactgccccagccacatcattcctgtncgggttgcaaannctggttaaaacccccgaaaagtttggnatnaaactaatngagcaagaccttancatntaccgngccaaggcaatcaattacccttacngnggccccggggnagaaagaactttctaccggattgcccccaaccctttaccaaacaccccaanatgatgaactactttcnttggnaaactgctagcacattgaaacaagtgggcttgaactgaagcttnattcccancttaatgcaactttttgcaggaaggccctggantttgaaangataagtgaaagcagagaagncctaattntnagcnttgaaccaagttggnaacttgntnaggccttaacatgaccccaattttttaacttaaccccagggcattntnatatccgaaggntttaaaattgcctttttggnaataaggtttttaaatttaaccnn

SEQ ID NO: 1003 - DNA, 408 bp, Homo sapiens
  misc_feature (324)..(324): n equals a,t,g, or c
ggcagtgttaattctatactgcatttgaagtgtatgtaacttagcttatgttaatgcagtcatgaagttggtttgctccagcatccggtagtctttaaacattcttttagtgaaattgtcattgttttatcagtgctaatgtgtgcaagcagtttttttattttgcttttctcctggcatcagaaagtggtggcgttttctgtactggattgcaccaaggaagcttttggggaggaaggaaggacattaaattctttccctggtaatgaaaagagccctttatcaatacagtgctgcaatttctggatatcagctacactttgnttttaagtttgtttttgacatgtttatttggcaaattttataatgaagttttaagttgaaaataaaatgtagcaacattttgat

SEQ ID NO: 1004 - DNA, 682 bp, Homo sapiens
  misc_feature (11)..(11): n equals a,t,g, or c
  misc_feature (26)..(26): n equals a,t,g, or c
  misc_feature (90)..(90): n equals a,t,g, or c
  misc_feature (128)..(128): n equals a,t,g, or c
  misc_feature (170)..(170): n equals a,t,g, or c
  misc_feature (183)..(183): n equals a,t,g, or c
  misc_feature (203)..(203): n equals a,t,g, or c
  misc_feature (214)..(214): n equals a,t,g, or c
  misc_feature (255)..(255): n equals a,t,g, or c
  misc_feature (269)..(269): n equals a,t,g, or c
  misc_feature (325)..(325): n equals a,t,g, or c
  misc_feature (328)..(328): n equals a,t,g, or c
  misc_feature (356)..(356): n equals a,t,g, or c
  misc_feature (372)..(372): n equals a,t,g, or c
  misc_feature (388)..(388): n equals a,t,g, or c
  misc_feature (432)..(432): n equals a,t,g, or c
  misc_feature (435)..(435): n equals a,t,g, or c
  misc_feature (449)..(449): n equals a,t,g, or c
  misc_feature (454)..(454): n equals a,t,g, or c
  misc_feature (458)..(458): n equals a,t,g, or c
  misc_feature (470)..(470): n equals a,t,g, or c
  misc_feature (486)..(486): n equals a,t,g, or c
  misc_feature (489)..(489): n equals a,t,g, or c
  misc_feature (496)..(496): n equals a,t,g, or c
  misc_feature (506)..(507): n equals a,t,g, or c
  misc_feature (510)..(510): n equals a,t,g, or c
  misc_feature (514)..(514): n equals a,t,g, or c
  misc_feature (530)..(530): n equals a,t,g, or c
  misc_feature (559)..(559): n equals a,t,g, or c
  misc_feature (576)..(576): n equals a,t,g, or c
  misc_feature (603)..(603): n equals a,t,g, or c
  misc_feature (613)..(613): n equals a,t,g, or c
  misc_feature (641)..(641): n equals a,t,g, or c
  misc_feature (662)..(662): n equals a,t,g, or c
  misc_feature (665)..(665): n equals a,t,g, or c
gcccacgcgtncgcccacgcgtccgnccacgcgtccgcccacgcgtccggccgccaaggtgctcggtccttccgaggaagctaaggctgngttggggtgaggccctcacttcatccggcgactagcancgcgtccggcagcgccagccctacactcgcccgcgccatggnctctgtctccganctcgcctgcatctactcggncctcattctgnacgacgatgaggtgacagtcacggaggataagatcaatgcnctcattaaagcagncgtgtaaatgttgaagctttttggcctgcttggttgcaaaggccctgggcaacgtnaanattgggaagcctaatttgcaatgtaagngcccggttggacctgntttcaagtaagcttgntggcttggacccaagcaaggaaagggtccttggccccccttttnaanttggtttgcttggntttcnaagnttttaagggaanaaaataaaaagggttnggnaaagccnaaaaggaaannggnaaanaaaattttcccaaagnaaagtttttggaatggaattgaaacaatngggggtttttttggggnccttttttttggaccttaaaaaccttnttttttaatnaaccaatgggtttaaattaaaaaaaagnttgaaactttttaaaaaaaanaanaaaaaaaaaaggggcgg

SEQ ID NO: 1005 - DNA, 762 bp, Homo sapiens
  misc_feature (44)..(44): n equals a,t,g, or c
  misc_feature (59)..(59): n equals a,t,g, or c
  misc_feature (73)..(73): n equals a,t,g, or c
  misc_feature (89)..(89): n equals a,t,g, or c
  misc_feature (133)..(133): n equals a,t,g, or c
  misc_feature (142)..(142): n equals a,t,g, or c
  misc_feature (164)..(164): n equals a,t,g, or c
  misc_feature (275)..(275): n equals a,t,g, or c
  misc_feature (278)..(278): n equals a,t,g, or c
  misc_feature (316)..(316): n equals a,t,g, or c
  misc_feature (339)..(339): n equals a,t,g, or c
  misc_feature (367)..(367): n equals a,t,g, or c
  misc_feature (371)..(371): n equals a,t,g, or c
  misc_feature (485)..(485): n equals a,t,g, or c
  misc_feature (532)..(532): n equals a,t,g, or c
  misc_feature (536)..(536): n equals a,t,g, or c
  misc_feature (551)..(551): n equals a,t,g, or c
  misc_feature (578)..(578): n equals a,t,g, or c
  misc_feature (608)..(608): n equals a,t,g, or c
  misc_feature (626)..(626): n equals a,t,g, or c
  misc_feature (629)..(629): n equals a,t,g, or c
  misc_feature (641)..(641): n equals a,t,g, or c
  misc_feature (649)..(649): n equals a,t,g, or c
  misc_feature (675)..(675): n equals a,t,g, or c
  misc_feature (682)..(682): n equals a,t,g, or c
  misc_feature (695)..(695): n equals a,t,g, or c
  misc_feature (741)..(741): n equals a,t,g, or c
  misc_feature (756)..(756): n equals a,t,g, or c
ttaggtttacctgcactattgaaggtacggctgcaggtaccggnccggaattccaggcncgacccacgcgttngaattgctggccgctncactcctggaaccttcactaaccagatccaggcagccttccggnagccacggnttcttgtggttactgaccccanggctgaccaccagcctctcacggaggcatcttatgttaacctacctaccattgcgctgtgtaacacagattctcctctgcgctatgtggacattgccatcccatgcaacancangggagctcactcagtgggtttaatgtggtggatgctgnctcgggaaggtctgcgcatgcgnggcaccatttcccgtgaacacccatggnaggncatgcctgatctgtacttctacagagatcctgaagagattgaaaaagaagagcaggctgctgctgagaaggcagtgaccaaggaggaatttcagggtgaatggactgctcccgntcctgagttcactgctactcagtctgaggttgcagactggtctgaangtgnacaggggccctctgngcctattcagcaatttcctactgaaanactggagcgcttaagcctggcacggaagantggtcttgcaacttccantgnttaaggcccttnatgggtangaagcaaccactggctgggccttaanctggtcnttgcataagctcnttaaacaacatggggaaaaatgggttgatggaaaataaacatcagnttctaaaaaaaaaanacaaaa

SEQ ID NO: 1006 - DNA, 762 bp, Homo sapiens
  misc_feature (243)..(243): n equals a,t,g, or c
  misc_feature (325)..(326): n equals a,t,g, or c
  misc_feature (421)..(421): n equals a,t,g, or c
  misc_feature (535)..(535): n equals a,t,g, or c
  misc_feature (678)..(678): n equals a,t,g, or c
  misc_feature (718)..(718): n equals a,t,g, or c
  misc_feature (722)..(722): n equals a,t,g, or c
  misc_feature (740)..(740): n equals a,t,g, or c
  misc_feature (754)..(754): n equals a,t,g, or c
gcgcggtcgtaagggctgaggatttttggtccgcacgctcctgctcctgactcaccgctgttcgctctcgccgaggaacaagtcggtcaggaagcccgcgcgcaacagccatggcttttaaggataccggaaaaacacccgtggagccggaggtggcaattcaccgaattcgaatcaccctaacaagccgcaacgtaaaatccttggaaaaggtgtgtgctgacttgataagaggcgcaaaanaaaagaatctcaaagtgaaaggaccagttcgaatgcctaccaagactttgagaatcactaccagaaaaacttccttgggggnnaaggttttaaaacttgggaatcgtttccagatgagaattccaagcgactcattgacttgcacaagtccttctgagattggtaagcagattacttncatcagtattgagccaggagttgaggtggaaagtcaccattgcagatgcttaagtcaactattttaataaattgatgaccagttgttaaaaaaaaaaaaaaaaggcggccgttntagaggatcccttgaggggcccaagcttacgcgtgcatgcgacgcatacttttttcctatagtgagtcgaatataagctaggactggccgcgtttacaacgtctgactggaaaactgtaacttggaactttggaagaacctantttgggggggcataatggccaactactacgagattaagcnttanggaattaaatttaagggnaagggtaactactnaaacttgt

SEQ ID NO: 1007 - DNA, 774 bp, Homo sapiens
  misc_feature (286)..(286): n equals a,t,g, or c
  misc_feature (298)..(298): n equals a,t,g, or c
  misc_feature (368)..(368): n equals a,t,g, or c
  misc_feature (397)..(397): n equals a,t,g, or c
  misc_feature (463)..(463): n equals a,t,g, or c
  misc_feature (473)..(473): n equals a,t,g, or c
  misc_feature (500)..(500): n equals a,t,g, or c
  misc_feature (539)..(539): n equals a,t,g, or c
  misc_feature (563)..(563): n equals a,t,g, or c
  misc_feature (565)..(565): n equals a,t,g, or c
  misc_feature (569)..(569): n equals a,t,g, or c
  misc_feature (608)..(608): n equals a,t,g, or c
  misc_feature (617)..(617): n equals a,t,g, or c
  misc_feature (644)..(645): n equals a,t,g, or c
  misc_feature (650)..(650): n equals a,t,g, or c
  misc_feature (666)..(666): n equals a,t,g, or c
  misc_feature (668)..(668): n equals a,t,g, or c
  misc_feature (671)..(671): n equals a,t,g, or c
  misc_feature (676)..(676): n equals a,t,g, or c
  misc_feature (679)..(680): n equals a,t,g, or c
  misc_feature (693)..(693): n equals a,t,g, or c
  misc_feature (727)..(727): n equals a,t,g, or c
  misc_feature (731)..(731): n equals a,t,g, or c
  misc_feature (764)..(764): n equals a,t,g, or c
gctggaaccatggagggtgtagaagagaagaagaaggaggttcctgctgtgccagaaacccttaagaaaaagcgaaggaatttcgcagagctgaagatcaagcgcctgagaaagaagtttgcccaaaagatgcttcgaaaggcaaggaggaagcttatctatgaaaaagcaaagcactatcacaaggaatataggcagatgtacagaactgaaattcgaatggcgaggatggcaagaaaagctggcaacttctatgtacctgcagaacccaaattggcgtttgtcntcagaatcagangtatcatgggagtgagccccaagggttcgaaaaggtgtttgcaagctttcttcgccttcggtcaaaatcnttcaatgggaacccttttggtggaaagcntcaaacaagggctttccgaattaaaccatggcttgagggaatttggtaagaagcccattaatattngcaatggggngggtaaccccccaaattcttggaaagntcaggtaaaatggaaacctaaattcttaccaaagccgtngggttaatgggccaaaaaatccanantaanggaaagccgaaaattgctttttgacccggataaaccgcnttttggaantgcttccgaatctctccgggcaaaatnncggcnatcatctggcattggnancgnaattnganntcatggagaatcnatactggttgcaaaaacgccttcaaaggagggcnaatnaacttcctgggggcccttcaaaatggctttctncccaggcgga

SEQ ID NO: 1008 - DNA, 794 bp, Homo sapiens
  misc_feature (174)..(174): n equals a,t,g, or c
  misc_feature (198)..(198): n equals a,t,g, or c
  misc_feature (214)..(214): n equals a,t,g, or c
  misc_feature (217)..(217): n equals a,t,g, or c
  misc_feature (234)..(234): n equals a,t,g, or c
  misc_feature (255)..(256): n equals a,t,g, or c
  misc_feature (284)..(284): n equals a,t,g, or c
  misc_feature (315)..(315): n equals a,t,g, or c
  misc_feature (333)..(333): n equals a,t,g, or c
  misc_feature (389)..(390): n equals a,t,g, or c
  misc_feature (416)..(416): n equals a,t,g, or c
  misc_feature (418)..(418): n equals a,t,g, or c
  misc_feature (423)..(423): n equals a,t,g, or c
  misc_feature (426)..(426): n equals a,t,g, or c
  misc_feature (434)..(434): n equals a,t,g, or c
  misc_feature (452)..(452): n equals a,t,g, or c
  misc_feature (457)..(457): n equals a,t,g, or c
  misc_feature (462)..(462): n equals a,t,g, or c
  misc_feature (466)..(466): n equals a,t,g, or c
  misc_feature (468)..(468): n equals a,t,g, or c
  misc_feature (488)..(488): n equals a,t,g, or c
  misc_feature (491)..(491): n equals a,t,g, or c
  misc_feature (510)..(510): n equals a,t,g, or c
  misc_feature (515)..(515): n equals a,t,g, or c
  misc_feature (541)..(541): n equals a,t,g, or c
  misc_feature (545)..(545): n equals a,t,g, or c
  misc_feature (547)..(547): n equals a,t,g, or c
  misc_feature (553)..(553): n equals a,t,g, or c
  misc_feature (556)..(557): n equals a,t,g, or c
  misc_feature (573)..(574): n equals a,t,g, or c
  misc_feature (585)..(585): n equals a,t,g, or c
  misc_feature (591)..(591): n equals a,t,g, or c
  misc_feature (599)..(599): n equals a,t,g, or c
  misc_feature (602)..(602): n equals a,t,g, or c
  misc_feature (607)..(607): n equals a,t,g, or c
  misc_feature (611)..(611): n equals a,t,g, or c
  misc_feature (662)..(662): n equals a,t,g, or c
  misc_feature (667)..(667): n equals a,t,g, or c
  misc_feature (684)..(684): n equals a,t,g, or c
  misc_feature (717)..(717): n equals a,t,g, or c
  misc_feature (731)..(731): n equals a,t,g, or c
  misc_feature (736)..(736): n equals a,t,g, or c
  misc_feature (740)..(741): n equals a,t,g, or c
  misc_feature (755)..(755): n equals a,t,g, or c
  misc_feature (759)..(759): n equals a,t,g, or c
  misc_feature (787)..(787): n equals a,t,g, or c
  misc_feature (792)..(792): n equals a,t,g, or c
gatcttcgtgaagaccctgactggtaagaccatcactctcgaagtggagccgagtgacaccattgagaatgtcaaggcaaagatccaagacaaggaaggcatccctcctgaccagcagaggttgatctttgctgggaaacaagctggaagatggacgcaccctggctgactacnacatccagaaagagtccacccttnacctggggctccgtcntanaggtgggatgcagatcnttcgtgaagaccctgactggnnaagaccatcactctcgaaagtggagccnagtgacaccatttgagaatggcaaaggcaanagatccaagacaaggaanggcattccttctgaccagcaggaggttgatcctttgctgggaaacaagcttggaannatgggacgcacccttggctgacttcnancattncangaaagaantccacccttggacctggngcttncggcntcananggtggggaatgccagaatcnttnggggaagaacccttgactnggggnaagaacccattaacccctccgaaggntggnanccccangtnnacccccatttcgaagnnaattggccaangggcanaaggaatnccnagggntaanggaaagggcaattcccctccctggatccaaggaagaaagggttggaaaccnttggntgggggaaaaacaagcntgggaaaaaattgggacccgcaaccccttgggntgggactaccaaanatttncccnnaaaggaggggcccncttnttgggactttggggccctggggcccttnaaaanag

SEQ ID NO: 1009 - DNA, 716 bp, Homo sapiens
  misc_feature (348)..(348): n equals a,t,g, or c
  misc_feature (364)..(364): n equals a,t,g, or c
  misc_feature (438)..(438): n equals a,t,g, or c
  misc_feature (446)..(446): n equals a,t,g, or c
  misc_feature (451)..(451): n equals a,t,g, or c
  misc_feature (458)..(458): n equals a,t,g, or c
  misc_feature (484)..(484): n equals a,t,g, or c
  misc_feature (508)..(508): n equals a,t,g, or c
  misc_feature (563)..(563): n equals a,t,g, or c
  misc_feature (576)..(576): n equals a,t,g, or c
  misc_feature (589)..(589): n equals a,t,g, or c
  misc_feature (595)..(595): n equals a,t,g, or c
  misc_feature (600)..(600): n equals a,t,g, or c
  misc_feature (614)..(614): n equals a,t,g, or c
  misc_feature (645)..(645): n equals a,t,g, or c
  misc_feature (660)..(660): n equals a,t,g, or c
  misc_feature (663)..(663): n equals a,t,g, or c
  misc_feature (680)..(680): n equals a,t,g, or c
  misc_feature (706)..(706): n equals a,t,g, or c
gcccagatttagggactgataaagataaggaacagtggaaagaggttcacaagcaggtggttgagagtgcttatgaggtgatcaaactcaaaggctacacatcctgggctattggactctctgtagcagatttggcagagagtataatgaagaatcttaggcgggtgcacccagtttccaccatgattaagggtctttacggaataaaggatgatgtcttccttagtgttccttgcattttgggacagaatggaatctcagaccttgtgaaggtgactctgacttctgaggaagaggcccgtttgaagaagagtgcagatacactttgggggatcaaaaggagctgcnaattttaaaggcttcngaggcataacatttcctggctaagcttccaccaggattctaagtggaaggttgggccatggttggcctttttanctgaactngggantaaagcnagtaatatttaaagaatggactgggnaaaaacatcaacttcctgaagttnggaaataagaaatgggttggtaaaatccacagctatatcctgatgcttggaaggnattaatcttgggnagtcttcactggntagtgngaaanagttctggcacctntgaccaccattgccaatgcttgtccgactgnatttgcccttgaccnggnggatgttaccgggggtntatacttctggttctttactggacanctaagccaca

SEQ ID NO: 1010 - DNA, 115 bp, Homo sapiens
  misc_feature (4)..(4): n equals a,t,g, or c
  misc_feature (8)..(9): n equals a,t,g, or c
  misc_feature (95)..(95): n equals a,t,g, or c
  misc_feature (99)..(99): n equals a,t,g, or c
  misc_feature (102)..(102): n equals a,t,g, or c
  misc_feature (109)..(109): n equals a,t,g, or c
  misc_feature (114)..(114): n equals a,t,g, or c
aaangtgnngtaccgcctagcagagtaccgggtccgggaattcccggggtccgacccacgcgtccggatcaaggttattgcaggctttcttttcntatnttnttttttntaagng

SEQ ID NO: 1011 - DNA, 539 bp, Homo sapiens
  misc_feature (539)..(539): n equals a,t,g, or c
gccaaggttgaagcaatgaataaaagactgggctccttggtggatgagtttaaggagcttgtttacccaccagattacaatcctgaagggaaagttaccaagagaaaacacgataatgaaggttctggaagcaaaaggcccaaggtggagtattcagaagaggagctgaagacccacatcagcaagggtacgctgggcaagttcactgtgcccatgctgaaagaggcctgccgggcttacgggctgaagagtgggctgaagaagcaggagctgctggaagccctcaccaagcacttccaggactgaccagaggccgcgcgtccagctgcccttccgcagtgtggccaggctgcctggccttgtcctcagccagttaaaatgtgtttctcctgagctaggaagagtctacccgacataagtcgagggactttatgtttttgaggctttctgttgccatggtgatggtgtagccctcccactttgctggtccttactttactgcctgaataaagagccctaagtttgtactaaaaaaaaan

SEQ ID NO: 1012 - DNA, 564 bp, Homo sapiens
  misc_feature (150)..(150): n equals a,t,g, or c
  misc_feature (171)..(171): n equals a,t,g, or c
  misc_feature (189)..(189): n equals a,t,g, or c
  misc_feature (267)..(267): n equals a,t,g, or c
  misc_feature (360)..(360): n equals a,t,g, or c
  misc_feature (380)..(380): n equals a,t,g, or c
  misc_feature (451)..(451): n equals a,t,g, or c
  misc_feature (457)..(457): n equals a,t,g, or c
  misc_feature (497)..(498): n equals a,t,g, or c
  misc_feature (507)..(507): n equals a,t,g, or c
  misc_feature (529)..(529): n equals a,t,g, or c
  misc_feature (557)..(557): n equals a,t,g, or c
gaggagggcaacatctttgtcaccacccaggctgtattgacatcatccttggccggcactttgagcagatgaaggatgatgccattgtgtgtaacattggacactttgacgtggagatcgatgtcaagtggctcaacgagaacgccgtgnagaaggtgaacatcaagccgnaggtggaccggtatcggntgaagaatgggccgcatcatcctgctgccgatggcggctggtcaacctgggttgtgccatgggccaccccagcttcgngatgagtaactccttcaccaaccaggtgatggcgcagatcgagctgtggacccatccagacaagtaccccgttggggttcatttcctgcccangaagctggatgaggcagtgngctgaagcccacctgggcaagctgaatgtgaagttgaccaagctaactgagaagcaagcccagtacctggncatgtnctgtgatggccctttcaagccggatcactaccggttcttnnaaccaggtntgcgtttacccttcaagcttgnttgtcttgcccaaggtcccaacttttcntccctaa

SEQ ID NO: 1013 - DNA, 625 bp, Homo sapiens
  misc_feature (574)..(574): n equals a,t,g, or c
  misc_feature (578)..(578): n equals a,t,g, or c
  misc_feature (600)..(600): n equals a,t,g, or c
  misc_feature (611)..(611): n equals a,t,g, or c
  misc_feature (624)..(624): n equals a,t,g, or c
ggagcaactgaagggatggttgttgctgacaagaactgttcaaaaatacacttcatatctcctaatatttattgttgtggtgctgggacagctgcaagacacagacatgacaacccagctcatttcttccaacctggagctccactccctctccactggccgtcttcccagagttgtgacagccaatcggatgctgaagcagatgcttttcaggtatcaaggttacattggtgcagccctagttttagggggagtagatgttactggacctcacctctacagcatctatcctcatggatcaactgataagttgccttatgtcaccatgggttctggctccttgcagcaatggctgtatttgaagataagtttaggccagacatggaggaggaggaagccaagaatctggtgagcgaagccatcgcagctgcatcttcaacgacctgggctccggaagcaacattgacctctgcgtcatcagcaagaacaagctggattttttccgccatacacagtgcccaacaagaaggggaccaggctttggccggtacaggtgtgaaaaagggactactgnaagncctcactgagaaaacactcctntggaaatgagngcttggaagaaana

SEQ ID NO: 1014 - DNA, 668 bp, Homo sapiens
  misc_feature (614)..(618): n equals a,t,g, or c
  misc_feature (626)..(640): n equals a,t,g, or c
  misc_feature (644)..(644): n equals a,t,g, or c
  misc_feature (646)..(651): n equals a,t,g, or c
  misc_feature (653)..(654): n equals a,t,g, or c
  misc_feature (659)..(660): n equals a,t,g, or c
  misc_feature (662)..(666): n equals a,t,g, or c
  misc_feature (668)..(668): n equals a,t,g, or c
actaggcttttgcaaaagctatttaggtgacactatagaaggtacgcctgcaggtaccggtccggaattcccgggtcgacccacgcgtccgagtacattccacaagcatgtgccttcttattgtacttgttttagctgattaactttgtaagatggagagaggttggatcatgtttaactgactgtgctgcccctttcacatcaaagaactactgacaacgaaggccgcgcctgcctttcccatctgtctatctatctggctggcagggaaggaaagaacttgcatgttggtgaaggaagaagtggggtggaagaagtggggtgggacgacagtgaaatctagagtaaaaccaagctggcccaaggtgtcctgcaggctgtaatgcagtttaatcagagtgccatttttttttttgttcaaaggattttaattattggaatgcacaatttttttaatatgcaaataaaaagtttaaaaagttaaaaaaaaaaaaaaggggcggccgtttaaaagaatccttggaggggccaaattttacggggggatggaaggtaaaaattttttccttatagggggccgtattaaaagctagccactggccgcttttaagggnnnnntggggggnnnnnnnnnnnnnnngggngnnnnnngnnggggnngnnnnngn

SEQ ID NO: 1015 - DNA, 550 bp, Homo sapiens
  misc_feature (394)..(394): n equals a,t,g, or c
  misc_feature (470)..(470): n equals a,t,g, or c
  misc_feature (487)..(487): n equals a,t,g, or c
acactatagaaggtacgcctgcaggtaccggtccggaattcccggatcgacccacgcgtccgcaccgactgcctgctcacccctgggctgagggaagggagaggagaggaacaagggcctccgaaaccccaaccctgagggagactggattggtcttggggcccaggacccagacgcaggacagagtggactctgcctgtgatggggtggccttcctgctgcccccctccaccagtgccttttgcagagagatattttgtgtacacagaagccattccgagtctgggacctgcccctgtgcggatcctgaccccagccaacagctgagctgccgggcctcctcgaggcccctaagccacccccagaggtcccatctgaagctggagtaccctgnggtcagcagcaagagaaagaagaggagattttctgtttgtttttcccctcagccctgccaccgtggggagtctggnttttctcttcatcctgnctctctcctccttactcttggataaataaacagcctgtgagcacacaggcagcccggcccagt

SEQ ID NO: 1016 - DNA, 566 bp, Homo sapiens
  misc_feature (159)..(159): n equals a,t,g, or c
  misc_feature (244)..(244): n equals a,t,g, or c
  misc_feature (408)..(409): n equals a,t,g, or c
  misc_feature (417)..(417): n equals a,t,g, or c
  misc_feature (433)..(433): n equals a,t,g, or c
  misc_feature (446)..(446): n equals a,t,g, or c
  misc_feature (517)..(517): n equals a,t,g, or c
  misc_feature (530)..(530): n equals a,t,g, or c
  misc_feature (532)..(532): n equals a,t,g, or c
  misc_feature (535)..(535): n equals a,t,g, or c
  misc_feature (550)..(550): n equals a,t,g, or c
gcacagaatgaaaaccccattttcaactgagctatctttgctccagcctgatactccagactgtgctggagatagtcataccccactggctttttccttcaccgaggacttggaaagttcttgtttgctagaccgaaaggaagaaaaaggggattctgncaggaaatgggaatggcttcatgagtctaagaagaactatcagagtatggagaaacacaccaaactacctggggacaaatgctgncagcccttaggcaagaccaaattggaaagaaaggtgtctgccaaagaaaacaggcaggcccctgtcctccttcaaacatacagggaatcctggaatggagaaaacatagaatcagtgaaacaaagccgtagtccagtttctgtgttttcctgggacaatgaacnnaatgaccnggactcctggagtcancttttcactgaanattctcaaggccagcgggtcattgcccacaacactagagctccttttcaaagatgtaaccaataaactggnattgggacctaangnccntttcctaacagtccntgggcttagcgcccag

SEQ ID NO: 1017 - DNA, 384 bp, Homo sapiens
  misc_feature (10)..(11): n equals a,t,g, or c
  misc_feature (26)..(26): n equals a,t,g, or c
  misc_feature (31)..(31): n equals a,t,g, or c
  misc_feature (100)..(100): n equals a,t,g, or c
  misc_feature (106)..(106): n equals a,t,g, or c
  misc_feature (119)..(119): n equals a,t,g, or c
  misc_feature (128)..(128): n equals a,t,g, or c
  misc_feature (143)..(145): n equals a,t,g, or c
  misc_feature (204)..(204): n equals a,t,g, or c
  misc_feature (217)..(217): n equals a,t,g, or c
  misc_feature (225)..(225): n equals a,t,g, or c
  misc_feature (230)..(230): n equals a,t,g, or c
  misc_feature (252)..(253): n equals a,t,g, or c
  misc_feature (259)..(259): n equals a,t,g, or c
  misc_feature (265)..(265): n equals a,t,g, or c
  misc_feature (269)..(270): n equals a,t,g, or c
  misc_feature (308)..(308): n equals a,t,g, or c
  misc_feature (311)..(311): n equals a,t,g, or c
  misc_feature (331)..(331): n equals a,t,g, or c
  misc_feature (344)..(344): n equals a,t,g, or c
  misc_feature (378)..(378): n equals a,t,g, or c
ctaacagacnnctcggaaaatccccnacacnatttcgggaagcctgccggtaccggtccggaattcccgggtcgacccacgcgttcgcttaatgtatcanctcttntggcatagcaggngtgtgtggnggccatatggactgnnnactatccaaaaggtcaagagagaaaacagcactcgaggtctcatcaattaaagcaccangtggaatctgcancctatatntgaanattagatgggaaaacgagagannagaaanactctnccannaaagaggaagagaagatttgaaagactcaatgatggcntantgggcataaaactgagtgtnccaacggttgatnaacaacagtagcagttatgtgaacagggaacgantcatga

SEQ ID NO: 1018 - DNA, 199 bp, Homo sapiens
  misc_feature (5)..(5): n equals a,t,g, or c
  misc_feature (11)..(11): n equals a,t,g, or c
  misc_feature (44)..(44): n equals a,t,g, or c
  misc_feature (86)..(86): n equals a,t,g, or c
  misc_feature (92)..(92): n equals a,t,g, or c
  misc_feature (114)..(114): n equals a,t,g, or c
  misc_feature (116)..(116): n equals a,t,g, or c
  misc_feature (135)..(135): n equals a,t,g, or c
  misc_feature (168)..(168): n equals a,t,g, or c
  misc_feature (180)..(180): n equals a,t,g, or c
ctttntatagncctgtggtggaagattttattaaaatcctacgngaagttgataaggcgcttgctgatgacttggaaacaaacttnccaagnttgaaggttcagacttaaaacntnaattggaattacttctgtncaagaaattaactttatttttctcactgatatnctagatgattgngagttttgttactgagtat

SEQ ID NO: 1019 - DNA, 638 bp, Homo sapiens
  misc_feature (433)..(433): n equals a,t,g, or c
  misc_feature (470)..(470): n equals a,t,g, or c
  misc_feature (472)..(472): n equals a,t,g, or c
  misc_feature (497)..(497): n equals a,t,g, or c
  misc_feature (536)..(536): n equals a,t,g, or c
  misc_feature (601)..(601): n equals a,t,g, or c
  misc_feature (614)..(614): n equals a,t,g, or c
  misc_feature (618)..(618): n equals a,t,g, or c
  misc_feature (625)..(625): n equals a,t,g, or c
  misc_feature (637)..(637): n equals a,t,g, or c
gcattgtgctacattatccagcttctttggaacaatgtgtgctctgtatggttttttttggtatgacaactaattaagcaactgacattgaactgagaattctacaaactataaaacattaatttttgaaggtaatttagttttgtggctgggcattcagtgaagtcttaggacttctttgcagacaactgactgggtatatataggaatgaatctggctttagggttaaatcatttaaggtccttttataggcaggcactagtaactaaaactgaaaactaagtaagtttatttttgaggaatgttgttaaaaatgtctttaggaagtcactaaaacttaattggaagaaaaaatcatgatgcttatacaataaatatgaataaatgttatataaggaaactcacctatttgaaatcatggctatattggtnttattttctagattccaaaaatacaaacactagttgntncagcattgtactttgataagtctgnacattgacgtgtatggactaaatccagggtaaaatcaanggtacaaaatttaagggtatggtaactaaaaggatagcatttctaagatatttgaatattagggncatttggcacttntcancaagtanggatcttctcang

SEQ ID NO: 1020 - DNA, 533 bp, Homo sapiens
  misc_feature (455)..(455): n equals a,t,g, or c
  misc_feature (496)..(496): n equals a,t,g, or c
  misc_feature (515)..(515): n equals a,t,g, or c
  misc_feature (527)..(527): n equals a,t,g, or c
  misc_feature (530)..(530): n equals a,t,g, or c
ggatcactgatccagaacacttcaagaactcgtcaaacagctcgataagcctttttgactgtgtacatctgtaccgggaataacattcctaggctgaaatttccacaaagaatagaacctgtacccagttcttcaggctgatttccctgacctcttgggcatttgtatttgtagtaaagtattgcagagattcctaagtattttatagcagccatcaaaattggactttgtattgtttattcataaaagacacttggtaatagacttcagtgaactctgtatgaatgcagtagtgtgtgtgcaaaatccgcttcctgagcgtagggtgctgagctggcgctagggctcggttgtgaaatacagcgtagtcagcccttgcgctcagtgtagaaacccacgtctgtaaggtcggtcttcgtccatctgcttttttctgaaatacactaagagcaagncacaaaaactgtaacctcaaggaaaccataaagcttggagngccttaatttttaaccagnttccaataaaanggntta

SEQ ID NO: 1021 - DNA, 525 bp, Homo sapiens
  misc_feature (441)..(441): n equals a,t,g, or c
  misc_feature (448)..(448): n equals a,t,g, or c
  misc_feature (487)..(487): n equals a,t,g, or c
  misc_feature (504)..(504): n equals a,t,g, or c
  misc_feature (506)..(506): n equals a,t,g, or c
gaaaattttcatggctaccatcaatattgtttttgatcgagttgggaaaacggatcctgtcacaagaggcattgagatcactgtgaattatctgggaatccaatttgatgtgaagttttggtcccaacacatttccttcattcttgttggaataatcatcgtcacatccatcagaggattgctgatcactcttaccaagttcttttatgccatctctagcagtaagtcctccaatgtcattgtcctgctattagcacagataatgggcatgtactttgtctcctctgtgctgctgatccgaatgagtatgcctttagaataccgcaccataatcactgaagtccttggagaactgcagttcaacttctatcaccgttggtttgatgtgatcttcctggtcagcgctctctctagcatactcttcctctatttggttcacanacaggcnccattagaagcaaatgggcacctttgaacttaaacctantacagactgttagaggncnagtgggtttcaaaaattta

SEQ ID NO: 1022 - DNA, 415 bp, Homo sapiens
  misc_feature (225)..(225): n equals a,t,g, or c
  misc_feature (270)..(270): n equals a,t,g, or c
  misc_feature (345)..(345): n equals a,t,g, or c
  misc_feature (387)..(387): n equals a,t,g, or c
  misc_feature (406)..(406): n equals a,t,g, or c
  misc_feature (411)..(412): n equals a,t,g, or c
gaactgtttacattcattatggggtatgtatgaccttcattttccaagaaatagaactctagcttagaattatggatgctctaaaatgtcagaatgggaactctcctcgaagttctcccaaactcagagacagcactgccttctcctaaatgattattcttttctccctgttttctggtattttctagcatccttctcaccacagccataaccctttgttacttncattaggccgtataactggagagacctgctgctcgttatataatnatctgataccaaacacaagcgattctgaatgtacacacacgtttatctatagagcataaggtaaaacaattttgnttaacattttggtattgcttacaaatgttattaaaacatgcngattcaaaaaaaacaaacnacaanngta

SEQ ID NO: 1023 - DNA, 177 bp, Homo sapiens
  misc_feature (143)..(143): n equals a,t,g, or c
  misc_feature (154)..(154): n equals a,t,g, or c
  misc_feature (159)..(159): n equals a,t,g, or c
  misc_feature (171)..(171): n equals a,t,g, or c
  misc_feature (175)..(175): n equals a,t,g, or c
gggacgatccaacacttctgtcttcagggagagtacagcttgttgtgggggatggaagaatgggatatgctgaagaagccccttatgatgccattcatgtgggagctgcagcccctgttgtaccccaggcgctaatagatcanttaaagcccgnaggangattgatattgnctgntg

SEQ ID NO: 1024 - DNA, 507 bp, Homo sapiens
  misc_feature (246)..(246): n equals a,t,g, or c
  misc_feature (299)..(299): n equals a,t,g, or c
  misc_feature (327)..(327): n equals a,t,g, or c
  misc_feature (418)..(418): n equals a,t,g, or c
  misc_feature (444)..(444): n equals a,t,g, or c
  misc_feature (455)..(455): n equals a,t,g, or c
  misc_feature (486)..(486): n equals a,t,g, or c
  misc_feature (501)..(501): n equals a,t,g, or c
ggaagaaagaaaggcccgtccacaggcccggctctgggccacgtgccccggaagcaggtgtgtccagagtcagctgagggctctccccacaccacccagcaggcgctggtgctccttctgcctcatgggaccagtccagcttccagccgctctggctcgagggtggtctgagcacttccttctgagtgggcttctctgggagctctccagtggcactgctggacctgcccacgtttctgtaaaatnaggatacgtggctttagtaagcagaccaagcgcttcgtggcagggaaagcagngtgcggggaagtcactgaaaagtgctgnctaaggaagtttggaaatagtccccgttccagattgccttgaattttaaaacattttgctttgggaaagtaggtcagcagcacctaagatnaaggatgcgttccattttcacacttncagtcatgaanactgagaagactgtcttcagcgtgaactaangttcacaggcagatnctgatc

SEQ ID NO: 1025 - DNA, 165 bp, Homo sapiens
  misc_feature (11)..(11): n equals a,t,g, or c
  misc_feature (18)..(18): n equals a,t,g, or c
  misc_feature (33)..(33): n equals a,t,g, or c
  misc_feature (74)..(74): n equals a,t,g, or c
  misc_feature (88)..(88): n equals a,t,g, or c
  misc_feature (124)..(124): n equals a,t,g, or c
  misc_feature (126)..(126): n equals a,t,g, or c
  misc_feature (154)..(154): n equals a,t,g, or c
ggtttaaaggnaggtccnttaaatctttttaanggggggtttgggtaaaccaaacctttaaattaagggctaanagggggggtttaanccgggccccccttgggcccaaggggggtttaaaccncngggggtttcccccgggggtaaataattnttacccccggg

SEQ ID NO: 1026 - DNA, 490 bp, Homo sapiens
  misc_feature (223)..(223): n equals a,t,g, or c
  misc_feature (230)..(230): n equals a,t,g, or c
  misc_feature (271)..(271): n equals a,t,g, or c
  misc_feature (295)..(295): n equals a,t,g, or c
  misc_feature (304)..(304): n equals a,t,g, or c
  misc_feature (402)..(402): n equals a,t,g, or c
  misc_feature (409)..(409): n equals a,t,g, or c
  misc_feature (425)..(425): n equals a,t,g, or c
  misc_feature (487)..(487): n equals a,t,g, or c
  misc_feature (489)..(489): n equals a,t,g, or c
gcccacgcgtccgcccacgcgtccgggcgttcaagatgtcgaagcgaggacgtggtgggtcctctggtgcgaaattccggatttccttgggtcttccggtaggagctgtaatcaattgtgctgacaacacaggagccaaaaacctgtatatcatctccgtgaaggggatcaagggacggctgaacagacttcccgctgctggtgtgggtgacatggtgatggncacagtnaagaaaggcaaaccagagctcagaaaaaaggtacatccagnagtggtcattcgacaacgaaagtnataccgtanaaaagatggcgtgtttctttattttgaagataatgcaggagtcatagtgaacaataaaggccgagatgaaaggttctgccattacaggaccaagtagnaaaggantgtgcagacttgtggncccggattgcatccaatgctggcagcatttgcatgattctccagtatattttgtaaaaaatnana

SEQ ID NO: 1027 - DNA, 422 bp, Homo sapiens
  misc_feature (2)..(2): n equals a,t,g, or c
  misc_feature (6)..(8): n equals a,t,g, or c
  misc_feature (38)..(38): n equals a,t,g, or c
  misc_feature (400)..(400): n equals a,t,g, or c
  misc_feature (404)..(404): n equals a,t,g, or c
  misc_feature (420)..(422): n equals a,t,g, or c
tntttnnnagctccctcaacaccttccggtccgagaancgatacagccggaacctcccatcgctgaatttaaggtggaaactggaagttgctggtggggcaagccctgcttcctgcatggaactggagctgtatggagttgacgacaagttctacagcaagctggatcaagaggatgcgctcctgggctcctaccctgtagatgacggctgccgcatccacgttattgaccacagtggcgcccgccttggtgagtatgaggacgtgtcccgggtggagaagtacacgatctcacaagaagcctacgaccagaggcaagacacggtccgctctttcctgaagcgcagcaagctcggcggtacaacgaggaggagcggctcagcaggaggccaataaaaagntcanagttcattggaaaaannn

SEQ ID NO: 1028 - DNA, 457 bp, Homo sapiens
  misc_feature (347)..(347): n equals a,t,g, or c
  misc_feature (389)..(389): n equals a,t,g, or c
  misc_feature (416)..(417): n equals a,t,g, or c
  misc_feature (421)..(421): n equals a,t,g, or c
  misc_feature (457)..(457): n equals a,t,g, or c
ggccgcggcggtagaggaacgcgcagccagccttgggaagcccaggcccggcagccatggcggtggaaggaggaatgaaatgtgtgaagttcttgctctacgtcctcctgctggccttttgcgcctgtgcagtgggactgattgccgtgggtgtcggggcacagcttgtcctgagtcagaccataatccagggggctacccctggctctctgttgccagtggtcatcatcgcagtgggtgtcttcctcttcctggtggcttttgtgggctgctgcggtgcctgcaaggagaactattgtcttatgatcacgtttgccatctttctgtctcttatcatgttggtggangtggccgcagccattgctggctatgtgtttagagataaggtnatgtcagagtttaataacaacttccgnnagcngatggagaattaccctaaaaacaaccacactgtttn

SEQ ID NO: 1029 - DNA, 442 bp, Homo sapiens
  misc_feature (317)..(317): n equals a,t,g, or c
  misc_feature (337)..(337): n equals a,t,g, or c
  misc_feature (404)..(404): n equals a,t,g, or c
  misc_feature (407)..(407): n equals a,t,g, or c
  misc_feature (417)..(417): n equals a,t,g, or c
  misc_feature (437)..(438): n equals a,t,g, or c
ggcggctatgcaggtggtctgagctcggcctatgggggcctcacaagccccggcctcagctacagcctgggctccagctttggctctggcgcgggctccagctccttcagccgcaccagctcctccagggccgtggttgtgaagaagatcgagacacgtgatgggaagctggtgtctgagtcctctgacgtcctgcccaagtgaacagctgcggcagcccctcccagcctacccctcctgcgctgccccagaagcctgggaaggaggccgctatgcagggtagcactgggaacaggagacccacctgaggctcaagncctagcctcagcccacctgnggagtttactacctgggggaccccccttgcccatgcctccagctacaacaacaattcaatttgcttnttnttcttttggnccaaaaataaaaaccttcannctag

SEQ ID NO: 1030 - DNA, 626 bp, Homo sapiens
  misc_feature (4)..(4): n equals a,t,g, or c
  misc_feature (29)..(29): n equals a,t,g, or c
  misc_feature (384)..(384): n equals a,t,g, or c
  misc_feature (432)..(432): n equals a,t,g, or c
  misc_feature (456)..(456): n equals a,t,g, or c
  misc_feature (494)..(494): n equals a,t,g, or c
  misc_feature (499)..(499): n equals a,t,g, or c
  misc_feature (615)..(615): n equals a,t,g, or c
  misc_feature (618)..(618): n equals a,t,g, or c
  misc_feature (621)..(621): n equals a,t,g, or c
  misc_feature (624)..(624): n equals a,t,g, or c
  misc_feature (626)..(626): n equals a,t,g, or c
ttgntggctcaccctattgcccttccaangttttcccctgtgtacgaccagatttggtcacccctttaactggatctcgctagctcatcgtagactgtgtgtttgagacgcacgtcgaggagaactgacctatgccttcgtcggggataatcgtcgcatgcccacagtgctgactggcccagtgggcgcaaccaattggatggtgcgccgcgcatagaaggccataaatgattgatacacagggaaactgtgaaccgaaagagaaaagggggaacgcgagaagcgcggaaatgactgctagagctggctgctggcacacggggctggatgcacgagcagggagcaaaagaggagatataccactgacgcaggtgaaggcgggcncgagggacaggtatacgtttaacctgtagggtacctttggacgttganacgtcggtagcagtagaagtactngatataggccacaccgggatgctgggaaaaaattgttnatatngttttgcaattgcaaataagaaagcaactaggcggcgcgaatggctgagctactggagaaccggataaagaactagactagtataaagggataaagaaactagggggggatctagnganggngcngn

SEQ ID NO: 1031 - DNA, 476 bp, Homo sapiens
  misc_feature (7)..(7): n equals a,t,g, or c
  misc_feature (41)..(42): n equals a,t,g, or c
  misc_feature (269)..(269): n equals a,t,g, or c
  misc_feature (272)..(272): n equals a,t,g, or c
  misc_feature (341)..(341): n equals a,t,g, or c
  misc_feature (358)..(358): n equals a,t,g, or c
  misc_feature (368)..(368): n equals a,t,g, or c
  misc_feature (433)..(433): n equals a,t,g, or c
  misc_feature (450)..(450): n equals a,t,g, or c
  misc_feature (463)..(463): n equals a,t,g, or c
  misc_feature (470)..(470): n equals a,t,g, or c
  misc_feature (474)..(474): n equals a,t,g, or c
ttgccangtttgccggtcattatctcgttccttcaacagcnnccaccgctaccgttgtccgctggcagccggtcaccttagtgttgcccttcttgcctccttagtcgcctgaaataccgatgctgcccttccaaccgccgccgtcgatctgcgcaacctagtaatagggtgcctaagggtgatacaaataacggcaacgattgcctgggttgttctaactccagcaatattaatttggtttcaccttttgattatggttcccttttacntcnagtggtgcctccattcgctcaccgagctgctttataaaattaactcaccttaccttctgtgccattcgnggaaccgcgggcatccnagttattctntgatcataacaaaaactccagccgccggttgctgctttgtaccgtcgctcgtgcaacttgataanaaagggcttgagtgccnctcttgcctggangacggcntgcnaa

SEQ ID NO: 1032 - DNA, 538 bp, Homo sapiens
  misc_feature (537)..(537): n equals a,t,g, or c
cgaccgttgactattctctacaaaccacaaagacattggaacactatacctattattcggcgcatgagctggagtcctaggcacagctctaagcctccttattcgagccgagctgggccagccaggcaaccttctaggtaacgaccacatctacaacgttatcgtcacagcccatgcatttgtaataatcttcttcatagtaatacccatcataatcggaggctttggcaactgactagttcccctaataatcggtgcccccggatatggcgtttccccggcataaacaacataagcttctgactcttacctccctctctcctactcctgctcgcatctgctatagtggaggccggagcaggaacaggttgaacagtctaccctcccttagcagggaactactcccaccctggagcctccgtagacctaaccatcttctccttacacctagcaggtgtctcctctatcttagggggccatcaatttcatcacaacaattatcaatataaaaccccctgccataacccaataccaaang

SEQ ID NO: 1033 - DNA, 542 bp, Homo sapiens
gaccaatctatcaccctatagaagaactaatgttagtataagtaacatgaaaacattctcctccgcataagcctgcgtcagattaaaacactgaactgacaattaacagcccaatatctacaatcaaccaacaagtcattattaccctcactgtcaacccaacacaggcatgctcataaggaaaggttaaaaaaagtaaaaggaactcggcaaatcttaccccgcctgtttaccaaaaacatcacctctagcatcaccagtattagagggcaccgcctggcccagtgacacatgtttaacggccgcggtaccctaaccgtggcaaaggtagcataatcacttgttccttaattagggacctgtatgatggctccacgagggttcagctgtctcttacttttaaccagtgaaattgacctgcccgtgaagaggcgggcatgacacagcaagacgagaagaccctatggagctttaatttattaatgcaaacagtacctaacaaacccacaggtcctaaactaccaaacctggcattaaaaatt

SEQ ID NO: 1034 - DNA, 412 bp, Homo sapiens
  misc_feature (39)..(39): n equals a,t,g, or c
  misc_feature (56)..(56): n equals a,t,g, or c
  misc_feature (211)..(211): n equals a,t,g, or c
  misc_feature (270)..(270): n equals a,t,g, or c
  misc_feature (290)..(290): n equals a,t,g, or c
  misc_feature (400)..(400): n equals a,t,g, or c
ctagtctcaggcttcaacatcgaatacgccgcagccctncgccctattcttcatanccgaatacacaaacattattataataaacaccctcaccactacaatcttcctaggaacaacatatgacgcactctcccctgaactctacacaacatattttgtcaccaagaccctacttctaacctccctgtacttatgaattcgaacagcatanccccgattccgctacgaccaactcatacacctcctatgaaaaaacttcctaccactcancctagcattacttatatganatgtctccatacccattacaatctccagcatcccccctcaaacctaagaaatatgtctgataaaagagttactttgatagagttaataataggagctaaacccccttatnttaggctatggt

SEQ ID NO: 1035 - DNA, 667 bp, Homo sapiens
  misc_feature (1)..(1): n equals a,t,g, or c
  misc_feature (5)..(5): n equals a,t,g, or c
  misc_feature (28)..(28): n equals a,t,g, or c
  misc_feature (81)..(82): n equals a,t,g, or c
  misc_feature (102)..(102): n equals a,t,g, or c
  misc_feature (110)..(110): n equals a,t,g, or c
  misc_feature (465)..(465): n equals a,t,g, or c
  misc_feature (541)..(541): n equals a,t,g, or c
  misc_feature (551)..(551): n equals a,t,g, or c
  misc_feature (563)..(563): n equals a,t,g, or c
  misc_feature (565)..(565): n equals a,t,g, or c
  misc_feature (627)..(627): n equals a,t,g, or c
  misc_feature (630)..(630): n equals a,t,g, or c
  misc_feature (642)..(642): n equals a,t,g, or c
  misc_feature (648)..(648): n equals a,t,g, or c
  misc_feature (653)..(653): n equals a,t,g, or c
natantggaatctttcgactcattttgnggaaagccctacgcctgcaggtaccggtccggaattcccgggtttacccactnntccgcttgactccgctgctngccatgtnttctcacaagactttcaggattaagcgattcctggccaagaaacaaaagcaaaatcgtcccattccccagtggattcggatgaaaactggaaataaaatcaggtacaactccaaaaggagacattggagaagaaccaagctgggtctataaggaattgcacatgagatggcacacatatttatgctgtctgaaggtcacgatcatgttaccatatcaagctgaaaatgtcaccactatctggagatttcgacgtgttttcctctctgaatctgttatgaacacgttggttggctggattcagtaataaatatgtaaggcctttctttttaaaaaaaaaaaaaaaagggcggccgntctagaggatccaagcttacgtacgccgtgcatgcgacgtcatagctcttctatagtggcacctaaaattcaattnacttggccgncgtttacaacgncntgactgggaaaaaccctggcggttcccaacttaatcgccttgaagacatcccccttttgccnctngcgtaataaccnaaaagncccgnaccgatcggccttt

SEQ ID NO: 1036 - DNA, 525 bp, Homo sapiens
  misc_feature (7)..(7): n equals a,t,g, or c
  misc_feature (27)..(27): n equals a,t,g, or c
  misc_feature (30)..(31): n equals a,t,g, or c
  misc_feature (34)..(34): n equals a,t,g, or c
  misc_feature (139)..(139): n equals a,t,g, or c
  misc_feature (162)..(162): n equals a,t,g, or c
  misc_feature (164)..(164): n equals a,t,g, or c
  misc_feature (514)..(514): n equals a,t,g, or c
aacgggnctcttcgcaggtacttctgnaannacnccgtccggaattcccgggtcgacccacgcgtccggagagaaaagcttaaaaaaaaaaagtaaggggtgagcagttaatggtattcattccacatacaatatctgngtaaaacgatttcctgtagaagnanctttaatggtttttgctctagaataccgtaggtctatccttagagcactcacgccatgctttcttccctgggttttaaacttcatataactttcagaaattggagagcaaaaattttgcttgtcactgcacatcaatataaaaaagcttatttaacttatcaaaacgtatttattgccaaactatgcttttttttgttaattttgttcatatttatcgggatgacaaatccatagaatatattcttttatgttaaattatgatcttcatattaatcttaaaattttgtgacgtgtctttttcctttttttccacagttttaatatattattcttcaacgacattttttgnaactttacctt

SEQ ID NO: 1037 - DNA, 372 bp, Homo sapiens
  misc_feature (3)..(3): n equals a,t,g, or c
  misc_feature (5)..(5): n equals a,t,g, or c
  misc_feature (9)..(9): n equals a,t,g, or c
  misc_feature (33)..(33): n equals a,t,g, or c
  misc_feature (119)..(119): n equals a,t,g, or c
  misc_feature (141)..(141): n equals a,t,g, or c
  misc_feature (157)..(157): n equals a,t,g, or c
  misc_feature (194)..(194): n equals a,t,g, or c
  misc_feature (333)..(333): n equals a,t,g, or c
  misc_feature (337)..(338): n equals a,t,g, or c
  misc_feature (342)..(342): n equals a,t,g, or c
  misc_feature (350)..(350): n equals a,t,g, or c
  misc_feature (365)..(365): n equals a,t,g, or c
  misc_feature (369)..(369): n equals a,t,g, or c
ggnanaggntgttcaggcgcttcgtggaggttngccgggtggctcatgtctcatttggacctcatgccggaaaattggtcgcgattgtagatgttattgatcagaacagggctttggtngatggaccttgcactcaagtgnaggagacaggccatgncttttcaagtgtcatgcagctccactgtatttgcatnctcaaagtttccgcacagtgtcccaccagaagtatgtgccgacaagcctgggcagaaggcaggacatgcaatgacaaaatgggacagccacacggtggggccaagtaagtttgaagccagagcaaagggtaaagccaantttnncagnttttgatncctttttaaagtttntggnagg

SEQ ID NO: 1038 - DNA, 500 bp, Homo sapiens
  misc_feature (70)..(70): n equals a,t,g, or c
  misc_feature (322)..(322): n equals a,t,g, or c
  misc_feature (336)..(336): n equals a,t,g, or c
  misc_feature (360)..(360): n equals a,t,g, or c
  misc_feature (434)..(434): n equals a,t,g, or c
  misc_feature (454)..(454): n equals a,t,g, or c
  misc_feature (465)..(465): n equals a,t,g, or c
  misc_feature (477)..(477): n equals a,t,g, or c
  misc_feature (489)..(489): n equals a,t,g, or c
aattcggcttagcggtggttcgcggccgaggtactttgttgagattgacttcctaagctacttaagacancttgcaccactaagaaaaaaatgtagaaccatttggaaaaatgaaatttagtagttccaagtttcaaagaaatgtcaacattttattccattcaataaagaacaaaaccaatagtgtttttattactttcatctgaaacattccatgttttaatctgagccttgcagactttcatttggagtttgaacccgttttggttgcatttcatttttggagaacttaattaacgtgagattggcaattgaaatgcangtgcagttttctgntaatgtcatgctgttgtttaggtnataagaaatattaagtaattggctttaagatttagaatttttttcctgagttcctgctagatttcgtattctantagttcaatgtattttcaantgaaatgccanaatatttccgtnatctttgcccanttttaattttt

SEQ ID NO: 1039 - DNA, 422 bp, Homo sapiens
  misc_feature (17)..(17): n equals a,t,g, or c
  misc_feature (19)..(19): n equals a,t,g, or c
  misc_feature (21)..(21): n equals a,t,g, or c
  misc_feature (23)..(23): n equals a,t,g, or c
  misc_feature (42)..(42): n equals a,t,g, or c
  misc_feature (371)..(371): n equals a,t,g, or c
  misc_feature (391)..(391): n equals a,t,g, or c
  misc_feature (393)..(393): n equals a,t,g, or c
  misc_feature (403)..(403): n equals a,t,g, or c
  misc_feature (417)..(417): n equals a,t,g, or c
aaccccttggaaccctntngncnaacgtccccgtgctggacntcggcttagcgtggtcgcggccgaggtactttttgaacttgatagctaaagattctaaaatgcatgttttatactaagttttaaccagtcaggaaaattttatgtaactagtgatagtttatttttttgtatgaattttgtttaggctgcaatgtttagcttttgttaactcctcactcttgctgtcttaagttcattactatgtttaatggcctacttgccaagatatttagcatgtaaaaagcagggttttgattaaaaaaaaaacggcttcatattgaagctgagacttacaataacaagttgagtggcaagcctggtatgctggntcttatcggcagaatcttantnaatgtaatgntttaaaagtttggntggct

SEQ ID NO: 1040 - DNA, 482 bp, Homo sapiens
  misc_feature (75)..(75): n equals a,t,g, or c
  misc_feature (401)..(401): n equals a,t,g, or c
  misc_feature (440)..(440): n equals a,t,g, or c
  misc_feature (445)..(445): n equals a,t,g, or c
  misc_feature (465)..(465): n equals a,t,g, or c
  misc_feature (471)..(471): n equals a,t,g, or c
ctcggatcccttgtaacggccgcccgtgtgctggaatttcgagcggccgcccgggcaggtcagaaacctagatgnaactggtcagaatctgtaaattacttagttgatatccactttgagcaggtatcaaatgatttaggatccttaaaattacattctaataattaagttatgtggaaaaagtaaggctggggaagtcgtgattaatagtcttcaaagggccattttttaaaatcctctgggcattttctttcagctgtttgttagtttttgctttatttaaagcatatttaagttattttaatgtggtttaggggcaaaatgtgcagatacttcatttttgtaagatagattgtaatagatgctgtttatactaaacatgtcataactatctatacagnatatattaaaagaaagcttgtacctcggccgcgaccacnctaangccgaattcttgcagatatncattanactggcggccg

SEQ ID NO: 1041 - DNA, 241 bp, Homo sapiens
  misc_feature (222)..(224): n equals a,t,g, or c
  misc_feature (228)..(228): n equals a,t,g, or c
  misc_feature (241)..(241): n equals a,t,g, or c
gtgtgctggaatttcgagcggccgcccgggcaggtagaggcatcttcaaggttcatacgttgtccagctgtaagttcatttgagtagcagacctaacaaatatttgaggtcaaaaccctaccatgttaaaacaaacaaaaacttaccatgttaataaaagtattcatttgcttgaaaagaaaaaaaaaaaaaaaaaaaaaaaaaaaaaaaaaaaaaaaaaannnggcngtaaaaaaaaaan

SEQ ID NO: 1042 - DNA, 765 bp, Homo sapiens
  misc_feature (525)..(525): n equals a,t,g, or c
  misc_feature (557)..(557): n equals a,t,g, or c
  misc_feature (562)..(562): n equals a,t,g, or c
  misc_feature (565)..(565): n equals a,t,g, or c
  misc_feature (597)..(597): n equals a,t,g, or c
  misc_feature (636)..(636): n equals a,t,g, or c
  misc_feature (701)..(701): n equals a,t,g, or c
  misc_feature (704)..(704): n equals a,t,g, or c
  misc_feature (708)..(708): n equals a,t,g, or c
  misc_feature (740)..(741): n equals a,t,g, or c
ggcttactcataacaagatcacaaagctgggctcttttgaaggattggtaaacctgaccttcatccatctccagcacaatcggctgaaagaggatgctgtttcagctgcttttaaaggtcttaaatcactcgaataccttgacttgagcttcaatcagatagccagactgccttctggtctccctgtctctcttctaactctctacttagacaacaataagatcagcaacatccctgatgagtatttcaagcgttttaatgcattgcagtatctgcgtttatctcacaacgaactggctgatagtggaatacctggaaattctttcaatgtgtcatccctggttgagctggatctgtcctataacaagcttaaaaacataccaactgtcaatgaaaaccttgaaaactattacctggaggtcaatcaacttgagaagtttgacataaagagcttctgcaagatcctggggccattatcctactccaagatcaagcatttgcgtttggatggcaatcgcatctcanaaaccagtcttccaccggatatgtatgaatgnctacntgntgctaacgaagtcactcttaattaatatctgnatcctggaacaatattttatgggtatggtttttctgggnggcaagtttcatagtatccataatttaatactggttattactttcatgaaattttaaaatctganggnaaanggtttggaaacatttattttttttaaagaaannatgaaaggcaggcctatttcatca

SEQ ID NO: 1043 - DNA, 597 bp, Homo sapiens
  misc_feature (427)..(427): n equals a,t,g, or c
  misc_feature (496)..(496): n equals a,t,g, or c
  misc_feature (538)..(538): n equals a,t,g, or c
  misc_feature (557)..(557): n equals a,t,g, or c
  misc_feature (563)..(563): n equals a,t,g, or c
  misc_feature (576)..(576): n equals a,t,g, or c
  misc_feature (581)..(581): n equals a,t,g, or c
ggcgttcgccgattcctcctccttggtcgccgcgtccttggctggcgtaaaaatggctacaaacttcctagcacatgagaagatctggttcgacaagttcaaatatgacgacgcagaaaggagattctacgagcagatgaacgggcctgtggcaggtgcctcccgccaggagaacggcgccagcgtgatcctccgtgacattgcgagagccagagagaacatccagaaatccctggctggaagctcagccccggggccttcagcggcaccagcggagaccacggtgagctcgtcgtccggattgccagtctggaagtggagaaccagagtctgcgtggcgtggtacaggagcttgcagcaggccatctccaagctggaggcccggctgaacgtgctggagaagagctcgcctggcaccggccacggncccacagacccagcacgtatctccatgcgccaagtggagcccccagccaagaaccagccacaccagcanaggatgaccaggatgataccttgactggttgcagtgacaatnaggaggaggacaaggagcngcacanttcggaggacggntacgnagtacccgagaaaaag

SEQ ID NO: 1044 - DNA, 653 bp, Homo sapiens
  misc_feature (5)..(5): n equals a,t,g, or c
  misc_feature (275)..(275): n equals a,t,g, or c
  misc_feature (318)..(318): n equals a,t,g, or c
  misc_feature (433)..(433): n equals a,t,g, or c
  misc_feature (523)..(523): n equals a,t,g, or c
  misc_feature (606)..(606): n equals a,t,g, or c
  misc_feature (611)..(611): n equals a,t,g, or c
  misc_feature (623)..(623): n equals a,t,g, or c
  misc_feature (646)..(646): n equals a,t,g, or c
gccgnctcggccgcctccgcctctgctactgccgctgctggaagacagcctggatttcctttctttgtcccccactcccgatacccagcgaaagcaccctctgactgccagatagtgcagtgttttggtcacggtaacacacacacactctccctcatctttcgtgcccattcactgagggccagaatgactgctcacccacttccaccgtggggttgggggtgggcaacagaggaggggagcaagtagggaagggggtggccttgacaactcangagtgagcagggaaattgagtccaaggaaaaagagagactcanagacccgggagggccttcctctgaaaggccaagccaagccatgcttggcagggtgaggggccagttgagttctgggagctgggcactactctgccagtccagagttgtacagcanaagcctctctcctagactgaaaatgaatgtgaaactaggaaataaaatgtgccccttccagtctgggaaggagatggtgcaaaagccctnttccataagtttaatatggttgcatcggttaataataatattgataataattaattaattaccaaatttttttgggtcaatgngaagnccccctcttccntttctcttttcttaaaatttccnaaaacca

SEQ ID NO: 1045 - DNA, 647 bp, Homo sapiens
  misc_feature (5)..(5): n equals a,t,g, or c
  misc_feature (10)..(10): n equals a,t,g, or c
  misc_feature (12)..(12): n equals a,t,g, or c
  misc_feature (270)..(270): n equals a,t,g, or c
  misc_feature (630)..(630): n equals a,t,g, or c
  misc_feature (641)..(641): n equals a,t,g, or c
ggggntattnanggggatcttcaggtgacattatagaaggtacgcctgcaggtaccggtccggaattcccgggtcgacccacgcgtccggattcatctagatggtgccatgacaatggtgtgaactacaagattggagagaagtgggaccgtcagggagaaaatggccagatgatgagctgcacatgtcttgggaacggaaaaggagaattcaagtgtgaccctcatgaggcaacgtgttatgatgatgggaagacataccacgtagganaacagtggcagaaggaatatctcggtgccatttgctcctgcacatgctttggaggccagcggggctggcgctgtgacaactgccgcagacctgggggtgaacccagtcccgaaggcactactggccagtcctacaaccagtattctcagagataccatcagagaacaaacactaatgttaattgcccaattgagtgcttcatgcctttagatgtacaggctgacagagaagattcccgagagtaaatcatctttccaatccagaggaacaagcatgtctctctgcaagatccatctaaactggagtgatgttagcagacccagcttagagtcttctttctttcttaagccctttctctgnaagaagttctncagctt

SEQ ID NO: 1046 - DNA, 516 bp, Homo sapiens
ctcccgctgctcagccgaggcctgcctggagccccagatcaccccttcctactacaccacttctgacgctgtcatttccactgagaccgtcttcattgtggagatctccctgacatgcaagaacaggggccagaacatggctctctatgctgacggcggaggaaaacaattccctgtcactcgaggccaggatgtggggcgttatcaggtgtcctggagcctggaccacaagagcgcccacgcaggcacctatgaggttagattcttcgacgaggagtgctacagcctcctcaggaaggctcagaggaataacgaggacatttccatcatcccgcctctgtttacagacagcgtggaccatcggggcacttggaacgggccctggatgtccactgaggtgctggctgcggcgatcggccttgagatctactacttggccttcagtgcgaagagccacatccaggcctgagggcggcaccccagccctgcccttgcttccttcaataaacatcacag

SEQ ID NO: 1047 - DNA, 467 bp, Homo sapiens
  misc_feature (353)..(353): n equals a,t,g, or c
ctgctctcctcttctactcacttttcccactccaagcccagcccatggagattgacctggatggggcaggccacctggctctcacctctaggtccccatactcctatgatctgagtcagagccatgtcttctccctggaatgagttgaggccactgtgttccttccgcttggagctattttccaggcttctgctggggcctgggacaactgctcccacctcctgacacccttctcccactctcctaggcattctggacctctgggttgggatcaggggtaggaatggaaaggatggagcatcaacagcagggtgggcttgtggggcctgggaggggcaatcctcaaatgcggngtgggggcagcacaggagggcggcctccttctgagctcctgtcccctgctacacctattatcccagctgcctagattcagggaaagtgggacagattgtaggggaggggctcct

SEQ ID NO: 1048 - DNA, 516 bp, Homo sapiens
ggaggtgcagccggccactttccgctgcgtcactgaccgcctggccatccagtttggcaactacaaaaagtagaggcagctgcagccaccgcggggcctcagtgggggtctctggggaacacagccagacatcctgatggggaggcagagccaggaagctaagccagggcccagctgcgtccaacccagccccccacctcaggtccctgaccccagctcgatgccccatcaccgcctctccctggctcccaagggtgcaggtgggcgcaaggcccggcccccatcacatgttcccttggcctcagagctgcccctgctctcccaccacagccacccagaggcaccccatgaagcttttttctcgttcactcccaaacccaagtgtccaaggctccagtcctaggagaacagtccctgggtcagcagccaggaggcggtccataagaatggggacagtgggctctgccagggctgccgcacctgtccagacacacatgttctgttcctcctcctcat

SEQ ID NO: 1049 - DNA, 219 bp, Homo sapiens
  misc_feature (212)..(214): n equals a,t,g, or c
  misc_feature (217)..(217): n equals a,t,g, or c
  misc_feature (219)..(219): n equals a,t,g, or c
gggagtctgctactagtcttatcagctcttaaaaacagaaactcatctgtccaagttcgtggcagaaaggaacgtccttgtgaagacctttatctgagccactgtacttcgttatcactgccatgcagtttacatgagctgttctgcagctcaaattccattttgtgaatgggtttttttttttaataaactgtatttaacttaaaaaacannntcnan

SEQ ID NO: 1050 - DNA, 714 bp, Homo sapiens
  misc_feature (587)..(587): n equals a,t,g, or c
  misc_feature (590)..(590): n equals a,t,g, or c
  misc_feature (605)..(605): n equals a,t,g, or c
  misc_feature (695)..(695): n equals a,t,g, or c
  misc_feature (711)..(711): n equals a,t,g, or c
gcattgattaagtcttattcagtcatcggtgaggttaatgcactaatcatggattttttgaacatgttattgcagtgattctcaaattaactgtattggtgtaagatttttgtcattaagtgtttaagtgttattctgaattttctaccttagttatcattaatgtagttcctcattgaacatgtgataatctaatacctgtgaaaactgactaatcagctgccaataatatctaatatttttcatcatgcacgaattaataatcatcatactctagaatcttgtctgtcactcactacatgaataagcaaatattgtcttcaaaagaatgcacaagaaccacaattaagatgtcatattattttgaaagtacaaaatatactaaaagagtgtgtgtgtattcacgcagttactcgcttccatttttatgacctttcaactataggtaataactcttagagaaattaatttaatattagaatttctattatgaatcatgtgaaagcatgacattcgttcacaatagcactattttaaataaattataagctttaaggtacgaagtatttaatagatctaatcaaatntgntgattcatggctatnataaagcaggagccaattataaaatcttcaatcaattgaacttttacaaaaccacttggagaatttcatgagcctttaaaaatctggacntttcaaagcttggtanttc

SEQ ID NO: 1051 - DNA, 642 bp, Homo sapiens
  misc_feature (488)..(488): n equals a,t,g, or c
  misc_feature (513)..(513): n equals a,t,g, or c
  misc_feature (538)..(538): n equals a,t,g, or c
  misc_feature (541)..(542): n equals a,t,g, or c
  misc_feature (602)..(602): n equals a,t,g, or c
  misc_feature (607)..(607): n equals a,t,g, or c
  misc_feature (624)..(624): n equals a,t,g, or c
  misc_feature (630)..(631): n equals a,t,g, or c
ggggagaaggggcatggagcctgccatggggtgggcttctgtactcatgtggctacctctgtccctcaccaggtggtctgagctcggcctatgggggcctcacaagccccggcctcagctacagcctgggctccagctttggctctggcgcgggctccagctccttcagccgcaccagctcctccagggccgtggttgtgaagaagatcgagacacgtgatgggaagctggtgtctgagtcctctgacgtcctgcccaagtgaacagctgcggcagcccctcccagcctacccctcctgcgctgccccagagcctgggaaggaggccgctatgcagggtagcactgggaacaggagacccacctgaggctcagccctagccctcagcccacctggggagtttactacctggggaccccccttgcccatgcctccagctacaaaacaattcaattgctttttttttttggtccaaaataaaaacctcanctaagctctgccaatgtcaaaaaanaaaaaaaaaaggggcgggccgcttntannaggatcccttcgaggggggccccaaagctttacgcgtgccattgccgaacgtcataagcntcctnttcccctaataagtggnggtcgnnaattaattaaa

SEQ ID NO: 1052 - DNA, 612 bp, Homo sapiens
  misc_feature (526)..(526): n equals a,t,g, or c
  misc_feature (549)..(549): n equals a,t,g, or c
  misc_feature (571)..(571): n equals a,t,g, or c
  misc_feature (602)..(602): n equals a,t,g, or c
  misc_feature (608)..(608): n equals a,t,g, or c
gcggcagccgaggccgcgaactgcatcatggaggtgtcctgtggccaggcggaaagcagtgagaagcccaacgctgaggacatgacatccaaagattactactttgactcctacgcacactttggcatccacgaggagatgctgaaggacgaggtgcgcaccctcacttaccgcaactccatgtttcataaccggcacctcttcaaggacaaggtggtgctggacgtcggctcgggcaccggcatcctctgcatgtttgctgccaaggccggggcccgcaaggtcatcgggatcgagtgttccagtatctctgattatgcggtgaagatcgtcaaagccaacaagttagaccacgtggtgaccatcatcaaggggaaggtggaggaggtggagctcccagtggagaaggtggacatcatcatcagcgagtggatgggctactgcctcttctacgagtccatgctcaacaccgtgctctatgcccgggacaagtggctggcgcccgatggccttaatcttccagaancggccacgcttgtatgtgacggncatcgaggaccggcagtccaangactaccaggatccactggtgggaaaacgtntttggnttct

SEQ ID NO: 1053 - DNA, 407 bp, Homo sapiens
cttatacctgcacccctaacccttaatccagtagaactgcctgcctgcgccttggtgggcctcaccagctttctctccccacagctgccaagagcccgtcggcccaacttatggagcaagtggctcagcttaagtccctgagtgacaccgtcgagaagctcaaggatgaggtcctcaaggagacagtatctcagcgccctggagccacagtacccactgactttgccaccttcccttcatcagccttcctcagggccaaggaggagcagcaggatgacacagtctacatgggcaaagtgaccttctcatgtgcggctggttttggacagcgacaccggctggtgctgacccaggagcagctgcaccagcttcacagtcgcctcatctcctaagcactcctttcccct

SEQ ID NO: 1054 - DNA, 474 bp, Homo sapiens
ctcactccctcaagaatccgaaccacaggacaaaaaccacctactgggctctctcctaccctgccctcctcccttttttttacccctctcttttttattttttctttgctctttagaacccagtgaaaaataccagggtactggggtgcaactctttcttatgataggtcattagtgctttaagcaaaagatattagcagctttgactgcagcattagcaattaggaaaaaaaaaaaattaagttccctgcggacatgtaactttgccatcagttttgatgtggaaacactgtgatatataaaatgttgttggacaacagtagttttaagagtaaaatatgaaacgtttaaaaagttccaaaaaaagctagctctgtcctttacttattgagacactttaactttttcctttgtatttccattgtattagataaataaatgtgaatgtaaaattgtaaaaaaaaaaaaaaaaaa

SEQ ID NO: 1055 - DNA, 417 bp, Homo sapiens
  misc_feature (391)..(395): n equals a,t,g, or c
  misc_feature (400)..(400): n equals a,t,g, or c
  misc_feature (403)..(410): n equals a,t,g, or c
ccacccatgacctttttcactgtggccatcaggactttccctgacagctgtgtactcttaggctaagagatgtgactacagcctgcccctgactgtgttgtcccagggctgatgctgtacaggtacaggctggagattttcacataggttagattctcattcacgggactagttagctttaagcaccctagaggactagggtaatctgacttctcacttcctaagttcccttctatatcctcaaggtagaaatgtctatgttttctactccaattcataaatctattcataagtctttggtacaagtttacatgataaaaagaaatgtgatttgtcttcccttctttgcacttttgaaataaagtatttatctcctgtctacagtttaatnnnnnaaaanaannnnnnnnaaaaaag

SEQ ID NO: 1056 - DNA, 426 bp, Homo sapiens
tggggcggggcgcaagggaggtttcgagcccggaaggtccggcgcccagagctaacgggagtcccaggttaaacactttaagatgagaaaaattgatctctgtctgagctctgaagggtccgaagtgattttagctacatcaagtgatgaaaaacacccacctgaaaatatcattgatgggaatccagaaacgttttggaccaccacaggaatgtttccccaggaattcattatttgtttccacaaacatgtaaggattgaaaggcttgtaatccaaagttactttgtacagaccttgaagattgaaaaaagcacgtctaaagagccagttgattttgagcaatggattgaaaaagatttggtacacacagaggggcagcttcaaaatgaagaaattgtggcacatgatggctccgctacttactt

SEQ ID NO: 1057 - DNA, 478 bp, Homo sapiens
agggaacagggcggatacctgaccaactcgtgatcctagacatgaagcatggagtggaggcgaaaaattacgaagagattgcaaaagttgagaagctcaaaccattagaggtagagctgcgacgcctagaagacctttcagaatctattgttaatgattttgcctacatgaagaagagagaagaggagatgcgtgataccaacgagtcaacaaacactcgggtcctatacttcagcatcttttcaatgttctgtctcattggactagctacctggcaggtcttctacctgcgacgcttcttcaaggccaagaaattgattgagtaatgaatgaggcatattctcctcccaccttgtacctcagccagcagaacatcgctgggacgtgcctggcctaaggcatcctaccaacagcaccatcaaggcacgttggagctttcttgccagaactgatctcttttggtgtgggaggacatggg

SEQ ID NO: 1058 - DNA, 425 bp, Homo sapiens
  misc_feature (187)..(187): n equals a,t,g, or c
  misc_feature (345)..(345): n equals a,t,g, or c
  misc_feature (353)..(353): n equals a,t,g, or c
  misc_feature (396)..(396): n equals a,t,g, or c
  misc_feature (410)..(410): n equals a,t,g, or c
gttccagtgagtccaccctctaaatcaccacgatcaaaagggacaagcatcaagcacgcagcaatgcagctcaaaacgcttagcctagccacacccccacgggaaacagcagtgattaacctttagcaataaacgaaagtttaactaagctatactaaccccagggttggtcaatttcgtgccagcnaccgcggtcacacgattaacccaagtcaatagaagccggcgtaaagagtgttttagatcaccccctccccaataaagctaaaactcacctgagttgtaaaaaactcaaaaaaaaaaaaaaaagggcggccgctctagaggatccaagcttacgtacgngtgcatgngacgtcatagctcttctatagtgtcacctaattcattcatggncgtcgttttacaantcgtgactggggaaa

SEQ ID NO: 1059 - DNA, 316 bp, Homo sapiens
  misc_feature (9)..(9): n equals a,t,g, or c
  misc_feature (312)..(316): n equals a,t,g, or c
tttcaaaantagtttaggtgacactatagaaggtacgcctgcaggtaccgggtccggaattcccgggtcgacccacgcgtccggagcaacttctccacatgttgggtgtccatcctggggcagggaaggacagagtgttggatggctgggacggggccttgctcttgtcggccagcccactccccagccagagagggcttgaccaaatcaaattgaggtggtgacttttgttggaaaattgggctgggatcacgtcctgttttgtaataaaagctgaaaagtctgcaaaaaaaaaaaaaaaaaaaaaaaaannnnn

SEQ ID NO: 1060 - DNA, 577 bp, Homo sapiens
  misc_feature (6)..(6): n equals a,t,g, or c
  misc_feature (23)..(24): n equals a,t,g, or c
  misc_feature (42)..(42): n equals a,t,g, or c
  misc_feature (46)..(46): n equals a,t,g, or c
  misc_feature (65)..(65): n equals a,t,g, or c
  misc_feature (81)..(81): n equals a,t,g, or c
  misc_feature (85)..(85): n equals a,t,g, or c
  misc_feature (89)..(89): n equals a,t,g, or c
  misc_feature (92)..(92): n equals a,t,g, or c
  misc_feature (95)..(96): n equals a,t,g, or c
  misc_feature (109)..(109): n equals a,t,g, or c
  misc_feature (111)..(111): n equals a,t,g, or c
  misc_feature (115)..(115): n equals a,t,g, or c
  misc_feature (117)..(117): n equals a,t,g, or c
  misc_feature (126)..(126): n equals a,t,g, or c
  misc_feature (130)..(130): n equals a,t,g, or c
  misc_feature (134)..(135): n equals a,t,g, or c
  misc_feature (140)..(140): n equals a,t,g, or c
  misc_feature (142)..(142): n equals a,t,g, or c
  misc_feature (146)..(146): n equals a,t,g, or c
  misc_feature (155)..(155): n equals a,t,g, or c
  misc_feature (163)..(163): n equals a,t,g, or c
  misc_feature (166)..(166): n equals a,t,g, or c
  misc_feature (173)..(173): n equals a,t,g, or c
  misc_feature (177)..(178): n equals a,t,g, or c
  misc_feature (187)..(187): n equals a,t,g, or c
  misc_feature (189)..(189): n equals a,t,g, or c
  misc_feature (199)..(199): n equals a,t,g, or c
  misc_feature (203)..(203): n equals a,t,g, or c
  misc_feature (207)..(207): n equals a,t,g, or c
  misc_feature (217)..(217): n equals a,t,g, or c
  misc_feature (221)..(221): n equals a,t,g, or c
  misc_feature (224)..(224): n equals a,t,g, or c
  misc_feature (249)..(249): n equals a,t,g, or c
  misc_feature (276)..(276): n equals a,t,g, or c
  misc_feature (278)..(278): n equals a,t,g, or c
  misc_feature (293)..(293): n equals a,t,g, or c
  misc_feature (338)..(338): n equals a,t,g, or c
  misc_feature (345)..(345): n equals a,t,g, or c
  misc_feature (370)..(370): n equals a,t,g, or c
  misc_feature (374)..(374): n equals a,t,g, or c
  misc_feature (421)..(421): n equals a,t,g, or c
  misc_feature (435)..(435): n equals a,t,g, or c
  misc_feature (445)..(445): n equals a,t,g, or c
  misc_feature (471)..(471): n equals a,t,g, or c
  misc_feature (474)..(474): n equals a,t,g, or c
  misc_feature (495)..(495): n equals a,t,g, or c
  misc_feature (501)..(501): n equals a,t,g, or c
  misc_feature (513)..(513): n equals a,t,g, or c
  misc_feature (516)..(516): n equals a,t,g, or c
  misc_feature (530)..(530): n equals a,t,g, or c
  misc_feature (571)..(571): n equals a,t,g, or c
  misc_feature (577)..(577): n equals a,t,g, or c
gcagantcttcattgaggattgnnatagccatgatttcaganatancaagcttttgcttgacagnatatgggtgggatttngcgnaaanccnatnntgatgaatctganantaangntgataaaanaagngagnngtgtnantctnactccttangagcccanaanttaccancatnncttaaggantnacagggaagnggtntacncaatactccncttnctncagtattgtcccctctcactttaanatatattaattatacaggttgggctananaaatcagctgctatncgggttgattattattagctatttctaatcctgttccttatttgncttctantccccttaatctaatctacaagctntgtncatgcagatggagtatccttatccctctcttccccttcccttatatnttgcggctatgggntaggagaaangtgcacaacccaccaccccctttacncgngcattaaaatttcttattaancctttnccccgttcccanttnttgccactttcatntacctttctggcaaaaaggagcctttagctctctgagaccntaaaan

SEQ ID NO: 1061 - DNA, 542 bp, Homo sapiens
  misc_feature (263)..(263): n equals a,t,g, or c
  misc_feature (284)..(284): n equals a,t,g, or c
  misc_feature (289)..(289): n equals a,t,g, or c
  misc_feature (331)..(331): n equals a,t,g, or c
  misc_feature (347)..(347): n equals a,t,g, or c
  misc_feature (363)..(363): n equals a,t,g, or c
  misc_feature (397)..(397): n equals a,t,g, or c
  misc_feature (406)..(407): n equals a,t,g, or c
  misc_feature (433)..(433): n equals a,t,g, or c
  misc_feature (470)..(470): n equals a,t,g, or c
  misc_feature (496)..(496): n equals a,t,g, or c
  misc_feature (508)..(508): n equals a,t,g, or c
  misc_feature (511)..(511): n equals a,t,g, or c
  misc_feature (526)..(526): n equals a,t,g, or c
aaaggtctcatcctggagtttgaggaaaagaacaggggcagctgaagttatcaagggaatttttgagcctctgcttagtgaaacacaaaggaacaaagcagctataaactaaatagaatgcaactatctgcttttcttatgctgaccactggagtccatggtggcaagtagagagctgctctaggttcttgaggtttggttttcattattaatttttagggtatgggcactgtgcaaagactccatagctgtgcctaggagtntagggaaaagtgacagagggnttggntttttttacctttagtttcagccaagtcatttttcaagtccngaggaatgacatcatnttcaggttaaaattantgagggacattaggacaaacccaactaagtgganttttaggcnngtaggcctttttaagggaaccattantattaacttctgttaggggtttaaaggactttaggcntacccggtattattgggaagggcccnggtgtttacccngtnctgaaatgacttttnccaccatggtttaaaa

SEQ ID NO: 1062 - DNA, 439 bp, Homo sapiens
  misc_feature (8)..(8): n equals a,t,g, or c
  misc_feature (325)..(325): n equals a,t,g, or c
  misc_feature (330)..(330): n equals a,t,g, or c
  misc_feature (333)..(333): n equals a,t,g, or c
  misc_feature (338)..(338): n equals a,t,g, or c
  misc_feature (349)..(349): n equals a,t,g, or c
  misc_feature (373)..(373): n equals a,t,g, or c
  misc_feature (375)..(375): n equals a,t,g, or c
  misc_feature (386)..(386): n equals a,t,g, or c
  misc_feature (395)..(395): n equals a,t,g, or c
ggcagagnaagaaactcatgtcaggagtggagaattctggaaaggtgaacatttggaaatcaaggtagaaaaatatccctagggcctagctgaggagtctgtatgttgttgggttttgatagtaaccagtccaagattttgttattagacgtgggtttctggaatagacaggcatttctgaacagacatgacaggatcaaaacaatgtttgaggcaaactgcccttcatctactgtgggtatgttgggggatgatgggatatagtggaaggtaatgggtgctcatacagcatctaggcttaaggtgatttcactactatatattnaactnggntatcntttattttttnaattttggaatctggagctcaagntnggcccgcacancccaggggnggagggaccatgccaccaaattaccccaatttaatttagggggc

SEQ ID NO: 1063 - DNA, 544 bp, Homo sapiens
  misc_feature (203)..(203): n equals a,t,g, or c
  misc_feature (426)..(426): n equals a,t,g, or c
  misc_feature (441)..(441): n equals a,t,g, or c
  misc_feature (498)..(498): n equals a,t,g, or c
  misc_feature (537)..(537): n equals a,t,g, or c
ggaaactacagtcgtcgggaaggaacaagaggctccagttggagtgctcagaatactcctcgaggaaattacaatgaaagtcgtggaggccagagcaattttaacagaggccctcttccaccattacgaccccttagttctacaggttaccgcccaagtcctcgggaccgtgcttctagaggtcgtgggggacttggaccttnctgggctagtgcaaatagcggcagtggaggctcaagaggaaagtttgttagtggaggcagtggtagaggtcgtcatgtacgctcctttacacgataaaaatccttttgggaacatcttaactgtatatgaacatttcacgaggacaataaaaataagacattgaaggaccaatttagacttagcagttatctggagacatctgagagaatatttttatctgangaaagcagaatttgnttgatacctaacaagatttcaataaaaatccaaactttgtatgtaaaaaaaaaaatnaaaactcgaggggggcccggtacccaattcgcctatagnggtcgta

SEQ ID NO: 1064 - DNA, 310 bp, Homo sapiens
  misc_feature (282)..(282): n equals a,t,g, or c
  misc_feature (299)..(299): n equals a,t,g, or c
  misc_feature (309)..(309): n equals a,t,g, or c
ctccaccttactaccagacaaccttagccaaaccatttacccaaataaagtataggcgatagaaattgaaacctggcgcaatagatatagtaccgcaagggaaagatgaaaaattatagccaagcataatatagcaaggactaacccctataccttctgcataatgaattaactagaaataactttgcaaggagagccaaagctaagacccccgaaaccagacgagctacctaagaacagctaaaagagcacacccgtctatgtagcaaaatagtggggagntttataggtagaggcgnccaaacctanc

SEQ ID NO: 1065 - DNA, 623 bp, Homo sapiens
  misc_feature (2)..(2): n equals a,t,g, or c
  misc_feature (20)..(21): n equals a,t,g, or c
  misc_feature (31)..(31): n equals a,t,g, or c
  misc_feature (70)..(70): n equals a,t,g, or c
  misc_feature (466)..(466): n equals a,t,g, or c
  misc_feature (471)..(471): n equals a,t,g, or c
  misc_feature (499)..(499): n equals a,t,g, or c
  misc_feature (503)..(503): n equals a,t,g, or c
  misc_feature (521)..(521): n equals a,t,g, or c
  misc_feature (544)..(544): n equals a,t,g, or c
  misc_feature (555)..(555): n equals a,t,g, or c
  misc_feature (579)..(579): n equals a,t,g, or c
  misc_feature (608)..(609): n equals a,t,g, or c
cnttacatcgaggtgacatnngctaacctgncttgcgtctgcaggtcgacactagtaagatccttctccnttcggcacgagcgccaccggggggtcctcggatctggcccaggtgaggaattttaaattggaacaagagcaagaaaaaaacaaaatcttgtcagaagcactggagacgctggccactgaacatcatgaattagagcagtctctggtgaaaggctctccacccgccagcatccttagcgaggacgagttctatgatgcgctgtcagattccgagtccgaaaggtccctgagtagattggaagcagtgacagcacgctcctttgaagaggaaggagagcatttgggcagtagaaaacacagaatgtccgaagaaaaagactgtggtggcggagatgctctctccaatggcattcaagaaacacagaacaagtttgccttctcctatgttttccagaantgganttcagtatctggagcatcctcagaaaantgtntttggattggaacttatnccaagttcacgttgccatttatnatttaatgagncctttgaggtttccctacaagcgnctaactgaatacatggggcatacttaccnnaatccacaaggcca

SEQ ID NO: 1066 - DNA, 281 bp, Homo sapiens
  misc_feature (84)..(84): n equals a,t,g, or c
  misc_feature (188)..(188): n equals a,t,g, or c
  misc_feature (227)..(227): n equals a,t,g, or c
  misc_feature (276)..(276): n equals a,t,g, or c
  misc_feature (279)..(279): n equals a,t,g, or c
  misc_feature (281)..(281): n equals a,t,g, or c
aagctatcgggcccataccccgaaaatgttggttatacccttcccgtactaattaatcccctggcccaacccgtcatctactcncccatctttgcaggcacactcatcacagcgctaagctcgcactgattttttacctgagtaggcctagaaataaacatactagcttttattccagttctaaccanaaaaataaaccctcgttccacagaagctgccatcaagtntttcctcacgcaagcaaccgcatccataatccttctaatagctatcctnttnan

SEQ ID NO: 1067 - DNA, 605 bp, Homo sapiens
  misc_feature (480)..(480): n equals a,t,g, or c
  misc_feature (503)..(503): n equals a,t,g, or c
  misc_feature (566)..(566): n equals a,t,g, or c
  misc_feature (579)..(579): n equals a,t,g, or c
  misc_feature (589)..(589): n equals a,t,g, or c
  misc_feature (600)..(600): n equals a,t,g, or c
  misc_feature (603)..(603): n equals a,t,g, or c
gcgttcgttgggcggtgctggtttttcgctcgtcgactgcggctcttcctcgggcagcggaagcggcgcggcggtcggagaagtggcctaaaacttcggcgttgggtgaaagaaaatggcccgaaccaagcagactgctcgtaagtccaccggtgggaaagccccccgcaaacagctggccacgaaagccgccaggaaaagcgctccctctaccggcggggtgaagaagcctcatcgctacaggtaggtcgggcgggggaacaatggcccggcggtggccggctttgtgcggcagcgtccgctcactcctcccctgctcgctgcaggcccgggaccgtggcgcttcgagagattcgtcgttatcagaagtcgaccgagctgctcatccggaagctgcccttccagaggttggtgagggagatcgcgcaggatttcaaaaccgacctgaggtttcagagcgcaagcatcggtgcgctgcangaggctagcgaaccgtacctggnggggtctgttccaagataccaacctgtgtgccatccaccctaagagagtcaccatcatgcccnaagacattccaancttggcttcngcggatcccgncanag

SEQ ID NO: 1068 - DNA, 360 bp, Homo sapiens
  misc_feature (302)..(302): n equals a,t,g, or c
  misc_feature (314)..(314): n equals a,t,g, or c
  misc_feature (335)..(335): n equals a,t,g, or c
  misc_feature (342)..(342): n equals a,t,g, or c
  misc_feature (359)..(359): n equals a,t,g, or c
ctcctcccgcccacgccccgctccccgcccccggagccccgcggacgctacgccgcgacgagtaggagggccgctgcggtgagccttgaagcctagggcgcgggcccgggtggagccgccgcaggtgcagatcttggtggtagtagcaaatattcaaacgagaactttgaaggccgaagtggagaagggttccatgtgaacagcagttgaacatgggtcagtcggtcctgagagatgggcgagcgccgttccgaagggacgggcgatggcctccgttgccctcggccgattcgaaaagggantcgttcagattncccgaatccggagtggcgganatgggcncccgcgaaggttccaant

SEQ ID NO: 1069 - DNA, 349 bp, Homo sapiens
  misc_feature (115)..(115): n equals a,t,g, or c
  misc_feature (261)..(261): n equals a,t,g, or c
  misc_feature (278)..(278): n equals a,t,g, or c
  misc_feature (295)..(295): n equals a,t,g, or c
  misc_feature (298)..(298): n equals a,t,g, or c
  misc_feature (326)..(326): n equals a,t,g, or c
ggacgccgacgtgcagttcctggcctcggtgctgcccccagacacggatcctgcgttcttcgagcaccttcgggccctcgactgctccgaggtgacggtgcgagccctgcccganggctccctcgccttccccggagtgccgctcctgcaggtgtccgggccgctcctggtggtgcagctgctggagacaccgctgctctgcctggtcagctacgccagcctggtggccaccaacgcagcgcggctttcgcttgatcgcanggccagagaagcggctnctagagattgggctgangcnggctcaagggcccgattgggggcttaanagcttcaactaaaactaacttgg

SEQ ID NO: 1070 - DNA, 430 bp, Homo sapiens
  misc_feature (371)..(371): n equals a,t,g, or c
  misc_feature (387)..(387): n equals a,t,g, or c
cccacgcgtccgcagatcagacgtggcgacccgctgaatttaagcatattagtcagcggaggagaagaaactaaccaggattccctcagtaacggcgagtgaacagggaagagcccagcgccgaatccccgccccgcggcggggcgcgggacatgtggcgtacggaagacccgctccccggcgccgctcgtggggggcccaagtccttctgatcgaggcccagcccgtggacggtgtgaggccggtagcggcccccggcgcgccgggcccgggtcttcccggagtcgggttgcttgggaatgcagcccaaagcgggtggtaaactccatctaaggctaaataccggcacgagaccgatagtcaacaagtancgtaaagggaaagttnaaaagaacttttaaagagagattcaagaaggcgtgaaaccgtt

SEQ ID NO: 1071 - DNA, 648 bp, Homo sapiens
  misc_feature (321)..(321): n equals a,t,g, or c
  misc_feature (332)..(332): n equals a,t,g, or c
  misc_feature (484)..(484): n equals a,t,g, or c
  misc_feature (588)..(588): n equals a,t,g, or c
  misc_feature (601)..(601): n equals a,t,g, or c
  misc_feature (607)..(607): n equals a,t,g, or c
  misc_feature (615)..(615): n equals a,t,g, or c
  misc_feature (638)..(638): n equals a,t,g, or c
gagcagtcctacttctcctatctctcccagtcctagctgctggcatcactatactactaacagaccgcaacctcaacaccaccttcttcgaccccgccggaggaggagaccccattctataccaacacctattctgatttttcggtcaccctgaagtttatattcttatcctaccaggcttcggaataatctcccatattgtaacttactactccggaaaaaaagaaccatttggatacataggtatggtctgagctatgatatcaattggcttcctagggtttatcgtgtgagcacaccacatatttacagtaggaatanacgtagacacncgagcatatttcacctccgctaccataatcatcgctatccccaccggcgtcaaagtatttagctgactcgccacactccacgggaagcaatatgaaatgatctgctgcagtgctctgagccctaagattcatctttcttttcaccgtaggtngcctgactggcattgtattagcaaactcatcactagacatcgtactacacgacacgtactacgttgttgcccacttccactatgttctatcaataggagctgtntttggcatcatanggaagnttcattcnctgatttccctatctcaggctanccctagaaca

SEQ ID NO: 1072 - DNA, 445 bp, Homo sapiens
  misc_feature (315)..(315): n equals a,t,g, or c
  misc_feature (378)..(378): n equals a,t,g, or c
  misc_feature (390)..(390): n equals a,t,g, or c
  misc_feature (416)..(416): n equals a,t,g, or c
  misc_feature (443)..(443): n equals a,t,g, or c
  misc_feature (445)..(445): n equals a,t,g, or c
cagcactggagttggtgagcatgtgctctctcttgagattaggagcttccttactgctcctctgggtgatccaagtgtagtgggaccccctactagggtcaggaagtggacactaacatctgtgcaggtgttgacttgaaaaataaagtgttgattggctagaactgctgcctccctgactgtgagctgccttccacaccctgcactgcactgtgttctctcctcacccttaacctgcttcactccagtctgttctggctgtttattaccttgttgcaaaacagggccgaagcaaggattaccttgacaaccctngcttctccttagccatcttccttgacagtgtgatctgtttagtgagatttacatgtgtgaatnaagtatatgcangaggaaaaaaaaaaaaaaaaactcgngggggggcccggaacccattccccccnan

SEQ ID NO: 1073 - DNA, 679 bp, Homo sapiens
  misc_feature (393)..(393): n equals a,t,g, or c
  misc_feature (430)..(430): n equals a,t,g, or c
  misc_feature (437)..(437): n equals a,t,g, or c
  misc_feature (482)..(482): n equals a,t,g, or c
  misc_feature (523)..(523): n equals a,t,g, or c
  misc_feature (543)..(543): n equals a,t,g, or c
  misc_feature (565)..(565): n equals a,t,g, or c
  misc_feature (576)..(576): n equals a,t,g, or c
  misc_feature (584)..(584): n equals a,t,g, or c
  misc_feature (594)..(594): n equals a,t,g, or c
  misc_feature (618)..(618): n equals a,t,g, or c
  misc_feature (640)..(640): n equals a,t,g, or c
  misc_feature (645)..(645): n equals a,t,g, or c
gccaagggcaaggcaaagcactaaagggccagtaccagtgagtggccccacctgtgtccccgatgctgccgtcacctggtcctccgcctactgtccctctcagtgccttctctcagctcccaggccaacagtagccaaacccctagagacagtgatgcctgcccgcaccctggcctggtccctggtccttcactggcgccttctcggagctggcccagggggcctggagcatggacagtgtgggcgctctccctaccttgcctccttttttcttaaagcaaagtcacttctccatcacaaccagatttgaggctggttttgatggctgggtccttgggcctggccaagtcttcctcttacctctggatctagaagggaccataagaggagtangccctggttcctgctgtcctggtggctgggccagcangggcctnactcttgaagtcaggactgggtctgacctggtgggacacctgcanaagatgctctttccaagacggatgggccctgtgtctcagantggggttggggacagcttancacagttacacctactttccanattgactgggnggattgantgatggaagntttaaggccgggatgacttttaangtatactggaataagcattttntccgnaaaaaaaaaaaaaaaaaaaaaggggccttttaaa

SEQ ID NO: 1074 - DNA, 821 bp, Homo sapiens
  misc_feature (28)..(28): n equals a,t,g, or c
  misc_feature (199)..(199): n equals a,t,g, or c
  misc_feature (797)..(797): n equals a,t,g, or c
aaggaaagggaaaaacttctactatagntaaagctggtacgcctgcaggtaccggtccggaattcccgggtcgacccacgcgtccgagagcatccacaggtcctgggatgccattaatcgactctcaaatactggcagtggtttgcagtggcttactggagcccttcacttatgcagcccattaacttctcaggacatncaacatttgaaagactggatctctgaaacctgggtgaatctggcaatggtggactatccttatgcctctaactttttacagcctttgcctgcttggcctatcaaggtagtgtgccagtatttgaaaaatcccaatgtatctgattcactgctgctgcagaatattttccaagctctgaatgtatattacaattattcgggccaggtgaaatgcctgaatatttcagagacagcaactagcagtctgggaacactgggttggagctatcaggcctgcacagaagtagtcatgcccttttgtactaatggtgtcgatgacatgtttgaacctcactcatggaacttaaaggaactttctgatgactgttttcaacagtggggtgtgagaccaaggccctcctggatcactactatgtatggaggcaaaaacattagttcacacacaaacattggtttcagcaatggtgaactagacccctggtcaggaggtggagtaactaaggatatcacagacactcttgggtgcagtcaccatctcaaaaggggcccacccacttaaatcttcggacccaagaaatgccctttgggaatcctaaggncttggggcttggttagccccgttt

SEQ ID NO: 1075 - DNA, 509 bp, Homo sapiens
  misc_feature (321)..(321): n equals a,t,g, or c
  misc_feature (345)..(345): n equals a,t,g, or c
  misc_feature (426)..(426): n equals a,t,g, or c
  misc_feature (428)..(428): n equals a,t,g, or c
  misc_feature (490)..(490): n equals a,t,g, or c
  misc_feature (500)..(501): n equals a,t,g, or c
gcccacgcgtccgcccacgcgtccgcccacgcgtccggttcgccgcgggctacaacgtcaaattcgatatgttcagcaagatctgcgtgaacggggacgacgcccacccgctgtggaagtggatgaagatccaacccaagggcaagggcatcctgggaaatgccatcaagtggaacttcaccaagttcctcatcgacaagaacggctgcgtggtgaagcgctacggacccatggaggagcccctggtgatagagaaggacctgccccactatttctagctccacaagtgtgtggccccgcccgagcccctgccacgccctnggagcctttcaccgggctttttanagggcttgcttgaaacttgttggggggcaaaccccaaaatcagggggaccccgccgaagaaggtccatggctgtgggttgntnggggccccccctggtacttgggaaaaccaccattaaaaaaaaaaaaaaaaaagggggccttnaaacaattannccggtggg

SEQ ID NO: 1076 - DNA, 315 bp, Homo sapiens
  misc_feature (4)..(4): n equals a,t,g, or c
  misc_feature (48)..(49): n equals a,t,g, or c
  misc_feature (59)..(59): n equals a,t,g, or c
  misc_feature (81)..(81): n equals a,t,g, or c
  misc_feature (128)..(128): n equals a,t,g, or c
  misc_feature (165)..(166): n equals a,t,g, or c
  misc_feature (201)..(201): n equals a,t,g, or c
  misc_feature (205)..(206): n equals a,t,g, or c
  misc_feature (235)..(235): n equals a,t,g, or c
  misc_feature (274)..(274): n equals a,t,g, or c
  misc_feature (281)..(281): n equals a,t,g, or c
  misc_feature (306)..(306): n equals a,t,g, or c
  misc_feature (315)..(315): n equals a,t,g, or c
aagnatggagtgtacaaccccatcaaaatcttcggcgtgacgaccctnnacatcgtcanagccaacacctttgttgcacanctgaagggtttggatccagctcgagtcaacgtccctgtcattggtgnccatgctgggaagaccatcatccccctgatctctcanngcacccccaaggtggactttccccaggaccagctnacannactcactgggccggatccaggaggccggnacggaaagtggtcaaggctaaagccggagcatgctctgncaccctnttcatggggtaagcccggggccccntttggtttn

SEQ ID NO: 1077 - DNA, 640 bp, Homo sapiens
  misc_feature (394)..(394): n equals a,t,g, or c
  misc_feature (406)..(406): n equals a,t,g, or c
  misc_feature (458)..(458): n equals a,t,g, or c
  misc_feature (517)..(517): n equals a,t,g, or c
  misc_feature (583)..(583): n equals a,t,g, or c
  misc_feature (615)..(616): n equals a,t,g, or c
  misc_feature (629)..(629): n equals a,t,g, or c
  misc_feature (632)..(632): n equals a,t,g, or c
ggccattttaaaaacagcacaaaggaacaaggaaactaaatattattttgagccatcattacttagtgaaatacaaacatccaaatagaaacgattgttgttccaccagaagattagaagttaaattatttccacacaataggaatttcacttcgtgtcatcggggatgtagtaggagttgcattatttgtcaaaccaaatagagatgcgtgggctgactgctgaaatacaaaagaattgaaccttatctgaaggcgttttctaagtggcccctcccatagaagccgggaagttgtccacccctagcagaagccacattaatatttacaaaatggttataaatccttgaagacatttttgcccattttgtataagaaacaggagtaaacaaggngtttatacttgntatggttcattaatgaaatattattactttacatcttggggaatgtttggtntctttagaaatgaactaatgatcactacaaagggagaattcatgacagcattttctaanagaaaaagcttaggtccccgtcttccaatgatgggttctttttctacacccttactttttcatagntcaattctttttaccaactttctcttgggggnntttctttgaatgncangtttcttt

SEQ ID NO: 1078 - DNA, 705 bp, Homo sapiens
  misc_feature (508)..(508): n equals a,t,g, or c
  misc_feature (549)..(549): n equals a,t,g, or c
  misc_feature (586)..(586): n equals a,t,g, or c
  misc_feature (597)..(597): n equals a,t,g, or c
  misc_feature (599)..(599): n equals a,t,g, or c
  misc_feature (638)..(638): n equals a,t,g, or c
  misc_feature (669)..(669): n equals a,t,g, or c
  misc_feature (691)..(691): n equals a,t,g, or c
  misc_feature (701)..(701): n equals a,t,g, or c
  misc_feature (703)..(703): n equals a,t,g, or c
gcggacgcgtgggctgtactggacacacgtgaaggagcagttggaaactctccggaagctgcagaggagggaggtggctgagcagtggctgcggcctgcagaggaggaccacctggaggattccctggaagacctgggggcagcagatgactttctagagcctgaggagtacatggagcccgagggagcagaccccagggaagccgctgaccttgacgcagtgccgatgtccctgagctacgaggagctggttcgaaggaatgtggagctcttcatcgccacctcccagaagtttgtccaggagacagagctgagccagcgcatcagggactgggaggacacagtgcagcctctgctccaggagcaggagcagcatgtgccctttgacatccacacctatggggaccagctggtctcacggttcccccagctcaatgagtggtgtccctttgcggagctggtggctggccagcccggccttcgaggtgtgtcgttccatgctggcctncctgcagctggccaatgactacacagtgggagataacccancagcccgggctggaaaatggccgtggacaccattgtnccttaaactgntnacgcaccaacgaacgcacaacgctttcagactaccttgnccctcatggccaaccctgatggggaaacacnaagcagggttgggggaatgtgnactgaagaancntg

SEQ ID NO: 1079 - DNA, 701 bp, Homo sapiens
  misc_feature (15)..(15): n equals a,t,g, or c
  misc_feature (374)..(374): n equals a,t,g, or c
  misc_feature (423)..(423): n equals a,t,g, or c
  misc_feature (428)..(428): n equals a,t,g, or c
  misc_feature (459)..(459): n equals a,t,g, or c
  misc_feature (507)..(507): n equals a,t,g, or c
  misc_feature (541)..(541): n equals a,t,g, or c
  misc_feature (546)..(546): n equals a,t,g, or c
  misc_feature (564)..(564): n equals a,t,g, or c
  misc_feature (573)..(573): n equals a,t,g, or c
  misc_feature (582)..(582): n equals a,t,g, or c
  misc_feature (587)..(587): n equals a,t,g, or c
  misc_feature (594)..(595): n equals a,t,g, or c
  misc_feature (598)..(598): n equals a,t,g, or c
  misc_feature (624)..(624): n equals a,t,g, or c
  misc_feature (633)..(633): n equals a,t,g, or c
  misc_feature (642)..(642): n equals a,t,g, or c
  misc_feature (659)..(659): n equals a,t,g, or c
  misc_feature (677)..(677): n equals a,t,g, or c
gcgggtttgccgccngaacacaggtgtcgtgaaaactacccctaaaagccaaaatgggaaaggaaaagactcatatcaacattgtcgtcattggacaccgtagattcgggcaagtccaccactactggccatctgatctataaatgcggtggcatcgacaaaagaaccattgaaaaatttgagaaggaggctgctgagatgggaaagggctccttcaagtatgcctgggtcttggataaactgaaagctgagcgtgaacgtggtatcaccattgatatctccttgtggaaatttgagaccagcaagtactatgtgactatcattgatgccccaggacacagagactttatcaaaacatgatacagggacatctnagctgactgtgctgcctgattgttgctgtgtgttgtgaatttgaactgnatctncaagaatggcagacccgagagatgcctttgnttacacactgggtgtaaacactaattgcgtgtacaaatggattcatgncccctcagcagaaagattagaaatgtagaagcanctacntagaaatgtcaccgccanacttggcanttgtgatgncactntgacaanntcntctgtaagagaagacctagtgatcangaccctgtngttgtgtcnccatgcatgagctgctnttcgagtcaatgggtgcncttgcaggatggtaacgtggcttt

SEQ ID NO: 1080 - DNA, 737 bp, Homo sapiens
  misc_feature (342)..(342): n equals a,t,g, or c
  misc_feature (465)..(465): n equals a,t,g, or c
  misc_feature (522)..(522): n equals a,t,g, or c
  misc_feature (539)..(539): n equals a,t,g, or c
  misc_feature (555)..(555): n equals a,t,g, or c
  misc_feature (574)..(574): n equals a,t,g, or c
  misc_feature (596)..(596): n equals a,t,g, or c
  misc_feature (667)..(667): n equals a,t,g, or c
  misc_feature (686)..(686): n equals a,t,g, or c
  misc_feature (723)..(723): n equals a,t,g, or c
  misc_feature (727)..(727): n equals a,t,g, or c
  misc_feature (732)..(732): n equals a,t,g, or c
gcggacgcgtggggcagccatcaggtaagccaagatgggtgcatacaagtacatccaggagctatggagaaagaagcagtctgatgtcatgcgctttcttctgagggtccgctgctggcagtaccgccagctctctgctctccacagggctccccgccccacccggcctgataaagcgcgccgactgggctacaaggccaagcaaggttacgttatatataggattcgtgttcgccgtggtggccgaaaacgcccagttcctaagggtgcaacttacggcaagcctgtccatcatggtgttaaccagctaaagtttgctcgaagccttcagtcccgttgcanaggaaccgaactggacgccacttggggcttttaagagtcctgaattcttactggggttggtgaagattccacatacaaattttttgaggttatcctcattgatccattccataaagctatcanaagaaatcctgacacccagtggatcaccaaaccagtccacaagcacagggaagatcntgggctgacatctgcangccgaaagaccctggncttggaaagggccacaagnttcaccacactattggtgggtnttcgccggcacttggaaaaagcgcaatacttttcagttcaccggtaccgttaaataataaagttggaaaantatacttaataacaattangacagtcaaaaaaaaaaaaagggggccctttaaaganccantttanaccgg

SEQ ID NO: 1081 - DNA, 662 bp, Homo sapiens
  misc_feature (19)..(19): n equals a,t,g, or c
  misc_feature (24)..(24): n equals a,t,g, or c
  misc_feature (26)..(26): n equals a,t,g, or c
  misc_feature (36)..(36): n equals a,t,g, or c
  misc_feature (65)..(65): n equals a,t,g, or c
  misc_feature (173)..(173): n equals a,t,g, or c
  misc_feature (185)..(185): n equals a,t,g, or c
  misc_feature (191)..(191): n equals a,t,g, or c
  misc_feature (262)..(262): n equals a,t,g, or c
  misc_feature (270)..(270): n equals a,t,g, or c
  misc_feature (284)..(284): n equals a,t,g, or c
  misc_feature (368)..(368): n equals a,t,g, or c
  misc_feature (375)..(375): n equals a,t,g, or c
  misc_feature (387)..(387): n equals a,t,g, or c
  misc_feature (404)..(404): n equals a,t,g, or c
  misc_feature (454)..(454): n equals a,t,g, or c
  misc_feature (470)..(470): n equals a,t,g, or c
  misc_feature (476)..(476): n equals a,t,g, or c
  misc_feature (483)..(484): n equals a,t,g, or c
  misc_feature (494)..(494): n equals a,t,g, or c
  misc_feature (501)..(501): n equals a,t,g, or c
  misc_feature (517)..(519): n equals a,t,g, or c
  misc_feature (524)..(524): n equals a,t,g, or c
  misc_feature (538)..(538): n equals a,t,g, or c
  misc_feature (542)..(542): n equals a,t,g, or c
  misc_feature (547)..(548): n equals a,t,g, or c
  misc_feature (558)..(559): n equals a,t,g, or c
  misc_feature (575)..(575): n equals a,t,g, or c
  misc_feature (582)..(582): n equals a,t,g, or c
  misc_feature (612)..(612): n equals a,t,g, or c
  misc_feature (647)..(647): n equals a,t,g, or c
  misc_feature (650)..(650): n equals a,t,g, or c
aaaagggatctttaaggcnactcncnaagctgtacncctgcaggtccgtccggattcccggtcgnccacgcgtccgacacatggcggtgaatcttaaggttaaattttaatatgaaagatcctcatgaattaaatagttgatgcaatttttaacgttaattgatataataaanaacacaacaaanttaggnttgtaaaactgctttttcattacgtgggttttgaaatctagccccagacatactgtgttgagagatcttanagggaggnagtaggttttgaanaggttgatggtggtggggagggaaggcctcctgaattgagtttgatgcaaagctttttagccatgaagaatctttcagtcatangactaanaattaaattttnagtatttaaaaagacanagtattttgtccatttgagattctgcactccatgaaaagttccttggacnctggggccaaaactgntgattntcttaanntgcggttgtnatatatngaattgttccaagttnnnaagtntgctcacactttcntgantaaanngggccttgcnnttaatgaaaaaggatnttaatcnctttgtaataagtaaagcccaattggattncccgcctccatttgtcttggagataatgtacatgngangttgctaaaagg

SEQ ID NO: 1082 - DNA, 628 bp, Homo sapiens
  misc_feature (3)..(3): n equals a,t,g, or c
  misc_feature (12)..(12): n equals a,t,g, or c
  misc_feature (29)..(29): n equals a,t,g, or c
  misc_feature (111)..(111): n equals a,t,g, or c
  misc_feature (383)..(383): n equals a,t,g, or c
  misc_feature (404)..(404): n equals a,t,g, or c
  misc_feature (464)..(464): n equals a,t,g, or c
  misc_feature (474)..(474): n equals a,t,g, or c
  misc_feature (519)..(519): n equals a,t,g, or c
  misc_feature (526)..(526): n equals a,t,g, or c
  misc_feature (548)..(548): n equals a,t,g, or c
  misc_feature (579)..(579): n equals a,t,g, or c
  misc_feature (599)..(599): n equals a,t,g, or c
  misc_feature (606)..(606): n equals a,t,g, or c
  misc_feature (619)..(619): n equals a,t,g, or c
atnctctatgtnagaaataacttccgggnaaagctgtttcgcctgcaggtaccggtccggaattcccgggtcgacccacgcgtccgcttagagtcttttgtgccataatgnagcagtatggagggaggattttgtggagaaatggggatagtcttcatgaccacaaataaataaaggaaaactaagctgcattgtgggttttgaaaaggttattatacttcttaacaattctttttttcagggacttttctagctgtatgactgttacttgaccttctttgaaaagcattcccaaaatgctctattttagatagattaacattaaccaacataatttttttagatcgagtagcataaattttaagtagcttagcgtggtcatntctttactgatttatttgggnttgctgagaaaggaagaggaagcaatcgaattgactattgaccaaattttggatcatggnaatatttagnggggatattaatagaaaaaaattgtctagtgagcaatgaacgtgntatgatncattatcctttcaagattgttnaataagaagagtgctttctttaaagtagtgngatgtaaggtctgtgatcantgagggnacctttttatgangctctttga

SEQ ID NO: 1083 - DNA, 526 bp, Homo sapiens
  misc_feature (202)..(202): n equals a,t,g, or c
  misc_feature (466)..(466): n equals a,t,g, or c
  misc_feature (486)..(487): n equals a,t,g, or c
  misc_feature (523)..(523): n equals a,t,g, or c
  misc_feature (525)..(525): n equals a,t,g, or c
ggttttttccccattgtatataaagtaccgcttaaaattgatataaattactgaggtttttaacatgtattctgttctttaagatccctgtaagaatgtttaaggtttttatttatttatatatattttttgagtctgttctttgtaagacatggttctggttgttcgctcatagcggagaggctggggctgcggttgtggntgtggccggcgtgggtggtggctgggaactgtggcccaggcttagcggccgctctagaggatccaagcttacgtacgcgtgcatgcgacgtcatagctcttctatagtgtcacctaaattcaattcactggccgtcgttttacaacgtcgtgactgggaaaaccctggcgttacccaacttaatcgccttgcagcacatccccctttcgccagctggcgtaatagcgaagaggcccgcaccgatcgcccttcccaacagttgcngcagtctgaatggcgaatgnnacgcgccctgtagcggcgcactaagcgcggctggtngng

SEQ ID NO: 1084 - DNA, 619 bp, Homo sapiens
  misc_feature (1)..(3): n equals a,t,g, or c
  misc_feature (6)..(6): n equals a,t,g, or c
  misc_feature (35)..(35): n equals a,t,g, or c
  misc_feature (252)..(252): n equals a,t,g, or c
  misc_feature (285)..(285): n equals a,t,g, or c
  misc_feature (395)..(395): n equals a,t,g, or c
  misc_feature (426)..(426): n equals a,t,g, or c
  misc_feature (466)..(466): n equals a,t,g, or c
  misc_feature (468)..(468): n equals a,t,g, or c
  misc_feature (494)..(494): n equals a,t,g, or c
  misc_feature (546)..(546): n equals a,t,g, or c
  misc_feature (565)..(565): n equals a,t,g, or c
  misc_feature (587)..(587): n equals a,t,g, or c
  misc_feature (612)..(612): n equals a,t,g, or c
  misc_feature (619)..(619): n equals a,t,g, or c
nnnagnttggatcccttggaacccctactcactanagggaaagctggtacgcctgcaggtaccggtccggaattcccgggtcgacccacgcgtccgcttaggtggcaccaatcttgacttccagatggaacagtacatctataaaaggaaaagtgatggcatctatatcataaatctcaagaggacctgggagaagcttctgctggcagctcgtgcaattgttgccattgaaaaccctgctgatgtcagtgntatatcctccaggaatactggccagagggctgngctgaagcttgctgctgcactggagccactccaattgctggccgcttcactcctggaaccttcactaaccagatccaggcagccttccgggagccacggcttcttgaggntactgaccccagggctgaccaccagcctctnacggaggcatcttatgttaacctacctaccattgcgctgngnaacacagattctcctctgcgctatgnggacattgccatcccatgcaacaaacaagggagctcactcagtgggtttaangtggcggatgcctgctcgngaaggtctgcgcaatgcgtggnaccatttcccgtgaacacccatggngagggcn

SEQ ID NO: 1085 - DNA, 607 bp, Homo sapiens
  misc_feature (334)..(334): n equals a,t,g, or c
  misc_feature (429)..(429): n equals a,t,g, or c
  misc_feature (494)..(494): n equals a,t,g, or c
  misc_feature (507)..(507): n equals a,t,g, or c
  misc_feature (523)..(523): n equals a,t,g, or c
  misc_feature (562)..(562): n equals a,t,g, or c
  misc_feature (566)..(566): n equals a,t,g, or c
  misc_feature (571)..(571): n equals a,t,g, or c
  misc_feature (591)..(591): n equals a,t,g, or c
gagagaggacaaaagaagtcttcacacgttgtggaactttcctgcaacttctggatgcagacaagcctcagagcagactgttctggctccagtgaatatcggctgccaagctgtgagcatccagggatccccgtctgcctcactttacactgtgaaaggtggtagggtgagtcccacttgagcgcttcctgatgaataaagcaggcacttgacctggctgtagcctaggtcttgagtgaaccccaaaaacttgaaaaaaaaaaaaaaaaaactcgagggggggcccggtacccaattcgccctatagtgagtcgtattacaattcactggccgncgttttacaacgtcgtgactgggaaaaccctggcgttacccaacttaatcgccttgcagcacatccccctttcgccagctggcgtaatagcgaanaggcccgcaccgatcgcccttcccaacagttgcgcagcctgaatggccgaatggcaaattgtaangcgctaatatttntggtaaacatttccgntaaaatttttgctaaatcagctcattttttaaccaatangccngaaancggaaaaatcccttataaancaaatcgaataagacc

SEQ ID NO: 1086 - DNA, 339 bp, Homo sapiens
  misc_feature (214)..(214): n equals a,t,g, or c
  misc_feature (288)..(288): n equals a,t,g, or c
  misc_feature (294)..(294): n equals a,t,g, or c
  misc_feature (319)..(319): n equals a,t,g, or c
  misc_feature (330)..(330): n equals a,t,g, or c
  misc_feature (336)..(336): n equals a,t,g, or c
gcctgtctgcagtcacatctttgtggggcctgctgacccacaagcttttgttctctcagtacttgttacccagcttctcaacatccagggcccaatttgccctgcctggagttccccctggctctaggacactctaacaagctctgtccacgggtctccccattcccaccaggccctgcacacacccactccgtaacctctcccctgtacctgngccaagcctaagcacttggcgatgcctcatgccccgaagggccctctctcagttctgggaggatgactccaagnccctgnacgccctgggacaccctttaacggntgctacccaangctggncca

SEQ ID NO: 1087 - DNA, 346 bp, Homo sapiens
  misc_feature (333)..(334): n equals a,t,g, or c
  misc_feature (336)..(336): n equals a,t,g, or c
  misc_feature (341)..(341): n equals a,t,g, or c
  misc_feature (346)..(346): n equals a,t,g, or c
gttctgggatgtctcttccccactcagtacttactgagattgcagaccttgaagctaatacattgccaagagaaaatctgatatgaaagaaaattgctaattatttactttatcttcatatacccaatatatggtagataaccactaacttttggttgaataatggatacatgcctacctttctgggatatttgtaaggtgctgtagtttttttaacatgctcctgaatctcctttattagttgttcttgatcatgtgacttgtaatcaggatttagaacgacaaaagcctttactacctaaaataaatatttgaaacaccaggaaaaaaaannanaatanaaaan

SEQ ID NO: 1088 - DNA, 450 bp, Homo sapiens
  misc_feature (251)..(251): n equals a,t,g, or c
  misc_feature (300)..(300): n equals a,t,g, or c
  misc_feature (374)..(374): n equals a,t,g, or c
  misc_feature (397)..(397): n equals a,t,g, or c
  misc_feature (442)..(442): n equals a,t,g, or c
  misc_feature (444)..(444): n equals a,t,g, or c
  misc_feature (446)..(446): n equals a,t,g, or c
ggggaaaagctccagtcttttgactctccagaaaggaaacggattaagtactccagggaaactgacagtgatcgtaaacttgttgataaagaagatatcgacactagcagcaaaggaggctgtgtccaacaggctactggctggaggaaagggacaggcctgggatatggccatcctggattggcttcatcagaggaggctgaaggccggatgaggggccccagtgttggagcctcaggaagaaccagcanaagacagtccaacgagacttatcgagatgcttttccgaagaagtcatgnttgctcgatataaagaactcgattaagaaaggagactagttccatgggatacaacctcctcttgctttgtttgnctctccttttcttttggtactgntcttgctgctagaacttttttaaataaaccttttttcaatgtgancnanccgc

SEQ ID NO: 1089 - DNA, 746 bp, Homo sapiens
  misc_feature (65)..(65): n equals a,t,g, or c
  misc_feature (516)..(516): n equals a,t,g, or c
  misc_feature (565)..(565): n equals a,t,g, or c
  misc_feature (579)..(579): n equals a,t,g, or c
  misc_feature (606)..(606): n equals a,t,g, or c
  misc_feature (608)..(608): n equals a,t,g, or c
  misc_feature (631)..(631): n equals a,t,g, or c
  misc_feature (668)..(668): n equals a,t,g, or c
  misc_feature (690)..(690): n equals a,t,g, or c
  misc_feature (702)..(702): n equals a,t,g, or c
  misc_feature (714)..(714): n equals a,t,g, or c
  misc_feature (734)..(734): n equals a,t,g, or c
gcttttttttcatcgaggcggccgagctggttggtggcggcggtcgtgcggacgcaaacatgcanatctttgtgaagaccctcactggcaaaaccatcacccttgaggtcgagcccagtgacaccattgagaatgtcaaagccaaaattcaagacaaggagggtatcccacctgaccagcagcgtctgatatttgccggcaaacagctggaggatggccgcactctctcagactacaacatccagaaagagtccaccctgcacctggtgttgcgcctgcgaggtggcattattgagccttctctccgccagcttgcccagaaatacaactgcgacaagatgatctgccgcaagtgctatgctcgccttcaccctcgtgctgtcaactgccgcaagaagaagtgtggtcacaccaacaacctgcgtcccaagaagaaggtcaaataaggtggttctttcttgaagggcagcctcctgcccaggccccgtggccctggagcctcaataaagtgtcccntttcattgactggagcaagcaaaaaaaaaaaaaaaaaagggccggccgnttctagaggatccnaagcttacgtacgcgtgcatgcgacgncntaagcttttttatagtggcaccnaaaattcaattcactggccgccgttttacaacggtgngggactggggaaaacccctggnggttaccccaancttaaatcggcnttgggagcaacatccccccnttttcgcccagg

SEQ ID NO: 1090 - DNA, 687 bp, Homo sapiens
  misc_feature (2)..(2): n equals a,t,g, or c
  misc_feature (13)..(13): n equals a,t,g, or c
  misc_feature (15)..(15): n equals a,t,g, or c
  misc_feature (131)..(131): n equals a,t,g, or c
  misc_feature (147)..(147): n equals a,t,g, or c
  misc_feature (156)..(156): n equals a,t,g, or c
  misc_feature (159)..(159): n equals a,t,g, or c
  misc_feature (169)..(169): n equals a,t,g, or c
  misc_feature (177)..(177): n equals a,t,g, or c
  misc_feature (180)..(181): n equals a,t,g, or c
  misc_feature (183)..(183): n equals a,t,g, or c
  misc_feature (185)..(185): n equals a,t,g, or c
  misc_feature (267)..(267): n equals a,t,g, or c
  misc_feature (274)..(274): n equals a,t,g, or c
  misc_feature (285)..(285): n equals a,t,g, or c
  misc_feature (291)..(291): n equals a,t,g, or c
  misc_feature (297)..(297): n equals a,t,g, or c
  misc_feature (310)..(310): n equals a,t,g, or c
  misc_feature (312)..(312): n equals a,t,g, or c
  misc_feature (326)..(326): n equals a,t,g, or c
  misc_feature (329)..(329): n equals a,t,g, or c
  misc_feature (333)..(333): n equals a,t,g, or c
  misc_feature (337)..(339): n equals a,t,g, or c
  misc_feature (344)..(344): n equals a,t,g, or c
  misc_feature (347)..(347): n equals a,t,g, or c
  misc_feature (350)..(350): n equals a,t,g, or c
  misc_feature (352)..(352): n equals a,t,g, or c
  misc_feature (354)..(354): n equals a,t,g, or c
  misc_feature (378)..(378): n equals a,t,g, or c
  misc_feature (384)..(385): n equals a,t,g, or c
  misc_feature (388)..(388): n equals a,t,g, or c
  misc_feature (393)..(393): n equals a,t,g, or c
  misc_feature (399)..(399): n equals a,t,g, or c
  misc_feature (416)..(416): n equals a,t,g, or c
  misc_feature (418)..(418): n equals a,t,g, or c
  misc_feature (420)..(420): n equals a,t,g, or c
  misc_feature (432)..(432): n equals a,t,g, or c
  misc_feature (437)..(437): n equals a,t,g, or c
  misc_feature (448)..(448): n equals a,t,g, or c
  misc_feature (456)..(456): n equals a,t,g, or c
  misc_feature (462)..(462): n equals a,t,g, or c
  misc_feature (464)..(464): n equals a,t,g, or c
  misc_feature (467)..(467): n equals a,t,g, or c
  misc_feature (471)..(471): n equals a,t,g, or c
  misc_feature (475)..(476): n equals a,t,g, or c
  misc_feature (506)..(506): n equals a,t,g, or c
  misc_feature (515)..(515): n equals a,t,g, or c
  misc_feature (539)..(539): n equals a,t,g, or c
  misc_feature (563)..(563): n equals a,t,g, or c
  misc_feature (571)..(572): n equals a,t,g, or c
  misc_feature (579)..(579): n equals a,t,g, or c
  misc_feature (617)..(617): n equals a,t,g, or c
  misc_feature (641)..(642): n equals a,t,g, or c
  misc_feature (644)..(645): n equals a,t,g, or c
  misc_feature (656)..(656): n equals a,t,g, or c
  misc_feature (676)..(676): n equals a,t,g, or c
  misc_feature (680)..(681): n equals a,t,g, or c
  misc_feature (683)..(684): n equals a,t,g, or c
gngaggaggcggncntggttactctggaggaagcagaggctatggaagtggtggacagggttatggaaaccagggcagtgggctatggcgggagtggcagctatgacagctataacaacggaagccgaagncgggttttgcggtggnaggggaagnaanttttgaaggnggggaaanttnnangnattttggaattacaacaatcagtcttcaaattttggacccatgaagggaggaaattttggaggcagaagctttggcccctantgcggtngaagccaatantttggnaaaacncgaaaccaaggtngntatttgcggttcangcnccgnaagnnnttttngcnctngnanaagattttaattaggaaacaaagnttaacnnganaaganagccanaaaaatgaccgggaaantncngggtaccacaantttgngaacttaagcnagcacaanggtggnanggnctanattnntccaagaagacatgtttaacaaatactcangggattggnaaaaactttgaggactggatttgngactaaatgattacaggtatttanttctggtnntggaagngtaaagattccacaaaggtttaaggagaattttttttnacccagctttaatgttaaggaaannannggccttaaaangctttttaaaaaaaaaaaantaanntnngaa

SEQ ID NO: 1091 - DNA, 475 bp, Homo sapiens
  misc_feature (9)..(9): n equals a,t,g, or c
  misc_feature (22)..(22): n equals a,t,g, or c
  misc_feature (40)..(40): n equals a,t,g, or c
  misc_feature (77)..(77): n equals a,t,g, or c
  misc_feature (95)..(95): n equals a,t,g, or c
  misc_feature (119)..(119): n equals a,t,g, or c
  misc_feature (149)..(149): n equals a,t,g, or c
  misc_feature (189)..(189): n equals a,t,g, or c
  misc_feature (208)..(208): n equals a,t,g, or c
  misc_feature (256)..(256): n equals a,t,g, or c
  misc_feature (261)..(261): n equals a,t,g, or c
  misc_feature (278)..(278): n equals a,t,g, or c
  misc_feature (298)..(298): n equals a,t,g, or c
  misc_feature (349)..(349): n equals a,t,g, or c
  misc_feature (361)..(361): n equals a,t,g, or c
  misc_feature (403)..(403): n equals a,t,g, or c
  misc_feature (424)..(424): n equals a,t,g, or c
  misc_feature (441)..(441): n equals a,t,g, or c
  misc_feature (469)..(469): n equals a,t,g, or c
  misc_feature (473)..(473): n equals a,t,g, or c
actccaagnattacaagggttntctgtcctacctgaatgncacccggaaggactactggcaggtccacctggaccangtggaggtggccagcggnctgaccctgtgcaaggagggctgngaggccattgtggacacaggcacttccctnatggtgggcccgtaggatgaggtgcgcgagctgcataaangccatcggggccgtgccgntgattcagggcgagtacatgatcccctgtgagaaggtgtccaccctgnccgcnatcacactgaagctgcnaggcaaaggctacaagctgnccccagaggactacacgctcaaggtgtcgcaggcccgggaagaccctctgnctgagcggcttnatggacatggacatcccgccacccagcgggccattctggatnctgggcgacgtgttcatcggnccgctactacactgtgnttgaccgtgacaaccacaaggggggganttcncc

SEQ ID NO: 1092 - DNA, 269 bp, Homo sapiens
  misc_feature (176)..(176): n equals a,t,g, or c
  misc_feature (201)..(201): n equals a,t,g, or c
  misc_feature (234)..(234): n equals a,t,g, or c
  misc_feature (262)..(263): n equals a,t,g, or c
gatcagtttgtgtataggaaaagagaactgggttaaaagcaaattaacttgttctgaaaagaaagtatagattaattttgttttctgtttaaattttatctccttggtaaagatttttttttcctgggcagaaaacttggcatttttaggcgtagataccttaccttacaatgccnaaatgaatttaattccagtactcangtttttccctttaacagactctatgtgtatcanggctttctaatggggtttttcctcttcnnttttaa

SEQ ID NO: 1093 - DNA, 752 bp, Homo sapiens
  misc_feature (8)..(8): n equals a,t,g, or c
  misc_feature (14)..(14): n equals a,t,g, or c
  misc_feature (637)..(637): n equals a,t,g, or c
  misc_feature (707)..(707): n equals a,t,g, or c
  misc_feature (733)..(733): n equals a,t,g, or c
  misc_feature (735)..(735): n equals a,t,g, or c
  misc_feature (745)..(746): n equals a,t,g, or c
cctttgancacganccactatagcttttggcaaacacgtcccgcaggtaccggtccggaattcccgggtcgacccacgcgtccgccgagcaggaggcgccatcatgggagtggacatccgccataacaaggaccgaaaggttcggcgcaaggagcccaagagccaggatatctacctgaggctgttggtcaagttatacaggtttctggccagaagaaccaactccacattcaaccaggttgtgttgaagaggttgtttatgagtcgcaccaaccggccgcctctgtccctttcccggatgatccggaagatgaagcttcctggccgggaaaacaagacggccgtggttgtggggaccataactgatgatgtgcgggttcaggaggtacccaaactgaaggtatgtgcactgcgcgtgaccagccgggcccgcagccgcatcctcagggcagggggcaagatcctcactttcgaccagctggccctggactcccctaagggctgtggcactgtcctgctctccggtcctcgcaagggccgagaggtgtaccggcatttcggcaaggccccaggaaccccgcacagccacaccaaaccctacgtccgctccaagggcgcggaagttcgagcgtgccanaggccgacgggccagccgaggctacaaaaaactaaaccctgggatcctactctcttattaaaaaagaatntttgcttgcagtaaaaaaaaaaaaancnaaaaaggggnngccccg

SEQ ID NO: 1094 - DNA, 745 bp, Homo sapiens
  misc_feature (71)..(71): n equals a,t,g, or c
  misc_feature (85)..(85): n equals a,t,g, or c
  misc_feature (93)..(93): n equals a,t,g, or c
  misc_feature (96)..(96): n equals a,t,g, or c
  misc_feature (108)..(108): n equals a,t,g, or c
  misc_feature (113)..(113): n equals a,t,g, or c
  misc_feature (122)..(122): n equals a,t,g, or c
  misc_feature (129)..(129): n equals a,t,g, or c
  misc_feature (131)..(131): n equals a,t,g, or c
  misc_feature (134)..(134): n equals a,t,g, or c
  misc_feature (155)..(155): n equals a,t,g, or c
  misc_feature (160)..(160): n equals a,t,g, or c
  misc_feature (172)..(172): n equals a,t,g, or c
  misc_feature (175)..(175): n equals a,t,g, or c
  misc_feature (179)..(179): n equals a,t,g, or c
  misc_feature (187)..(187): n equals a,t,g, or c
  misc_feature (196)..(196): n equals a,t,g, or c
  misc_feature (198)..(198): n equals a,t,g, or c
  misc_feature (202)..(202): n equals a,t,g, or c
  misc_feature (209)..(209): n equals a,t,g, or c
  misc_feature (212)..(212): n equals a,t,g, or c
  misc_feature (236)..(236): n equals a,t,g, or c
  misc_feature (253)..(253): n equals a,t,g, or c
  misc_feature (258)..(258): n equals a,t,g, or c
  misc_feature (266)..(266): n equals a,t,g, or c
  misc_feature (274)..(274): n equals a,t,g, or c
  misc_feature (282)..(282): n equals a,t,g, or c
  misc_feature (290)..(290): n equals a,t,g, or c
  misc_feature (294)..(294): n equals a,t,g, or c
  misc_feature (302)..(302): n equals a,t,g, or c
  misc_feature (312)..(312): n equals a,t,g, or c
  misc_feature (320)..(320): n equals a,t,g, or c
  misc_feature (323)..(323): n equals a,t,g, or c
  misc_feature (330)..(330): n equals a,t,g, or c
  misc_feature (360)..(360): n equals a,t,g, or c
  misc_feature (369)..(369): n equals a,t,g, or c
  misc_feature (376)..(376): n equals a,t,g, or c
  misc_feature (380)..(380): n equals a,t,g, or c
  misc_feature (382)..(382): n equals a,t,g, or c
  misc_feature (393)..(393): n equals a,t,g, or c
  misc_feature (406)..(406): n equals a,t,g, or c
  misc_feature (424)..(424): n equals a,t,g, or c
  misc_feature (439)..(439): n equals a,t,g, or c
  misc_feature (441)..(441): n equals a,t,g, or c
  misc_feature (453)..(453): n equals a,t,g, or c
  misc_feature (492)..(492): n equals a,t,g, or c
  misc_feature (501)..(501): n equals a,t,g, or c
  misc_feature (538)..(538): n equals a,t,g, or c
  misc_feature (550)..(550): n equals a,t,g, or c
  misc_feature (574)..(574): n equals a,t,g, or c
  misc_feature (590)..(590): n equals a,t,g, or c
  misc_feature (614)..(614): n equals a,t,g, or c
  misc_feature (648)..(648): n equals a,t,g, or c
  misc_feature (683)..(683): n equals a,t,g, or c
  misc_feature (707)..(707): n equals a,t,g, or c
  misc_feature (711)..(711): n equals a,t,g, or c
ggctttttcaagggtgaagatacaagtcttaaccacagtgtaacttacagtttcctttaaaaaaaaaaaangtaaacctggcagntatagaanacnctatgggcattnataanagctatttnatatatngnagnatcaacatttttaaattaaangtttnacattcacaagnggngggnagtcttgncattaaggngngggnaatttanagnccagttggttttcttctgactgcncttgttctcatagtagnaaaangctatgcncatttatnccttgcanaagtcctnattntaccacangttaaccctntagctganaangcaaacnctaactgggggattttatttataagggctntagaaaaancgagttnttcncnccagcatcatnttaactaacattntgaactagttagggcagnttttcattgggttgngnggttggtctcanaactaggttgagtttttctcctctgctgaggaaacagtnccgaagttntttttcttggggcatttggattataaaaacttggtgngggggaggagcncaaaactccagcccactgaacctntgccaattaaaatggngttggggttagggttacatctggntacctggcctgggaaaaatcatttttataggagnatggccttccaagggggttttaaaatttaccggangtttttagggccaattatgaatgntggnctaaaatttaccaataaaccttgtttatccccaa

SEQ ID NO: 1095 - DNA, 745 bp, Homo sapiens
  misc_feature (258)..(258): n equals a,t,g, or c
  misc_feature (271)..(271): n equals a,t,g, or c
  misc_feature (276)..(276): n equals a,t,g, or c
  misc_feature (287)..(287): n equals a,t,g, or c
  misc_feature (293)..(293): n equals a,t,g, or c
  misc_feature (330)..(330): n equals a,t,g, or c
  misc_feature (338)..(338): n equals a,t,g, or c
  misc_feature (340)..(340): n equals a,t,g, or c
  misc_feature (380)..(380): n equals a,t,g, or c
  misc_feature (397)..(397): n equals a,t,g, or c
  misc_feature (404)..(404): n equals a,t,g, or c
  misc_feature (417)..(417): n equals a,t,g, or c
  misc_feature (458)..(458): n equals a,t,g, or c
  misc_feature (462)..(462): n equals a,t,g, or c
  misc_feature (473)..(473): n equals a,t,g, or c
  misc_feature (481)..(481): n equals a,t,g, or c
  misc_feature (495)..(495): n equals a,t,g, or c
  misc_feature (518)..(518): n equals a,t,g, or c
  misc_feature (523)..(523): n equals a,t,g, or c
  misc_feature (528)..(528): n equals a,t,g, or c
  misc_feature (539)..(539): n equals a,t,g, or c
  misc_feature (554)..(554): n equals a,t,g, or c
  misc_feature (559)..(559): n equals a,t,g, or c
  misc_feature (573)..(574): n equals a,t,g, or c
  misc_feature (615)..(615): n equals a,t,g, or c
  misc_feature (620)..(620): n equals a,t,g, or c
  misc_feature (624)..(624): n equals a,t,g, or c
  misc_feature (628)..(628): n equals a,t,g, or c
  misc_feature (646)..(646): n equals a,t,g, or c
  misc_feature (686)..(686): n equals a,t,g, or c
  misc_feature (691)..(691): n equals a,t,g, or c
  misc_feature (693)..(693): n equals a,t,g, or c
  misc_feature (700)..(701): n equals a,t,g, or c
ggggacttgttcctgatcttcctgaagatctctaccatttaattaagaaagcagttgctgttcgaaagcatcttgagaggaacagaaaggataaggatgctaaattccgtctgattctaatagagagccggattcaccgtttggctcgatattataagaccaagcgagtcctccctcccaattggaaatatgaatcatctacagcctctgccctggtcgcataaatttgtctgtgtactcaagcaataaaatgattgnttaactaataaanaaaanaaaaaaagggnggccgntctagaggatccaagcttacgtacgcgtgcatgcganggcataantnttctaataggggcacctaaatttcaaattaactgggccgncgttttacaaacgtcgnggaactngggaaaaaacccntggggggttaccccaactttaaatcggcctttggaaggaanaatnccccccttttnggccaagnttgggcgggaaaanaagccgaaaaaagggcccccggnaaccngaatngggcccttttncccaacaagtttggngcaanccctggaatgggcnnaaatggggaacgcgccctggtaaacgggggcaattaaaccncgggngggntggnggtgggttacccgcaaangtgaaccggtaaacttggcaggggcctaaaggcccgttcntttgntntcttccnnactttttggcaaggttggccgggtttcccggaaaggttaaaagg

SEQ ID NO: 1096 - DNA, 624 bp, Homo sapiens
  misc_feature (14)..(14): n equals a,t,g, or c
  misc_feature (25)..(25): n equals a,t,g, or c
  misc_feature (33)..(34): n equals a,t,g, or c
  misc_feature (51)..(51): n equals a,t,g, or c
  misc_feature (147)..(147): n equals a,t,g, or c
  misc_feature (176)..(176): n equals a,t,g, or c
  misc_feature (182)..(182): n equals a,t,g, or c
  misc_feature (201)..(201): n equals a,t,g, or c
  misc_feature (225)..(225): n equals a,t,g, or c
  misc_feature (242)..(242): n equals a,t,g, or c
  misc_feature (247)..(248): n equals a,t,g, or c
  misc_feature (294)..(294): n equals a,t,g, or c
  misc_feature (316)..(316): n equals a,t,g, or c
  misc_feature (352)..(352): n equals a,t,g, or c
  misc_feature (367)..(368): n equals a,t,g, or c
  misc_feature (375)..(375): n equals a,t,g, or c
  misc_feature (404)..(404): n equals a,t,g, or c
  misc_feature (424)..(424): n equals a,t,g, or c
  misc_feature (443)..(443): n equals a,t,g, or c
  misc_feature (449)..(449): n equals a,t,g, or c
  misc_feature (460)..(460): n equals a,t,g, or c
  misc_feature (488)..(488): n equals a,t,g, or c
  misc_feature (492)..(492): n equals a,t,g, or c
  misc_feature (505)..(505): n equals a,t,g, or c
  misc_feature (512)..(512): n equals a,t,g, or c
  misc_feature (579)..(579): n equals a,t,g, or c
  misc_feature (582)..(582): n equals a,t,g, or c
  misc_feature (612)..(612): n equals a,t,g, or c
  misc_feature (619)..(619): n equals a,t,g, or c
  misc_feature (624)..(624): n equals a,t,g, or c
tacgcctgttggtnccggtcccganttcccggnncgacccacgcgtgcggnggtactttgcagcgtgcttttgcagaaatcacaattttcctgtggaataaagatggtccaaatagtcaaaaattaaatatatatatatattagtantttatatagatgtcagcaattaggcagancaaggnttagtttaacttccactgntaaaataaagcttacatagttgtnttcctttgaaagactgngctgnnctttaacataggtttttaaagactaggatattgaatgtgaaacatncgatttcattggtcacttctanaccaaaaattatgtgttgccaaaaccaaacccaggntcatgaatatggagnntattatngtgaaacatggactttgagcttattgttnttattctgtagtaaatattntcagggttttaaacactantcacanactgaatgacntgacttcaaaagcaacaaccttaaaggncggnatttcattagtantcctcantctgcattctggcttgaaaaacagctctgttgaatcacagtatcagtattttcacacgtaagcacanttnggccatttccggggtttttaagaactgggntacagancttan

SEQ ID NO: 1097 - DNA, 631 bp, Homo sapiens
  misc_feature (5)..(5): n equals a,t,g, or c
  misc_feature (7)..(7): n equals a,t,g, or c
  misc_feature (17)..(17): n equals a,t,g, or c
  misc_feature (139)..(139): n equals a,t,g, or c
  misc_feature (153)..(153): n equals a,t,g, or c
  misc_feature (282)..(282): n equals a,t,g, or c
  misc_feature (304)..(304): n equals a,t,g, or c
  misc_feature (354)..(354): n equals a,t,g, or c
  misc_feature (370)..(370): n equals a,t,g, or c
  misc_feature (373)..(373): n equals a,t,g, or c
  misc_feature (379)..(379): n equals a,t,g, or c
  misc_feature (417)..(417): n equals a,t,g, or c
  misc_feature (421)..(421): n equals a,t,g, or c
  misc_feature (445)..(445): n equals a,t,g, or c
  misc_feature (481)..(481): n equals a,t,g, or c
  misc_feature (494)..(494): n equals a,t,g, or c
  misc_feature (500)..(500): n equals a,t,g, or c
  misc_feature (513)..(513): n equals a,t,g, or c
  misc_feature (561)..(561): n equals a,t,g, or c
  misc_feature (574)..(574): n equals a,t,g, or c
  misc_feature (605)..(605): n equals a,t,g, or c
  misc_feature (624)..(624): n equals a,t,g, or c
  misc_feature (628)..(628): n equals a,t,g, or c
ggagngnactttgcagntgcttttgcagaaatcacaattttcctgtggaataaagatggtccaaatagtcaaaaattaaatatatatatatattagtaatttatatagatgtcagcaattaggcagatcaaggtttagnttaacttccactgntaaaataaagcttacatagttttcttcctttgaaagactgtgctgcctttaacataggtttttaaagactaggatattgaatgtgaaacatcccgttttcattggtcacttctaaaccaaaaattatgnggtgccaaaaccaaacccaggntcatgaatatggtggctattatagtgaaaccatgactttgacttaatggnttaatctggaataaanaantttcangggttttaaaccctaaacacaaactggaaggacttgantttnaaaagcaacaaccttaaaggccgncattcattagtattcctcaattctggaatcctgggnttggaaaaacagnttttgntggaatcaccagnattcaggaaattttcacacggtaaagcaccaattcggggcccaatttnccgggggtttctnaaggaacttggggttcacaagaccttaagcnaggggaatcgcaatggganccgnaag

SEQ ID NO: 1098 - DNA, 608 bp, Homo sapiens
  misc_feature (439)..(439): n equals a,t,g, or c
  misc_feature (495)..(495): n equals a,t,g, or c
  misc_feature (526)..(526): n equals a,t,g, or c
  misc_feature (546)..(546): n equals a,t,g, or c
  misc_feature (603)..(603): n equals a,t,g, or c
  misc_feature (605)..(605): n equals a,t,g, or c
  misc_feature (608)..(608): n equals a,t,g, or c
gtgaaactctcctttgtctctgtgtgtggcaggtctggcagacccgtctgcgttaacacaagcggttgctgcctacaacaacgtcaaagcctgcctgaagagttgaggggggtagatttcttcaagcagaggaggtgctgactcctcagggcacgacagcagaaggatgttgcttttttaagggagggccagaaagaaagttagtggattgcaaagttggttgcctggtggaagttagaacagaccaacattttgtgccagaaatttaagagttccataggtggaggcgcagttctttcgaataaatgtgtaactttgaaattgtgttcatttgcactcggtgcagcggttatgcttatgaaaatacctggcagctttgtgcaatgaattaatgttataaggaattatctattttgtcatagtatttaagtcataatgncatttcagaattcagttctgtaggattttcttttctttaaaaaatgtatattctgngtagttttaattggtaaaaaaatgtaattgngatttaatactgcatagtgntttggtattttttttatatgcaaaggtcttacgagccaataaaactatttcaaaagnanaan

SEQ ID NO: 1099 - DNA, 150 bp, Homo sapiens
  misc_feature (8)..(8): n equals a,t,g, or c
  misc_feature (11)..(11): n equals a,t,g, or c
  misc_feature (18)..(18): n equals a,t,g, or c
  misc_feature (50)..(50): n equals a,t,g, or c
  misc_feature (73)..(73): n equals a,t,g, or c
  misc_feature (110)..(110): n equals a,t,g, or c
  misc_feature (116)..(116): n equals a,t,g, or c
  misc_feature (125)..(125): n equals a,t,g, or c
  misc_feature (131)..(131): n equals a,t,g, or c
agtaagtntgnccgattntctttacccacctggaataagccagacctaancactgaaggtatgaaaaataatnactatatcacacctgaattgttcaaggaatgcttctntgtcanaacaaaagnctttanagaatgatctatcactgac

SEQ ID NO: 1100 - DNA, 620 bp, Homo sapiens
  misc_feature (218)..(218): n equals a,t,g, or c
  misc_feature (225)..(225): n equals a,t,g, or c
  misc_feature (246)..(246): n equals a,t,g, or c
  misc_feature (358)..(358): n equals a,t,g, or c
  misc_feature (370)..(370): n equals a,t,g, or c
  misc_feature (472)..(472): n equals a,t,g, or c
  misc_feature (475)..(476): n equals a,t,g, or c
  misc_feature (478)..(478): n equals a,t,g, or c
  misc_feature (485)..(485): n equals a,t,g, or c
  misc_feature (513)..(514): n equals a,t,g, or c
  misc_feature (559)..(559): n equals a,t,g, or c
  misc_feature (584)..(584): n equals a,t,g, or c
ggcagcgtctgcgggcgatgagtgccgaggagcggctacgccagtcccgcgtactgagccagaaggtgcgaggccgcccgtagcggaagccgcggcggacagaccctccgaaggcctggcggccagcgattgctgatctgtgcatggtgattgcccacagtgagtatcaaaagtccaaaagaatttccatctttctgagcatgcaagatgaaattganacagaanagatcatcaagggacattttncaaccgaggcaaaatctgcttcatccctcggtaccggttccagagcaatcacatggatatggtgagaatagaatcaccagaggaaatttctttacttcccaaaacatcctgnaatatccctcancctggtgagggtgatgttcgggaggaggccttgtccacagggggacttgatctcatcttcatgccaggccttgggtttgacaaacatggcaacccgactggnganngngcaaggnctactatgatgcctatcttaagcgcttnnttgcagcatcaggaagtgaagccctacacccttgcgttgcttttnaagaacagatttgccttcagtccantgaatgaaaacgacttgaaggtagattaaagtcctt

SEQ ID NO: 1101 - DNA, 647 bp, Homo sapiens
  misc_feature (187)..(187): n equals a,t,g, or c
  misc_feature (398)..(398): n equals a,t,g, or c
  misc_feature (400)..(400): n equals a,t,g, or c
  misc_feature (422)..(422): n equals a,t,g, or c
  misc_feature (430)..(430): n equals a,t,g, or c
  misc_feature (434)..(434): n equals a,t,g, or c
  misc_feature (442)..(442): n equals a,t,g, or c
  misc_feature (504)..(504): n equals a,t,g, or c
  misc_feature (518)..(518): n equals a,t,g, or c
  misc_feature (559)..(559): n equals a,t,g, or c
  misc_feature (581)..(581): n equals a,t,g, or c
  misc_feature (631)..(631): n equals a,t,g, or c
  misc_feature (635)..(635): n equals a,t,g, or c
  misc_feature (642)..(642): n equals a,t,g, or c
gcgtggacagacagcttcacaacagacagatctacccccccatcaacgtgctcccttccctgtcgcggctgatgaagtcagccattggggaaggcatgacaagaaaggaccatggagatgtctccaaccagctgtacgcctgctatgccatcgggaaggacgtgcaggccatgaaggcagtagttgnggaggaggcgctcacctctgaggacctgctctacctggaattcctgcagaagtttgagaagaacttcatcaatcagggcccctacgagaaccgctcggtgttcgagtcgctggacctgggctggaagctgctgcgcatcttccccaaggagatgctgaagcgcattccgcaggccgtgatcgacgagttctattcccgcgagggggctctngnaggacctcgcgcctgacactgngctctagnccgncgccgggnacccaacaccgcagggaacctaccctcggttccggtctccctccttggcaccccaaccaagnggttcttgcgccgncctccgccttccgttggcttccaaggtggtggagccgccgnacgcttcatcctttcccttcgnttgaattccttttcccggggcttcatgccttcccccttgaattcccggancttncggaaanaacct

SEQ ID NO: 1102 - DNA, 785 bp, Homo sapiens
  misc_feature (597)..(597): n equals a,t,g, or c
  misc_feature (605)..(605): n equals a,t,g, or c
  misc_feature (611)..(611): n equals a,t,g, or c
  misc_feature (620)..(620): n equals a,t,g, or c
  misc_feature (623)..(623): n equals a,t,g, or c
  misc_feature (651)..(651): n equals a,t,g, or c
  misc_feature (685)..(686): n equals a,t,g, or c
  misc_feature (691)..(691): n equals a,t,g, or c
  misc_feature (709)..(709): n equals a,t,g, or c
  misc_feature (752)..(752): n equals a,t,g, or c
  misc_feature (755)..(755): n equals a,t,g, or c
gctcagcgaatgagagctggcaaaggcaaaatgagaaaccgtcgccgtatccagcgcaggggcccgtgcatcatctataatgaggataatggtatcatcaaggccttcagaaacatccctggaattactctgcttaatgtaagcaagctgaacattttgaagcttgctcctggtgggcatgtgggacgtttctgcatttggactgaaagtgctttccggaagttagatgaattgtacggcacttggcgtaaagccgcttccctcaagagtaactacaatcttcccatgcacaagatgattaatacagatcttagcagaatcttgaaaagcccagagatccaaagagcccttcgagcaccacgcaagaagatccatcgcagagtcctaaagaagaacccactgaaaaacttgagaatcatgttgaagctaaacccatatgcaaagaccatgcgccggaacaccattcttcgccaggccaggaatcacaagctccgggtggataaggcagctgctgcagcagcggcactacaagccaaatcagatgagaaggcggcggttgcaggcaagaagcctgtggtaggtaagaaaggaaagaangctgctgntggtgntaagaacanaanaagcctctggtgggaaaaaaggcagcanctaccaagaacccagccctgaaaagaaacctgcnnagaanaaacctactaccgagganaaaaaacctgctgcataaactcttaaattggatattccttaanggncaaacatttggacaggttcttttgaataaa

SEQ ID NO: 1103 - DNA, 615 bp, Homo sapiens
  misc_feature (357)..(357): n equals a,t,g, or c
  misc_feature (385)..(385): n equals a,t,g, or c
  misc_feature (419)..(419): n equals a,t,g, or c
  misc_feature (479)..(479): n equals a,t,g, or c
  misc_feature (555)..(555): n equals a,t,g, or c
  misc_feature (558)..(558): n equals a,t,g, or c
  misc_feature (573)..(573): n equals a,t,g, or c
  misc_feature (582)..(582): n equals a,t,g, or c
  misc_feature (611)..(611): n equals a,t,g, or c
gtttttgtttaccgtagcgtatacatttgttttgggatttttgtgtgtttgttgggaattttgtttttagccaggtcagtattgatgaggctgatcatttggctctttttttccttccagaagagttgcatcaacaaagttaattgtatttatgtatgtaaatagattttaagcttcattataaaatattgttaatgcctataactttttttcaatttttttgtgtgtgtttctaaggactttttcttaggtttgctaaatactgtagggaaaaaaatgcttctttctactttgattattttagactttaaaatgagctacttcttattcacttttgtaaacagctaatagcatggnccaatttttttaagttcactttttttgntctaggggaaatgaatgtgcaaaaaaagaaaaanaactgttggttatttgtgttattctggatgtataaaaatcaatggaaaaaaataactttnaaattgaaatgacggtataacacatctactgaaaaagcaacgggaaatgtgggcctatttaagccagcccccctanggnccaattggggggcanttattgggnttggggcacaaaacaatcctggaaaattnggcc

SEQ ID NO: 1104 - DNA, 643 bp, Homo sapiens
  misc_feature (302)..(302): n equals a,t,g, or c
  misc_feature (361)..(361): n equals a,t,g, or c
  misc_feature (374)..(374): n equals a,t,g, or c
  misc_feature (473)..(473): n equals a,t,g, or c
  misc_feature (510)..(510): n equals a,t,g, or c
  misc_feature (518)..(518): n equals a,t,g, or c
  misc_feature (527)..(527): n equals a,t,g, or c
  misc_feature (543)..(543): n equals a,t,g, or c
  misc_feature (588)..(588): n equals a,t,g, or c
  misc_feature (606)..(606): n equals a,t,g, or c
  misc_feature (623)..(623): n equals a,t,g, or c
  misc_feature (627)..(627): n equals a,t,g, or c
  misc_feature (638)..(638): n equals a,t,g, or c
ggcaggatgagggcgcagagcccacgggctacagcgcggagctgtctagtgagggcatccgggatgaccgcaatgaggagaagcgcatcactgaggcagagaagaacgagcgtgtgcagcggcagctgctgacgctgagcagcgagctgtcccaggcccgagatgagaataagaggacccacaatgacatcatccacaacgagaacatgaggcaaggccgggacaagtacaagacgctgcggcagatccggcagggcaacaccaagcagcgcatcgacgaagttcgaggccctgtaacaagncaggccaggaccaagggcagaggggtgctcatagcggcgctgcagccccgcacgcttgngtctttagtgctncaagtctaggaacttcctcagatccagttcctttagaaagcagttacccaacagaaacattctgggctgggaaccagggaggcgccctggtttggtttncccaggttgtaataatgccaagcaggccctgaatctngcgattantctcgaatnacttctggggttgtgnttggaacaaggacttgattgaattaccggaaaatgcctgtaaagncttaagtaagaaactttnaatgcttggccttgggngatncaaggagtcancatcc

SEQ ID NO: 1105 - DNA, 746 bp, Homo sapiens
  misc_feature (34)..(34): n equals a,t,g, or c
  misc_feature (160)..(160): n equals a,t,g, or c
  misc_feature (205)..(205): n equals a,t,g, or c
  misc_feature (212)..(212): n equals a,t,g, or c
  misc_feature (256)..(256): n equals a,t,g, or c
  misc_feature (317)..(317): n equals a,t,g, or c
  misc_feature (358)..(358): n equals a,t,g, or c
  misc_feature (368)..(368): n equals a,t,g, or c
  misc_feature (389)..(389): n equals a,t,g, or c
  misc_feature (407)..(407): n equals a,t,g, or c
  misc_feature (410)..(410): n equals a,t,g, or c
  misc_feature (412)..(412): n equals a,t,g, or c
  misc_feature (436)..(436): n equals a,t,g, or c
  misc_feature (460)..(460): n equals a,t,g, or c
  misc_feature (499)..(499): n equals a,t,g, or c
  misc_feature (596)..(596): n equals a,t,g, or c
  misc_feature (653)..(653): n equals a,t,g, or c
  misc_feature (679)..(679): n equals a,t,g, or c
  misc_feature (684)..(684): n equals a,t,g, or c
  misc_feature (697)..(697): n equals a,t,g, or c
  misc_feature (699)..(699): n equals a,t,g, or c
  misc_feature (703)..(703): n equals a,t,g, or c
  misc_feature (708)..(708): n equals a,t,g, or c
  misc_feature (722)..(722): n equals a,t,g, or c
  misc_feature (732)..(732): n equals a,t,g, or c
gaggcaagcttgtcatcaatggaaatcccatcancatcttccaggagcgagatccctccaaaatcaagtggggcgatgctggcgctgagtacgtcgtggagtccactggcgtcttcaccaccatggagaaggctggggctcatttgcaggggggagccanaagggtcatcatctctgccccctctgctgacgcccccatgttcgncatgggngtgaaccatgagaagtatgacaacagcctcaagatcatcagcantgccttctgcaccaccaactgcttagcacccctggccaaggtcatccatgacaactttggnatcgtggaaggactcatgaccacagtccatgccatcactgncacccagaanactgtggatggcccctccggnaaactgtggcgtgatggncgngntgctctccagaacatcatccctgnctctactggcgctgccaaggctgngggcaaggtcatccctgagctgaacgggaagctcactgncatggccttcccgtgtccccactgccaacgtgtcagtggtggacctgacctgccgtctagaaaaacctgccaaatatgatgacatcaagaaggtggngaagcaggcctcggaaggcccccctcaagggcatcctgggctacacttgagcaccangtggacttcctcttgactttaacagngactnccacttctgcaancnttcnacgcnttgggccttggcanttggcccttnaacggaaccacttt

SEQ ID NO: 1106 - DNA, 721 bp, Homo sapiens
  misc_feature (418)..(418): n equals a,t,g, or c
  misc_feature (541)..(541): n equals a,t,g, or c
  misc_feature (543)..(543): n equals a,t,g, or c
  misc_feature (549)..(549): n equals a,t,g, or c
  misc_feature (554)..(554): n equals a,t,g, or c
  misc_feature (572)..(572): n equals a,t,g, or c
  misc_feature (596)..(596): n equals a,t,g, or c
  misc_feature (608)..(608): n equals a,t,g, or c
  misc_feature (632)..(632): n equals a,t,g, or c
  misc_feature (669)..(669): n equals a,t,g, or c
  misc_feature (675)..(675): n equals a,t,g, or c
  misc_feature (695)..(695): n equals a,t,g, or c
  misc_feature (708)..(708): n equals a,t,g, or c
ggggtggccttctcactgggcttcaccctgggccctatgctcggagcctccctgcccctggaaatggcaccctggtttgccctgctcttcgcagcctccgacctgctgttcatcttctgcttcctgccagagacgctgcccctggagaaacgggcgccctctatcgccctggggttccgtgatgcggctgatctgctcagccccctggccctgccctgcactaacacacccgctccctccaaagcgggtggcaggcagtcccctgagtcctgcagggcacgggctgtgctgaggctgccgtgcccacctgcaggccctcctgctgctggatgcccgccttcctcctcatcggctggggacgttctctgcccgtgctgggcctggggctgctgctctactcctttgccgccgccgttgnggtgccctgcctgacctccgtggtcgctggctatggtgagcccccttccctcggccgaagccacctgagcggtagaagggcagtggagcctgactgtgcctcttcccacaggctcaccagggnanaagggnacggncatgggtacactgcgcancctaggtgctctggccagggccgnggggcccctggnggccgcttcaggtgagggcgcggnatggtgcttggggaaggctgggggccaaagcacctgncctcgncttccaagtgccaagccccntcggggactgggntgaccgccaccgt

SEQ ID NO: 1107 - DNA, 299 bp, Homo sapiens
  misc_feature (252)..(252): n equals a,t,g, or c
  misc_feature (268)..(268): n equals a,t,g, or c
  misc_feature (274)..(274): n equals a,t,g, or c
  misc_feature (282)..(282): n equals a,t,g, or c
  misc_feature (294)..(294): n equals a,t,g, or c
gaaattagtgctcagcaaaagaatgccctgcgttcccaaagtaaaagaatgacaagctgtaccttaaaccaaaacacttcgtaatctcatccaattgcaaaaagagttattagccaaccaggtattcccagtagtgacagtggatataactgtgtagtcattcacctctgcttatatgaatactttacaacctcttttgccttttgcaggaacgtccttgtgaagacctttatctgagccactgtacttcgntatcactgccatgcantttacntgagctgntctgcagctcanattcc

SEQ ID NO: 1108 - DNA, 413 bp, Homo sapiens
  misc_feature (32)..(32): n equals a,t,g, or c
  misc_feature (49)..(49): n equals a,t,g, or c
  misc_feature (207)..(207): n equals a,t,g, or c
  misc_feature (264)..(264): n equals a,t,g, or c
  misc_feature (267)..(267): n equals a,t,g, or c
  misc_feature (341)..(341): n equals a,t,g, or c
  misc_feature (362)..(362): n equals a,t,g, or c
  misc_feature (386)..(386): n equals a,t,g, or c
  misc_feature (412)..(413): n equals a,t,g, or c
gaaccgcacatgcagatggggctcccgcccgnggtgttatttaaagaanaaacgtctatgtgtacagatgaatgataaactctctgcttctccctctgcccctctccaggcgccggcgggcgggccggtttcgaagttgatgcaatcggtttaaacatggctgaacgcgtgtgtacacgggactgacgcaacccacgtgtaactgtnagccgggccctgagtaatcgcttaaagatgttcctacgggcttgttgctgttgatgnttngctttgctttgctttttggtctttttttgtattataaaaaataatctatttctatgagaaaagaggcgtctgtntattttgggaatcttttccgnttcaagcattaagaacacttttantaaacttttttttgagaatggttaann

SEQ ID NO: 1109 - DNA, 621 bp, Homo sapiens
  misc_feature (7)..(7): n equals a,t,g, or c
  misc_feature (26)..(26): n equals a,t,g, or c
  misc_feature (30)..(30): n equals a,t,g, or c
  misc_feature (53)..(53): n equals a,t,g, or c
  misc_feature (72)..(72): n equals a,t,g, or c
  misc_feature (78)..(78): n equals a,t,g, or c
  misc_feature (81)..(81): n equals a,t,g, or c
  misc_feature (115)..(115): n equals a,t,g, or c
  misc_feature (118)..(118): n equals a,t,g, or c
  misc_feature (133)..(133): n equals a,t,g, or c
  misc_feature (144)..(144): n equals a,t,g, or c
  misc_feature (154)..(154): n equals a,t,g, or c
  misc_feature (167)..(167): n equals a,t,g, or c
  misc_feature (176)..(176): n equals a,t,g, or c
  misc_feature (185)..(185): n equals a,t,g, or c
  misc_feature (188)..(188): n equals a,t,g, or c
  misc_feature (200)..(200): n equals a,t,g, or c
  misc_feature (210)..(210): n equals a,t,g, or c
  misc_feature (227)..(227): n equals a,t,g, or c
  misc_feature (229)..(229): n equals a,t,g, or c
  misc_feature (253)..(253): n equals a,t,g, or c
  misc_feature (265)..(265): n equals a,t,g, or c
  misc_feature (296)..(297): n equals a,t,g, or c
  misc_feature (317)..(317): n equals a,t,g, or c
  misc_feature (321)..(321): n equals a,t,g, or c
  misc_feature (339)..(339): n equals a,t,g, or c
  misc_feature (344)..(344): n equals a,t,g, or c
  misc_feature (349)..(349): n equals a,t,g, or c
  misc_feature (353)..(354): n equals a,t,g, or c
  misc_feature (362)..(362): n equals a,t,g, or c
  misc_feature (367)..(367): n equals a,t,g, or c
  misc_feature (377)..(377): n equals a,t,g, or c
  misc_feature (401)..(401): n equals a,t,g, or c
  misc_feature (407)..(408): n equals a,t,g, or c
  misc_feature (436)..(437): n equals a,t,g, or c
  misc_feature (465)..(465): n equals a,t,g, or c
  misc_feature (473)..(473): n equals a,t,g, or c
  misc_feature (479)..(479): n equals a,t,g, or c
  misc_feature (513)..(513): n equals a,t,g, or c
  misc_feature (517)..(519): n equals a,t,g, or c
  misc_feature (533)..(533): n equals a,t,g, or c
  misc_feature (557)..(557): n equals a,t,g, or c
  misc_feature (598)..(598): n equals a,t,g, or c
  misc_feature (610)..(610): n equals a,t,g, or c
  misc_feature (614)..(614): n equals a,t,g, or c
gcccacncgtccgcattacaggtggngtgntctgtgataatgaaaagcatcanaaaagcttttgtactttgngggttnctntattttgaattttttgatcaaaaaactgattacncanaatataggttggagnttggcttcatnttcctggggntcccctcactccnttttttgtnaaccccatntgnagcctcttcctntactcaggcngtcgacccggcacgatnanaagtgggaccagcagagggcgccnacttcaggagtnccgatttcccaccaggcttcattaacccagnnacctgaactgtttgttaganccanccgaccttctttctcatngctgnttggnatgnncacagttnctganggactgggcncgggaattttccattggaaagaangtcagnnggtcccattgataactcagactcaaatnntaactgtcatgccctacaaataaaatgnagagcctnttctgngaaatgctttgatccctctgagctgccatgctgnctgnnnacacacctttctgntttggcttacaaaagaatgtgttnctttccacccttgctgacctcaggagcagctgttcatctgngtgggaaacttnagcnaaggaaa

SEQ ID NO: 1110 - DNA, 634 bp, Homo sapiens
  misc_feature (161)..(161): n equals a,t,g, or c
  misc_feature (255)..(255): n equals a,t,g, or c
  misc_feature (398)..(398): n equals a,t,g, or c
  misc_feature (442)..(442): n equals a,t,g, or c
  misc_feature (448)..(448): n equals a,t,g, or c
  misc_feature (491)..(491): n equals a,t,g, or c
  misc_feature (524)..(524): n equals a,t,g, or c
  misc_feature (589)..(589): n equals a,t,g, or c
  misc_feature (619)..(619): n equals a,t,g, or c
  misc_feature (628)..(629): n equals a,t,g, or c
  misc_feature (634)..(634): n equals a,t,g, or c
ggtaattcccactgtaatagcatagggattttggaagcagctgctggtggcttgggacatcagtggggccaagggttctctgtccctggttcaactgtgatttggctttcccgtgtctttcctggtgatgccttgtttggggttctgtgggtttgggtggnaagagggccatctgcctgaatgtaacctgctagctctccgaaggccctgcgggcctggcttgtgtgagcgtgtggacagtggtggccgcgctgngcctgctcgtgttgcctacatgtccctggctgttgaggcgctgcttcagcctgcacccctcccttgtctcatagatgctccttttgaccttttcaaataaatatggatggcgagctcctaggcctctggcttcctggtagagngcggcatgccgaagggtctgctgggtgtggattggatgctgaantgtggnggttggaagctgctgtggcccacttgggcacccacgcttctgnccacttctggttgccaggagacagcaagcaaanccagcaggacatgaaagttgctattaaatggacttcgtgaattttggtttgcactaaagttctgngatttaaccataaaattctgttaccagaanaattttttnnaaaan

SEQ ID NO: 1111 - DNA, 680 bp, Homo sapiens
  misc_feature (2)..(2): n equals a,t,g, or c
  misc_feature (102)..(102): n equals a,t,g, or c
  misc_feature (153)..(153): n equals a,t,g, or c
  misc_feature (321)..(321): n equals a,t,g, or c
  misc_feature (355)..(355): n equals a,t,g, or c
  misc_feature (394)..(394): n equals a,t,g, or c
  misc_feature (478)..(478): n equals a,t,g, or c
  misc_feature (519)..(519): n equals a,t,g, or c
  misc_feature (537)..(537): n equals a,t,g, or c
  misc_feature (540)..(540): n equals a,t,g, or c
  misc_feature (543)..(543): n equals a,t,g, or c
  misc_feature (606)..(606): n equals a,t,g, or c
  misc_feature (625)..(625): n equals a,t,g, or c
  misc_feature (679)..(679): n equals a,t,g, or c
gntccagtccaggctcacagacgccaaacgcattaactggcgaacagtgctgagtggcggcagcctctacatcgagatcccgggcggcgcgctgcccgaggngagcaaggacagctttgcagttctcctggagttcgctgaggagcagctgcnagccgaccatgtcttcatttgcttccacaagaaccgcgaggacagagccgccttgctccgaaccttcagctttttgggctttgagattgtgagaccggggcatccccttgtccccaagagacccgacgcttgcttcatggcctacacgttcgagagagagtcttcggnagaggaggaggagtagggccgcctcggagctggncatccggcccctggggccaccccttgtcagccgggtggntaggaaccgtagactcgctcatctcgcctgggtttgtccgcatgttgtaatcgcgcaaataaacgctcactccgaattagcggngtatttcttgaagtttaatattgtgtttgagatactgaagnatttgctttaattctaantanaantttatattttacttttttatcgctggtttaagatgattcagattatccttgtactttgtcggngaagtttcttaattggagncttttgtaaacagtcttagtcttttaacttggaaagatgaggactcctcccccnc

SEQ ID NO: 1112 - DNA, 546 bp, Homo sapiens
  misc_feature (12)..(12): n equals a,t,g, or c
  misc_feature (15)..(15): n equals a,t,g, or c
  misc_feature (71)..(71): n equals a,t,g, or c
  misc_feature (74)..(74): n equals a,t,g, or c
  misc_feature (76)..(76): n equals a,t,g, or c
  misc_feature (105)..(106): n equals a,t,g, or c
  misc_feature (206)..(206): n equals a,t,g, or c
  misc_feature (220)..(221): n equals a,t,g, or c
  misc_feature (229)..(229): n equals a,t,g, or c
  misc_feature (233)..(233): n equals a,t,g, or c
  misc_feature (299)..(299): n equals a,t,g, or c
  misc_feature (325)..(325): n equals a,t,g, or c
  misc_feature (518)..(518): n equals a,t,g, or c
  misc_feature (520)..(520): n equals a,t,g, or c
  misc_feature (533)..(533): n equals a,t,g, or c
  misc_feature (539)..(539): n equals a,t,g, or c
  misc_feature (542)..(542): n equals a,t,g, or c
tcccttttagtntangctcccacgccctgcaggtaccggtccggaattcccgggtcgacccacgcgtcctngcntncatggtccgcgttcgcaccaaaggcgtgnngaaggcggtccgggtcatcatagaaaagtactacacgcgcctgggcaacgacttccacacgaacaagcgcgtgtgcgaggagatcgccattatccccagnaaaaagctccgcannaagatagnacgntatgtcacgcatctcatgaagcgaattcagagaggcccagtaagaggtatctccatcaagctgcangaggaggagagagaaaggagagacanttatgttcctgaggtctcagccttggatcaggagattattgaagtagatcctgacactaaggaaatgctgaagcttttggacttcggcagtctgtccaaccttcaggtcactcagcctacagttggcatgaatttcaaaacgcctcggggacctgtttgaattttttctgtagtgctgtattatttttaatananctgggacaacagnccatgnacnccgg

SEQ ID NO: 1113 - DNA, 504 bp, Homo sapiens
  misc_feature (95)..(95): n equals a,t,g, or c
  misc_feature (101)..(101): n equals a,t,g, or c
  misc_feature (125)..(125): n equals a,t,g, or c
  misc_feature (134)..(134): n equals a,t,g, or c
  misc_feature (156)..(156): n equals a,t,g, or c
  misc_feature (179)..(179): n equals a,t,g, or c
  misc_feature (182)..(182): n equals a,t,g, or c
  misc_feature (194)..(194): n equals a,t,g, or c
  misc_feature (199)..(199): n equals a,t,g, or c
  misc_feature (214)..(214): n equals a,t,g, or c
  misc_feature (228)..(228): n equals a,t,g, or c
  misc_feature (242)..(242): n equals a,t,g, or c
  misc_feature (279)..(279): n equals a,t,g, or c
  misc_feature (357)..(357): n equals a,t,g, or c
  misc_feature (376)..(376): n equals a,t,g, or c
  misc_feature (378)..(378): n equals a,t,g, or c
  misc_feature (382)..(383): n equals a,t,g, or c
  misc_feature (385)..(387): n equals a,t,g, or c
  misc_feature (389)..(390): n equals a,t,g, or c
  misc_feature (392)..(393): n equals a,t,g, or c
  misc_feature (395)..(395): n equals a,t,g, or c
  misc_feature (399)..(400): n equals a,t,g, or c
  misc_feature (403)..(403): n equals a,t,g, or c
  misc_feature (432)..(432): n equals a,t,g, or c
  misc_feature (447)..(447): n equals a,t,g, or c
  misc_feature (502)..(504): n equals a,t,g, or c
ctgtctttccttttttctgagagattcaaagcctccacgactctgtttcccccgtcccttctgaatttaatttgcactaagtcatttgcactggntggagntgtggagacggccttgagtctcantacgagtgngcgtgagtgcgagccaccttgncaagtgcctgtgcagggcccggncgncctccatctggnccggntgactgggcgccggntgtgtgcccgaggnctcaccctgccctngcctagtctggaagctccgaccgacatcacggagcanccttcaagcattccattacgccccatctcgctctgtgcccctccccaccagggcttcagcaggagccctggactcatnatcaataaacactgttacngnaaannannnanntnnanaaanntanagaaatttccagctgttataatctaaagnattcttatgatctgngtaagctctgaatgaacttctttactcaataaaattaattttttggcttcttaannn

SEQ ID NO: 1114 - DNA, 663 bp, Homo sapiens
  misc_feature (553)..(553): n equals a,t,g, or c
  misc_feature (602)..(602): n equals a,t,g, or c
  misc_feature (623)..(623): n equals a,t,g, or c
  misc_feature (656)..(657): n equals a,t,g, or c
  misc_feature (661)..(661): n equals a,t,g, or c
ggctcgcccagctcgcccagcgtccgccgcgcctcggccaaggcttcaacggaccacaccaaaatgccatctcaaatggaacacgccatggaaaccatgatgtttacatttcacaaattcgctggggataaaggctacttaacaaaggaggacctgagagtactcatggaaaaggagttccctggatttttggaaaatcaaaaagaccctctggctgtggacaaaataatgaaggacctggaccagtgtagagatggcaaagtgggcttccagagcttcttttccctaattgcgggcctcaccattgcatgcaatgactattttgtagtacacatgaagcagaagggaaagaagtaggcagaaatgagcagttcgctcctccctgataagagttgtcccaaagggtcgcttaaggaatctgccccacagcttcccccatagaaggatttcatgagcagatcaggacacttagcaaatgtaaaaataaaatctaactctcatttgacaagcagagaaagaaaagttaaataccagataagcttttgatttttgnattggttgcatccccttgccctcaataaataaaggtcttttttagttcnaaaaaaaaaaaaaaaaggggngcccttttaaaggatccaagtttactacccggnntgcnaa

SEQ ID NO: 1115 - DNA, 742 bp, Homo sapiens
  misc_feature (94)..(94): n equals a,t,g, or c
  misc_feature (105)..(105): n equals a,t,g, or c
  misc_feature (121)..(121): n equals a,t,g, or c
  misc_feature (136)..(136): n equals a,t,g, or c
  misc_feature (139)..(139): n equals a,t,g, or c
  misc_feature (153)..(153): n equals a,t,g, or c
  misc_feature (167)..(167): n equals a,t,g, or c
  misc_feature (191)..(191): n equals a,t,g, or c
  misc_feature (228)..(228): n equals a,t,g, or c
  misc_feature (256)..(256): n equals a,t,g, or c
  misc_feature (260)..(260): n equals a,t,g, or c
  misc_feature (291)..(291): n equals a,t,g, or c
  misc_feature (316)..(316): n equals a,t,g, or c
  misc_feature (358)..(358): n equals a,t,g, or c
  misc_feature (374)..(374): n equals a,t,g, or c
  misc_feature (378)..(378): n equals a,t,g, or c
  misc_feature (411)..(411): n equals a,t,g, or c
  misc_feature (510)..(510): n equals a,t,g, or c
  misc_feature (555)..(555): n equals a,t,g, or c
  misc_feature (610)..(610): n equals a,t,g, or c
  misc_feature (612)..(612): n equals a,t,g, or c
  misc_feature (638)..(638): n equals a,t,g, or c
  misc_feature (662)..(662): n equals a,t,g, or c
  misc_feature (712)..(712): n equals a,t,g, or c
  misc_feature (720)..(720): n equals a,t,g, or c
  misc_feature (727)..(727): n equals a,t,g, or c
  misc_feature (736)..(736): n equals a,t,g, or c
gggttttatttcctttctactatagttttgccttactaatataagaagctgtcttttttttttgaactgcatccctaatagggaaaagaaactngcacacaaaancgctgacaccttctgngaaaggatctgtggncgnttctccgatttggnaaccttcagtatgnggcttctctactcctttgtcaggntttacgattatgtatgattactgcaggtagcgctggnatatggtcaaatgaatgaaccacctggngctngtgcccgggtagctctgactggactgactgnggctgaatacttcagagaccaacanggccaagatgtactgctatttattgataacatctttcgcttnacccaggctggttcanaggngtctgcattattgggccgaatcccttctgctgngggctatcagcctaccctggccactgacatgggtactatgcaggaaagaattaccactaccaagaagggatctatcacctctgtacaggctatctatgngcctgctgatgacttgactgaccctgcccctgctactacgtttgnccatttggatgctaccactgtactgtcgcggccattgctgagctgggcatctatncngctggggatcctctagactccacctntcggatcaagggatcccacattgntggcaggggagcattaccaatgttgccccgggggggcaaaaaatcctgcnggactacnaatcctnccgggaaanattgca

SEQ ID NO: 1116 - DNA, 763 bp, Homo sapiens
  misc_feature (611)..(611): n equals a,t,g, or c
  misc_feature (698)..(698): n equals a,t,g, or c
  misc_feature (749)..(749): n equals a,t,g, or c
  misc_feature (754)..(754): n equals a,t,g, or c
gcccacgcgtccgcgcatcgttctgcagattgacaatgcccgtcttgctgctgatgactttagagtcaagtatgagacagagctggccatgcgccagtctgtggagaacgacatccatgggctccgcaaggtcattgatgacaccaatatcacacgactgcagctggagacagagatcgaggctctcaaggaggagctgctcttcatgaagaagaaccacgaagaggaagtaaaaggcctacaagcccagattgccagctctgggttgaccgtggaggtagatgcccccaaatctcaggacctcgccaagatcatggcagacatccgggcccaatatgacgagctggctcggaagaaccgagaggagctagacaagtactggtctcagcagattgaggagagcaccacagtggtcaccacacagtctgctgaggttggagctgctgagacgacgctcacagagctgagacgtacagtccagtccttggagatcgacctggactccatgagaaatctgaaggccagcttggagaacagcctgagggaggtggaggcccgctacgccctacagatggagcagctcaacgggatcctgctgcaccttgagtcanagctgcacagacccgggcagagggacagcgccaggcccaggagtatgaggccctgcttaacatcaaggtcaagctggaaggcttganatcggcacctaccggccgcctggttggaaaatggccaaggacttttaatcnttggngaatgccct

SEQ ID NO: 1117 - DNA, 749 bp, Homo sapiens
  misc_feature (215)..(215): n equals a,t,g, or c
  misc_feature (512)..(512): n equals a,t,g, or c
  misc_feature (608)..(608): n equals a,t,g, or c
  misc_feature (716)..(716): n equals a,t,g, or c
ggcgagcgcggctgcagccggcggcatggctagcacggcttcggagatcatcgccttcatggtctccatctcaggctgggtactggtgtcctccacgctgcccaccgactactggaaggtgtctaccatcgacggcacggtcatcacaaccgccacctattgggccaacctgtggaaggcgtgcgttaccgactccacgggcgtctccaactgcnaggacttcccctccatgctggcgctggacggttatatacaggcatgtagaggacttatgatcgctgctgtcagcctgggcttctttggttccatatttgcgctctttggaatgaagtgtaccaaagtcggaggctccgataaagccaaagctaaaattgcttgtttggctgggattgtattcatactgtcagggctgtgctcaatgactggatgttccctatatgcaaacaaaatcacaacggaattctttgatcctctctttgttgagcaaaagtatgaattaggagccgctctgnttattggatgggcaggagcctcactgtgcataattggtgggggcatattttgcttttcaatatctgacaacaaccaaacacccagatacacatacnacggggccacatctgtcatgcttctcggacaaaggatcatggtggagaaaatttaaacacaacccttcaaacagtttgataaaagctatgctaaaaactcgttggaanctgctcttgagttggtataaaacgactgtcaca

SEQ ID NO: 1118 - DNA, 687 bp, Homo sapiens
  misc_feature (440)..(440): n equals a,t,g, or c
  misc_feature (460)..(460): n equals a,t,g, or c
  misc_feature (523)..(523): n equals a,t,g, or c
  misc_feature (527)..(527): n equals a,t,g, or c
  misc_feature (551)..(551): n equals a,t,g, or c
  misc_feature (574)..(574): n equals a,t,g, or c
  misc_feature (593)..(593): n equals a,t,g, or c
  misc_feature (614)..(614): n equals a,t,g, or c
  misc_feature (619)..(619): n equals a,t,g, or c
  misc_feature (638)..(638): n equals a,t,g, or c
  misc_feature (648)..(648): n equals a,t,g, or c
gctggctccgcactgttcggcagaggctgggagccccgccatggctgtgctcgaccgaggcacctccaccaccaccgtgttcaacttccccgtctccatccctgtccactccacgaacagtgcgctgagctaccttcagagccccattacgacctctcccagctgctgaaaggccacgggaggtgaggctcttcacatcccattgggactccatgctccttgagaggagaaatgcaataactctgggaggggctcgagagggctggtccttatttatttaacttcacccgagttcctctgggtttctaagcagttatggtgatgacttagcgtcaagacatttgctgaactcagcacattcgggaccaatatatagtgggtacatcaagtccatctgacaaaatggggcagaagagaaaggactcagtgtgtgatccggnttctttttgctcgcccctgntttttgtagaatctcttcatgcttgacatacctaccagtattattcccgacgacacatatacntatnagaatataccttatttatttttgngtaagtgtctgccttacaaatgncattggctactcctagaanaaccaaatacctcaattttgnttttngagtactggactatcctgnaaatatatcntaagcaaggtttggttttagcactgatggaaaataccaa

SEQ ID NO: 1119 - DNA, 585 bp, Homo sapiens
  misc_feature (13)..(13): n equals a,t,g, or c
  misc_feature (25)..(25): n equals a,t,g, or c
  misc_feature (75)..(76): n equals a,t,g, or c
  misc_feature (86)..(86): n equals a,t,g, or c
  misc_feature (88)..(88): n equals a,t,g, or c
  misc_feature (135)..(135): n equals a,t,g, or c
  misc_feature (167)..(167): n equals a,t,g, or c
  misc_feature (257)..(257): n equals a,t,g, or c
  misc_feature (266)..(266): n equals a,t,g, or c
  misc_feature (271)..(271): n equals a,t,g, or c
  misc_feature (276)..(276): n equals a,t,g, or c
  misc_feature (286)..(286): n equals a,t,g, or c
  misc_feature (295)..(295): n equals a,t,g, or c
  misc_feature (297)..(297): n equals a,t,g, or c
  misc_feature (301)..(302): n equals a,t,g, or c
  misc_feature (306)..(306): n equals a,t,g, or c
  misc_feature (323)..(323): n equals a,t,g, or c
  misc_feature (326)..(326): n equals a,t,g, or c
  misc_feature (333)..(333): n equals a,t,g, or c
  misc_feature (348)..(349): n equals a,t,g, or c
  misc_feature (352)..(352): n equals a,t,g, or c
  misc_feature (371)..(371): n equals a,t,g, or c
  misc_feature (385)..(385): n equals a,t,g, or c
  misc_feature (389)..(389): n equals a,t,g, or c
  misc_feature (398)..(398): n equals a,t,g, or c
  misc_feature (413)..(413): n equals a,t,g, or c
  misc_feature (428)..(429): n equals a,t,g, or c
  misc_feature (434)..(435): n equals a,t,g, or c
  misc_feature (437)..(438): n equals a,t,g, or c
  misc_feature (445)..(445): n equals a,t,g, or c
  misc_feature (449)..(449): n equals a,t,g, or c
  misc_feature (454)..(454): n equals a,t,g, or c
  misc_feature (546)..(546): n equals a,t,g, or c
  misc_feature (560)..(560): n equals a,t,g, or c
  misc_feature (562)..(562): n equals a,t,g, or c
  misc_feature (569)..(569): n equals a,t,g, or c
  misc_feature (583)..(583): n equals a,t,g, or c
gatcaagatatcnttaccaacactnaaatacctttacagcttgtcacagtttctggaaatgagacaatggagtanntattacacancnacttattcattgtggttatttttatacagtagtgagaagaatattgntcctaagttcttagatatctttttattgatgngcaaaaatttttggattgacagtaacttggttatacatgacactgaaatgccttactttgtatgatattccatagtatattaaaaatggnaaaattgcntgggntttgnaggtactttnggaatctanangaanngaanttttaccaagttatatncanaggaaanttggatttaacctgnngantgggaagctaaccaatgcntaaccctggggggnttancggaaaaanggcaacatggtgggnatttaactaatggannggttnncnngcttggngggnggaangaaaatcatggttatggaaaaaaaattttggaaattttcttggaggactgggaatttttaataatgccttaacttgcccaaaccaaggtttnccaggccaaagggnancataagnggaaggcttttacntt

SEQ ID NO: 1120 - DNA, 821 bp, Homo sapiens
  misc_feature (5)..(5): n equals a,t,g, or c
  misc_feature (24)..(24): n equals a,t,g, or c
  misc_feature (35)..(35): n equals a,t,g, or c
  misc_feature (39)..(39): n equals a,t,g, or c
  misc_feature (50)..(50): n equals a,t,g, or c
  misc_feature (582)..(582): n equals a,t,g, or c
  misc_feature (736)..(736): n equals a,t,g, or c
  misc_feature (778)..(778): n equals a,t,g, or c
ggggnaaagaagggggggggaatnaacggggggancgcncgttacgcctngccggtaccggtccggaattcccgggtcgacccacgcgtccggcgacaccacaggcaagctgggctttgaggaattcaagtacttgtggaacaacatcaaaaggtggcaggccatatacaaacagttcgacactgaccgatcagggaccatttgcagtagtgaactcccaggtgcctttgaggcagcagggttccacctgaatgagcatctctataacatgatcatccgacgctactcagatgaaagtgggaacatggattttgacaacttcatcagctgcttggtcaggctggacgccatgttccgtgccttcaaatctcttgacaaagatggcactggacaaatccaggtgaacatccaggagtggctgcagctgactatgtattcctgaactggagccccagacccgcccctcaccgccttgctataggagtcacctggagcctcggtctctcccagggccgatcctgtctgcagtcacatctttgtggggcctgctgacccacaagcttttggtctctcagtacttgntacccagcttctcaacatccagggcccaatttgccctgcctggagttcccctggctctaggacactctaacaagctctgtccacgggtctcccattccaccaggccctgacacacccacttcgtaaccttttccctggacctgtgccaagctancacttgggatgccttcatgccccgagggcccttttttaattntgggaggatgacttcagtcccttgacgccctgggacaaccttt

SEQ ID NO: 1121 - DNA, 745 bp, Homo sapiens
  misc_feature (15)..(17): n equals a,t,g, or c
  misc_feature (72)..(72): n equals a,t,g, or c
  misc_feature (82)..(82): n equals a,t,g, or c
  misc_feature (300)..(300): n equals a,t,g, or c
  misc_feature (499)..(499): n equals a,t,g, or c
  misc_feature (545)..(545): n equals a,t,g, or c
  misc_feature (570)..(570): n equals a,t,g, or c
  misc_feature (574)..(574): n equals a,t,g, or c
  misc_feature (577)..(577): n equals a,t,g, or c
  misc_feature (600)..(600): n equals a,t,g, or c
  misc_feature (643)..(643): n equals a,t,g, or c
  misc_feature (666)..(666): n equals a,t,g, or c
  misc_feature (676)..(676): n equals a,t,g, or c
  misc_feature (717)..(717): n equals a,t,g, or c
  misc_feature (734)..(734): n equals a,t,g, or c
  misc_feature (739)..(739): n equals a,t,g, or c
cccactatagggatnnnctggtacgcctgcaggtaccggtccggaattcccgggtcgacccacgcgtccgtngccgtgtggntgagttggctgccggtgagttgggtgccggtggagtcgtgttggtcctcagaatccccgcgtagccgctgcctcctcctaccctcgccatgtttcttacccggtctgagtacgacaggggcgtgaatactttttctcccgaaggaagattatttcaagtggaatatgccattgaggctatcaagcttggttctacagccattgggatccagacatcanagggtgtgtgcctagctgtggagaagagaattacttccccactgatggagcccagcagcattgagaaaattgtagagattgatgctcacataggttgtgccatgagtgggctaattgctgatgctaagactttaattgataaagccagagtggagacacagaaccactggttacctacaatgagacaatgacagtgganagtgtgacccaagctgtgtccaatctggttttgaagtttggagaanaagatgcagatccaggtgccatgtntcgnccntttggagtagcattattatttgnaggagttgatgagaaaggacccagttgtttatatggacccatntggacctttgacagtggatgttnacaattgctntgtttaaaggtgcccaaagttcttgaagaagttacacaagntatgatttgaagaaccntaagnttacta

SEQ ID NO: 1122 - DNA, 756 bp, Homo sapiens
  misc_feature (15)..(15): n equals a,t,g, or c
  misc_feature (190)..(190): n equals a,t,g, or c
  misc_feature (201)..(201): n equals a,t,g, or c
  misc_feature (275)..(275): n equals a,t,g, or c
  misc_feature (321)..(321): n equals a,t,g, or c
  misc_feature (326)..(326): n equals a,t,g, or c
  misc_feature (339)..(339): n equals a,t,g, or c
  misc_feature (347)..(347): n equals a,t,g, or c
  misc_feature (353)..(353): n equals a,t,g, or c
  misc_feature (380)..(380): n equals a,t,g, or c
  misc_feature (401)..(401): n equals a,t,g, or c
  misc_feature (416)..(416): n equals a,t,g, or c
  misc_feature (454)..(454): n equals a,t,g, or c
  misc_feature (468)..(468): n equals a,t,g, or c
  misc_feature (479)..(479): n equals a,t,g, or c
  misc_feature (493)..(493): n equals a,t,g, or c
  misc_feature (511)..(511): n equals a,t,g, or c
  misc_feature (520)..(520): n equals a,t,g, or c
  misc_feature (535)..(536): n equals a,t,g, or c
  misc_feature (545)..(545): n equals a,t,g, or c
  misc_feature (557)..(557): n equals a,t,g, or c
  misc_feature (562)..(562): n equals a,t,g, or c
  misc_feature (565)..(565): n equals a,t,g, or c
  misc_feature (571)..(571): n equals a,t,g, or c
  misc_feature (580)..(580): n equals a,t,g, or c
  misc_feature (592)..(593): n equals a,t,g, or c
  misc_feature (612)..(612): n equals a,t,g, or c
  misc_feature (619)..(619): n equals a,t,g, or c
  misc_feature (627)..(627): n equals a,t,g, or c
  misc_feature (638)..(638): n equals a,t,g, or c
  misc_feature (645)..(645): n equals a,t,g, or c
  misc_feature (648)..(648): n equals a,t,g, or c
  misc_feature (660)..(660): n equals a,t,g, or c
  misc_feature (671)..(671): n equals a,t,g, or c
  misc_feature (680)..(680): n equals a,t,g, or c
  misc_feature (691)..(691): n equals a,t,g, or c
  misc_feature (700)..(700): n equals a,t,g, or c
  misc_feature (702)..(702): n equals a,t,g, or c
  misc_feature (712)..(712): n equals a,t,g, or c
  misc_feature (718)..(718): n equals a,t,g, or c
  misc_feature (727)..(727): n equals a,t,g, or c
  misc_feature (730)..(730): n equals a,t,g, or c
  misc_feature (755)..(755): n equals a,t,g, or c
gggtgaccactgaanatcctggtgtcgccatgggccgccgccccgcccgttgttaccggtattgtaagaacaagccgtacccaaagtctcgcttctgccgaggtgtccctgatgccaagattcgcatttttgacctggggcggaaaaaggcaaaagtggatgagtttccgctttgtggccacatggtgtnagatgaatatnagcagctgtcctctgaagccctggaggctgccgaatttgtgccaataagtacatggtaaaaagttgtggcaaanatggcttccatatccgggtgcggctccaccccttccacgtcattcngtatnaacaagatgttgncctgggcntggggnttgaaaggcttccaaaaaggcaatgcnaaggtgccttttgtaaagccncagggcacttgtggnccaagggtttcacaattggcccaaagtttaatcaaggnccaatcccgtaacnaaagcttgcantaacaaagggaagnaatggtgaaattgaaggncccttggcncaaaggggcccaaanntttcaaggnttttccttgggncccgnccngaaaanaattccacnattttttaaaannaaaattgggggctttttancccaagntttcaaanggtttaattanaattttnaanacaatggtgggntttaaaaaagnggtttaaancccaaaaaggntttgggggntnaagtacaatncccagncggggcccnttngaaaaagggcgggcccttgaattana

SEQ ID NO: 1123 - DNA, 586 bp, Homo sapiens
  misc_feature (429)..(429): n equals a,t,g, or c
  misc_feature (432)..(432): n equals a,t,g, or c
  misc_feature (436)..(436): n equals a,t,g, or c
  misc_feature (482)..(482): n equals a,t,g, or c
  misc_feature (504)..(504): n equals a,t,g, or c
  misc_feature (527)..(527): n equals a,t,g, or c
  misc_feature (557)..(557): n equals a,t,g, or c
  misc_feature (572)..(572): n equals a,t,g, or c
  misc_feature (582)..(582): n equals a,t,g, or c
ggccttgttggagctctgaccctgaaccctcctcacttttgcccctgtcacctttaggaagtaaaaggcctacaagcccagattgccagctctgggttgaccgtggaggtagatgcccccaaatctcaggacctcgccaagatcatggcagacatccgggcccaatatgacgagctggctcggaagaaccgagaggagctagacaagtactggtctcagcagattgaggagagcaccacagtggtcaccacacagtctgctgaggttggagctgctgagacgacgctcacagagctgagacgtacagtccagtccttggagatcgacctggactccatgagaaatctgaaggccagcttggagaacagcctgagggaggtggaaggcccgttacgccctacagatggagcaagctcaacgggatcctgntgnaccnttgagtcaaagcttgcacaaaacccggcagagggacagcgccaggnccaggaatatgaggccctgttnacatcaaggcaagttgaggtganatggcactaacggcgcttgttgaaatgcangacttaactgggatncttgaaaganactc

SEQ ID NO: 1124 - DNA, 312 bp, Homo sapiens
  misc_feature (37)..(37): n equals a,t,g, or c
  misc_feature (52)..(52): n equals a,t,g, or c
  misc_feature (64)..(64): n equals a,t,g, or c
  misc_feature (76)..(76): n equals a,t,g, or c
  misc_feature (84)..(84): n equals a,t,g, or c
  misc_feature (116)..(116): n equals a,t,g, or c
  misc_feature (123)..(123): n equals a,t,g, or c
  misc_feature (137)..(137): n equals a,t,g, or c
  misc_feature (156)..(156): n equals a,t,g, or c
  misc_feature (178)..(178): n equals a,t,g, or c
  misc_feature (180)..(180): n equals a,t,g, or c
  misc_feature (187)..(187): n equals a,t,g, or c
  misc_feature (198)..(198): n equals a,t,g, or c
  misc_feature (202)..(202): n equals a,t,g, or c
  misc_feature (235)..(235): n equals a,t,g, or c
  misc_feature (266)..(266): n equals a,t,g, or c
  misc_feature (295)..(295): n equals a,t,g, or c
  misc_feature (302)..(302): n equals a,t,g, or c
  misc_feature (308)..(308): n equals a,t,g, or c
gcacatttgggtgaagctgtcaaggccagagagaganatgatagagtgacgncttcctgtatanagctgtacctgncgcagagnaagttcgatgtcagcctgattagatatcaagncctcctngaaccctgagctcnaggccgtacgcatgattgntgactacctctgccacgagagncncatatanagcatcagggncaanctggacacgagagatgagcacgagcgttgacgngaccaacaccaccttcctgctcatggccganttcatatatctccacttccaagaacccgngtgctantcctgngtac

SEQ ID NO: 1125 - DNA, 512 bp, Homo sapiens
  misc_feature (8)..(8): n equals a,t,g, or c
  misc_feature (433)..(434): n equals a,t,g, or c
  misc_feature (456)..(456): n equals a,t,g, or c
  misc_feature (485)..(485): n equals a,t,g, or c
gtgatatnactgagaaaaccaattacaatctagatctctatcatatttctttctcaatagattaagtgatgcctctggaaaatatatcagttgttgttgaggatttctgagaaaagtaaatgagaaataagaaaagaagggggtgtctatttacacttaggattctctttcaatgtttcagttttgaaatttaatggtctttgatttgtggcagtgtttgctgcaaggtcgataaaaaaaatgtttatttccttattcactgacctttcaaggagaacatacagtaaaaaaattccccaggtgtcaatatcaggaaagtggtattttccctgaacaacttctatcatgcatgctttccaccctagtttaaaaaatgcatccaaataaatcttgatgtgactcaactgattaaatgcatgaaataaatcttggnntatataataatttcaattatgnaagctggtagaaataaatatgagatctgnaaacattcaggtctttctgaaaaaaaa

SEQ ID NO: 1126 - DNA, 443 bp, Homo sapiens
  misc_feature (425)..(425): n equals a,t,g, or c
  misc_feature (432)..(432): n equals a,t,g, or c
  misc_feature (441)..(443): n equals a,t,g, or c
gcagaacccaacctccgagcagtacatgctaagacttcaccagtcaaagcgaactactatactcaattgatccaataacttgaccaacggaacaagttaccctagggataacagcgcaatcctattctagagtccatatcaacaatagggtttacgacctcgatgttggatcaggacatcccgatggtgcagccgctattaaaggttcgtttgttcaacgattaaagtcctacgtgatctgagttcagaccggagtaatccaggtcggtttctatctacttcaaattcctccctgtacgaaaggacaagagaaataaggcctacttcacaaagcgccttcccccgtaaatgatatcatctcaacttagtattatacccacacccacccaagaacagggtttgaaaaaaaaaaaaaaaaaaaaaanggggggncctttttannn

SEQ ID NO: 1127 - DNA, 795 bp, Homo sapiens
  misc_feature (352)..(352): n equals a,t,g, or c
  misc_feature (428)..(428): n equals a,t,g, or c
  misc_feature (430)..(430): n equals a,t,g, or c
  misc_feature (452)..(452): n equals a,t,g, or c
  misc_feature (460)..(460): n equals a,t,g, or c
  misc_feature (495)..(495): n equals a,t,g, or c
  misc_feature (499)..(499): n equals a,t,g, or c
  misc_feature (503)..(503): n equals a,t,g, or c
  misc_feature (534)..(534): n equals a,t,g, or c
  misc_feature (538)..(538): n equals a,t,g, or c
  misc_feature (543)..(544): n equals a,t,g, or c
  misc_feature (559)..(559): n equals a,t,g, or c
  misc_feature (573)..(574): n equals a,t,g, or c
  misc_feature (581)..(581): n equals a,t,g, or c
  misc_feature (593)..(593): n equals a,t,g, or c
  misc_feature (604)..(604): n equals a,t,g, or c
  misc_feature (611)..(611): n equals a,t,g, or c
  misc_feature (618)..(618): n equals a,t,g, or c
  misc_feature (620)..(620): n equals a,t,g, or c
  misc_feature (627)..(627): n equals a,t,g, or c
  misc_feature (630)..(630): n equals a,t,g, or c
  misc_feature (634)..(634): n equals a,t,g, or c
  misc_feature (640)..(640): n equals a,t,g, or c
  misc_feature (644)..(645): n equals a,t,g, or c
  misc_feature (650)..(650): n equals a,t,g, or c
  misc_feature (660)..(660): n equals a,t,g, or c
  misc_feature (677)..(677): n equals a,t,g, or c
  misc_feature (684)..(684): n equals a,t,g, or c
  misc_feature (688)..(688): n equals a,t,g, or c
  misc_feature (726)..(726): n equals a,t,g, or c
  misc_feature (754)..(754): n equals a,t,g, or c
  misc_feature (766)..(766): n equals a,t,g, or c
  misc_feature (774)..(774): n equals a,t,g, or c
gtgcccacgcagctttcagtcatggcctccggtaacgcgcgcatcggaaagccagcccctgacttcaaggccacagcggtggttgatggcgccttcaaagaggtgaagctgtcggactacaaagggaagtacgtggtcctctttttctaccctctggacttcacttttgtgtgccccaccgagatcatcgcgttcagcaaccgtgcagaggacttccgcaagctgggctgtgaagtgctgggcgtctcggtggactctcagttcacccacctggcttggatcaacaccccccggaaagagggaggcttggccccctgaacatcccctgcttgctgacgtgaccagaccttgnctgaggattacggcgtgctgaaaacagattagggcattgcctacaggggcctctttatcatcgatggcaagggtgncnttgccagatactggtaatgganttgcctgngggacgcttcgtggattaagctctttcggctgggnccanggcntttcaggtaccccagacccaaccatgggggnaaantttgnncccgctttgcttggnaaacccttgggcanntggaccnccgaatttaaancccccaaccgngggattnaccggcnanggggaanaantttntttccnaaannccaanttaaggcttngggttaacgggataaanggaagcnttgnggccccctgggctaaagggcccccgggcttgggggggnccccctttgggcccccaacttggggggnccctaaactttnccccccgnaaagggcccaaaactgggccc

SEQ ID NO: 1128 - DNA, 587 bp, Homo sapiens
  misc_feature (277)..(277): n equals a,t,g, or c
  misc_feature (332)..(332): n equals a,t,g, or c
  misc_feature (344)..(344): n equals a,t,g, or c
  misc_feature (360)..(360): n equals a,t,g, or c
  misc_feature (366)..(366): n equals a,t,g, or c
  misc_feature (389)..(389): n equals a,t,g, or c
  misc_feature (423)..(423): n equals a,t,g, or c
  misc_feature (443)..(443): n equals a,t,g, or c
  misc_feature (466)..(466): n equals a,t,g, or c
  misc_feature (477)..(477): n equals a,t,g, or c
  misc_feature (491)..(491): n equals a,t,g, or c
  misc_feature (530)..(530): n equals a,t,g, or c
  misc_feature (550)..(550): n equals a,t,g, or c
  misc_feature (566)..(566): n equals a,t,g, or c
  misc_feature (584)..(584): n equals a,t,g, or c
gcgcttggggaaggaggcgtcttggcccgggcagcagtggcggcagcgcccgagagagggtgagcttgtcggccacagactgctacattgtgcatgagatctacaatggggagaatgcccaagaccagtttgagtacgagctggagcaggccctggaagcccagtacaagtacattgtgattgagcccactcgcattggcgacgagacagcccgctggatcaccgtgggcaactgcctgcacaagacggccgtgctggcgggcaccgctgcctcttnccccgttggcgcttgccttagattattcccactacatttcccttgccgatggtgngctgaacctggnctgctgaccctctatnggatcntctggcaagttgacctttgctgnaagtaccaagtggagtacgacgcccataaactgncgcgcctgccttttggacanacttaacttccttcaacccgggnggtggcttggnccggaaaggacgancttggacaagaaaggaagacttggaccaacacggatagnacttgggccgccctgggggnactgggtaaaaggaanaattacgaacttttatgnccc

SEQ ID NO: 1129 - DNA, 740 bp, Homo sapiens
  misc_feature (333)..(333): n equals a,t,g, or c
  misc_feature (340)..(340): n equals a,t,g, or c
  misc_feature (349)..(349): n equals a,t,g, or c
  misc_feature (506)..(506): n equals a,t,g, or c
  misc_feature (544)..(544): n equals a,t,g, or c
  misc_feature (593)..(593): n equals a,t,g, or c
  misc_feature (611)..(611): n equals a,t,g, or c
  misc_feature (620)..(620): n equals a,t,g, or c
  misc_feature (631)..(631): n equals a,t,g, or c
  misc_feature (711)..(711): n equals a,t,g, or c
  misc_feature (721)..(721): n equals a,t,g, or c
  misc_feature (725)..(726): n equals a,t,g, or c
  misc_feature (733)..(733): n equals a,t,g, or c
ggccgcagccatgagtatgctcaggcttcagaagaggctcgcctctagtgtcctccgctgtggcaagaagaaggtctggttagaccccaatgagaccaatgaaatcgccaatgccaactcccgtcagcagatccggaagctcatcaaagatgggctgatcatccgcaagcctgtgacggtccattcccgggctcgatgccggaaaaacaccttggcccgccggaagggcaggcacatgggcataggtaagcggaagggtacagccaatgcccgaatgccagagaaggtcacatggatgaggagaatgaggattttgcgccggctgctcagaanataccgngaatcttanaagatcgatcgccacatgtatcacagcctgtacctgaaggtgaaggggaatgtgttcaaaaacaagcggattctcatggaacacatccacaagctgaagcagacaaggcccgcaagaagcttctggctgaccaggctgaggcccgcaagtctaagancaaggaagcacgcaagcgccgtgaagagcgcttcaggncaagaaggaggagatcatcaaggactttattccagggaggaagagaccnagaaataaaaacttcccnttttgctgnacatactgggncctttgggaatacttagatcaacccttaaaataaaacaagccttaatctgcaaaaaaaaaaaaaaaaaaaggggggcccnttttaaagancccnnttttaanacccggg

SEQ ID NO: 1130 - DNA, 571 bp, Homo sapiens
  misc_feature (13)..(13): n equals a,t,g, or c
  misc_feature (277)..(277): n equals a,t,g, or c
  misc_feature (320)..(320): n equals a,t,g, or c
  misc_feature (350)..(350): n equals a,t,g, or c
  misc_feature (375)..(375): n equals a,t,g, or c
  misc_feature (457)..(457): n equals a,t,g, or c
  misc_feature (513)..(513): n equals a,t,g, or c
  misc_feature (543)..(543): n equals a,t,g, or c
  misc_feature (545)..(546): n equals a,t,g, or c
  misc_feature (558)..(558): n equals a,t,g, or c
gaattattgcagngacttttctctttaaatggtgggataacttaaatcatttgaatcagtttgttgaccatgagaaaatatacagaatgtgaatatgtaggtaaatgattacagaaaaatttatctgcttaacaaacttagaatgactttttccttttaaatttagttctatcattaatttatcattaaatttagttctatcatttggtactatcattaatgtattatatacactgatactttaaaacttgtgtggaaaaactacttataattttgnatcacacaccctggatatgggtctggttctaagccgcatttgngagagattatggaaaatgagaccgaccaantaaacttaattaaacttgcagatcntacttatgggaaattgacaaatgagggaactctgggtttagagctggataacattccgagccttgcaaggacttgtattgcnaggcttaaggacataaatttccaagttaaaaatggcaaggaactttggtcgtcttnaaagctaatacttcaataccgtaactgccnanngtcaggaataanggtggcccattgg

SEQ ID NO: 1131 - DNA, 541 bp, Homo sapiens
  misc_feature (78)..(78): n equals a,t,g, or c
  misc_feature (87)..(87): n equals a,t,g, or c
  misc_feature (95)..(95): n equals a,t,g, or c
  misc_feature (130)..(130): n equals a,t,g, or c
  misc_feature (137)..(137): n equals a,t,g, or c
  misc_feature (189)..(189): n equals a,t,g, or c
  misc_feature (209)..(209): n equals a,t,g, or c
  misc_feature (211)..(211): n equals a,t,g, or c
  misc_feature (483)..(483): n equals a,t,g, or c
  misc_feature (517)..(518): n equals a,t,g, or c
  misc_feature (528)..(528): n equals a,t,g, or c
  misc_feature (531)..(531): n equals a,t,g, or c
gggcggcggcggcgatccacagtgattcggccgccgcgccggggggtgggggggctgcgcgggacttttttttttcanactgaccgnggggcagntgcggagcatgtcgaccccggcccggaggaggctnatgcggnatttcaagcggttacaagaggacccacctgtgggtgtcagtggcgcaccatntgaaaacaacatcatgcagngnaatgcagttatatttggaccagaagggacaccttttgaagatggtacttttaaactagtaatagaattttctgaagaatatccaaataaaccaccaactgttaggtttttatccaaaatgtttcatccaaatgtgtatgctgatggtagcatatgtttagatatccttcagaatcgatggagtccaacatatgatgtatcttctatcttaacatcaattcaatctctgctggatgaaccgaatcctaacagtccagccaatagccaggcagnacaagtttatcaggaaaacaaaccagaattttannaaaagagttnggncattgttgaa

SEQ ID NO: 1132 - DNA, 750 bp, Homo sapiens
  misc_feature (10)..(10): n equals a,t,g, or c
  misc_feature (368)..(368): n equals a,t,g, or c
  misc_feature (514)..(514): n equals a,t,g, or c
  misc_feature (622)..(622): n equals a,t,g, or c
  misc_feature (647)..(647): n equals a,t,g, or c
  misc_feature (678)..(678): n equals a,t,g, or c
  misc_feature (715)..(715): n equals a,t,g, or c
  misc_feature (724)..(724): n equals a,t,g, or c
  misc_feature (743)..(743): n equals a,t,g, or c
  misc_feature (749)..(749): n equals a,t,g, or c
ggccaggccngtagtgccggggccccgcgtccgggccctgcagcttccctaccgctgtgctcagcccggagaccagtgccaggttgctggctggggcaccacggccgcccggagagtgaagtacaacaagggcctgacctgctccagcatcactatcctgagccctaaagagtgtgaggtcttctaccctggcgtggtcaccaacaacatgatatgtgctggactggaccggggccaggacccttgccagagtgactctggaggccccctggtctgtgacgagaccctccaaggcatcctctcgtggggtgtttacccctgtggctctgcccagcatccagctgtctacacccagatctgcaaatacntgtcctggatcaataaagtcatacgctccaactgatccagatgctacgctccagctgatccagatgttatgctcctgctgatccagatgcccagaggctccatcgtccatcctcttcctccccagtcggctgaactctccccttgnctgcactgttcaaacctctgcccgccctccacacctcttaacatctcccctctcacctcaatcccccacctatccccattctctgcctgtactgaagcttaaatgcangaagtggtggccaaggttattccanagaagccaggaagcggtcatccccagctctnaagagtactgggtccccaactgattcttgcactcccnttgtctttngcaagcagggcttttactnttctant

SEQ ID NO: 1133 - DNA, 600 bp, Homo sapiens
  misc_feature (488)..(488): n equals a,t,g, or c
  misc_feature (531)..(531): n equals a,t,g, or c
  misc_feature (572)..(573): n equals a,t,g, or c
  misc_feature (576)..(576): n equals a,t,g, or c
  misc_feature (597)..(597): n equals a,t,g, or c
gcaaatttcttgtatcaggaagaaatacaaattttgtcatgtttctcaagcagtgtttctgaggaggaacaaattacaagtgtacccaataactgaaaatgttttaactcactctcatttgtaagcagtccacatagtagacaatgggttttccaagctgggcaaggtacatttaatcagtaaatcagtttcacatcatgtattgtgatgtttcaatgtgagacacaaaaacaatggcttgaaacttgtgtatcatatgtgattttgaaatgaacaccttgaatagcactaatttttatttgtggtatttttctataacaaaacaagtagctctaggaaaagaggttttattttgtaaacgatcatttgtgacctcagacactctctggctaatattttaataagctcacagcagataattctgagatcatgggtgaggggtggtgcatgttgagatttaaattggcataaagttgcatactttttgnctagctggttgattcattttttaatatagtatgccaattttgngactggtaccatgtgaaaagtcctgttgaaatgacaaatgnntgnccacaatcaagaatgatgtgnaag

SEQ ID NO: 1134 - DNA, 653 bp, Homo sapiens
  misc_feature (9)..(9): n equals a,t,g, or c
  misc_feature (36)..(36): n equals a,t,g, or c
  misc_feature (51)..(51): n equals a,t,g, or c
  misc_feature (57)..(57): n equals a,t,g, or c
  misc_feature (60)..(60): n equals a,t,g, or c
  misc_feature (104)..(104): n equals a,t,g, or c
  misc_feature (107)..(107): n equals a,t,g, or c
  misc_feature (346)..(346): n equals a,t,g, or c
  misc_feature (369)..(369): n equals a,t,g, or c
  misc_feature (428)..(428): n equals a,t,g, or c
  misc_feature (465)..(465): n equals a,t,g, or c
  misc_feature (495)..(495): n equals a,t,g, or c
  misc_feature (525)..(525): n equals a,t,g, or c
  misc_feature (566)..(566): n equals a,t,g, or c
  misc_feature (579)..(579): n equals a,t,g, or c
  misc_feature (587)..(587): n equals a,t,g, or c
  misc_feature (633)..(633): n equals a,t,g, or c
  misc_feature (645)..(645): n equals a,t,g, or c
cttccgggngaacccaagctggagctccaccgcggnggcggccgctctagntttagnggnttccccgggctgcaggaattcgatatcaagcttatcgataccgnccncctcgagggggggcccggtacccaattcgccctatagtgagtcgtattacgcgcgctcactggccgtcgttttacaacgtcgtgactgggaaaaccctggcgttacccaacttaatcgccttgcagcacatccccctttcgccagctggcgtaatagcgaagaggcccgcaccgatcgcccttcccaacagttgcgcagcctgaatggcgaatggaaattgtaagcgttaatattttgntaaaattcgcgttaaatttttgntaaatcagctcatttttttaaccaataggccgaaatcggcaaaatcccttataaatcanaagaatagaccgagatagggttgagtggtgttccagnttggaacaagagtccactattaaagaacgnggactccaacgtcaaagggcgaaaaaccgnctatcaaggcgaaggcccatacgtgaaccatcaccctaacnaggtttttggggncgaggtgnccgaaaggcctaaatcgggaaccctaaaggggagcccccgatttanagcttgacgggnaaggccgg

SEQ ID NO: 1135 - DNA, 90 bp, Homo sapiens
  misc_feature (5)..(5): n equals a,t,g, or c
  misc_feature (48)..(48): n equals a,t,g, or c
  misc_feature (51)..(51): n equals a,t,g, or c
  misc_feature (53)..(53): n equals a,t,g, or c
  misc_feature (89)..(89): n equals a,t,g, or c
gcgantatttttaaaagccaaagattgacccagttacttgagggtagngangncggacccagtgcaaagaggctgcatccctggcctgnt

SEQ ID NO: 1136 - DNA, 702 bp, Homo sapiens
  misc_feature (525)..(525): n equals a,t,g, or c
  misc_feature (563)..(563): n equals a,t,g, or c
  misc_feature (598)..(598): n equals a,t,g, or c
  misc_feature (629)..(629): n equals a,t,g, or c
  misc_feature (633)..(633): n equals a,t,g, or c
  misc_feature (636)..(636): n equals a,t,g, or c
  misc_feature (653)..(653): n equals a,t,g, or c
  misc_feature (692)..(692): n equals a,t,g, or c
ggcagcttcaccaacccctgcaaagtgactctgaagaagacgacaagccctgctccagtcacacccggaagctgactggtccacgcacagctgaagcatgaggaaactcatcgcgggactaattttccttaaaatttagacttgcacagtaaggacttcaactgaccttcctcagactgagaactgtttccagtatatacatcaagtcactgaggtaggacaaaagattgctacattcctattattttatgggtattataagtgtaccaggactctaaaagaaacttgtttgtataatgctattctatccaaggtatgtagcccaggaaataaccaacttgatgcgtgttatgacccattttaagcctcccatgatcacagtttttaaaatacaattaaggactggtccttttctaggtgacacaagaaaggtaatagctagaacagaagaaagaggggtccccaaaaatgtaaccttaaaatttgacacttgggccactattgatagtaagcagcatggatgangatgtggtctctaaattggaaaaaaaggttcacagtanaataagtatatctgcaagaatcataattatgtganatgggcaatactgggccttgggtaattcggntacntgnaaatagttaaaaaaaanagggttggttccaaaaaggaaagcagctttctggataanggaattgaac

SEQ ID NO: 1137 - DNA, 738 bp, Homo sapiens
  misc_feature (612)..(612): n equals a,t,g, or c
  misc_feature (648)..(648): n equals a,t,g, or c
  misc_feature (686)..(686): n equals a,t,g, or c
  misc_feature (722)..(722): n equals a,t,g, or c
  misc_feature (734)..(734): n equals a,t,g, or c
gcctactctctggacaaagacagcctctaccttaacggttacaatgaacctggtccagatgagcctcctacaactcccaagccagccaccacattcctgcctcctctgtcagaagccacaacagccatggggtaccacctgaagaccctcacactcaacttcaccatctccaatctccagtattcaccagatatgggcaagggctcagctacattcaactccaccgagggggtccttcagcacctgctcaaaacctttgttccagaagagcagcatgggccccttctacttgggttgccaactgatctccctcaggcctgagaaggatggggcagccactggtgtggacaccacctgcacctaccaccctgaccctgtgggccccgggctggacatacagcagctttactgggagctgagtcagctgacccatggtgtcacccaactgggcttctatgtcctggacagggatagcctcttcatcaatggctatgcaccccagaatttatcaatccggggcgagtaccagataaatttccacattgtcaactggaacctcagtaatccagaccccacattcttagaagtacatcacccttcttaagggacatncagggacaaggtcaaccacacttttacaaaggcagncaaactaccttgaaacaattccggttttggctgggcancaaatttgacaatggacttcccggttggcaactggnaaaggcatttgntttt

SEQ ID NO: 1138 - DNA, 639 bp, Homo sapiens
  misc_feature (246)..(246): n equals a,t,g, or c
  misc_feature (305)..(305): n equals a,t,g, or c
  misc_feature (333)..(333): n equals a,t,g, or c
  misc_feature (512)..(512): n equals a,t,g, or c
  misc_feature (542)..(542): n equals a,t,g, or c
  misc_feature (555)..(555): n equals a,t,g, or c
  misc_feature (557)..(557): n equals a,t,g, or c
  misc_feature (638)..(639): n equals a,t,g, or c
gcagttatcgtgaagggccccagaggaaccctgcggagggacttcaatcacatcaatgtagaactcagccttcttggaaagaaaaaaaagaggctccgggttgacaaatggtggggtaacagaaaggaactggctaccgttcggactatttgtagtcatgtacagaacatgatcaagggtgttacactgggcttccgttacaagatgaggtctgtgtatgctcacttccccatcaacgttggtatncaggagaaatgggtctcttgttgaaatccgaaattcttgggtgaaaaatatatccccanggttcggatgagaccaggtgttgcttgntcagtatctcaagcccagaaagatgaattaatccttgaaggaaatgacatttgagcttggtttcaaaattcagcggcttttgattcagcaggccacaacagttaaaaccaaggatatcaggaaaatttttggatggaatctaatgcttttaaaaaaggactggttcaacaagcttgatnaataagaatctaagaagttacctggctacnggaaagaaaaatncngaataaccctttaagaacctaacttgggataatttaaaaggatcaattaaaagaacctattggatttggaaaaaaaaaaann

SEQ ID NO: 1139 - DNA, 620 bp, Homo sapiens
  misc_feature (612)..(612): n equals a,t,g, or c
  misc_feature (617)..(618): n equals a,t,g, or c
gcagtaatgcaaggatcagtgatgaaaagagatttgtgtgcatgctagtaactgaggacaacgtgtttgaggcacctacaatagtcaaggtgttcaagcaaccatctaaacctgaaattgtaagcaaagcactgtttctcgaaacagagcagctaaaaaagttgggtgactgcatttcagaagacagttatccagatggcaatatcacatggtacaggaatggaaaagtgctacatccccttgaaggagcggtggtcataatttttaaaaaggaaatggacccagtgactcagctctataccatgacttccaccctggagtacaagacaaccaaggctgacatacaaatgccattcacctgctcggtgacatattatggaccatctggccagaaaacaattcattctgaacaggcagtatttgatatttactatcctacagagcaggtgacaatacaagtgctgccaccaaaaaatgccatcaaagaaggggataacatcactcttaaatgcttagggaatggcaaccctcccccagaggaatttttggtttacttaccaggacagccccaagagaactcgcgctcagtaaacgggaacatgccccctgcanacacnnaa

SEQ ID NO: 1140 - DNA, 653 bp, Homo sapiens
  misc_feature (67)..(67): n equals a,t,g, or c
  misc_feature (370)..(370): n equals a,t,g, or c
  misc_feature (444)..(444): n equals a,t,g, or c
  misc_feature (447)..(447): n equals a,t,g, or c
  misc_feature (475)..(475): n equals a,t,g, or c
  misc_feature (485)..(485): n equals a,t,g, or c
  misc_feature (548)..(548): n equals a,t,g, or c
  misc_feature (550)..(551): n equals a,t,g, or c
  misc_feature (590)..(590): n equals a,t,g, or c
  misc_feature (626)..(626): n equals a,t,g, or c
  misc_feature (629)..(629): n equals a,t,g, or c
  misc_feature (639)..(639): n equals a,t,g, or c
  misc_feature (647)..(647): n equals a,t,g, or c
gtggcgtctcagctccagaaccgactccgctccgcactggccttggtcacaggtgcggggagcggcntcggccgagcggtcagtgtacgcctggccggagagggggccaccgtagctgcctgcgacctggaccgggcagcggcacaggagacggtgcggctgctgggcgggccagggagcaaggaggggccgccccgagggaaccatgctgccttccaggctgacgtgtctgaggccagggccgccaggtgcctgctggaacaagtgcaggcctgcttttctcgcccaccatctgtcgctgtgtcctgtgcgggcatcacccaggatgagtttctgctgcacatgtctgaggatgactgggacaaagtcntagctgtcaacctcaagggcaccttcctagtcactcaggctgcagcacaagccctggtgtccaatggttgtcgnggntccatcatcaacatcagtagcatcgtangaaaggtggngaacgtggggcagacaaactatgcagcatccaaggctggagtgattgggctgacccagaccgnannccgggagcttggacgacatgggatccgcttgtaactctntccttccagggttcattgcaacacccatgacacaanaangtgccacaanaaagtggntggaca

SEQ ID NO: 1141 - DNA, 402 bp, Homo sapiens
  misc_feature (4)..(4): n equals a,t,g, or c
  misc_feature (369)..(369): n equals a,t,g, or c
  misc_feature (390)..(390): n equals a,t,g, or c
  misc_feature (393)..(394): n equals a,t,g, or c
  misc_feature (399)..(399): n equals a,t,g, or c
gctnagcctccaaaggagccagcctctccccagttcctgaaatcctgagtgttgcctgccagtcgccatgagaacttcctaccttctgctgtttactctctgcttacttttgtctgagatggcctcaggtggtaactttctcacaggccttggccacagatctgatcattacaattgcgtcagcagtggagggcaatgtctctattctgcctgcccgatctttaccaaaattcaaggcacctgttacagagggaaggccaagtgctgcaagtgagctgggagtgaccagaagaaatgacgcacaagtgaaatgaactttttataagcattcttttaataaaggaaaattgcttttgaagtatacctccnaaaaaaaaaaaaaaaaaaaanggnngcccnttt

SEQ ID NO: 1142 - DNA, 624 bp, Homo sapiens
  misc_feature (155)..(155): n equals a,t,g, or c
  misc_feature (163)..(163): n equals a,t,g, or c
  misc_feature (215)..(215): n equals a,t,g, or c
  misc_feature (243)..(243): n equals a,t,g, or c
  misc_feature (283)..(283): n equals a,t,g, or c
  misc_feature (439)..(439): n equals a,t,g, or c
  misc_feature (472)..(472): n equals a,t,g, or c
  misc_feature (525)..(525): n equals a,t,g, or c
  misc_feature (528)..(528): n equals a,t,g, or c
  misc_feature (570)..(570): n equals a,t,g, or c
  misc_feature (578)..(578): n equals a,t,g, or c
  misc_feature (582)..(582): n equals a,t,g, or c
  misc_feature (615)..(615): n equals a,t,g, or c
gcttttttattccattttggtgtggacgcgtctgaaactgatagtgctgctgctacctaccataatgtgtttgttgcaagatccacaagaacgtggatgccaagaatccacaaaaaaaaaacagatgcaaccgttgatgaggccataagcagaancagtaagnggttcccacgtttcctctgctttaactactgatgatgaaatgcaagtcatanggcaaaaagaaaggccttgactgatacngacaaaatgttattattatgggaagggataactcccttgnaaaaccttgaaatgtttttcttctttgagaaaaatctatcacctattttaaccctgctcttgatatagcaaatattgtaagttgacttatggaggatgactcacggaagacggtgaatgggttcactcaatccagaaaaggaagaggaaaatacanggacataacgaccaatctgtgaaaacgctcagnggcttaaaagacctattaagagatgaaactatttgattctttatttaactccnttncaaggaaaggttttgaaaatccatacggtttacatatttaanaaggacantctngtaaagggggtttttttgaaaaatgaaatttanattaaaggg

SEQ ID NO: 1143 - DNA, 609 bp, Homo sapiens
  misc_feature (360)..(360): n equals a,t,g, or c
  misc_feature (372)..(372): n equals a,t,g, or c
  misc_feature (379)..(379): n equals a,t,g, or c
  misc_feature (449)..(449): n equals a,t,g, or c
  misc_feature (491)..(491): n equals a,t,g, or c
  misc_feature (501)..(501): n equals a,t,g, or c
  misc_feature (531)..(531): n equals a,t,g, or c
  misc_feature (551)..(551): n equals a,t,g, or c
  misc_feature (568)..(568): n equals a,t,g, or c
  misc_feature (581)..(581): n equals a,t,g, or c
  misc_feature (601)..(601): n equals a,t,g, or c
gggctcatcgagctgaaggactgccagccggacaaggtgtacctgggaggcctggacgtgtgtggtgaggacggccagttcacctactgctggcacgatgacatcatgcaagccgtcttccacatcgccaccctgatgcccaccaaggacgtggacaagcaccgctgcgacaagaagcgccacctgggcaacgactttgtgtccattgtctacaatgactccggtgaggacttcaagcttggcaccatcaagggccagttcaactttgtccacgtgatcgtcaccccgctggactacgagtgcaaccttggtgtccttgcagtgcaggaaagacattggagggctttgtggacacccaanccgtgggccaanaatcggngtcttgaccggcaacctgccctttcgtggccccggccagatgggcccttgcacgcaaaatattgggcttnacaaggtgcattaataagcccgtttccaaccccaaccgatantcttaacccnttccaagtggaattggccccgggtttccgncacattaaagcgggtttccncccggcggaatctttcnaaggaaaacccgnctaaattccaaaccccaagncctaactt

SEQ ID NO: 1144 - DNA, 210 bp, Homo sapiens
gttcaagattacttaaactcttctctaccaaactcattaacttttaggttagcacagtattttcattgatattttggtttctggagttattactaattttcttgatctgatgttataattaaaaaaaaacaggactttgtacgtgaaatgagactgagataaggaagctgattcagagatggagatttaaaaaaagagagagagagaaaa

SEQ ID NO: 1145 - DNA, 468 bp, Homo sapiens
  misc_feature (274)..(274): n equals a,t,g, or c
  misc_feature (302)..(302): n equals a,t,g, or c
  misc_feature (315)..(315): n equals a,t,g, or c
  misc_feature (351)..(351): n equals a,t,g, or c
  misc_feature (401)..(401): n equals a,t,g, or c
  misc_feature (417)..(417): n equals a,t,g, or c
  misc_feature (431)..(431): n equals a,t,g, or c
  misc_feature (463)..(463): n equals a,t,g, or c
  misc_feature (465)..(465): n equals a,t,g, or c
ggtttcaatgttaaactaaactattgccttcctcttacttttcctaaaatgattttctaatgggaacagtcacttcaagttcatgacatagtttgaaggaggataattcattttttcctggttgtcactgtcttcttatccccttggtgggctgggttcatactgtgaaataaactaaaatgaaaccaaaacgttcctgccgtaaatacgtggcacagcactgcagaaaaagcagtcacctctattcgtgagtccccaagccatagcagggcgnctgtaaaagaagggaaactgcacccagnaagtgggtggcgncagacgcatcctttcgcccgtagttcatgaaatagntccggctttggtctttcagaaaatctcaacttcaccgtgcaccaaagtgntacccggggtcttttntaagtgtaagccangggaagaaactttcaaaagggaccatcttcanancat

SEQ ID NO: 1146 - DNA, 549 bp, Homo sapiens
  misc_feature (258)..(258): n equals a,t,g, or c
  misc_feature (337)..(337): n equals a,t,g, or c
  misc_feature (380)..(380): n equals a,t,g, or c
  misc_feature (408)..(408): n equals a,t,g, or c
  misc_feature (415)..(415): n equals a,t,g, or c
  misc_feature (471)..(471): n equals a,t,g, or c
  misc_feature (483)..(483): n equals a,t,g, or c
  misc_feature (512)..(512): n equals a,t,g, or c
  misc_feature (517)..(517): n equals a,t,g, or c
  misc_feature (534)..(534): n equals a,t,g, or c
gaaaagaaagaaagcagcagcatgatcctgacatgacagatgtgggagacccacagcctgcagacactgtgggctggaaggtgggaagggaggggccggtggaggtggagctgtttgaaagtgacacagcagcagtagaagcagtggtgggcgaagcccaggtgaccctcagaacgttgcacaagaacatcagggaaaagaaccagaatcctttaaggaaaatgttcttcatgtatgagagactaaagtgatttttcnaagaaagttcagcccttctctgacttacctggacatttctagatacttccaaaggaccctctgggaatcaataagcttnctaatctggaatgggaagtcataaggaaaaccttttggggttntttgaaattttttgggttacagaaggancccctanttggggtcttccctgagccagcttcacttgcaaaaccttttggcctgtatatgagnatgggctcaggnctttccacaccgaaggacttatctttagnctganccggattctgatcctanctttcaaggttttaa

SEQ ID NO: 1147 - DNA, 755 bp, Homo sapiens
  misc_feature (499)..(499): n equals a,t,g, or c
  misc_feature (541)..(541): n equals a,t,g, or c
  misc_feature (617)..(617): n equals a,t,g, or c
  misc_feature (681)..(681): n equals a,t,g, or c
  misc_feature (689)..(689): n equals a,t,g, or c
  misc_feature (708)..(708): n equals a,t,g, or c
  misc_feature (726)..(726): n equals a,t,g, or c
  misc_feature (753)..(753): n equals a,t,g, or c
gagcgcggcggcaagatggcagtgcaaatatccaagaagaggaagtttgtcgctgatggcatcttcaaagctgaactgaatgagtttcttactcgggagctggctgaagatggctactctggagttgaggtgcgagttacaccaaccaggacagaaatcattatcttagccaccagaacacagaatgttcttggtgagaagggccggcggattcgggaactgactgctgtagttcagaagaggtttggctttccagagggcagtgtagagctttatgctgaaaaggtggccactagaggtctgtgtgccattgcccaggcagagtctctgcgttacaaactcctaggagggcttgctgtgcggagggcctgctatggtgtgctgcggttcatcatggagagtggggccaaaggctgcgaggttgtggtgtctgggaaactcccaggacagagggctaaatccatgaagtttgtggatggcctgatgatccacagcgganaccctgttaactactacgttgacactgctgtgcgccacgtgntgctcaaacagggtgtgctggcatcaaggtgaagatcatgctgccctgggacccaactggtaagattggccctaanaagcccctgcctgacacgtgagcattgtggaacccaaagatgagatactgccaccaaccccatntaaaacanaaggtgggaaccaaacccnctgcctgccccaaccggncccacagcatacagggctccttggaantg

SEQ ID NO: 1148 - DNA, 640 bp, Homo sapiens
  misc_feature (580)..(580): n equals a,t,g, or c
  misc_feature (587)..(587): n equals a,t,g, or c
  misc_feature (604)..(604): n equals a,t,g, or c
  misc_feature (621)..(621): n equals a,t,g, or c
  misc_feature (629)..(629): n equals a,t,g, or c
gctctcacagccattgcagtacattgagctccatagagacagcgccggggcaagtgagagccggacgggcactgggcgactctgtgcctcgctgaggaaaaataactaaacatgggcaaaggagatcctaagaagccgagaggcaaaatgtcatcatatgcattttttgtgcaaacttgtcgggaggagcataagaagaagcacccagatgcttcagtcaacttctcagagttttctaagaagtgctcagagaggtggaagaccatgtctgctaaagagaaaggaaaatttgaagatatggcaaaagcggacaaggcccgttatgaaagagaaatgaaaacctatatccctcccaaaggggagacaaaaaagaagttcaaggatcccaatgcacccaagaggcctccttcggccttcttcctcttctgctctgagtatcgcccaaaaatcaaaggagaacatcctggcctgtccattggtgatgttgcgaagaaactgggagagatgtggaataacactgctgcagatgacaagcagccttatgaaaagaaggctgcgaagcttaaggaaaaatacgaanaggatantgctgcatatcgagctnaaggaaagcctgagcancaaaaaanggaagttgcaa

SEQ ID NO: 1149 - DNA, 698 bp, Homo sapiens
  misc_feature (310)..(310): n equals a,t,g, or c
  misc_feature (346)..(346): n equals a,t,g, or c
  misc_feature (582)..(582): n equals a,t,g, or c
  misc_feature (633)..(633): n equals a,t,g, or c
  misc_feature (662)..(662): n equals a,t,g, or c
  misc_feature (669)..(669): n equals a,t,g, or c
  misc_feature (694)..(694): n equals a,t,g, or c
  misc_feature (696)..(696): n equals a,t,g, or c
ggcctgaccgaccttcagcagggctgtggctaccatgttctctcgcgcgggtgtcgctgggctgtcggcctggaccttgcagccgcaatggattcaagttcgaaatatggcaactttgaaagatatcaccaggagactaaagtccatcaaaaacatccagaaaattaccaagtctatgaaaatggtagcggcagcataatatgcccgagctgagagagagctgaaaccagctcgaatatatggattgggatctttagctctgtatgaaaaagctgatatcaaggggcctgaagacaagaagaaacacctncttattggtgtgtcctcagatcgaggactgtgtggngctattcattcctccattgctaaacagatgaaaagcgaggttgctacactaacagcagctgggaaagaagttatgcttgttggaattggtgacaaaatcagaggcatactttataggactcattctgaccagtttctggtggcattcaaagaagtgggaagaaagccccccacttttggagatgccgtcagtcattgcccttgaattactaaattctggatatgaatttgatgaangctccatcatctttaataaattcaggtctgtcatctcctattagacagaanaaaaagcccatcttttcccttaataccgntgcaagnggcttgacagcatgagtatctatcncnat

SEQ ID NO: 1150 - DNA, 673 bp, Homo sapiens
  misc_feature (3)..(4): n equals a,t,g, or c
  misc_feature (24)..(24): n equals a,t,g, or c
  misc_feature (50)..(50): n equals a,t,g, or c
  misc_feature (82)..(82): n equals a,t,g, or c
  misc_feature (110)..(110): n equals a,t,g, or c
  misc_feature (120)..(120): n equals a,t,g, or c
  misc_feature (145)..(145): n equals a,t,g, or c
  misc_feature (165)..(165): n equals a,t,g, or c
  misc_feature (168)..(168): n equals a,t,g, or c
  misc_feature (179)..(179): n equals a,t,g, or c
  misc_feature (186)..(186): n equals a,t,g, or c
  misc_feature (195)..(195): n equals a,t,g, or c
  misc_feature (207)..(207): n equals a,t,g, or c
  misc_feature (219)..(219): n equals a,t,g, or c
  misc_feature (237)..(237): n equals a,t,g, or c
  misc_feature (268)..(268): n equals a,t,g, or c
  misc_feature (304)..(305): n equals a,t,g, or c
  misc_feature (308)..(308): n equals a,t,g, or c
  misc_feature (329)..(329): n equals a,t,g, or c
  misc_feature (334)..(334): n equals a,t,g, or c
  misc_feature (341)..(341): n equals a,t,g, or c
  misc_feature (349)..(349): n equals a,t,g, or c
  misc_feature (375)..(375): n equals a,t,g, or c
  misc_feature (384)..(384): n equals a,t,g, or c
  misc_feature (396)..(396): n equals a,t,g, or c
  misc_feature (400)..(400): n equals a,t,g, or c
  misc_feature (419)..(419): n equals a,t,g, or c
  misc_feature (423)..(423): n equals a,t,g, or c
  misc_feature (431)..(431): n equals a,t,g, or c
  misc_feature (441)..(442): n equals a,t,g, or c
  misc_feature (463)..(463): n equals a,t,g, or c
  misc_feature (466)..(466): n equals a,t,g, or c
  misc_feature (471)..(471): n equals a,t,g, or c
  misc_feature (479)..(479): n equals a,t,g, or c
  misc_feature (498)..(499): n equals a,t,g, or c
  misc_feature (502)..(502): n equals a,t,g, or c
  misc_feature (504)..(504): n equals a,t,g, or c
  misc_feature (509)..(509): n equals a,t,g, or c
  misc_feature (558)..(558): n equals a,t,g, or c
  misc_feature (572)..(572): n equals a,t,g, or c
  misc_feature (602)..(602): n equals a,t,g, or c
  misc_feature (636)..(636): n equals a,t,g, or c
  misc_feature (663)..(663): n equals a,t,g, or c
  misc_feature (665)..(665): n equals a,t,g, or c
  misc_feature (670)..(670): n equals a,t,g, or c
gannctgcccagaagtgccttggntccagccctgtaccccttggtactgnctctgaacactctggtttccccacccaactgnggctaagtctctttttcccttggatcanccaagcgaancttggagctttgacaaggaactttnctaagaaaccgctgataacnagnacaaaacacanccaaggntacacgcangcatgcacgggnttcctgcccagncgacggcttaagccagtncccgactggcctggacacactgctctcgcantagcacagatgtctgctcctcctcttgaacttggtnnggnaaaccccacccaaaagccccntttgntacttangcaaattncccttccctgactcccgagggctagngctagagcngacccggttaantaanggcagacccagggctactntagnctcatacncgtgcccttnnagagccatgccccgggacctntgncctgngcctttcntacctctacatgggctgcnngananatttnctcagcctgaaagtttccccaaccatctgccatagaactcctatgcatnctttagaaccctgnttaagacaccattcttttgggaaccttttncccatctggcttcccaaaatgataattccgcttntctgggttccgtacacactttacatcngntgganggt

SEQ ID NO: 1151 - DNA, 681 bp, Homo sapiens
  misc_feature (411)..(411): n equals a,t,g, or c
  misc_feature (423)..(423): n equals a,t,g, or c
  misc_feature (450)..(450): n equals a,t,g, or c
  misc_feature (489)..(489): n equals a,t,g, or c
  misc_feature (541)..(541): n equals a,t,g, or c
  misc_feature (558)..(558): n equals a,t,g, or c
  misc_feature (603)..(603): n equals a,t,g, or c
  misc_feature (607)..(607): n equals a,t,g, or c
  misc_feature (662)..(662): n equals a,t,g, or c
  misc_feature (670)..(670): n equals a,t,g, or c
  misc_feature (680)..(681): n equals a,t,g, or c
gggagggctcactgagaaccatcccggtaacccgatcaccgctggtcaccatgaaccacattgtgcaaaccttctctcctgtcaacagcggccagcctcccaactacgagatgctcaaggaggagcaggaagtggctatgctgggggcgccccacaaccctgctcccccgacgtccaccgtgatccacatccgcagcgagacctccgtgcccgaccatgtcgtctggtccctgttcaacaccctcttcatgaacacctgctgcctgggcttcatagcattcgcctactccgtgaagtctagggacaggaagatggttggcgacgtgaccggggcccaggcctatgcctccaccgccaagtgcctgaacatctgggccctgattttggcatcttcatgaccattctgctcgnatcatccaatgntggtcgtcaggcccagcgatagatcangaggcatcattgaggccaggagctctgcccgtgacctgnatcccacgtactctatcttcattcctcgcctgcccccagaggccaggagctntgccttgacctggattncacttacttcacctttcattcttggcctgtccccacaggccagtnctgnatcaaccctttatcctacacgcttttttacaatggcatttaataaaggggatatntttctggngcaaaaaaann

SEQ ID NO: 1152 - DNA, 524 bp, Homo sapiens
  misc_feature (300)..(300): n equals a,t,g, or c
  misc_feature (388)..(388): n equals a,t,g, or c
  misc_feature (393)..(393): n equals a,t,g, or c
  misc_feature (395)..(395): n equals a,t,g, or c
  misc_feature (455)..(455): n equals a,t,g, or c
  misc_feature (468)..(468): n equals a,t,g, or c
  misc_feature (481)..(482): n equals a,t,g, or c
  misc_feature (496)..(496): n equals a,t,g, or c
ggctccgtgtactgaggccccgcagctctggccacagggacctctgcagtgccccctaagtgacccggacacttccgagggggccatcaccgcctgtgtatataacgtttccggtattactctgctacacgtagcctttttacttttggggttttgtttttgttctgaactttcctgttaccttttcagggctgacgtcacatgtaggtggcgtgtatgagtggagacgggcctgggtcttggggactggagggcaggggtccttctgccctggggtcccagggtgctctgcctgctaancaggcctctcctgggaagcactcgccagagactcagcttgggcaacttgggggctgtgtccacccaagcccggccgtcctgtggctgnacagntnaccttggtcccttctggcccggttcgagagcccaagtctgtgggcactcttctggccttnatgcacctggccnttcttaacacgtnngcctttaaactggnaatcaacaacaatcctggacttccgtca

SEQ ID NO: 1153 - DNA, 655 bp, Homo sapiens
  misc_feature (1)..(1): n equals a,t,g, or c
  misc_feature (21)..(21): n equals a,t,g, or c
  misc_feature (30)..(30): n equals a,t,g, or c
  misc_feature (41)..(41): n equals a,t,g, or c
  misc_feature (92)..(92): n equals a,t,g, or c
  misc_feature (380)..(380): n equals a,t,g, or c
  misc_feature (532)..(532): n equals a,t,g, or c
  misc_feature (544)..(544): n equals a,t,g, or c
  misc_feature (571)..(571): n equals a,t,g, or c
  misc_feature (619)..(619): n equals a,t,g, or c
  misc_feature (639)..(640): n equals a,t,g, or c
  misc_feature (649)..(649): n equals a,t,g, or c
ngtgataaagggatatttaangaatcatcnagggaagctgntacgcctgcaggtaccggtccggaattcccgggtcgacccacgcgtccggngctgcgagaccgaggtcaacatcaccttctgcgagggctcctgccccggagcgtccaagtactcagcagaggcccaggccatgcagcaccagtgcacctgctgccaggagaggcgggtccacgaggagacggtgcccttgcactgtcctaacggctcagccatcctgcacacctacacccacgtggatgagtgtggttgcacgcccttctgtgtccctgcgcccatggctcccccacacacccgtggcttccggccaggaggccactgctgtctgagaacgtctgctncatcccatgctctgtcacctggagccaggatgtgcattgctgatcatgaaaaccttggcctcctctgcggagccccggcctgtgtgtggaccccggcttcgtgctctgttgccacccgggtgaaacggccagaggtgagggcagagaccttngagcgcataganctactgaactggcacttgctgcctctngatgacctgaaataatgcgctttgctcacgcgacgcgcaagttatgancgctgaaagtgcagagattnnataagagcntaacat

SEQ ID NO: 1154 - DNA, 241 bp, Homo sapiens
  misc_feature (2)..(2): n equals a,t,g, or c
  misc_feature (25)..(25): n equals a,t,g, or c
  misc_feature (86)..(86): n equals a,t,g, or c
  misc_feature (105)..(105): n equals a,t,g, or c
  misc_feature (157)..(157): n equals a,t,g, or c
  misc_feature (202)..(202): n equals a,t,g, or c
  misc_feature (214)..(214): n equals a,t,g, or c
  misc_feature (230)..(230): n equals a,t,g, or c
  misc_feature (240)..(240): n equals a,t,g, or c
gntacattaagagtcaaagttgacntggctggcgtggaggtgggggaggcacccgtcggccccttggtgttgccctctgtctttgnttagccatacgatgtttgntctcagcactgtacaacggtccctatataatacggagaagcaatatcactgnatgagactcacaccatgtattattattcactagcaccctaggtgngataattgaagnaaatatcttttatacnaacacactana

SEQ ID NO: 1155 - DNA, 126 bp, Homo sapiens
  misc_feature (3)..(3): n equals a,t,g, or c
  misc_feature (9)..(9): n equals a,t,g, or c
  misc_feature (12)..(12): n equals a,t,g, or c
  misc_feature (55)..(55): n equals a,t,g, or c
  misc_feature (78)..(78): n equals a,t,g, or c
  misc_feature (102)..(102): n equals a,t,g, or c
  misc_feature (119)..(119): n equals a,t,g, or c
  misc_feature (124)..(124): n equals a,t,g, or c
gcntcttcnganaaggccccggtccggaatttccggatcgacccacgcgtcccgntcctgaatcaagattggaaactnttagacacatggaaaaacaacggnagaaacaggaaaaaaanaaaanaa

SEQ ID NO: 1156 - DNA, 702 bp, Homo sapiens
  misc_feature (12)..(12): n equals a,t,g, or c
  misc_feature (14)..(15): n equals a,t,g, or c
  misc_feature (32)..(32): n equals a,t,g, or c
  misc_feature (44)..(44): n equals a,t,g, or c
  misc_feature (218)..(218): n equals a,t,g, or c
  misc_feature (246)..(246): n equals a,t,g, or c
  misc_feature (273)..(273): n equals a,t,g, or c
  misc_feature (303)..(303): n equals a,t,g, or c
  misc_feature (376)..(376): n equals a,t,g, or c
  misc_feature (429)..(429): n equals a,t,g, or c
  misc_feature (469)..(469): n equals a,t,g, or c
  misc_feature (482)..(482): n equals a,t,g, or c
  misc_feature (489)..(489): n equals a,t,g, or c
  misc_feature (498)..(498): n equals a,t,g, or c
  misc_feature (508)..(508): n equals a,t,g, or c
  misc_feature (537)..(537): n equals a,t,g, or c
  misc_feature (546)..(546): n equals a,t,g, or c
  misc_feature (586)..(587): n equals a,t,g, or c
  misc_feature (652)..(652): n equals a,t,g, or c
  misc_feature (677)..(677): n equals a,t,g, or c
  misc_feature (690)..(690): n equals a,t,g, or c
  misc_feature (693)..(693): n equals a,t,g, or c
ggaatgaactgnannaatactggccaagaggnctgagctgaagnttgctgctgccactggagccactccaattgctggacgcttcactcctggaaccttcactaaccagatccaggcagccttccgggagccacggcttcttgtggttactgaccccagggctgaccaccagcctctcacggaggcatcttatgttaacctacctaccattgcgctgngtaacacagattctcctctgcgctatgnggacattgccatcccatgcaacaacangggagctcactcagtgggtttgatgtgcgnatgctgctcgggaagtctgcgcatgcgtggcaccatttcccgtgaacacccatgggaggcatgcctgatctgnacttctacagagatcctgaagagattgaaaaagaagaacaggctgctgctganaagcagtgaccaaggaggaatttcagggtgaatggactgnttccgttctgagntcactgntactcaacngagggtgganactggctgaaagtgtcaggtgccctctgngctattcancaattcctactggaaactggagcgcttaactgcacggaanntgggctgaagttccactggtaagcccttaatgggaggacaaccctgatggcttaactgtcttganagctctaacacatggaaaaaggttntggaaaaactcanttntaaaaaaaa

SEQ ID NO: 1157 - DNA, 798 bp, Homo sapiens
  misc_feature (3)..(5): n equals a,t,g, or c
  misc_feature (15)..(15): n equals a,t,g, or c
  misc_feature (18)..(18): n equals a,t,g, or c
  misc_feature (135)..(135): n equals a,t,g, or c
  misc_feature (238)..(238): n equals a,t,g, or c
  misc_feature (471)..(471): n equals a,t,g, or c
  misc_feature (524)..(524): n equals a,t,g, or c
  misc_feature (579)..(579): n equals a,t,g, or c
  misc_feature (586)..(586): n equals a,t,g, or c
  misc_feature (600)..(600): n equals a,t,g, or c
  misc_feature (670)..(670): n equals a,t,g, or c
  misc_feature (691)..(691): n equals a,t,g, or c
  misc_feature (786)..(786): n equals a,t,g, or c
acnnntatatcatanatntcaagaggacctgtgagaagcttctgctggcagctcgtgcaattgttgccattgaaaaccctgctgatgtcaggggtatatcctccaggaatactggccagagggctgtgctgaagnttgctgctgccactggagccactccaattgctggccgcttcactcctggaaccttcactaaccagatccaggcagccttccgggagccacggcttcttgtggntactgaccccagggctgaccaccagcctctcacggaggcatcttatgttaacctacctaccattgcgctgtgtaacacagattctcctctgcgctatgtggacattgccatcccatgcaacaacaagggagctcactcagtgggtttgatgtggtggatgctggctcgggaagttctgcgcatgcgtggcaccatttcccgtgaacacccatgggaggtcatgcctgatctgnacttctacagagatcctgaagagattgaaaaagaagagcaggctgctgctganaaggcagtgaccaaggaggaatttcagggtgaatggactgctcccgctcctgagntcactgntactcacctgaggntgcaactggctgaaagtgtacaggtgccctctgggctattcacaattcctactgaagctggagcgctcanctgcacggaagctggctgcanttccctggtaagccactgaatgggaggacaaccctgatggcttaactgtcttgatagctttaacacatggaaatgggtgatggaaaataacatanttctaaaaaaaa

SEQ ID NO: 1158 - DNA, 329 bp, Homo sapiens
  misc_feature (205)..(205): n equals a,t,g, or c
  misc_feature (315)..(315): n equals a,t,g, or c
  misc_feature (323)..(323): n equals a,t,g, or c
  misc_feature (326)..(327): n equals a,t,g, or c
  misc_feature (329)..(329): n equals a,t,g, or c
gattcagaagatgaaaacgtagaagacacccctgaattaaaaacacttacatagcagtggctggaattactccaaaacgtgcccagtgatcgcactgtaacatgggattttctcacccaaataggcaactcatgcttcctgagtgtaatcaaagcatgtggtgttttggggccatatgcaccaggtttctattttagaaaccttnaagctgtcttgcttatgtaccgtatgtaaatttattctttttaaaaatcacttttattttgattttgacttattaaatgctttaaaagccaaaaaaaaaaaaaaaggggnggccgttntanngn

SEQ ID NO: 1159 - DNA, 775 bp, Homo sapiens
  misc_feature (35)..(35): n equals a,t,g, or c
  misc_feature (53)..(54): n equals a,t,g, or c
  misc_feature (66)..(66): n equals a,t,g, or c
  misc_feature (72)..(72): n equals a,t,g, or c
  misc_feature (115)..(116): n equals a,t,g, or c
  misc_feature (125)..(125): n equals a,t,g, or c
  misc_feature (334)..(334): n equals a,t,g, or c
  misc_feature (374)..(374): n equals a,t,g, or c
  misc_feature (378)..(378): n equals a,t,g, or c
  misc_feature (389)..(389): n equals a,t,g, or c
  misc_feature (438)..(438): n equals a,t,g, or c
  misc_feature (478)..(478): n equals a,t,g, or c
  misc_feature (512)..(512): n equals a,t,g, or c
  misc_feature (531)..(531): n equals a,t,g, or c
  misc_feature (550)..(550): n equals a,t,g, or c
  misc_feature (566)..(566): n equals a,t,g, or c
  misc_feature (596)..(596): n equals a,t,g, or c
  misc_feature (602)..(602): n equals a,t,g, or c
  misc_feature (604)..(604): n equals a,t,g, or c
  misc_feature (643)..(643): n equals a,t,g, or c
  misc_feature (658)..(658): n equals a,t,g, or c
  misc_feature (710)..(710): n equals a,t,g, or c
  misc_feature (730)..(730): n equals a,t,g, or c
  misc_feature (743)..(743): n equals a,t,g, or c
  misc_feature (769)..(770): n equals a,t,g, or c
gacaatgtgggcttcaatgtcaagaatgtgtctgncaaggatgttcgtcgtgnnaacgttgctggngacagnaaaaatgacccaccaatggaagcagctggcttcactgctcagnngattatccngaaccatccaggccaaataagcgccggctatgcccctgtattggattgccacacggctcacattgcatgcaagtttgctgagctgaaggaaaagattgatcgccgttctggtaaaaagctggaagatggccctaaattcttgaagtctggtgatgctgccattggtgatatggttcctggcaagcccatgtgtgttgagagcttctcanactatccacctttgggtcgctttgctgttcgggatatganacanacagttgcggngggtggcatcaaagcaaccggacaagaaggctgctggaacttgcaaggncaccaagtctgccaaaaagctcaaaaagctaaatgaatantatcctaatacctgcaacccactcttaatcaagnggtggaagaacgggctcanaactgttggttcaaatggncatttaagttaagagnaaaagactgggtaatggtaccatgcatcgnaaaacntnaaaaggaaaggagaatgtttggggaccactttggtttcnttttgcggggggcantttaagtattaggttttaaaacagacttttaatggaacaacttgcccaaaanttgcccaaaattttagaccnttaaaaagttaangggaaaaaaaaaaaaaaggcggcctnntaagg

SEQ ID NO: 1160 - DNA, 619 bp, Homo sapiens
  misc_feature (31)..(31): n equals a,t,g, or c
  misc_feature (33)..(33): n equals a,t,g, or c
  misc_feature (181)..(181): n equals a,t,g, or c
  misc_feature (285)..(285): n equals a,t,g, or c
  misc_feature (372)..(372): n equals a,t,g, or c
  misc_feature (376)..(376): n equals a,t,g, or c
  misc_feature (397)..(397): n equals a,t,g, or c
  misc_feature (406)..(406): n equals a,t,g, or c
  misc_feature (409)..(409): n equals a,t,g, or c
  misc_feature (433)..(433): n equals a,t,g, or c
  misc_feature (480)..(480): n equals a,t,g, or c
  misc_feature (489)..(489): n equals a,t,g, or c
  misc_feature (559)..(559): n equals a,t,g, or c
  misc_feature (566)..(566): n equals a,t,g, or c
  misc_feature (573)..(573): n equals a,t,g, or c
  misc_feature (607)..(607): n equals a,t,g, or c
  misc_feature (615)..(615): n equals a,t,g, or c
gacctggtcctgcgtctgagaggtggtatgnanatcttcgtgaagaccctgaccggcaagaccatcaccctggaagtggagcccagtgacaccatcgaaaatgtgaaggccaagatccaggataaagaaggcatccctcccgaccagcagaggctcatctttgcaggcaagcagctggaanatggccgcactctttctgactacaacatccagaaggagtcgaccctgcacctggtcctgcgtctgagaggtggtatgcagatcttcgtgaagaccctgaccggnaagaccatcactctggaggtggagcccagtgacaccatcgaaaatgtgaaggccaagatccaagataaagaaggcatcccccccgancagnataggctcatctttgcaggcnagcagctgnaanatggccgcactctttctgactacnacatccagaaagagtcgacccttgcacctggacctgcgcctgaaggntggctgtanttcttcagtcatggcattcgcagtgccaagtgatggcattactctgcctatagccatttgccccacttanggttagnaataccnggttcagtaatagcttaacctggtcaaaatgttnataaaggnttcg

SEQ ID NO: 1161 - DNA, 680 bp, Homo sapiens
  misc_feature (61)..(61): n equals a,t,g, or c
  misc_feature (311)..(311): n equals a,t,g, or c
  misc_feature (330)..(330): n equals a,t,g, or c
  misc_feature (346)..(346): n equals a,t,g, or c
  misc_feature (366)..(366): n equals a,t,g, or c
  misc_feature (396)..(396): n equals a,t,g, or c
  misc_feature (449)..(449): n equals a,t,g, or c
  misc_feature (454)..(454): n equals a,t,g, or c
  misc_feature (459)..(459): n equals a,t,g, or c
  misc_feature (471)..(471): n equals a,t,g, or c
  misc_feature (477)..(477): n equals a,t,g, or c
  misc_feature (500)..(500): n equals a,t,g, or c
  misc_feature (545)..(545): n equals a,t,g, or c
  misc_feature (547)..(547): n equals a,t,g, or c
  misc_feature (564)..(564): n equals a,t,g, or c
  misc_feature (566)..(566): n equals a,t,g, or c
  misc_feature (571)..(571): n equals a,t,g, or c
  misc_feature (579)..(579): n equals a,t,g, or c
  misc_feature (585)..(585): n equals a,t,g, or c
  misc_feature (606)..(606): n equals a,t,g, or c
  misc_feature (636)..(637): n equals a,t,g, or c
  misc_feature (652)..(652): n equals a,t,g, or c
gcgacgcgtgggtgccgcctacaccgtggtctatttcccagttcgaggcccgctgcgcggncctgcgcatgctgctggcagatcagggccagagctggaaggaggaggtggtgacccgtggagacgtggcaggagggctcactcaaagcctcctgcctatacggcagcttcccaagttccaggacggagacctcaccctgtaccaagtccaataccatcctgcgtcacctggcccgacccttgggctctatgggaaggaccagcaggaggcagccctggtggacatggtgaatgacggcgtggaggacctncgctgcaatacatttcctnatctacaccaactatnaagcggcaaggatgactatntgaaaggcactggccgggcaactgaagccntttgagaacctgctgtccagaaccagggaggcaagaacttcattgggggagancagancttcnttggttactacnaactgntggacttgctgctgaaccatganggcctaaaccctggctggctgggaaccgtttcccctggttttaananatggggggcgccttaangnccggnccaagttnaaggcnttctggcttccctggggaccngaacttcccattaatgggaacgggaacaannagggttgggggaacnttaacggaagcaaaattgcttctttttc

SEQ ID NO: 1162 - DNA, 586 bp, Homo sapiens
  misc_feature (35)..(35): n equals a,t,g, or c
  misc_feature (326)..(326): n equals a,t,g, or c
  misc_feature (358)..(358): n equals a,t,g, or c
  misc_feature (383)..(384): n equals a,t,g, or c
  misc_feature (414)..(414): n equals a,t,g, or c
  misc_feature (424)..(424): n equals a,t,g, or c
  misc_feature (482)..(482): n equals a,t,g, or c
  misc_feature (501)..(501): n equals a,t,g, or c
  misc_feature (517)..(517): n equals a,t,g, or c
  misc_feature (541)..(541): n equals a,t,g, or c
  misc_feature (574)..(574): n equals a,t,g, or c
  misc_feature (581)..(581): n equals a,t,g, or c
ggcgagcgcgagcggggaacgcgagaaagagcgcnagcgcgagaaggagccgcgagcttgaacgcagcgtgaaagttggctcaggagggcccgtgctccggtggaatgcccatctctgggcccagtgccccatcgcctccatttgaaccggcagtgcggtggctacagtgcccccctacctgggtcctgacactccagccttgcgcactctcagtgaatatgcccggctcatgtcatgtctcctgcaatcgcaacatccattctacgtgcccctggggcagtggacccgggctctgggtacaatgtccggcctgacagagtatcantgccggagaggaacggaagccggacagactcngacgctaagctgcttagtaactatnntgacctctggtctggcgcttgatcttccantgggctgttnactgcactgctgacttccttatcactggcctgacaacgtacgtgagtgcagctggctntgcattacgtgactaaganccaaagtgcgctgatncatgcgtgattatgatcataacanatcatatactctcaaactctactgtggactttnctgtagnatacg

SEQ ID NO: 1163 - DNA, 756 bp, Homo sapiens
  misc_feature (528)..(528): n equals a,t,g, or c
  misc_feature (612)..(612): n equals a,t,g, or c
  misc_feature (650)..(650): n equals a,t,g, or c
  misc_feature (673)..(673): n equals a,t,g, or c
  misc_feature (702)..(702): n equals a,t,g, or c
  misc_feature (742)..(742): n equals a,t,g, or c
  misc_feature (753)..(754): n equals a,t,g, or c
gccctttgagcccctggcttctggcatcctgttgttgctgtggctgatagcccccagcagggcctgcacctgtgtcccaccccacccacagacggccttctgcaattccgacctcgtcatcagggccaagttcgtggggacaccagaagtcaaccagaccaccttataccagcgttatgagatcaagatgaccaagatgtataaagggttccaagccttaggggatgccgctgacatccggttcgtctacacccccgccatggagagtgtctgcggatacttccacaggtcccacaaccgcagcgaggagtttctcattgctggaaaactgcaggatggactcttgcacatcactacctgcagttttgtggctccctggaacagcctgagcttagctcagcgccggggcttcaccaagacctacactgttggctgtgaggaatgcacagtgtttccctgtttatccatcccttgcaaactgcagagtggcactcattgcttgtggacggaccagcttctccaaggctntgaaaagggcttccagtcccgtcaccttgcctgcctgcctcgggagcaggctgggcacctggcagtccctgcggtccagatagnctgaatctggccggagtggaagctgaagcctgccaagngtccaccttgttccacttccatntttttttccggacaatgaaataaagaagntaccaccccacaaaaaaaaaaaaaaaaagggggggccccnttttaaagganncc

SEQ ID NO: 1164 - DNA, 717 bp, Homo sapiens
  misc_feature (19)..(19): n equals a,t,g, or c
  misc_feature (23)..(23): n equals a,t,g, or c
  misc_feature (176)..(176): n equals a,t,g, or c
  misc_feature (223)..(223): n equals a,t,g, or c
  misc_feature (308)..(308): n equals a,t,g, or c
  misc_feature (311)..(312): n equals a,t,g, or c
  misc_feature (337)..(337): n equals a,t,g, or c
  misc_feature (347)..(347): n equals a,t,g, or c
  misc_feature (400)..(400): n equals a,t,g, or c
  misc_feature (524)..(524): n equals a,t,g, or c
  misc_feature (566)..(566): n equals a,t,g, or c
  misc_feature (589)..(589): n equals a,t,g, or c
  misc_feature (610)..(610): n equals a,t,g, or c
  misc_feature (637)..(637): n equals a,t,g, or c
  misc_feature (705)..(705): n equals a,t,g, or c
  misc_feature (707)..(707): n equals a,t,g, or c
  misc_feature (717)..(717): n equals a,t,g, or c
ggttgctggtgacaagcanaaangacccaccaatggaagcagctggcttcactgctcaggtgattatcctgaaccatccaggccaaataagcgccggctatgcccctgtattggattgccacacggctcacattgcatgcaagtttgcttgagctgaaggaaaagattgatcgccngttctggtaaaaagctggaagatggccctaaattcttgaagtctggngatgctgccattgttgatatggttcctgcaagcccatgtgtgttgagagcttctcagactatccacctttgggtcgctttgctgntcnngatatgagacagacagttgcggtgnctgtcatcanagcagtggacaagaaggctgctggagctggcaaggcaccaagtctgccagaangctcagaaggctaaatgaatattatccctaatacctgccaccccactcttaatcagtggtggaagaacggtctcagaactgtttggttcaattgccatttaaagcttaataataaaagactggntaatgataacaatgcatcgtaaaaccttcagaaggaaagganaatggtttgtggaccactttggntttcttttttgcgtgtgcaantttaagttattaagttttaaaatcagnactttttaatggaacacttgaccaaaaatttgcacagaattttgagacccattaaaaaaggtaaatgngnaaaaaaaaan

SEQ ID NO: 1165 - DNA, 582 bp, Homo sapiens
  misc_feature (12)..(12): n equals a,t,g, or c
  misc_feature (38)..(38): n equals a,t,g, or c
  misc_feature (68)..(68): n equals a,t,g, or c
  misc_feature (100)..(100): n equals a,t,g, or c
  misc_feature (218)..(218): n equals a,t,g, or c
  misc_feature (304)..(304): n equals a,t,g, or c
  misc_feature (367)..(367): n equals a,t,g, or c
  misc_feature (374)..(376): n equals a,t,g, or c
  misc_feature (379)..(379): n equals a,t,g, or c
  misc_feature (384)..(384): n equals a,t,g, or c
  misc_feature (391)..(391): n equals a,t,g, or c
  misc_feature (399)..(399): n equals a,t,g, or c
  misc_feature (416)..(416): n equals a,t,g, or c
  misc_feature (419)..(419): n equals a,t,g, or c
  misc_feature (428)..(428): n equals a,t,g, or c
  misc_feature (513)..(515): n equals a,t,g, or c
  misc_feature (533)..(533): n equals a,t,g, or c
  misc_feature (535)..(535): n equals a,t,g, or c
  misc_feature (537)..(537): n equals a,t,g, or c
  misc_feature (539)..(539): n equals a,t,g, or c
cgagtattttcntacgtgtaatacccctgcaggtactngtccggaattcccgggtcgacccacgcgtncggtgagacttctccgccgcagacgccgccgngatgcgctacgtcgcctcctacctgctggctgccctagggggcaactcctcccccagcgccaaggacatcaagaagatcttggacagcgtgggtatcgaggcggacgacgaccggctnaacaaggttatcagtgagctgaatggaaaaaacattgaagacgtcattgcccagggtattggcaagcttgccagtgtacctgctgntggggctgtagctcgtctctgctgccccaggctctgcagcccctgttgctggttctgccctgntgcaggnnnggngaagnaagatgngaaagaanggggggtcttaagaagncanatgatgacngggaattgggccttttgattaaattcctgctcccctgcaaataaaggctttttacacatctaaaaaaaaaaaaaaaaggggggcnnntttaaagaaccttgtttnanancncgggagggagaaaaatggtttttttatggggaccctaaatttt

SEQ ID NO: 1166 - DNA, 574 bp, Homo sapiens
  misc_feature (304)..(304): n equals a,t,g, or c
  misc_feature (326)..(326): n equals a,t,g, or c
  misc_feature (337)..(337): n equals a,t,g, or c
  misc_feature (339)..(340): n equals a,t,g, or c
  misc_feature (342)..(342): n equals a,t,g, or c
  misc_feature (351)..(351): n equals a,t,g, or c
  misc_feature (509)..(509): n equals a,t,g, or c
  misc_feature (513)..(513): n equals a,t,g, or c
  misc_feature (532)..(532): n equals a,t,g, or c
  misc_feature (557)..(557): n equals a,t,g, or c
  misc_feature (571)..(571): n equals a,t,g, or c
gcgtctacaggtcaggatagatgggctgctcctctttcccccgcctcccgtgagccccgtatgcttcctcctctctggtctgaggaacctccctccccccacccctccccgtggtcttcaggaactttgtctcctgcctgtgcaggttgaggaaggtagttgcaggccaggccagaaggccagcctcatcatcttttctgcagtagaaattggtgataagggctgcatccctcccttggttcaaagaggcttccacccccagccttttttttcttgggagttggtggcatttgaaggtgtttgnggacaaaaatgggaaggaaaanggccttcaggnanngnaagcactgnttggacattggtacttttttcggagttagggagggatggaagactgaacctccttggaagaataccagaagctagtagttgatctcccaacagcttgtggaggattttgagatacttatcttattgaccagcttgaaggtaactctactgggcctaangggngccaggttttgcttgttantttgcttacattaaaagacggtagnaataacctggtttnaaa

SEQ ID NO: 1167 - DNA, 583 bp, Homo sapiens
  misc_feature (249)..(249): n equals a,t,g, or c
  misc_feature (305)..(305): n equals a,t,g, or c
  misc_feature (309)..(309): n equals a,t,g, or c
  misc_feature (311)..(311): n equals a,t,g, or c
  misc_feature (322)..(323): n equals a,t,g, or c
  misc_feature (327)..(327): n equals a,t,g, or c
  misc_feature (330)..(330): n equals a,t,g, or c
  misc_feature (335)..(335): n equals a,t,g, or c
  misc_feature (337)..(337): n equals a,t,g, or c
  misc_feature (341)..(341): n equals a,t,g, or c
  misc_feature (345)..(345): n equals a,t,g, or c
  misc_feature (352)..(352): n equals a,t,g, or c
  misc_feature (356)..(356): n equals a,t,g, or c
  misc_feature (371)..(372): n equals a,t,g, or c
  misc_feature (378)..(378): n equals a,t,g, or c
  misc_feature (384)..(384): n equals a,t,g, or c
  misc_feature (393)..(393): n equals a,t,g, or c
  misc_feature (400)..(400): n equals a,t,g, or c
  misc_feature (415)..(415): n equals a,t,g, or c
  misc_feature (424)..(424): n equals a,t,g, or c
  misc_feature (444)..(444): n equals a,t,g, or c
  misc_feature (465)..(465): n equals a,t,g, or c
  misc_feature (474)..(474): n equals a,t,g, or c
  misc_feature (476)..(476): n equals a,t,g, or c
  misc_feature (506)..(506): n equals a,t,g, or c
  misc_feature (512)..(512): n equals a,t,g, or c
  misc_feature (539)..(539): n equals a,t,g, or c
  misc_feature (549)..(549): n equals a,t,g, or c
  misc_feature (583)..(583): n equals a,t,g, or c
gctgagtcagtctcgccagctgccggtctttcgggggctccgtaactttctatccgtccgcgtcagcgccttgccaccctcatctccaatatgcctggtccgacccccagtggcactaacgtgggatcctcagggcgctctcccagcaaagcagtggccgcccgggcggcgggatccactgtccggcagaggaaaaatgccagctgtgggacaaggagtgcaggccgcacaacctcggcaggcaccggngggatgtggcgattctacacaagaagattcacctgggctcaaagttggccctggtncaanantgggtaataanncttnggntaatngnttcngganttaaagntggncaatttggggcaagnncccttngttcgnaaaattcanttacatncatctggcaatcttnaagaagganggaaaaaacccaacaatttnttggaaccaaaaagtataagngactaatcntnttcaatgaagaagaaaatttttctggaaancttggntggttttacaaggggaatttaatcaantaaattgganttttgaagggaatcaagtttttttttctaatggn

SEQ ID NO: 1168 - DNA, 696 bp, Homo sapiens
  misc_feature (131)..(131): n equals a,t,g, or c
  misc_feature (133)..(133): n equals a,t,g, or c
  misc_feature (232)..(232): n equals a,t,g, or c
  misc_feature (254)..(254): n equals a,t,g, or c
  misc_feature (257)..(257): n equals a,t,g, or c
  misc_feature (266)..(266): n equals a,t,g, or c
  misc_feature (269)..(269): n equals a,t,g, or c
  misc_feature (272)..(272): n equals a,t,g, or c
  misc_feature (275)..(275): n equals a,t,g, or c
  misc_feature (299)..(299): n equals a,t,g, or c
  misc_feature (314)..(314): n equals a,t,g, or c
  misc_feature (362)..(362): n equals a,t,g, or c
  misc_feature (375)..(375): n equals a,t,g, or c
  misc_feature (385)..(385): n equals a,t,g, or c
  misc_feature (391)..(391): n equals a,t,g, or c
  misc_feature (398)..(398): n equals a,t,g, or c
  misc_feature (406)..(406): n equals a,t,g, or c
  misc_feature (413)..(414): n equals a,t,g, or c
  misc_feature (448)..(448): n equals a,t,g, or c
  misc_feature (454)..(454): n equals a,t,g, or c
  misc_feature (459)..(459): n equals a,t,g, or c
  misc_feature (462)..(464): n equals a,t,g, or c
  misc_feature (466)..(466): n equals a,t,g, or c
  misc_feature (471)..(471): n equals a,t,g, or c
  misc_feature (488)..(488): n equals a,t,g, or c
  misc_feature (496)..(496): n equals a,t,g, or c
  misc_feature (511)..(511): n equals a,t,g, or c
  misc_feature (516)..(516): n equals a,t,g, or c
  misc_feature (519)..(519): n equals a,t,g, or c
  misc_feature (522)..(522): n equals a,t,g, or c
  misc_feature (524)..(524): n equals a,t,g, or c
  misc_feature (564)..(564): n equals a,t,g, or c
  misc_feature (571)..(571): n equals a,t,g, or c
  misc_feature (574)..(574): n equals a,t,g, or c
  misc_feature (593)..(593): n equals a,t,g, or c
  misc_feature (633)..(633): n equals a,t,g, or c
  misc_feature (641)..(641): n equals a,t,g, or c
  misc_feature (654)..(654): n equals a,t,g, or c
  misc_feature (663)..(663): n equals a,t,g, or c
  misc_feature (674)..(674): n equals a,t,g, or c
gggaaaaaaagccttttaaaaataccgagaacattaaaaattcgcatttgaagaaatcagcatttctaactgaagtgagccaaaaggaaaattatgctggggcaaagtttagtgatccaccttctcctagngntcttccaaagcctcctagtcactggatgggaagcactgttgaaaattccaaccaaaacagggagctgatggcagtacacttaaaaacgctcctcaaagntcaaacttagatttcatttcantangagtgaaanacntanttnttcccatatccctggactcttganaaaattggtacaganatggaaatttgccttggtgcaacatacaattgcaaaagatgaggttangaaattacctacnaacagcttgnattatnttttatnttttgtanatactgnntaccatgtaataagtgtatattggtcatacttgngaggtntcatnatnnntntggtntgaaacgtatgtatttngccctggnccacaattgcaaggngtttnggnatntntaccatgggataaagttttaaagtggtgggcttaagggcnccatggnaanacccgaattttatttggcnccagggtacttggcaattttttttcaaggaaaccagcttntcaaaatnttcagggggaaanaatttaaanggtgaaccggnttactaaaggccttactggagg

SEQ ID NO: 1169 - DNA, 553 bp, Homo sapiens
  misc_feature (252)..(252): n equals a,t,g, or c
  misc_feature (257)..(257): n equals a,t,g, or c
  misc_feature (286)..(286): n equals a,t,g, or c
  misc_feature (331)..(331): n equals a,t,g, or c
  misc_feature (348)..(348): n equals a,t,g, or c
  misc_feature (428)..(428): n equals a,t,g, or c
  misc_feature (452)..(452): n equals a,t,g, or c
  misc_feature (492)..(492): n equals a,t,g, or c
  misc_feature (504)..(504): n equals a,t,g, or c
  misc_feature (510)..(510): n equals a,t,g, or c
  misc_feature (522)..(522): n equals a,t,g, or c
  misc_feature (551)..(551): n equals a,t,g, or c
gagcagaaggagtgggccatgaacgtgggctgacaagaaaggcaagatcgtggacgccgtgattcaggagcaccagccctccgtgctgctggagctgggggcctactgtggctactcagctgtgcgcatggcccgcctgctgtcaccaggggcgaggctcatcaccatcgagatcaaccccgactgtgccgccatcacccagcggatggtggatttcgctggcgtgaaggacaaggtcacccttgtggttgnagcgncccaggacattatcccccagctgaagaanaagtatgatgtggacacactggacatggtcttcctcgaccactgnaaggaccggtacctgcnggacacgcttctcttggaggaatgtggcctgctgcggaaggggacagtgctactggctgacaacgtgatctgccaggtgngccagacttcctagcacacgtgcncgggagcagctgctttgagtgcacacactaccaatcgtcntggaatacaggnaggtgntggacggcctgnataaggccatctacaaggcccaggcagtnaa

SEQ ID NO: 1170 - DNA, 540 bp, Homo sapiens
  misc_feature (2)..(2): n equals a,t,g, or c
  misc_feature (5)..(5): n equals a,t,g, or c
  misc_feature (13)..(13): n equals a,t,g, or c
  misc_feature (15)..(15): n equals a,t,g, or c
  misc_feature (18)..(18): n equals a,t,g, or c
  misc_feature (65)..(65): n equals a,t,g, or c
  misc_feature (76)..(76): n equals a,t,g, or c
  misc_feature (138)..(138): n equals a,t,g, or c
  misc_feature (397)..(397): n equals a,t,g, or c
  misc_feature (444)..(444): n equals a,t,g, or c
  misc_feature (457)..(457): n equals a,t,g, or c
  misc_feature (486)..(486): n equals a,t,g, or c
  misc_feature (496)..(497): n equals a,t,g, or c
  misc_feature (533)..(533): n equals a,t,g, or c
  misc_feature (540)..(540): n equals a,t,g, or c
gnaantgctactngngancggcctcccgggtcgacccacgcgtccggtggcaagcaccaaccttntaaagtgacantttacaagaagggcaaggattctctgtacgcccagggaaagcggcgttatgacaggaagcanagtggctatggtgggcaaactaagccgattttccggaaaaaggctaaaactacaaagaagattgtgctaaggcttgagtgcgttgagcccaactgcagatctaagagaatgctggctattaaaagatgcaagcattttgaactgggaggagataagaagagaaagggccaagtgatccagttctaagtgtcatcttttattatgaagacaataaaatcttgagtttatgttcaaaaaaaaaaaaaaaaaaaagggcggncgctctagaggatccaagcttacgtacgcgtgcatgcgacggcatanctcttctataagnggcacctaaattcaattcactggccgcgntttacaacgnngtgactgggaaaaccctggcggtacccaacttaaanggcttgn

SEQ ID NO: 1171 - DNA, 511 bp, Homo sapiens
  misc_feature (13)..(13): n equals a,t,g, or c
  misc_feature (16)..(16): n equals a,t,g, or c
  misc_feature (19)..(19): n equals a,t,g, or c
  misc_feature (67)..(67): n equals a,t,g, or c
  misc_feature (71)..(71): n equals a,t,g, or c
  misc_feature (136)..(136): n equals a,t,g, or c
  misc_feature (438)..(438): n equals a,t,g, or c
  misc_feature (454)..(454): n equals a,t,g, or c
  misc_feature (474)..(474): n equals a,t,g, or c
  misc_feature (481)..(481): n equals a,t,g, or c
  misc_feature (483)..(483): n equals a,t,g, or c
  misc_feature (485)..(485): n equals a,t,g, or c
  misc_feature (488)..(488): n equals a,t,g, or c
  misc_feature (494)..(494): n equals a,t,g, or c
  misc_feature (496)..(496): n equals a,t,g, or c
  misc_feature (507)..(507): n equals a,t,g, or c
ttcggttacgccnccnggncccggtccggaattcccgggtcgacccacgcgtccgcaaaactatatntttnactcttagtgtaaaataatcttaatatttgaattatacattcaggttatgccctctatttctagnttgatgaaaatattattagtaatggatgttggggttttattaaatggcttttttccacatctgtcaagatgatcaactggcttttctctattatgactttagatgaatcgttttaatagatttgctaatgttaagacatctctgcatttctacaagaatctgatgtagtcatagtatactattcttttaatatacatctcctttcaatgttaacagtggttatttatgattggttggtccatagtagatttttattttgtgtttcttatctgtactttctgatttttctacaaagattgtgnattacttgtataatanaaataagagctttaaattgngaaaaangnancanaaaaananagggcggccgntcta

SEQ ID NO: 1172 - DNA, 509 bp, Homo sapiens
  misc_feature (4)..(4): n equals a,t,g, or c
  misc_feature (21)..(21): n equals a,t,g, or c
  misc_feature (73)..(73): n equals a,t,g, or c
  misc_feature (467)..(467): n equals a,t,g, or c
  misc_feature (469)..(469): n equals a,t,g, or c
  misc_feature (491)..(491): n equals a,t,g, or c
  misc_feature (497)..(497): n equals a,t,g, or c
  misc_feature (507)..(507): n equals a,t,g, or c
attnggtttgcggggacgccnccaggtaccggtccggaattcccgggtcgacccacgcgtccggtgcggctcnagcccagcccgctgctcactttccaccctctctccacctgcctctggcttctcaggcctctgctctccgacctctctcctctgaaaccctcctccacagctgcagcccatcctcccggctccctcctagtctgtcctgcgtcctctgtccccgggtttcagagacaacttcccaaagcacaaagcagtttttccccctaggggtgggaggaagcaaaagactctgtacctattttgtatgtgtataataatttgagatgtttttaattattttgattgctggaataaagcatgtggaaatgacccaaacataaaaaaaaaaaaaaaagggcggccgctctagaggatccaagcttacgtacgcgtgcatgcgacgtcataagctcttctatagngncacctaaattcaattcactggncggcgntttacaacgncg

SEQ ID NO: 1173 - DNA, 507 bp, Homo sapiens
  misc_feature (20)..(20): n equals a,t,g, or c
  misc_feature (70)..(71): n equals a,t,g, or c
  misc_feature (379)..(379): n equals a,t,g, or c
  misc_feature (443)..(443): n equals a,t,g, or c
  misc_feature (449)..(449): n equals a,t,g, or c
  misc_feature (459)..(459): n equals a,t,g, or c
  misc_feature (476)..(476): n equals a,t,g, or c
  misc_feature (485)..(485): n equals a,t,g, or c
cctatttggtttaggggacncccccaggtaccggtccggaattcccgggtcgacccacgcgtccggcctnnttttttggcccctggtcctgtcctgttctccagcatggtgtgtctgaagctccctggaggctcctgcatgacagcgctgacagtgacactgatggtgctgagctccccactggctttggctggggacacccgaccacgtttcctgtggcagcctaagagggagtgtcatttcttcaatgggacggagcgggtgcggttcctggacagatacttctataaccaggaggagtccgtgcgcttcgacagcgacgtgggggagtaccgggcggtgacggagctggggcggctgacgctgagtactggaacanccagaaggacttcctggaagacaggcgcgccgcggaggacacctactgcagacacaactacggngttggngaaaagcttncagtgcaacgggcgaanccaacctanggtgactggatattctttaaaa

SEQ ID NO: 1174 - DNA, 260 bp, Homo sapiens
  misc_feature (10)..(10): n equals a,t,g, or c
  misc_feature (52)..(52): n equals a,t,g, or c
  misc_feature (62)..(63): n equals a,t,g, or c
  misc_feature (85)..(86): n equals a,t,g, or c
  misc_feature (92)..(92): n equals a,t,g, or c
  misc_feature (119)..(119): n equals a,t,g, or c
  misc_feature (169)..(169): n equals a,t,g, or c
  misc_feature (193)..(193): n equals a,t,g, or c
  misc_feature (252)..(252): n equals a,t,g, or c
  misc_feature (254)..(256): n equals a,t,g, or c
  misc_feature (258)..(258): n equals a,t,g, or c
cccgaccggnccggaattcccgggtcgacccacgcgtccgtatttctcttgnttcagacttnnagtggtccctctttttttcctnnacactnagctcttctctaaaagcaaggatcccngaatgaacaattcagtttgacagaaaaagctgaataaaatgggcatctgnaattgaattgttggaaatgcctgntttgctcctaaattttaaacatcatcattaataaaataatgattcccaaagaaaaaaancnnngnaa

SEQ ID NO: 1175 - DNA, 786 bp, Homo sapiens
  misc_feature (1)..(1): n equals a,t,g, or c
  misc_feature (7)..(7): n equals a,t,g, or c
  misc_feature (60)..(61): n equals a,t,g, or c
  misc_feature (586)..(587): n equals a,t,g, or c
  misc_feature (591)..(595): n equals a,t,g, or c
  misc_feature (729)..(729): n equals a,t,g, or c
  misc_feature (763)..(763): n equals a,t,g, or c
  misc_feature (772)..(772): n equals a,t,g, or c
  misc_feature (774)..(774): n equals a,t,g, or c
  misc_feature (785)..(785): n equals a,t,g, or c
ntatagnctttaggtggaacgccccaggtaccggtccggaattcccgggtcgacccacgnntccgcggaaggattcaacatcagtgaggaggcactgaaccacctgggggagattggcaccaagaccacactgaggtactcagtgcagctgctgaccccggccaacttgcttgctaaaatcaacgggaaggacagcattgagaaagagcatgtcgaagagatcagtgaacttttctatgatgccaagtcctccgccaaaatcctggctgaccagcaggataagtacatgaagtgagatggctgaggttttcagcagtaagagactccccaggtgtgcctggcctgggtccagcctgtgggcgcttgcccctgggcttggggctgccgtccccactcaggcgtggtctgcagcgctgtcagttcagtgtggaaagcatttctttttaagttatcgtaactgttcctgtggttgctttgaaagaacccttccttacctggtgtgttttctataaatcttcataggctattttgattctctctctctctctctctaagttttttaaaaataaacttttcagaacaaaanntacnnnnnaaaaaaagggcggccgctctagaggatccaagcttacgtacgcgtgcatgcgacgtcatagctcttctatagtggcacctaaattcaattcactgggccgcgttttacaacgttgtgactgggaaaaccctggnggttaccccaacttaaatcgccttgcagcacatnccccttttngncagctgccctna

SEQ ID NO: 1176 - DNA, 724 bp, Homo sapiens
  misc_feature (2)..(2): n equals a,t,g, or c
  misc_feature (27)..(27): n equals a,t,g, or c
  misc_feature (76)..(76): n equals a,t,g, or c
  misc_feature (509)..(509): n equals a,t,g, or c
  misc_feature (624)..(624): n equals a,t,g, or c
  misc_feature (656)..(656): n equals a,t,g, or c
  misc_feature (674)..(674): n equals a,t,g, or c
  misc_feature (705)..(705): n equals a,t,g, or c
  misc_feature (711)..(711): n equals a,t,g, or c
  misc_feature (720)..(720): n equals a,t,g, or c
tngaacgccccttgggacaaggtcccnaattcccgggtcgacccacgcgtccgggaaggctttgtcactccaggtntatgtttccccatctctgtctggggctacagaatagggtggcagaagtgtcaccctgtgggtgtctccctcgggggctcttcccctagacctccccctcacttacataaagctcccttgaagcaagaaagagggtcccagggctgcaaaactggaagcacagcctcggggatggggagggaaagacggtgctatatccagttcctgctctctgctcatgggtggctgtgacaaccctggcctcacttgattcatctctggttttcttgccaccctctgggagtccccatcccattttcatcctgagcccaaccaggccctgccattggcctcttgtcccttggcacacttgtacccacaggtgaggggcaggacctgaaggtattggcctgttcaacaatcagtcatcatgggtgtttttgtcaactgcttgntaattgatttggggatgtttgccccgaatgagaggttgaggaaaagactgtgggtggggaggccctgcctgacccatcccttttcctttctggcccagcctaggtggaggaaagnggaatatcttatattgggcgatttgggggctnggggaggcagaagaatcncttgggagtcttggggtggcgctgggagcantctggnttcctcttngaac

SEQ ID NO: 1177 - DNA, 659 bp, Homo sapiens
  misc_feature (2)..(2): n equals a,t,g, or c
  misc_feature (46)..(47): n equals a,t,g, or c
  misc_feature (60)..(60): n equals a,t,g, or c
  misc_feature (78)..(78): n equals a,t,g, or c
  misc_feature (121)..(121): n equals a,t,g, or c
  misc_feature (542)..(542): n equals a,t,g, or c
  misc_feature (598)..(598): n equals a,t,g, or c
  misc_feature (615)..(615): n equals a,t,g, or c
  misc_feature (643)..(643): n equals a,t,g, or c
  misc_feature (645)..(645): n equals a,t,g, or c
  misc_feature (648)..(648): n equals a,t,g, or c
gnaacgcccccaggtaccggtccggaattcccgggtcgacccacgnntccgccgctgctnagggagccgccgccatgnctgcgcatctggaatggatggtcgtgcggaactgctccagttncctgatcaagaggaataagcagacctacagcactgagcccaataacttgaaggcccgcaattccttccgctacaacggactgattcaccgcaagactgtgggcgtggagccggcagccgacggcaaaggtgtcgtggtggtcattaagcggagatccggccagcggaagcctgccacctcctatgtgcggaccaccatcaacaagaatgctcgcgccacgctcagcagcatcagacacatgatccgcaagaacaagtaccgccccgacctgcgcatggcagccatccgcagggccagcgccatcctgcgcagccagaagcctgtgatggtgaagaggaagcggacccgcccaccaagagctcctgagccccctgcccccagagcaataaagtcagctggctttctcaaaaaaaaaaaaaanaaaaaaagggcggccgctctagaggatccaagcttacgtacgcgtgcatgcgacgncatagctcttctatagngtcacctaaattcaatttaactgggccngncgntttacaaccgt

SEQ ID NO: 1178 - DNA, 698 bp, Homo sapiens
  misc_feature (555)..(555): n equals a,t,g, or c
  misc_feature (558)..(558): n equals a,t,g, or c
  misc_feature (608)..(608): n equals a,t,g, or c
  misc_feature (634)..(634): n equals a,t,g, or c
  misc_feature (640)..(640): n equals a,t,g, or c
  misc_feature (656)..(656): n equals a,t,g, or c
  misc_feature (661)..(661): n equals a,t,g, or c
gaagaaaagaggctttggctttgttacttttgatgaccatgatcctgtggataaaatcgtattgcagaaataccataccatcaatggtcataatgcagaagtaagaaaggctttgtctagacaactatggaggaggaaattatggaagtggaaattacaatgattttggaaattataaccagcaaccttctaactacggtccaatgaagagtggaaactttggtggtagcaggaacatggggggaccatatggtggaggaaactatggtccaggaggcagtggaggaagtgggggttatggtgggaggagccgatactgagcttcttcctatttgccatggatcttttagatgctgcttcttcaatgcaaggaaaggaaataaccccagcgaggtactcttcagggacacaggtctagtacaagagaactcttgacggctactaagttcagccagtcttaaaaaactgtgctgtttctacaaaactttaactacagtagtttataaggatgccaacgaaagctgaggggtgtagagcaaaatagttctaagcttnagntaaacttctttagcattgatatgaaccatggacaaagtatattctgctgncacaaagactggaaaggcttcatttnaacagnttgaggcaagccaagngatcnttaataaagcttttcttggatccttcagtggtgttgg

SEQ ID NO: 1179 - DNA, 703 bp, Homo sapiens
  misc_feature (156)..(156): n equals a,t,g, or c
  misc_feature (477)..(477): n equals a,t,g, or c
  misc_feature (484)..(484): n equals a,t,g, or c
  misc_feature (547)..(547): n equals a,t,g, or c
  misc_feature (571)..(571): n equals a,t,g, or c
  misc_feature (623)..(623): n equals a,t,g, or c
  misc_feature (654)..(654): n equals a,t,g, or c
  misc_feature (665)..(665): n equals a,t,g, or c
  misc_feature (683)..(683): n equals a,t,g, or c
  misc_feature (701)..(701): n equals a,t,g, or c
gcgacaatccaatccagacagtttcccttggccagtccctgttcttccatttccccccactgctcagagacggcgagaactatgttgtgcttctggactccacactccccagatcccagtatgactacatcttgcctcaagtttctttcaccgcantgggctaccataaacacatcaccttgatttttaatcccacgaggaagctgcctgaacaggacatcgcacaaggatcctacattgccctgccattgacgctgctggttctgctggccggttacaaccatgacaagctcattcctttgctgctgcagttgacaagccggctacagggagtccgcgcgctcggccaggcagcctctgacaatagcggcccagaagatgcaaagagacaagccaagaaacagaagacaaggcggacttgaggaggaagggggacagttgcagtctcacttgggacagggcacaagccagggggtncgggcanttaaccggcccgtggggataaaaagccaaaagcatgcgtcagcttactttcagctgggcttgntggggccccgaacccaatggcccnttggcacttggggcaatcctggaacccattcctaaacccctttcctaaaagnccctttggggcaatggcaaatggaaaggganccttcctgggnaatttttctttaacccgnaaatttaatttttttggngg

SEQ ID NO: 1180 - DNA, 331 bp, Homo sapiens
  misc_feature (282)..(282): n equals a,t,g, or c
  misc_feature (295)..(295): n equals a,t,g, or c
  misc_feature (317)..(317): n equals a,t,g, or c
  misc_feature (330)..(331): n equals a,t,g, or c
gaatcaacaccctcctagccttactactaataattattacattttgactaccacaactcaacggctacatagaaaaatccaccccttacgagtgcggcttcgaccctatatcccccgcccgcgtccctttctccataaaattcttcttagtagctattaccttcttattatttgatctagaaattgccctccttttacccctaccatgagccctacaaacaactaacctgccactaatagttatgttcatccctcttattaatcatcatccttagccctaantctggcctatganttgactaccaaaaggattagantggaaccgaattnn

SEQ ID NO: 1181 - DNA, 539 bp, Homo sapiens
  misc_feature (396)..(396): n equals a,t,g, or c
  misc_feature (519)..(519): n equals a,t,g, or c
  misc_feature (525)..(525): n equals a,t,g, or c
  misc_feature (530)..(530): n equals a,t,g, or c
ctcaagtcgggtatgaaggagctggccgtgttccgggagaaggtcactgagcagcaccggcagatgggcaagggtggcaagcatcaccttggcctggaggagcccaagaagctgcgaccaccccctgccaggactccctgccaacaggaactggaccaggtcctggagcggatctccaccatgcgccttccggatgagcggggccctctggagcacctctactccctgcacatccccaactgtgacaagcatggcctgtacaacctcaaacagtgcaagatgtctctgaacgggcacgtggggaatgctggtgttttgaacccaacaccgggaactgatccaaggaacccccacatccggggggacccgaatgtcatctcttctacaatgacacangagctcgcggggtgcacaccagcggatgcagtaaacgcaaccagcggtgctgcgccctgcccccgccctctccaaacaccggcaaaaacgaaatcttggttgtggtctggaagattccatctnaacctnttatnttggaaaaa

SEQ ID NO: 1182 - DNA, 464 bp, Homo sapiens
  misc_feature (2)..(3): n equals a,t,g, or c
  misc_feature (84)..(84): n equals a,t,g, or c
  misc_feature (136)..(136): n equals a,t,g, or c
  misc_feature (146)..(146): n equals a,t,g, or c
  misc_feature (158)..(158): n equals a,t,g, or c
gnncacgcgtccgcccacgcgtccgcggacgcgtgggccgaaagcgaagaaggaagctcctgcccctcctaaagctgaagccanagcgaaggctttaaaggccaagaaggcagtgttgaaaggtgtccacagccanaaaaagaagnagatccgcacgncacccaccttccggcggccgaagacactgcgactccggagacagcccaaatatcctcggaagagcgctcccaggagaaacaagcttgaccactatgctatcatcaagtttccgctgaccactgagtctgccatgaagaagatagaagacaacaacacacttgtgttcattgtggatgttaaagccaacaagcaccagattaaacaggctgtgaagaagctgtatgacattgatgtggccaaggtcaacaccctgattcggcctgatggagagaagaaggcatatgttcgactggctcctgattacg

SEQ ID NO: 1183 - DNA, 357 bp, Homo sapiens
  misc_feature (295)..(295): n equals a,t,g, or c
  misc_feature (307)..(307): n equals a,t,g, or c
  misc_feature (329)..(329): n equals a,t,g, or c
  misc_feature (333)..(333): n equals a,t,g, or c
  misc_feature (343)..(343): n equals a,t,g, or c
ggacccacgcgtccgcgacccacgcgtccgccgctagcatagaaacattgcctttcctacacattcctcatcattgtttcctcagaaaattattttaagagtttgtgaaaccagattaaatatctatattcagtttgggcctaatttttaaaaataaatatttatactccagcttttgtgtatttgggtgtacatcaccacttatgcaaatcaaggatcagaaaactggaggttagccatctccattatttccttttgcacattgggtacagtgggtggcattagtatgcactanctgcaaaatccncagcaccttaggggaaaataantttnttttattaanaaaaaaaaaaattt

SEQ ID NO: 1184 - DNA, 471 bp, Homo sapiens
  misc_feature (365)..(365): n equals a,t,g, or c
  misc_feature (426)..(427): n equals a,t,g, or c
  misc_feature (449)..(449): n equals a,t,g, or c
  misc_feature (453)..(453): n equals a,t,g, or c
  misc_feature (462)..(462): n equals a,t,g, or c
gcagacgtggcgacccgctgaatttaagcatattagtcagcggaggagaagaaactaaccaggattccctcagtaacggcgagtgaacagggaagagcccagcgccgaatccccgccccgcggcggggcgcgggacatgtggcgtacggaagacccgctccccggcgccgctcgtggggggcccaagtccttctgatcgaggcccagcccgtggacggtgtgaggccggtagcggcccccggcgcgccgggcccgggtcttcccggagtcgggttgcttgggaatgcagcccaaagcgggtggtaaactccatctaaggctaaataccggcacgagaccgatagtcaacaagtaccgtaaggganagttgaaaagaactttgaagagagagttcaagaaggcttgaaaacgttaaagaggtaaacnngtggggtcgcgcatccgcccgnaggnttaacccgngacgggtcc

SEQ ID NO: 1185 - DNA, 415 bp, Homo sapiens
  misc_feature (8)..(8): n equals a,t,g, or c
  misc_feature (138)..(138): n equals a,t,g, or c
  misc_feature (359)..(359): n equals a,t,g, or c
  misc_feature (375)..(375): n equals a,t,g, or c
  misc_feature (380)..(381): n equals a,t,g, or c
  misc_feature (410)..(410): n equals a,t,g, or c
gcccacgntcccggggaggcggggccagcgaggcaagatggagttagtgcaggtcctgaaacgcgggctgcagcagatcaccggccaggcggttctccgaggctatctacgggtttttttcaggacaaatgatgcgangttggtacattagtgggggaagacaaatatggaaacaaatactatgaagacaacaagcaattttttggccgtcaccgatgggttgtatatactactgaaatgaatggcaaaaacacattctggggatgtggatgggaagcatggtgcctcctgaaatggcatcgttggcttcacagtatgactgatggatcctccaacaacaaaaccacttactgctcgtnaaattcattgggacgnaaccnnaaattccaacgtggactgggcaccccagnaacca

SEQ ID NO: 1186 - DNA, 470 bp, Homo sapiens
  misc_feature (56)..(56): n equals a,t,g, or c
  misc_feature (416)..(416): n equals a,t,g, or c
gcccacgcgtccggcggacatcttgtggctgtgtcgtgcgcgtgagccccgtaggnccggggaggcaccagctgccgcgcggggaggaggccgaggccgcagcttgagggaggccccggcccctctgcgcctgtgtctggcagagctggtgtgagacgagacaatcctgccccgccgccgggataatcaagagttttggccggacctttgagcatacaccgagagagtgaggagccagacgacaagcacacactatggcgctgaaacggattaataaggaacttagtgatttggcccgtgaccctccagcacaatgttctgcaggtccagttggggatgatatgtttcattggcaagccacaattatgggacctaatgacagcccatatcaaggcggtgtattctttttgacaatncattttcctacagactaacccttcaaaccacctaaggttgcatttacaacaaga

SEQ ID NO: 1187 - DNA, 566 bp, Homo sapiens
  misc_feature (559)..(559): n equals a,t,g, or c
gttccggggagtttgggggaccagatttaccttggattgcccctccctctcctggctcgggcaccccgaagcacgacgcagagtaggaagagtttaaagacctcgaggcctctgggcacttgagtttggcatgttaatttttatcagcgacttctggggcctagcaccattcccggaagaagggagttgtcgggcagggtccttaatgggggttgcaattcttgtcttggttgggaaagagcctagctgggaacaggggtcgtttgtgtagtaactgtattaagcagttctggtgggtttgttgtaactgttcggtgtccttggggtcccatctagcattgtggggtctggctcttctgaagaggagtcttggctcagtgtttgggtcctccataatccgaagttctaaatcaccagttttatccaaaggctgagagcaagtactgtgagtagcaagtgaatcagtagccggtggatcttttaattctgggttcacatttggtcaaggttctgctttcacgagtttgccattctatcctgttaaaatgaagggaagggntgttgaa

SEQ ID NO: 1188 - DNA, 457 bp, Homo sapiens
  misc_feature (443)..(443): n equals a,t,g, or c
cggacgcgtgggcggacgcgtgggcagaccgcaacctcaacaccaccttcttcgaccccgccggaggaggagaccccattctataccaacacctattctgatttttcggtcaccctgaagtttatattcttatcctaccaggcttcggaataatctcccatattgtaacttactactccggaaaaaaagaaccatttggatacataggtatggtctgagctatgatatcaattggcttcctagggtttatcgtgtgagcacaccatatttacagtaggaatagacgtagacacacgagcatatttcacctccgctaccataatcatcgctatccccaccggcgtcaaagtatttagctgactcgccacactccacggaagcaatatgaaatgatctgctgcagtgctctgagccctaggattcatctttcttttcaccgtagnggcctgactgggca

SEQ ID NO: 1189 - DNA, 726 bp, Homo sapiens
  misc_feature (4)..(4): n equals a,t,g, or c
  misc_feature (415)..(415): n equals a,t,g, or c
  misc_feature (550)..(550): n equals a,t,g, or c
  misc_feature (575)..(575): n equals a,t,g, or c
  misc_feature (646)..(646): n equals a,t,g, or c
  misc_feature (657)..(657): n equals a,t,g, or c
  misc_feature (706)..(706): n equals a,t,g, or c
  misc_feature (725)..(726): n equals a,t,g, or c
gcanttattttcctgtggaataaagatggtccaaaaatagtcaaaaattaaatatatatatatattagtaatttatatagatgtcagcaattaggcagatcaaggtttagtttaacttccactgttaaaataaagcttacatagttttcttcctttgaaagactgtgctgtcctttaacataggtttttaaagactaggatattgaatgtgaaacatccgttttcattgttcacttctaaaccaaaaattatgtgttgccaaaaccaaacccaggttcatgaatatggtgtctattatagtgaaacatgtactttgagcttattggttttattctgtattaaatattttcagggttttaaacactaatcacaaactgaatgacttgacttcaaaagcaacaaccttaaaggccgncatttcattagtattcctcattctgcatcctggcttgaaaaacagctctgttgaatcacagtatcagtattttcacacgtaagcacattcgggccatttccgtgggttctcatgagctgtggtcacagacctcancagggcatcgcatggaccgcaaganggcagattcggaccactaggcctgaatgacatttcactaaaaggcttcaaaacatttctaagactactaanggcttttatgnaaattctttaaatggggatttcttaagaattcaaaattgggaataaaantatttggattaaaaaaaann

SEQ ID NO: 1190 - DNA, 616 bp, Homo sapiens
  misc_feature (310)..(310): n equals a,t,g, or c
  misc_feature (574)..(574): n equals a,t,g, or c
  misc_feature (590)..(590): n equals a,t,g, or c
tcaagcttatcgataccgtcgacctcgtgccgctcgtgccgctcgtgccgctcgtgccgggatactgtccatcacatgttactttttggatgcaatatgccttcatccactggaagttactggttttgtgatgaaggaacctgtacagataaagccaatattctgtatgcctgggcgagaaatgctccccctacccggctccccaaaggtgttggattcagagttggaggagagactggaagtaaatactttgtactacaggtacactatggggatattaagtgcttttagagataataacaaggactgntctggtgtgtccttacacctcacacgtctgccacagcctttaattgctggcatgtaccttatgatgtctgttgacactgttatcccagcaggagaaaaagtggtgaattctgacatttcatgccattataaaaattatccaatgcatgtctttgcctatagagtcacactcaccatttaggtaaggtagtaagtggatcagagtaagaaaatggacagtggacactgattgacggcagaccctactgcacaggcttttacctgnggggcatcagttgagnaagtttggtgactatgctgaagaagg

SEQ ID NO: 1191 - DNA, 503 bp, Homo sapiens
  misc_feature (393)..(393): n equals a,t,g, or c
  misc_feature (437)..(437): n equals a,t,g, or c
  misc_feature (467)..(468): n equals a,t,g, or c
  misc_feature (489)..(489): n equals a,t,g, or c
gccggtccgaccacctgaagacccacaccaggactcatacaggtaaaacaagtgaaaagcccttcagctgtcggtggccaagttgtcagaaaaagtttgcccggtcagatgaattagtccgccatcacaacatgcatcagagaaacatgaccaaactccagctggcgctttgaggggtctcctcggggaccgttcagtgtcccaggcagcacagtgtgtgaactgctttcaagtctgactctccactcctcctcactaagaaggaaacttcagttgatcttcttcatccaacttccaagacaagataccggtgcttctggaaactaccaggtgtgcctggaagagttggtctctgccctgcctacttttagtgactcacaggccctggagaancggctaacaatgtctgggtagttaaaaagccattggcatttggnctggattttctactgtaagaagagccatannttatcatgtcccctgaccttnccttcttttttaat

SEQ ID NO: 1192 - DNA, 378 bp, Homo sapiens
  misc_feature (300)..(300): n equals a,t,g, or c
  misc_feature (311)..(311): n equals a,t,g, or c
  misc_feature (332)..(332): n equals a,t,g, or c
  misc_feature (364)..(364): n equals a,t,g, or c
  misc_feature (367)..(367): n equals a,t,g, or c
gcggacgcgtgggcgaaaatggaaagattaattgggagctcctgaagtatggggactttctccaaagaatcctgaaccagattctgatgaacatacaccagtggaggatgaagagccaaagaaaagcactacttcagcttctacttcagaagaagaaaaaaagaagaagtctagccgttcaaaagaaaggtccaagaaaaggagaaagaaaaaatcatcgaaaagaaaacataagaagtattctgaagatagcgacagtgactctgattctgaaacagactccagtgatgaagataacanaaggagagcanagaaagccaagaaaaaggaanagaagaagaaacacagatcgaagaaatataanaanaagaggtctaa

SEQ ID NO: 1193 - DNA, 161 bp, Homo sapiens
  misc_feature (2)..(2): n equals a,t,g, or c
gnagcatatgcttgtctcaaagattaagccatgcatgtctaagtacgcacggccggtacagtgaaactgcgaatggctcattaaatcagttatggttcctttggtcgctcgctcctctcctacttggataactgtggtaattctagagctaatacatgccg

SEQ ID NO: 1194 - DNA, 380 bp, Homo sapiens
  misc_feature (127)..(127): n equals a,t,g, or c
  misc_feature (337)..(337): n equals a,t,g, or c
  misc_feature (358)..(358): n equals a,t,g, or c
  misc_feature (369)..(369): n equals a,t,g, or c
  misc_feature (376)..(376): n equals a,t,g, or c
  misc_feature (378)..(378): n equals a,t,g, or c
tcaacaccctcctagccttactactaataattattacattttgactaccacaactcaacggctacatagaaaaatccaccccttacgagtgcggcttcgaccctatatcccccgcccgcgtcccttnctccataaaattcttcttagtagctattaccttcttattatttgatctagaaaattgccctccttttacccctaccatgagccctacaaacaactaacctgccactaatagttatgtcatccctcttattaatcatcatcctagccctaagtctggcctatgagtgactacaaaaaggattagactgaaccgaataaaaaaaaaaaaaanaactcgaggggggcccggtanccattcgcctnagggggngnta

SEQ ID NO: 1195 - DNA, 395 bp, Homo sapiens
  misc_feature (5)..(5): n equals a,t,g, or c
  misc_feature (7)..(8): n equals a,t,g, or c
  misc_feature (10)..(10): n equals a,t,g, or c
  misc_feature (64)..(64): n equals a,t,g, or c
  misc_feature (167)..(167): n equals a,t,g, or c
  misc_feature (259)..(259): n equals a,t,g, or c
  misc_feature (285)..(285): n equals a,t,g, or c
  misc_feature (292)..(292): n equals a,t,g, or c
  misc_feature (301)..(301): n equals a,t,g, or c
  misc_feature (328)..(328): n equals a,t,g, or c
  misc_feature (337)..(337): n equals a,t,g, or c
  misc_feature (382)..(383): n equals a,t,g, or c
ggcangnncnggtgtcggaattcccgagttcgacccacgcgtccgctctgaacccgagcggggntccttggcttgactttgatcctggtccttaaatgcctttccccactcccctcccgtgggttcaggggccaagcggcccctcctcagagcacgggcagcaccgnctcctggacccctgtgtgccagcctctgcagacgcagctggtgggagggagcatggatttggaggtggagaagtcactcctggtcctcgganggggtgggctgtgtgcctagttcagngtgactnggggattgntgagggcggacaggtttctgaggcctncctagcctnctttgtaaattcacacgagatagtccagggctttccagcgcccannttggatgataat

SEQ ID NO: 1196 - DNA, 315 bp, Homo sapiens
  misc_feature (79)..(79): n equals a,t,g, or c
  misc_feature (86)..(86): n equals a,t,g, or c
  misc_feature (136)..(136): n equals a,t,g, or c
  misc_feature (168)..(168): n equals a,t,g, or c
  misc_feature (184)..(184): n equals a,t,g, or c
  misc_feature (192)..(194): n equals a,t,g, or c
  misc_feature (209)..(209): n equals a,t,g, or c
  misc_feature (211)..(211): n equals a,t,g, or c
  misc_feature (241)..(241): n equals a,t,g, or c
  misc_feature (243)..(243): n equals a,t,g, or c
  misc_feature (245)..(245): n equals a,t,g, or c
  misc_feature (308)..(309): n equals a,t,g, or c
caacaatatactctccggacaatgaaccataaccaatactaccaatcaatactcatcattaataatcataatggctatngcaatanaactaggaatagccccctttcacttctgagtcccagaggttacccaaggnacccctctgacatccggcctgcttcttctcanatgacaaaaactagcncccatccnnngggatataccaaatntntccctcactaaacgtaagccttctcctcantntntcaatcttatccatcatagcaggcagttgaggtggattaaaaccaaaacccagctacgcaaannttagca

SEQ ID NO: 1197 - DNA, 366 bp, Homo sapiens
  misc_feature (337)..(337): n equals a,t,g, or c
  misc_feature (343)..(343): n equals a,t,g, or c
  misc_feature (358)..(358): n equals a,t,g, or c
  misc_feature (361)..(361): n equals a,t,g, or c
  misc_feature (363)..(363): n equals a,t,g, or c
gcaaaaccccactctgcatcaactgaacgcaaatcagccactttaattaagctaagcccttactagaccaatgggacttaaacccacaaacacttagttaacagctaagcaccctaatcaactggcttcaatctacttctcccgccgccgggaaaaaaggcgggagaagccccggcaggtttgaagctgcttcttcgaatttgcaattcaatatgaaaatcacctcggagctggtaaaaagaggcctaacccctgtctttagatttacagtccaatgcttcacttcagccatttaccttcacccccaaaaaaaaaaaaaaaaaacccgagggggggncccggnacccattcgccctanagngngtg

SEQ ID NO: 1198 - DNA, 515 bp, Homo sapiens
  misc_feature (8)..(8): n equals a,t,g, or c
  misc_feature (26)..(26): n equals a,t,g, or c
  misc_feature (28)..(28): n equals a,t,g, or c
  misc_feature (53)..(53): n equals a,t,g, or c
  misc_feature (82)..(82): n equals a,t,g, or c
  misc_feature (189)..(189): n equals a,t,g, or c
  misc_feature (452)..(452): n equals a,t,g, or c
  misc_feature (491)..(491): n equals a,t,g, or c
  misc_feature (494)..(494): n equals a,t,g, or c
  misc_feature (507)..(507): n equals a,t,g, or c
cgatcgtnactggtacgcatcgattncnaccgggttccggaaattcccgggtngacccacgcgtccgttcactctccgtcancttcattgcccgctcggcgtccggcccccgacccgcgctcgtccgcccgcccgcccgcccgcccgcgccatgaacgccaaggtcgtggtcgtgctggtcctcgtgcngaccgcgctctgcctcagcgacgggaagcccgtcagcctgagctacagatgcccatgccgattcttcgaaagccatgttgccagagccaacgtcaagcatctcaaaattctcaacactccaaactgtgcccttcagattgtagcccggctgaagaacaacaacagacaagtgtgcattgacccgaagctaaagtggattcaggagtactggagaaagctttaaacaagtaagcacaacagccaaaaaggactttccgctaganccactcgaggaaaactaaaacttgtgagagatgaacggnccnccacgttgggganaaggggcc

SEQ ID NO: 1199 - DNA, 563 bp, Homo sapiens
  misc_feature (503)..(503): n equals a,t,g, or c
  misc_feature (523)..(523): n equals a,t,g, or c
  misc_feature (556)..(558): n equals a,t,g, or c
ctcagacgctcaggaaatagaaaccgtctgaactatcctgcccgccatcatcctagtcctcatcgccctcccatccctacgcatcctttacataacagacgaggtcaacgatccctcccttaccatcaaatcaattggccaccaatggtactgaacctacgagtacaccgactacggcggactaatcttcaactcctacatacttcccccattattcctagaaccaggcgacctgcgactccttgacgttgacaatcgagcagtactcccgattgaagcccccattcgtataataattacatcacaagacgtcttgcactcatgagctgtccccacattaggcttaaaaacagatgcaattcccggacgtctaaaccaaaccactttcaccgctacacgaccgggggtatactacggtcaatgctctgaaatctgtggagcaaaccacagtttcatgcccatcgtcctagaattaattcccctaaaaatctttgaaatagggnccgtatttaccctatagcancccctctaacccctctagagccaaaaaaaaaannnaaaaa

SEQ ID NO: 1200 - DNA, 340 bp, Homo sapiens
  misc_feature (2)..(2): n equals a,t,g, or c
  misc_feature (50)..(50): n equals a,t,g, or c
tntaataatcaacaccctcctagccttactactaataattattacatttngactaccacaactcaacggctacatagaaaaatccaccccttacgagtgcggcttcgaccctatatcccccgcccgcgtccctttctccataaaattcttcttagtagctattaccttcttattatttgatctagaaattgccctccttttacccctaccatgagccctacaaacaactaacctgccactaatagttatgtcatccctcttattaatcatcatcctagccctaagtctggcctatgagtgactacaaaaaggattagactgaaccggaataaaaaaaaaa

SEQ ID NO: 1201 - DNA, 561 bp, Homo sapiens
  misc_feature (415)..(415): n equals a,t,g, or c
  misc_feature (418)..(418): n equals a,t,g, or c
  misc_feature (423)..(423): n equals a,t,g, or c
  misc_feature (451)..(451): n equals a,t,g, or c
  misc_feature (456)..(456): n equals a,t,g, or c
  misc_feature (466)..(466): n equals a,t,g, or c
  misc_feature (469)..(469): n equals a,t,g, or c
  misc_feature (474)..(474): n equals a,t,g, or c
  misc_feature (490)..(490): n equals a,t,g, or c
  misc_feature (498)..(498): n equals a,t,g, or c
  misc_feature (517)..(517): n equals a,t,g, or c
  misc_feature (554)..(554): n equals a,t,g, or c
ctttcttttggccctaggcccttcctgcccctgtcgtcagcagagagatggaaaacttgatgactagctccaccctaccgcccctttttgcagatgaagacggttccaaggagagtaatgatctggctaccactgggtaagcagctgctttaggacactggacttctccataggcctcaaaacaaagcttctagcaaagtaagaggtcctaaagaggcagttttatatcataagaatagacggtgcacttgtttcactttgcaaagagagtgacagccatcataaaccactttgtaatctgcattcaattatcttttgcagtgctctggttttttgtggactgggtacaacaatatgtgggatcttagcaaacactgggtgactccagttaaggaaattatatagtcaccattanggnatacnggccacagagtagcctaaaaacaatgcnttttnccgtcaattnccncggtntaaaagttttcccagntcgttttnaggggtcttatcagagctngacttaggggtttgccttcctcccccttcttcggggntggaatt

SEQ ID NO: 1202 - DNA, 320 bp, Homo sapiens
  misc_feature (14)..(14): n equals a,t,g, or c
  misc_feature (23)..(23): n equals a,t,g, or c
  misc_feature (71)..(71): n equals a,t,g, or c
  misc_feature (99)..(99): n equals a,t,g, or c
  misc_feature (120)..(120): n equals a,t,g, or c
  misc_feature (128)..(128): n equals a,t,g, or c
  misc_feature (149)..(149): n equals a,t,g, or c
  misc_feature (153)..(153): n equals a,t,g, or c
  misc_feature (189)..(189): n equals a,t,g, or c
  misc_feature (205)..(205): n equals a,t,g, or c
  misc_feature (217)..(217): n equals a,t,g, or c
  misc_feature (235)..(235): n equals a,t,g, or c
  misc_feature (247)..(247): n equals a,t,g, or c
  misc_feature (290)..(290): n equals a,t,g, or c
  misc_feature (305)..(305): n equals a,t,g, or c
  misc_feature (312)..(312): n equals a,t,g, or c
gtggggctccctcnggcaccggngactgcccggacccgggggaggtccctgaatatcccccttactaccangaggaggccggctactgaggctcccagnacgctctctccccacatcgtntccccatntgggtttttgggtttttctgngttntcatctttttttttttcttaacccgttcagtgctgncagtcaaccaagggtntgtgagtgtcancgtgggatcaggcagcanagcttttttccnctttgccttgatccttcgcaaggctgatccactgggctgtggnggaaggggtcaaggntcatatnccaataac

SEQ ID NO: 1203 - DNA, 534 bp, Homo sapiens
  misc_feature (479)..(479): n equals a,t,g, or c
  misc_feature (512)..(512): n equals a,t,g, or c
  misc_feature (523)..(523): n equals a,t,g, or c
gaacccgtcatctactctaccatctttgcaggcacactcatcacagcgctaagctcgcactgatttttacctgagtaggcctagaaataaacatgctagcttttattccagttctaaccaaaaaaataaaccctcgttccacagaagctgccatcaagtatttcctcacgcaagcaaccgcatccataatccttctaatagctatcctcttcaacaatatactctccggacaatgaaccataaccaatactaccaatcaatactcatcattaataatcataatggctatagcaataaaactaggaatagccccctttcacttctgagtcccagaggttacccaaggcacccctctgacatccggcctgcttcttctcacatgacaaaaactagcccccatctcaatcatataccaaatctctccctcactaaacgtaagccttctcctcactctctcaatcttatccatcatagcaggnagttgaggtggattaaaccaaacccagctacgnaaaatcttagnatatcctcaat

SEQ ID NO: 1204 - DNA, 333 bp, Homo sapiens
  misc_feature (280)..(280): n equals a,t,g, or c
  misc_feature (295)..(295): n equals a,t,g, or c
  misc_feature (297)..(297): n equals a,t,g, or c
  misc_feature (306)..(306): n equals a,t,g, or c
  misc_feature (309)..(309): n equals a,t,g, or c
gcgccagagtgcttcgcccacctcacacagctgctgcaggtgctggccggcggccgggtctgtgccgtgctggagggcggctaccacctggagtcactggcggagtcagtgtgcatgacagtacagacgctgctgggtgacccggccccacccctgtcagggccaatggcgccatgtcagagtgccctagagtccatccagagtgcccgtgctgcccaggccccgcactggaagagccttcagcagcaaagatgtgacccgctgtgccgatgagccccancaagtcactccccananggggaaggnctncaccttttgttgcctggggggtca

SEQ ID NO: 1205 - DNA, 551 bp, Homo sapiens
  misc_feature (314)..(314): n equals a,t,g, or c
  misc_feature (335)..(335): n equals a,t,g, or c
  misc_feature (371)..(371): n equals a,t,g, or c
  misc_feature (407)..(407): n equals a,t,g, or c
  misc_feature (421)..(421): n equals a,t,g, or c
  misc_feature (523)..(523): n equals a,t,g, or c
ggcacgagctggaataaggcaagggggagtgtagagcagagcagaagcctgagccagacggagagccacctcctctcccagggacagacatggctcagcggatgacaacacagctgctgctccttctagtgtgggtggctgtagtaggggaggctcagacaaggattgcatgggccaggactgagcttctcaatgtctgcatgaacgccaagcaccacaaggaaaagccaggccccgaggacaagttgcatgagcagtgtcgaccctggaggaagaatgcctgctgttcttaccaacaccagccaggaagcccntaaggatgtttcctacctttntaggtttcaattggaaccatttggaggagatggcanctgcctgcaaacgggattttcatccaggacaactgnctttacgggtgttnccccaatttggggccctggttccagcagtggtcagagtttgcgcaaagagcgggtatttaacgtgccctttgcaaagaggttttgagcaatggttggggagnttttggaactcttaaactgcaagggcaa

SEQ ID NO: 1206 - DNA, 251 bp, Homo sapiens
  misc_feature (15)..(15): n equals a,t,g, or c
  misc_feature (24)..(24): n equals a,t,g, or c
  misc_feature (43)..(43): n equals a,t,g, or c
  misc_feature (50)..(50): n equals a,t,g, or c
  misc_feature (61)..(61): n equals a,t,g, or c
  misc_feature (68)..(68): n equals a,t,g, or c
  misc_feature (77)..(77): n equals a,t,g, or c
  misc_feature (92)..(92): n equals a,t,g, or c
  misc_feature (103)..(103): n equals a,t,g, or c
  misc_feature (123)..(123): n equals a,t,g, or c
  misc_feature (136)..(136): n equals a,t,g, or c
  misc_feature (141)..(142): n equals a,t,g, or c
  misc_feature (158)..(158): n equals a,t,g, or c
  misc_feature (214)..(214): n equals a,t,g, or c
  misc_feature (244)..(245): n equals a,t,g, or c
  misc_feature (247)..(247): n equals a,t,g, or c
tcaagcttagggganaccgtcganctcgagggggggcccggtncccaaancgccctatagngagtcgnattacaatncactggccgtcgatntacaacgtcgngactgggaaaaccctggcgnaacccaacttaancgccnngcagcacatccccctntcgccagctggcggaacaagcgaagaggcccgcaccgatcgccctacccaacagtngtgcagcctgaatggcgaatggcaaattgnnancgca

SEQ ID NO: 1207 - DNA, 354 bp, Homo sapiens
  misc_feature (322)..(322): n equals a,t,g, or c
ggcacgagtatgaaacaacatttaatacaagtatttttggttagtcattattattacctaattcttccatcattgtatgctggtgttccttcaacaatggatttgatgaaaaaaggtttgtttccattgtattcttcataacctcctacaatgcagaagcccagacttccagctgtgtttcttcgtaatacaatatctttacagttatacaagcacctgaaatagaatgtaatcagtgtacatgcatatttaagtttcacagttaagggaatacttactggtgactcatcctccattccttttgttggcatttttaatgggntaagtaccactgcatagggcccactcaaaatt

SEQ ID NO: 1208 - DNA, 540 bp, Homo sapiens
  misc_feature (407)..(407): n equals a,t,g, or c
  misc_feature (439)..(439): n equals a,t,g, or c
  misc_feature (460)..(460): n equals a,t,g, or c
  misc_feature (467)..(467): n equals a,t,g, or c
  misc_feature (496)..(496): n equals a,t,g, or c
  misc_feature (502)..(502): n equals a,t,g, or c
  misc_feature (508)..(508): n equals a,t,g, or c
gtaaaaataaacacgaagaacaaagccccaccaccgtgctgtgctgtttgtgtggccccactgcatcgaggccacaggctagctgctagacgcatctagagttccctgattcctaaaattatttatcttaaatcctgtttgccctaaccttcttaaggcatcagctttgagttacaaatgtaaccaacacacaagcaaatgtgccattgacttagtgctgcataactgtgggacggtcacttccgttgagcctgaccttgtagagagacacaaatagttggcaaattgatgtgagcgctgtgaacaccccacgtgtctttctttttctcccagcttctggacaagatcgacgtgatcaagcaggctgactatgtgcccagcgatcaggacctgcttcgctgccgtgncctgacttctggaatcttttgagaccaagttncaggtggacaaagtaactttncagtaangcccaactggtacctttttatatacaganatcatnggtttnttgacatttaccccagtcctttggaataaccc

SEQ ID NO: 1209 - DNA, 387 bp, Homo sapiens
  misc_feature (67)..(67): n equals a,t,g, or c
  misc_feature (224)..(224): n equals a,t,g, or c
  misc_feature (320)..(320): n equals a,t,g, or c
  misc_feature (325)..(325): n equals a,t,g, or c
  misc_feature (339)..(339): n equals a,t,g, or c
  misc_feature (360)..(360): n equals a,t,g, or c
  misc_feature (363)..(363): n equals a,t,g, or c
ttttaataatcaacaccctcctagccttactactaataattattacattttgactaccacaactcancggctacatagaaaaatccaccccttacgagtgcggcttcgaccctatatcccccgcccgcgtccctttctccataaaattcttcttagtagctattaccttcttattatttgatctagaaattgccctccttttacccctaccatgtagccctacnaacaactaacctgccactaataggttatgtcatccctcttattaatcatcatcctagccctaagtctggcctatgagtggactacaaaaagggatnagacngagccgaataaaanaaaaaaaaaaggggggccgcnctnaaagttcccttggggggcccaact

SEQ ID NO: 1210 - DNA, 476 bp, Homo sapiens
  misc_feature (11)..(11): n equals a,t,g, or c
  misc_feature (15)..(15): n equals a,t,g, or c
  misc_feature (125)..(125): n equals a,t,g, or c
  misc_feature (213)..(213): n equals a,t,g, or c
  misc_feature (231)..(231): n equals a,t,g, or c
  misc_feature (253)..(253): n equals a,t,g, or c
  misc_feature (321)..(321): n equals a,t,g, or c
  misc_feature (332)..(332): n equals a,t,g, or c
  misc_feature (376)..(376): n equals a,t,g, or c
  misc_feature (402)..(402): n equals a,t,g, or c
  misc_feature (405)..(405): n equals a,t,g, or c
  misc_feature (417)..(417): n equals a,t,g, or c
  misc_feature (446)..(446): n equals a,t,g, or c
  misc_feature (462)..(462): n equals a,t,g, or c
gcggacgcttnggtngtgttcaggcgcttcgtggaggttggccgggtggcctatgtctcctttggacctcatgccggaaaattggtcgcgattgtagatgttattgatcagaacagggctttggncgatggaccttgcactcaagtgaggagacaggccatgcctttcaagtgcatgcagctcactgatttcatcctcaagtttccgcacagngcccaccagaagtatgtncgacaagcctggcagaaggcanacatcaatacaaaatgggcagccacacgatgggccaagaagattgaagccagagaaaggaaagccaanatgacagattntgatcgttttaaagttatgaaggcaaagaaaatgaggaacagantaatcaagaatgaagttaagaagctncanaaggcagctctnctgaaagcttcttccaaaaaagcacctgntactaaaggtactgcngctgctgctgctgc

SEQ ID NO: 1211 - DNA, 554 bp, Homo sapiens
  misc_feature (99)..(99): n equals a,t,g, or c
  misc_feature (265)..(265): n equals a,t,g, or c
  misc_feature (305)..(305): n equals a,t,g, or c
  misc_feature (328)..(328): n equals a,t,g, or c
  misc_feature (346)..(346): n equals a,t,g, or c
  misc_feature (360)..(360): n equals a,t,g, or c
  misc_feature (403)..(403): n equals a,t,g, or c
  misc_feature (409)..(409): n equals a,t,g, or c
  misc_feature (432)..(432): n equals a,t,g, or c
  misc_feature (456)..(456): n equals a,t,g, or c
  misc_feature (496)..(496): n equals a,t,g, or c
  misc_feature (500)..(500): n equals a,t,g, or c
  misc_feature (519)..(519): n equals a,t,g, or c
  misc_feature (525)..(525): n equals a,t,g, or c
  misc_feature (540)..(540): n equals a,t,g, or c
ggcacgagctcgtgggttggcagtatgagagttgtaatggcccgactgttgagtgagggggagcaggggatcccaacggcttgcgctgcctttgcgcanagccggcgggcggccacgtcgcggcctggctggggtaggagagggcggtccccagtgcagttgggtgaactaccgttgcacactggagtttctggtgtctttgcttggaactgacctagctcgtggcagggggaactcggttagcggccccacagcccctgctgantcaaaacaactgtgagtggggttgggcgatgattgcaaantgggggtggcggtcgcccggggntaggaagggattgatggntgaccccaggtaantttgatgtgttcgttgatgccatcaacgcagcgttttgaccgncccttngtcccacatttttcaagttcaanggtttcatggccaagatcccaaantttgttccgtttcatttccccttaggattgtaagacgttnatgnctgttatcctgagtaaagnatgaantttggagcccaccanggcaaagcacttta

SEQ ID NO: 1212 - DNA, 510 bp, Homo sapiens
  misc_feature (5)..(5): n equals a,t,g, or c
  misc_feature (27)..(27): n equals a,t,g, or c
  misc_feature (30)..(30): n equals a,t,g, or c
  misc_feature (40)..(40): n equals a,t,g, or c
  misc_feature (95)..(95): n equals a,t,g, or c
  misc_feature (226)..(226): n equals a,t,g, or c
  misc_feature (265)..(265): n equals a,t,g, or c
  misc_feature (305)..(305): n equals a,t,g, or c
  misc_feature (332)..(333): n equals a,t,g, or c
  misc_feature (463)..(463): n equals a,t,g, or c
  misc_feature (469)..(469): n equals a,t,g, or c
  misc_feature (498)..(499): n equals a,t,g, or c
  misc_feature (509)..(509): n equals a,t,g, or c
tttcnatgaccttctcaaacgcggccnggncgctctaganctagtggatcccccgggctgcaggaattcggcacgagcggagcccgagcggagtnttactcgaggccctgtagccggactgggcccctcgtccccttctccagcggctgcggccttggcagcgccgccctgccacactgaccccgtgtggcggagccgctccgcgcccccggccgctctgtaatgntagggcagtctcagccccgagatgacgtcgggtctccgnggcccggttattgtaggaaccatcggccccgtgtaatcgnaggaactatccggcccgggaaatcganngtctgcgcggcccggccccacaaacgggattccccgcccaaattgcggccgaaagtctctcgcccaaaagcatcttcggacgccagggcccggtgattttggctccccgcccggtatgttattcgggccncgtgcnacgtcaacggatcgaggcccggccattanngaaccgcggna

SEQ ID NO: 1213 - DNA, 745 bp, Homo sapiens
  misc_feature (540)..(541): n equals a,t,g, or c
  misc_feature (661)..(661): n equals a,t,g, or c
  misc_feature (703)..(703): n equals a,t,g, or c
  misc_feature (705)..(705): n equals a,t,g, or c
  misc_feature (723)..(723): n equals a,t,g, or c
  misc_feature (725)..(725): n equals a,t,g, or c
gctcatcattaataatcataatggctatagcaataaaactaggaatagccccctttcacttctgagtcccagaggttacccaaggcacccctctgacatccggcctgcttcttctcacatgacaaaaactagcccccatctcaatcatataccaaatctctccctcactagacgtaagccttctcctcactctctcaatcttatccatcatagcaggcagttgaggtggattaaaccaaacccagctacgcaaaatcttagcatactcctcaattacccacataggatgaataatagcagttctaccgtacaaccctaacataaccattcttaatttaactatttatattatcctaactactaccgcattcctactactcaacttaaactccagcaccacgaccctactactatctcgcacctgaaacaagctaacatgactaacacccttaattccatccaccctcctctccctaggaggcctgcccccgctaaccggctttttgcccaaatgggccattatcgaagaattcacaaggnncaatagcctcatcatccccaccatcatagccaccatcaacctccttaacctctacttctacctacgcctaatctatccacctcaatcacactactccccatatctaacaacgtagaaatnaaatgacagtttgaacatacaaaacccacccatttctcccanantcatcggccttacaaggntngtctaccttctccctttatc

SEQ ID NO: 1214 - DNA, 725 bp, Homo sapiens
  misc_feature (314)..(314): n equals a,t,g, or c
  misc_feature (458)..(458): n equals a,t,g, or c
  misc_feature (506)..(506): n equals a,t,g, or c
  misc_feature (520)..(520): n equals a,t,g, or c
  misc_feature (577)..(577): n equals a,t,g, or c
  misc_feature (595)..(595): n equals a,t,g, or c
  misc_feature (598)..(598): n equals a,t,g, or c
  misc_feature (645)..(645): n equals a,t,g, or c
  misc_feature (681)..(681): n equals a,t,g, or c
  misc_feature (694)..(694): n equals a,t,g, or c
gatagtaaaacccagcccatgacccctaacaggggccctctcagccctcctaatgacctccggcctagccatgtgatttcacttccactccataacgctcctcatactaggcctactaaccaacacactaaccatataccaatgatggcgcgatgtaacacgagaaagcacataccaaggccaccacacaccacctgtccaaaaaagccttcgatacgggataatcctatttattacctcagaagtttttttcttcgcaggatttttctgagccttttaccactccagcctagcccctaccccccaattagganggcactggcccccaacaggcatcaccccgctaaatcccctagaagtcccactcctaaacacatccgtattactcgcatcaggagtatcaatcacctgagctcaccatagtctaatagaaaacaaccgaaaccaaataattcaancactgcttattacaattttactgggtctctattttaccctcctacaancctcagagtattcnagtctcccttcaccatttccgacggcatctacggctcaacattttttgttaccacangcttccacggacttcacntcnttattggcttcactttcctcactatctgcttcatccgccaactaatntttcactttacatccaaacattcactttgggtttcnaaacccccccccnaatactggcattttgttaaaatttgtttgaa

SEQ ID NO: 1215 - DNA, 437 bp, Homo sapiens
  misc_feature (1)..(1): n equals a,t,g, or c
  misc_feature (163)..(163): n equals a,t,g, or c
  misc_feature (222)..(222): n equals a,t,g, or c
  misc_feature (313)..(313): n equals a,t,g, or c
  misc_feature (354)..(354): n equals a,t,g, or c
  misc_feature (384)..(384): n equals a,t,g, or c
  misc_feature (390)..(390): n equals a,t,g, or c
  misc_feature (431)..(431): n equals a,t,g, or c
  misc_feature (437)..(437): n equals a,t,g, or c
nctttacaaaaagacacttgatacttgttttcaaaccagtatacaagataagcttccctctcctccttctcgtgccgcttaaacacccctccccacatcaagcccgaatgatatttcctattcgcctacacaattctccgatccgtccctaacaagctaggangcgtccttgccctattactatccatcctcatcctagcaataatccccatcctccatatntccaaacaacaaagcataatatttcgcccactaagccaatcactttattgactcctagccgcagacctcctcattctaacctgaatcggangacaaccagtaagctacccttttaccatcattggacaagtngcatccgtactatacttcacaacaatcctnatcctnataccaactatctcccttattgaaaacaaaatactcaaatnggcctn

SEQ ID NO: 1216 - DNA, 544 bp, Homo sapiens
  misc_feature (294)..(294): n equals a,t,g, or c
  misc_feature (424)..(424): n equals a,t,g, or c
  misc_feature (439)..(439): n equals a,t,g, or c
  misc_feature (466)..(466): n equals a,t,g, or c
  misc_feature (496)..(496): n equals a,t,g, or c
  misc_feature (520)..(520): n equals a,t,g, or c
  misc_feature (522)..(522): n equals a,t,g, or c
  misc_feature (527)..(527): n equals a,t,g, or c
gggtgagggccgtcccgggcagcggagggcctggccccaggcgactagagctgcatcctcaaccattcctcaagaattttgtatccaaggcccaaaagtttgttacccaagatgatgaatgctgacatggatgttgatgctgaaaatcaagtggaactggaggaaaaaacaagacttattaatcaagtgttggaactccaacacacacttgaagatctctctgcaagagtagatgcagttaaggaagaaaatctgaagctaaaatcagaaaaccaaggtcttggacaatatatngaaaatttcatggcaagcttctaaggggttttcaaacaactgacacaaaaagcaaaagaaagtaagggattgacacccttctggtttatggaattgctgctgacatttttctttaaacttggatagattncaaaagtacagaccnttggggtttaatgaatattatgaaganaaggcagatgagacaaaatacacaataccngagactttcataagttggggaatnangtagnctatgaaaccgtgcaaa

SEQ ID NO: 1217 - DNA, 416 bp, Homo sapiens
tgctgacctcagcggttgccaggaaggggtgagcacagagtgcctcttacggtagttaggatgctcagttgctaaacactgcgctttattttcttaaccagttgtggtgtgagtatcagaattgaaacacttttttgggggtaaaaaatatagcctttacatggacagaattttttttgttgtttcagtgaatatgcctgtaattcagtgtatttcagttccgtcagaaagtgtaaatgttagtttcttggtaaagtccttttcttgcttaccttgactgttgatgtactgattgagaagttcattgtctcgtttgtgattcttccagatgtgatgcttgatattttctatatgcgagttagccatccacacccaggcatagcctggatacagtataaaaatagataattaaaaag

SEQ ID NO: 1218 - DNA, 486 bp, Homo sapiens
cttaggatgtatcccctcaaacctacctggtggttctgtgccttcccctactctcttctcatcttcgtatatgacgaagtcagaaaactcatcatcaggcgacgccctggcggctgggtggagaaggaaacctactattagccccccgtcctgcacgccgtggagcatcaggccacacactctgcatccgacacccaccccctctttgtgtacttcagtcttggagtttggaactctaccctggtaggaaagcaccgcagcatgtggggaagcaagacgtcctggaatgaagcatgtagctctatggggggaggggggagggctgcctgaaaaccatccatctgtggaaatgacagcggggaaggtttttatgtgcctttttggttttgtaaaaaaggaacacccggaaagactgaaagaatacattttatatctggatttttacaaataaagatggctattataatgggaaaaaaaaaaaaaaaa

SEQ ID NO: 1219 - DNA, 519 bp, Homo sapiens
  misc_feature (405)..(405): n equals a,t,g, or c
  misc_feature (412)..(412): n equals a,t,g, or c
gccgccctttttttttttttttaaaaaaaaaacaatcctttaataaaattagtccatctaaaactccccaatgcctaaggttctagtcgtggaagggttagctgcagaattccagttcagaagccaacggaggctcagtccagacagggattaaccgacttgtgctggtatctaggtgcttggattgccgagttgagtttgctggaagggaaatggggcggcgtcggggggcccgacaggcctggctgccagtcggcttccgcgaaaacgactcttgctgtccacatagccagccgtgaagccaaactgcaggcctctgccctcccctaaatgtcctcctaggaggcagtcactcgggaggaagatgtgcctgttaccaagtgcttcgtcccggccccagcgcanacctatnaatgaagatggagggagagctgatgtgaaaggcctgggtcccggccgcagaaggggcgccagaccgaaatcagcgatcgcgtctctcccaccaaagcctcccggcca

SEQ ID NO: 1220 - DNA, 369 bp, Homo sapiens
atgagacagagctggccatgcgccagtctgtggagaacgacatccatgggctccgcaaggtcattgatgacaccaatatcacacgactgcagctggagacagagatcgaggctctcaaggaggagctgctcttcatgaagaagaaccacgaagaggaagtaaaaggcctacaagcccagattgccagctctgggttgaccgtggaggtagatgcccccaaatctcaggacctcgccaagatcatggcagacatccgggcccaatatgacgagctggctcggaagaaccgagaggagctagacaagtactggtctcagcagattgaggagagcaccacagtggtcaccacacagtctgctgaggttggag

SEQ ID NO: 1221 - DNA, 518 bp, Homo sapiens
agaacaaggggaggtggacatggagagccaccggaatgccaacgcagagccagctgttcagcgtactcttttagagaaatagaagattgtcggcagaaacagcccaggcgttggcagcagggttagaacagctgcctgaggctcctccctgaaggacacctgcctgagagcagagatggaggccttctgttcacggcggattctttgttttaatcttgcgatgtgctttgcttgatgctgggcggatgatgtttactaacgatgaattttacatccaaagggggataggcacttggacccccattctccaaggcccgggggggcggtttcccatgggatgtgaaaggctggccattattaagtccctgtaactcagatgtcaaccccaccgaggcacccccccgtcccccagaatcttggctgtttacaaatcacgtgtccatcgagcacgtctgaaacccctggtagccccgacttctttttaattaaaataaggtaagcccttcaatttgtttctt

SEQ ID NO: 1222 - DNA, 490 bp, Homo sapiens
agcagcaccaaatccaagatggcggccagcaggaggctgatgaaggagcttgaagaaatccgcaaatgtgggatgaaaaacttccgtaacatccaggttgatgaagctaatttattgacttggcaaggtcttattgttcctgacaaccctccatatgataagggagccttcagaatcgaaatcaactttccagcagagtacccattcaaaccaccgaagatcacatttaaaacaaagatctatcacccaaacatcgacgaaaaggggcaggtctgtctgccagtaattagtgccgaaaactggaagccagcaaccaaaaccgaccaagtaatccagtccctcatagcactggtgaatgacccccagcctgagcacccgcttcgggctgacctagctgaagaatactctaaggaccgtaaaaaattctgtaagaatgctgaagagtttacaaagaaatatggggaaaagcgacctgtggactaaaatctgc

SEQ ID NO: 1223 - DNA, 486 bp, Homo sapiens
  misc_feature (460)..(460): n equals a,t,g, or c
gggacttgagcatgagctcagtcaaagtcgatggcattcggatgtccttccagaatcttctggcgaagatctgttttcaccaccatttttccgttgtggagcgagtggactcctgcgcctccatgtacagccgctccatccagggccaccatgtctgcctcctggtgaaaaagggtgagaactctgtctcagtcgacgggaagtgcagtgactccacgctactgagcaacttgttagaagagatgaaggcgacgctggccaagtgttgagagctgcctgcgagccccgcaccaccccgcggagcacgtacccagggaccgcagccctgacgtgtctcgcctctcctcagtcgtgtgtactgtacccaagcctgagtgttaatttaactctatgttgtccgccgtgtagacatccgaggtcatttgttgcgttgaattatctgaccatccttttttactgngactcttcccattctctttggcaaga

SEQ ID NO: 1224 - DNA, 501 bp, Homo sapiens
tttgcccatttggatgctaccactgtactgtcgcgtgccattgctgagctgggcatctatccagctgtggatcctctagactccacctctcgtatcatggatcccaacattgttggcagtgagcattacgatgttgcccgtggggtgcaaaagatcctgcaggactacaaatccctccaggatatcattgccatcctgggtatggatgaactttctgaggaagacaagttgaccgtgtcccgtgcacggaaaatacagcgtttcttgtctcagccattccaggttgctgaggtcttcacaggtcatatggggaagctggtacccctgaaggagaccatcaaaggattccagcagattttggcaggtgaatatgaccatctcccagaacaggccttctatatggtgggacccattgaagaagctgtggcaaaagctgataagctggctgaagagcattcatcgtgaggggtctttgtcctctgtactgtctctctccttgcc

SEQ ID NO: 1225 - DNA, 503 bp, Homo sapiens
gacagttatgaaacgagtcagctggatgaccagagtgctgaaacccacagccacaagcagtccagattatataagcggaaagctaatgatgagagcaatgagcattccgatgtgattgatagtcaggatctttccaaagtcagccgtgaattccacagccatgaatttcacagccatgaagatatgctggttgtagaccccaaaagtaaggaagaagataaacacctgaaatttcgtatttctcatgaattagatagtgcatcttctgaggtcaattaaaaggagaaaaaatacaatttctcactttgcatttagtcaaaagaaaaaatgctttatagcaaaatgaaagagaacatgaaatgcttctttctcagtttattggttgaatgtgtatctatttgagtctggaaataactgatgtgtttgataattagtttagtttgtggcttcatggaaactccctgtaaactaaaagcttcagggttatgtctatgttcattcta

SEQ ID NO: 1226 - DNA, 502 bp, Homo sapiens
  misc_feature (496)..(496): n equals a,t,g, or c
caggctggacgccatgttccgtgccttcaaatctcttgacaaagatggcactggacaaatccaggtgaacatccaggagtggctgcagctgactatgtattcctgaactggagccccagacccgccccctcaccgccttgctataggagtcacctggagcctcggtctctcccagggccgatcctgtctgcagtcacatctttgtggggcctgctgacccacaagcttttgttctctcagtacttgttacccagcttctcaacatccagggcccaatttgccctgcctggagttccccctggctctaggacactctaacaagctctgtccacgggtctccccattcccaccaggccctgcacacacccactccgtaacctctcccctgtacctgtgccaagcctagcacttgtgatgcctccatgccccgagggccctctctcagttctgggaggatgactccagtccctgcacgccctggcacacccttcacggntgctac

SEQ ID NO: 1227 - DNA, 475 bp, Homo sapiens
  misc_feature (459)..(459): n equals a,t,g, or c
  misc_feature (461)..(465): n equals a,t,g, or c
  misc_feature (467)..(467): n equals a,t,g, or c
cgccaacatgggccgcgttcgcaccaaaaccgtgaagaaggcggcccgggtcatcatagaaaagtactacacgcgcctgggcaacgacttccacacgaacaagcgcgtgtgcgaggagatcgccattatccccagcaaaaagctccgcaacaagatagcaggttatgtcacgcatctgatgaagcgaattcagagaggcccagtaagaggtatctccatcaagctgcaggaggaggagagagaaaggagagacaattatgttcctgaggtctcagccttggatcaggagattattgaagtagatcctgacactaaggaaatgctgaagcttttggacttcggcagtctgtccaaccttcaggtcactcagcctacagttgggatgaatttcaaaacgcctcggggacctgtttgaattttttctgtagtgctgtattattttcaataaatctgggacancnnnnnanaaaaaaaa

SEQ ID NO: 1228 - DNA, 501 bp, Homo sapiens
ctgccgcagacctgggggtgaacccagtcccgaaggcactactggccagtcctacaaccagtattctcagagataccatcagagaacaaacactaatgttaattgcccaattgagtgcttcatgcctttagatgtacaggctgacagagaagattcccgagagtaaatcatctttccaatccagaggaacaagcatgtctctctgccaagatccatctaaactggagtgatgttagcagacccagcttagagttcttctttctttcttaagccctttgctctggaggaagttctccagcttcagctcaactcacagcttctccaagcatcaccctgggagtttcctgagggttttctcataaatgagggctgcacattgcctgttctgcttcgaagtattcaataccgctcagtattttaaatgaagtgattctaagatttggtttgggatcaataggaaagcatatgcagccaaccaagatgcaaatgttttgaaatgat

SEQ ID NO: 1229 - DNA, 400 bp, Homo sapiens
acaaccttcactttatttttaactgtgtagtaagtttatattcaatgccttaaagtgcattgttaacaattgtcttgatatgttgtcctcattttagggaaagtcatagaagccaaaatgatcagcagttgagtaatttacgaaagcacaggtgcaatcccactttaaagcactgggggttgcacagagcacactggtttcaggctccataaatgtggatgactcactggagagcttcatctgtttaagtagaacaaatgtttttactctactgataaagtacaggaaaggaggtttgggatcaaaattatttttcacattccaaacctgtgacaccttacgtttatcgattgctatgcaataaaatacatctttaataataaaaaaaaaaaaaaaaaaa

SEQ ID NO: 1230 - DNA, 522 bp, Homo sapiens
cgcagccatggctcgtggtcccaagaagcatctgaagcgggtggcagctccaaagcattggatgctggataaattgaccggtgtgtttgctcctcgtccatccaccggtccccacaagttgagagagtgtctccccctcatcattttcctgaggaacagacttaagtatgccctgacaggagatgaagtaaagaagatttgcatgcagcggttcattaaaatcgatggcaaggtccgaactgatataacctaccctgctggattcatggatgtcatcagcattgacaagacgggagagaatttccgtctgatctatgacaccaagggtcgctttgctgtacatcgtattacacctgaggaggccaagtacaagttgtgcaaagtgagaaagatctttgtgggcacaaaaggaatccctcatctggtgactcatgatgcccgcaccatccgctaccccgatcccctcatcaaggtgaatgataccattcagattgatttagagactggcaagattactgattt

SEQ ID NO: 1231 - DNA, 383 bp, Homo sapiens
gccgccatcaaccgccagatcaacctggagctctacgcctcctacgtttacctgtccatgtcttactactttgaccgcgatgatgtggctttgaagaactttgccaaatactttcttcaccaatctcatgaggagagggaacatgctgagaaactgatgaagctgcagaaccaacgaggtggccgaatcttccttcaggatatcaagaaaccagactgtgatgactgggagagcgggctgaatgcaatggagtgtgcattacatttggaaaaaaatgtgaatcagtcactactggaactgcacaaactggccactgacaaaaatgacccccatttgtgtgacttcattgagacacattacctgaatgagcaggtgaaagccat

SEQ ID NO: 1232 - DNA, 284 bp, Homo sapiens
  misc_feature (242)..(242): n equals a,t,g, or c
  misc_feature (253)..(253): n equals a,t,g, or c
  misc_feature (266)..(266): n equals a,t,g, or c
  misc_feature (270)..(270): n equals a,t,g, or c
  misc_feature (280)..(280): n equals a,t,g, or c
tgcccccacaatcctaggcctacccgccgcagtactgatcattctatttccccctctattgatccccacctccaaatatctcatcaacaaccgactaatcaccacccaacaatgactaatcaaactaacctcaaaacaaatggataaccatacacaacactaaaggacaaacctgatctcttatataagtatccttattcatttttatggccacaattaacctcttgggattctggcctcantcatttacacnaaccaacccaacntatntataaacttngcca

SEQ ID NO: 1233 - DNA, 191 bp, Homo sapiens
  misc_feature (51)..(51): n equals a,t,g, or c
  misc_feature (140)..(140): n equals a,t,g, or c
  misc_feature (158)..(158): n equals a,t,g, or c
  misc_feature (171)..(171): n equals a,t,g, or c
  misc_feature (179)..(179): n equals a,t,g, or c
  misc_feature (189)..(189): n equals a,t,g, or c
gacggctgcgagaagacgacagaagggaggtgagaagccatttgaatgtgntcagtgcagttatgtggcctctaatcaacatgaagtaacccgccatgcaagacaggttcacaatgggcctaaacctcttaattgcccanactgtgattgcaaacagncagatagaagcancttcaaangacatgtagngc

SEQ ID NO: 1234 - DNA, 490 bp, Homo sapiens
  misc_feature (12)..(12): n equals a,t,g, or c
  misc_feature (25)..(25): n equals a,t,g, or c
  misc_feature (28)..(28): n equals a,t,g, or c
  misc_feature (149)..(149): n equals a,t,g, or c
  misc_feature (193)..(193): n equals a,t,g, or c
  misc_feature (256)..(256): n equals a,t,g, or c
  misc_feature (272)..(272): n equals a,t,g, or c
  misc_feature (284)..(284): n equals a,t,g, or c
  misc_feature (312)..(312): n equals a,t,g, or c
  misc_feature (333)..(333): n equals a,t,g, or c
  misc_feature (342)..(342): n equals a,t,g, or c
  misc_feature (345)..(345): n equals a,t,g, or c
  misc_feature (458)..(458): n equals a,t,g, or c
  misc_feature (472)..(472): n equals a,t,g, or c
  misc_feature (478)..(478): n equals a,t,g, or c
  misc_feature (481)..(482): n equals a,t,g, or c
cttccttgttgncttaaagcaggtngcngtccggaattcccgggtcgacccacgcgtccgccctttacagttgctggctttccaccttgctgtgctgagaggctatgatgttgatttcccacggaatcttgccaaatctgtgactgtanagtgaggaatatctatacaaaatgtacgaaactgtatgattaancaacacaagacaccttttgtatttaaaaccttgatttaaaatatcaccccttgaagccttttnttagtaaatccttatntatatatcagtnataattattccactcaatatgtgatttntgtgaagttacctcttacatnttcccagtnatncgtggaggactttgaataatggaatctatattggaatctgtatcaaaaaggatcctgggctgtgatttgtctttaaaaaaatgctggggtggttgcatttcttgggacctccncttccagtctgaanaaaaanaanntgtttcta

SEQ ID NO: 1235 - DNA, 650 bp, Homo sapiens
  misc_feature (6)..(6): n equals a,t,g, or c
  misc_feature (48)..(48): n equals a,t,g, or c
  misc_feature (387)..(387): n equals a,t,g, or c
  misc_feature (460)..(460): n equals a,t,g, or c
  misc_feature (464)..(464): n equals a,t,g, or c
  misc_feature (474)..(475): n equals a,t,g, or c
  misc_feature (486)..(486): n equals a,t,g, or c
  misc_feature (489)..(490): n equals a,t,g, or c
  misc_feature (507)..(507): n equals a,t,g, or c
  misc_feature (511)..(511): n equals a,t,g, or c
  misc_feature (528)..(529): n equals a,t,g, or c
  misc_feature (533)..(533): n equals a,t,g, or c
  misc_feature (542)..(542): n equals a,t,g, or c
  misc_feature (557)..(557): n equals a,t,g, or c
  misc_feature (565)..(565): n equals a,t,g, or c
  misc_feature (576)..(576): n equals a,t,g, or c
  misc_feature (578)..(578): n equals a,t,g, or c
  misc_feature (587)..(587): n equals a,t,g, or c
  misc_feature (601)..(601): n equals a,t,g, or c
  misc_feature (604)..(604): n equals a,t,g, or c
  misc_feature (610)..(610): n equals a,t,g, or c
gcaacngactttaggtgacactatagaaggtacgcctgcaggtaccgntccggaattcccgggtcgacccacgcgtccggcttttattgaacagcttatcttccacttgcaggtttatggaaacagcagtatttgaaaataaataaaaagtgggagaattccttgctgttagaagaatgtggccattattttgattttttgaatgagatatataatcaaagtactgctgaactgtgagtgcagtattctaaacatttcagctaggaataccactgatttagaaacaaaactgtttgtctctggtttctgaatttaaaatgttgggattacctgtttaaatctgtcttgggggatgtagagattaagtctgtacatgtgcgtgcacanaattattcatgcaccctctgattttggttttcttgtttctgagttcttaggaaagtaccccacatactctttntttnttttttttgnngaggggccttncannggggtggggaaagggtnaggnctttaaacaggtgggtnncttnggggttttncaaaaaccttttttnggaatttnaatcccaaacncnttttccggntttagaaggggggngtntttccnggggtagggttccccaggggttttccaagggggtttgggt

SEQ ID NO: 1236 - DNA, 650 bp, Homo sapiens
  misc_feature (10)..(10): n equals a,t,g, or c
  misc_feature (51)..(51): n equals a,t,g, or c
  misc_feature (449)..(449): n equals a,t,g, or c
  misc_feature (480)..(480): n equals a,t,g, or c
  misc_feature (503)..(503): n equals a,t,g, or c
  misc_feature (535)..(535): n equals a,t,g, or c
  misc_feature (558)..(558): n equals a,t,g, or c
  misc_feature (568)..(568): n equals a,t,g, or c
  misc_feature (579)..(579): n equals a,t,g, or c
  misc_feature (586)..(586): n equals a,t,g, or c
  misc_feature (589)..(589): n equals a,t,g, or c
  misc_feature (650)..(650): n equals a,t,g, or c
tggcaaacgnactttaggtgacactatagaaggtacgcctgcaggtaccgntccggaattcccgggtcgacccacgcgtccgggtcaaaagagatccactgttgcccagttggtgaagagacttacagatgcagatgccatgaagtacaccattgtggtgtccggctacggcctcggatgctgccccacttcagtacctggctccttactctggctgttccatgggagagtattttagagacaatggcaaacatgctttgatcatctatgacgacttatccaaacaggctgttgcttaccgtcagatgtctctgttgctccgccgaccccctggtgtgaggcctatcctggtgatgtgttctacctacactcccggttgctggagagagcagccaaaatgaacgatgcttttggtggtggctccttgactgctttgccagtcatagganacacaggctggtgatgtgtctgtttacaatnccaacaaatgtcatttccatcantgacggacagatctttttgggaaacagatttnttttacaaaggattccgccctgnaattaacggngggctgtttgnatctggngtnggatccgttgcccaaaccaggttttgagcaggtaggcaggaccctgaaggtggattggttn

SEQ ID NO: 1237 - DNA, 413 bp, Homo sapiens
  misc_feature (413)..(413): n equals a,t,g, or c
gtttattccctgccaagtttctctataattgatcttccagtttcataaaagaccttactggttctgaaattttgtatttgttacccaagtttcttattttattttttttttaaataaaagattgtagatgtaattagacaagaggttttagagagtagtcaagtaacatttgttcatcatttacaggcatttgcaagtaaaatcactggcatgttgttggaattatccccagctcagctgcttctccttctagcaagtgaggattctctgagagcaagagtggatgaggccatggaactcattattgcacatggacgggaaaatggacttgatagtatcctggatcttggattagtaaaccctccagaaaaggtacagcaaggaaaaccgaaagcgccatggctctatcgaan

SEQ ID NO: 1238 - DNA, 725 bp, Homo sapiens
  misc_feature (226)..(226): n equals a,t,g, or c
  misc_feature (290)..(290): n equals a,t,g, or c
  misc_feature (320)..(320): n equals a,t,g, or c
  misc_feature (324)..(324): n equals a,t,g, or c
  misc_feature (331)..(331): n equals a,t,g, or c
  misc_feature (339)..(339): n equals a,t,g, or c
  misc_feature (384)..(384): n equals a,t,g, or c
  misc_feature (546)..(546): n equals a,t,g, or c
  misc_feature (553)..(553): n equals a,t,g, or c
  misc_feature (605)..(605): n equals a,t,g, or c
  misc_feature (616)..(616): n equals a,t,g, or c
  misc_feature (622)..(622): n equals a,t,g, or c
  misc_feature (662)..(662): n equals a,t,g, or c
  misc_feature (668)..(668): n equals a,t,g, or c
  misc_feature (698)..(698): n equals a,t,g, or c
  misc_feature (705)..(705): n equals a,t,g, or c
  misc_feature (712)..(712): n equals a,t,g, or c
gattatcagccgtgttctctgctaatactgtacatgtaattattttcacctaaaacacaacaatttaactctgagttttagaaaccatattaggcccccagggtactttttctgcttcagcaataaaaagattgttcctgcattcctaagtgttaaccagtgggacagatagaagatacaggtaaatggcaatttgtggaacagactgtttcatctgtagacctgnggttcttgctaaaatagaaggatgaagcctaactctgatcatttgatatttaagtcctgcttgnaattaccattagcattttgccagaatgttnctgnttctagntattaaangaagcgacagaatcgaggcacaaatacgaacaaatgaaacagcangaagtacaactaaaacagcagctttctctttatatggataagtttgaagaattccagactaccatggcaaaaagcaatgaactggttacaaccttcagacaggaaatggaaaagatgacaaagaaaattaaaaaactggaaaaagaaacaataatttggcgnaccaaangggaaaccataataaagcactttgcaaatggctgaagaggaaaacagtccgngataaagagtncaaggnccttcaaataaaactggaacgggttagagaacttgggcanggcttnttcaaaccgaaagggatgggctcaatgggnaaaaagngagtccntgaaaaagcaggt

SEQ ID NO: 1239 - DNA, 338 bp, Homo sapiens
  misc_feature (164)..(164): n equals a,t,g, or c
  misc_feature (236)..(236): n equals a,t,g, or c
  misc_feature (271)..(271): n equals a,t,g, or c
  misc_feature (273)..(273): n equals a,t,g, or c
  misc_feature (311)..(311): n equals a,t,g, or c
  misc_feature (313)..(313): n equals a,t,g, or c
  misc_feature (330)..(330): n equals a,t,g, or c
gggtgttcgttcacagagatcagttttgtttatcatcgcaagtttttgctgttatctgcagacagaagagcctgcaagtgacaaaggaagtgaggcagaggcccacatgcccccaccgttcacaccctacgtgcctcggattctgaacggcttggcctcggagnggacaggcactgtctccgcagcagcagcagcagcagacctatggtgccatccacaacatccagcggggactnatccctgggacagtggcttgggcgcaaagcaccgngngccagtgttgggctgctggcccccccaggaaggcctgnangcttggggttcttccantttttttt

SEQ ID NO: 1240 - DNA, 329 bp, Homo sapiens
ttaagaaaacaataatggtactaataaaaactcctagggtttcctgtcagatttaattctacccagtggcaaagaattttttcaattgtggctttaaaaaaataattaaatatacatgtatatatatatatatatatatatatatatatatatatatatatatatatatatatttttttaatgtttcatttcctcagaggaaccaatcacttggaatgtctagaaatatccttgcagattttgccagtgtcaatcaagcctgcacacatgcacagtgaagcgggctgtgcctgccttgagcccatcaccagccaacattcttgatgtgt

SEQ ID NO: 1241 - DNA, 565 bp, Homo sapiens
  misc_feature (383)..(383): n equals a,t,g, or c
cctactcctcattgtacccattctaatcgcaatggcattcctaatgcttaccgaacgaaaaattctaggctatatacaactacgcaaaggccccaacgttgtaggcccctacgggctactacaacccttcgctgacgccataaaactcttcaccaaagagcccctaaaacccgccacatctaccatcaccctctacatcaccgccccgaccttagctctcaccatcgctcttctactatgaacccccctccccatacccaaccccctggtcaacctcaacctaggcctcctatttattctagccacctctagcctagccgtttactcaatcctctgatcagggtgagcatcaaactcaaactacgccctgatcggcgcactgngagcagtagcccaaacaatctcatatgaagtcaccctagccatcattctactatcaacattactaataagtggctcctttaacctctccaaccttatcacaacacaagaacacctctgattactcctgccatcatgacccttgggccataatatggatttatcttccacactagcagagacc

SEQ ID NO: 1242 - DNA, 363 bp, Homo sapiens
  misc_feature (9)..(10): n equals a,t,g, or c
  misc_feature (15)..(15): n equals a,t,g, or c
  misc_feature (18)..(18): n equals a,t,g, or c
  misc_feature (29)..(30): n equals a,t,g, or c
  misc_feature (61)..(61): n equals a,t,g, or c
  misc_feature (148)..(148): n equals a,t,g, or c
  misc_feature (234)..(234): n equals a,t,g, or c
  misc_feature (244)..(244): n equals a,t,g, or c
  misc_feature (255)..(255): n equals a,t,g, or c
  misc_feature (258)..(258): n equals a,t,g, or c
  misc_feature (322)..(322): n equals a,t,g, or c
  misc_feature (342)..(342): n equals a,t,g, or c
gaaacattnncctcnggntaagcctgcgnnagattaaaacactgaactgacaattaacagnccaatatctacaatcaaccaacaagtcattattaccctcactgtcaacccaacacaggcatgctcataaggaaaggttaaaaaaagnaaaaggaactcggcaaatcttaccccgcctgtttaccaaaaacatcacctctagcatcaccagtattagaggcaccgcctgcccantgacacatgnttaacggccgnggnaccctaaccgtgcaaaggtagcataatcacttgttccttaattagggacctgtatgaatggctncacgagggttcagctgtctnttacttttaaccagtgaaatt

SEQ ID NO: 1243 - DNA, 528 bp, Homo sapiens
  misc_feature (464)..(464): n equals a,t,g, or c
  misc_feature (474)..(474): n equals a,t,g, or c
  misc_feature (499)..(499): n equals a,t,g, or c
  misc_feature (518)..(518): n equals a,t,g, or c
atctactctaccatctttgcaggcacactcatcacagcgctaagctcgcactgattttttacctgagtaggcctagaaataaacatgctagcttttattccagttctaaccaaaaaaataaaccctcgttccacagaagctgccatcaagtatttcctcacgcaagcaaccgcatccataatccttctaatagctatcctcttcaacaatatactctccggacaatgaaccataaccaatactaccaatcaatactcatcattaataatcataatggctatagcaataaaactaggaatagccccctttcacttctgagtcccagaagttacccaaggcaccctctgacatccggcctgcttcttctcacatgacaaaaactacccccatctcaatcatataccaaatctctccctcactaaacttaagccttctcctcactctctcaatcttatccatcatancaggcagttnaagtggattaaaccaaacccacttncccaaatctttagcatatnctccatttcc

SEQ ID NO: 1244 - DNA, 441 bp, Homo sapiens
  misc_feature (348)..(348): n equals a,t,g, or c
  misc_feature (356)..(356): n equals a,t,g, or c
  misc_feature (409)..(409): n equals a,t,g, or c
  misc_feature (418)..(418): n equals a,t,g, or c
  misc_feature (422)..(422): n equals a,t,g, or c
gatttcccctattctcaggctacaccctagaccaaacctacgccaaaatccatttcactatcatattcatcggcgtaaatctaactttcttcccacaacactttctcggcctatccggaatgccccgacgttactcggactaccccgatgcatacaccacatgaaacatcctatcatctgtaggctcattcatttctctaacagcagtaatattaataattttcatgatttgagaagccttcgcttcgaagcgaaaagtcctaatagtagaaagaacctccataaacctggagttgactatatggatgccccccaccctaccacacattccaaagaaccgtatacatnaaatctanaccaaaaaggaaggaatcgaaccccccaagtggtttcaagccaaccccatggnctccatgantttntccaaaaaaaaaaaaaaaa

SEQ ID NO: 1245 - DNA, 638 bp, Homo sapiens
  misc_feature (7)..(7): n equals a,t,g, or c
  misc_feature (37)..(37): n equals a,t,g, or c
  misc_feature (48)..(48): n equals a,t,g, or c
  misc_feature (59)..(59): n equals a,t,g, or c
  misc_feature (76)..(76): n equals a,t,g, or c
  misc_feature (80)..(80): n equals a,t,g, or c
  misc_feature (100)..(100): n equals a,t,g, or c
  misc_feature (114)..(114): n equals a,t,g, or c
  misc_feature (116)..(116): n equals a,t,g, or c
  misc_feature (122)..(122): n equals a,t,g, or c
  misc_feature (129)..(129): n equals a,t,g, or c
  misc_feature (137)..(137): n equals a,t,g, or c
  misc_feature (146)..(146): n equals a,t,g, or c
  misc_feature (155)..(155): n equals a,t,g, or c
  misc_feature (158)..(158): n equals a,t,g, or c
  misc_feature (162)..(162): n equals a,t,g, or c
  misc_feature (168)..(168): n equals a,t,g, or c
  misc_feature (186)..(186): n equals a,t,g, or c
  misc_feature (200)..(200): n equals a,t,g, or c
  misc_feature (206)..(206): n equals a,t,g, or c
  misc_feature (220)..(221): n equals a,t,g, or c
  misc_feature (223)..(223): n equals a,t,g, or c
  misc_feature (241)..(241): n equals a,t,g, or c
  misc_feature (243)..(243): n equals a,t,g, or c
  misc_feature (277)..(277): n equals a,t,g, or c
  misc_feature (310)..(310): n equals a,t,g, or c
  misc_feature (358)..(358): n equals a,t,g, or c
  misc_feature (373)..(373): n equals a,t,g, or c
  misc_feature (375)..(375): n equals a,t,g, or c
  misc_feature (383)..(383): n equals a,t,g, or c
  misc_feature (396)..(396): n equals a,t,g, or c
  misc_feature (407)..(407): n equals a,t,g, or c
  misc_feature (434)..(434): n equals a,t,g, or c
  misc_feature (438)..(438): n equals a,t,g, or c
  misc_feature (457)..(457): n equals a,t,g, or c
  misc_feature (492)..(492): n equals a,t,g, or c
  misc_feature (529)..(529): n equals a,t,g, or c
  misc_feature (536)..(536): n equals a,t,g, or c
  misc_feature (555)..(555): n equals a,t,g, or c
  misc_feature (590)..(590): n equals a,t,g, or c
  misc_feature (599)..(599): n equals a,t,g, or c
  misc_feature (608)..(608): n equals a,t,g, or c
  misc_feature (636)..(636): n equals a,t,g, or c
ttatttnttttttttgaattaaatctttacaacagtncgaatgctgcnaaaggaagcancatactaaggtttaaangatncctttaagacacctaaaatngcgtttttcgactntncatccnctcaaantcaacatnattattacnttctatganatntaangagaangcctacctttttccagantgcatcaaggtcanaggctntgttgatttcatcnnangacagattgtgagtcacnanttcatcaacttttatctttttggacatatattcngacaccaactttgggacactttctacactcttncatcctaaaagaaatcacacattaatttattcagcaaatttctgcagnatgcttgttacttancntgaggacnaaaggcatttaanagaatgaattnttgggatgagttaacgagcaatgaganactncaaaataagcatggagatnaagaatttgaccaacacctttcagtggaaaaagtnaatacttttgaaaattcccttcctctggattaagaanttactanaacctcttaaaggtttggnccattgggacttttaaactacccaggacagaactntggaggctnacaacaggnttattagggccccatagcaaggattcanta

SEQ ID NO: 1246 - DNA, 277 bp, Homo sapiens
  misc_feature (2)..(2): n equals a,t,g, or c
  misc_feature (4)..(4): n equals a,t,g, or c
  misc_feature (8)..(8): n equals a,t,g, or c
  misc_feature (11)..(11): n equals a,t,g, or c
  misc_feature (25)..(25): n equals a,t,g, or c
anangcanganaggcaaacggtcanctgacagtacggtcggattcccgggtcgacccacgcgtccgatttgagaagccttcgcttcgaagcgaaaagtcctaatagtagaagaaccctccataaacctggagtgactatatggatgccccccaccctaccacacattcgaagaacccgtatacataaaatctagacaaaaaaggaaggaatcgaaccccccaaagctggtttcaagccaaccccatggcctccatgactttttcaaaaaaaaaaaaa

SEQ ID NO: 1247 - DNA, 197 bp, Homo sapiens
  misc_feature (2)..(2): n equals a,t,g, or c
  misc_feature (4)..(4): n equals a,t,g, or c
  misc_feature (7)..(7): n equals a,t,g, or c
  misc_feature (31)..(31): n equals a,t,g, or c
  misc_feature (36)..(36): n equals a,t,g, or c
  misc_feature (174)..(174): n equals a,t,g, or c
  misc_feature (178)..(178): n equals a,t,g, or c
  misc_feature (180)..(180): n equals a,t,g, or c
  misc_feature (183)..(183): n equals a,t,g, or c
  misc_feature (193)..(193): n equals a,t,g, or c
cncnggnaaaatggttagcctgcagtaccgntccgnaattcccggtcgacccacgcgtccgactagttctagatcgcgagcggcgccctttttttttttttttttttttttttttttttttttttttttttttttttttttttttttttttttttttttttttttttttttttntttntnttntttttttttntttt

SEQ ID NO: 1248 - DNA, 521 bp, Homo sapiens
  misc_feature (395)..(395): n equals a,t,g, or c
  misc_feature (397)..(397): n equals a,t,g, or c
  misc_feature (415)..(415): n equals a,t,g, or c
  misc_feature (440)..(440): n equals a,t,g, or c
  misc_feature (484)..(484): n equals a,t,g, or c
  misc_feature (487)..(487): n equals a,t,g, or c
  misc_feature (507)..(507): n equals a,t,g, or c
  misc_feature (517)..(517): n equals a,t,g, or c
gtgctcccatgttctccctccctcccattgtagccttgctgcccaggggagggatatgtcttcctttatgcatctgggaaaccaggaacagaccctgcgcaggagagtcagagggggaagagttagaatgggtcagtggctggaacaaagttctggttaaggaggaaattagtgccacccacggtgagaagcagagaaggcacttgcatcctatgcagccctgaagaccaggctcctttgggcaaaaggcaagactctggcaggtgggtcaatgctctctccttggagcaagaagccagcttttggggaaggcaggtcctgaggcaggcactggcctgggggcttccccaggttgaggagagaagtggagccccatggaaacagtgctccagctnangtaggaagccgaggtggngtgggggaagtttaagcctatgggnccagggggaaaggccaacagaaacccactacccctaaggaaggnccngaggttggggaatcttgganctcctaaagncctt

SEQ ID NO: 1249 - DNA, 469 bp, Homo sapiens
  misc_feature (1)..(1): n equals a,t,g, or c
  misc_feature (5)..(5): n equals a,t,g, or c
  misc_feature (17)..(18): n equals a,t,g, or c
  misc_feature (27)..(27): n equals a,t,g, or c
  misc_feature (307)..(307): n equals a,t,g, or c
  misc_feature (321)..(321): n equals a,t,g, or c
  misc_feature (344)..(344): n equals a,t,g, or c
  misc_feature (348)..(348): n equals a,t,g, or c
  misc_feature (352)..(354): n equals a,t,g, or c
  misc_feature (391)..(391): n equals a,t,g, or c
  misc_feature (424)..(424): n equals a,t,g, or c
  misc_feature (448)..(448): n equals a,t,g, or c
  misc_feature (456)..(456): n equals a,t,g, or c
  misc_feature (462)..(462): n equals a,t,g, or c
ncatnaggagacttttnntgataggcncaagctggtacgcctgcaggtaccggtccggaattcccgggtcgacccacgtgtccggcgggagctggatgaggccacggagagcaacgaggccatgggccgcgaggtgaacgcactcaagagcaagctcaggcgaggaaacgagacctctttcgttccttctagaaggtctggaggacgtagagttattgaaaatgcagatggttctgaggaggaaacggacactcgagacgcagacttcaatggaaccaaggccagtgaataagcaactttctacagntttgcaccacgggnaagaaaaccaaaaaccaaaacanacanacannnaaaacccaacaacaacccagacaaagcaaaacccagnagactgtacttagcattggctaaatccattctnaaattccaatatcacagacacccntcacacanggaatntaaaaac

SEQ ID NO: 1250 - DNA, 739 bp, Homo sapiens
  misc_feature (31)..(31): n equals a,t,g, or c
  misc_feature (47)..(47): n equals a,t,g, or c
  misc_feature (79)..(79): n equals a,t,g, or c
  misc_feature (92)..(92): n equals a,t,g, or c
  misc_feature (122)..(122): n equals a,t,g, or c
  misc_feature (151)..(151): n equals a,t,g, or c
  misc_feature (160)..(160): n equals a,t,g, or c
  misc_feature (167)..(167): n equals a,t,g, or c
  misc_feature (198)..(198): n equals a,t,g, or c
  misc_feature (214)..(214): n equals a,t,g, or c
  misc_feature (227)..(227): n equals a,t,g, or c
  misc_feature (252)..(252): n equals a,t,g, or c
  misc_feature (255)..(255): n equals a,t,g, or c
  misc_feature (297)..(297): n equals a,t,g, or c
  misc_feature (326)..(326): n equals a,t,g, or c
  misc_feature (352)..(352): n equals a,t,g, or c
  misc_feature (495)..(495): n equals a,t,g, or c
  misc_feature (548)..(548): n equals a,t,g, or c
  misc_feature (624)..(624): n equals a,t,g, or c
  misc_feature (708)..(708): n equals a,t,g, or c
ggggacgcgggggtattacaagtggataaanattgagcactgctctnaatccaaaggtacgctgtgaatcctggcctgnctgatatgcatcngtatagccaaggactagccagcatgcgtgnagctaatttgataccaatgaaagaagatntggccttgnggttaancaatttattagggaaggagattacagcaganacttttatggataagntggacaatggtgnggtgctctttcgacttgcagaaacnatncaggagaaattcaaggagagcatggaaagctaacaagcccanaaagaatctaccggtgaagaagatcccangcaaaaccagtgcaccctcgggctcnttttttgccagagacaatacagcaaatttcttatcctggtgccgagatttaggcgtggatgaaacgtgtctatttgaatcggaaggattggtcctccacaagcaacccagagaagtgagtctctgtctgctagagcttggacnggattgcagccaggaaggaagaacaagaattaatttcaagaaatcataagctnaataaccagaggaaggaactctgttagctaaaagcaacttgctttggttaacctggtttcccatttattatcttgnataccatcagacaggggcttctggccaggcccatgaagcccaaagaacaagaaatggaagaatacaaatggttggaagaaggtnttggatggcaaaattaaaaaatttcaagaat

SEQ ID NO: 1251 - DNA, 440 bp, Homo sapiens
  misc_feature (265)..(265): n equals a,t,g, or c
  misc_feature (370)..(370): n equals a,t,g, or c
  misc_feature (372)..(372): n equals a,t,g, or c
  misc_feature (414)..(414): n equals a,t,g, or c
  misc_feature (422)..(422): n equals a,t,g, or c
  misc_feature (436)..(436): n equals a,t,g, or c
cgttcggaggtgaaggctggcatggagcgggaactggaaaacatcatccaggagacagagaaagagctggacccagatgggctgaagaaggagtcagagcgggatcgggcaatgctggctctcacatccactctcaacaaactcatcaaaagactggaggaaaaacagagtccagagctggtgaagaagcacaagaaaaagagggttgtccccaaaaagcctcccccatcaccccaacctacagggaaaattgagatcaaaattntccgcccatgggcttgaagggactgaagagggtgcacgttggctgacttgatgaggacacgagaaacctcaagggggtctttttcatttttttggtgccgggagntnaggggccccgaaggaacgccagggcagaaaggtttggggggnatttaccnccgggtttgggggntttc

SEQ ID NO: 1252 - DNA, 602 bp, Homo sapiens
  misc_feature (1)..(1): n equals a,t,g, or c
  misc_feature (3)..(3): n equals a,t,g, or c
  misc_feature (44)..(45): n equals a,t,g, or c
  misc_feature (351)..(351): n equals a,t,g, or c
  misc_feature (421)..(421): n equals a,t,g, or c
  misc_feature (451)..(451): n equals a,t,g, or c
  misc_feature (487)..(487): n equals a,t,g, or c
  misc_feature (491)..(491): n equals a,t,g, or c
  misc_feature (495)..(495): n equals a,t,g, or c
  misc_feature (525)..(525): n equals a,t,g, or c
  misc_feature (536)..(537): n equals a,t,g, or c
  misc_feature (555)..(555): n equals a,t,g, or c
  misc_feature (567)..(567): n equals a,t,g, or c
ngnaaccccccggaattcccgggtcgacccacgcgtccgcgttnntctgtctcttgcttcaacagtgtttggacggaacagatccggggactctcttccagcctccgaccgccctccgatttcctctccgcttgcaacctccgggaccatcttctcggccatctcctgcttctgggacctgccagcaccgtttttgtggttagctccttcttgccaaccaaccatgagctcccagattcgtcagaattattccaccgacgtggaggcagccgtcaacagcctggtcaatttgtacctgcaggcctcctacacctacctctctctgggcttctatttcgaccgcgatgatgnggctctggaaggcgtgagccacttcttccgcgaattgctcgaggagaagcgcgagggctacgagcgtctnctgaagatgcaaaaccagcgtggcgggcgnttctagaggaccaaggcttacgtacgcgtgcatgcnacgncatnctcttctatagtgcccctaaattcaatttncttggccgacnntttacaacgtcgtgactnggaaaaaccccnggggtaacccaacttaaacggccttggcaggaaca

SEQ ID NO: 1253 - DNA, 780 bp, Homo sapiens
  misc_feature (7)..(7): n equals a,t,g, or c
  misc_feature (79)..(79): n equals a,t,g, or c
  misc_feature (497)..(497): n equals a,t,g, or c
  misc_feature (572)..(572): n equals a,t,g, or c
  misc_feature (599)..(599): n equals a,t,g, or c
  misc_feature (673)..(673): n equals a,t,g, or c
  misc_feature (686)..(686): n equals a,t,g, or c
  misc_feature (694)..(694): n equals a,t,g, or c
  misc_feature (738)..(738): n equals a,t,g, or c
  misc_feature (749)..(749): n equals a,t,g, or c
  misc_feature (761)..(761): n equals a,t,g, or c
ggcccanctgcccgttcggtccggaatccccgggtcgacccacgcgtccggtcgttcccaaagtataagccgtcgagcntgcgcactctgcctgagaccctcgacccagccgaatacaacatatctccggaaacccggcgggcgcaagccgagcggttggccataagagcccagctgaaacgagagtacctgcttcagtacaacgatcccaaccgccgagggctcatcgaaaatcctgccttgcttcgttgggcctatgcaagaacaataaatgtctatcctaatttcagacccactcctaaaaactcactcatgggagctctgtgtggatttgggcccctcatcttcatttaatatattatcaaaactgagaggggataggaaagaaaaacttatccaggaaggaaaattggatcgaacatttcacctctcatattaagtctggcaatgatgactatatgtattcctgctaaataaatcatctattaatcattaanaaaaaaaaaaaagcggccgctctagaggatccaagcttacgtacgcggcatgcgacggcataagctctctatagnggcacctaaattcaattcactggccgncgtttacaacgtcgtgactggggaaaaccctggcggtacccaacttaatcggcttggaagaaaatccccctttnggccagctggcgnaataacgnaaaagggcccggaaccgaacggccttttccaaaagttgcccaancctggaaggcnaaagggaacccnccttggaacggggcaataa

SEQ ID NO: 1254 - DNA, 545 bp, Homo sapiens
  misc_feature (343)..(343): n equals a,t,g, or c
  misc_feature (383)..(383): n equals a,t,g, or c
  misc_feature (399)..(399): n equals a,t,g, or c
  misc_feature (417)..(417): n equals a,t,g, or c
  misc_feature (424)..(424): n equals a,t,g, or c
  misc_feature (436)..(436): n equals a,t,g, or c
  misc_feature (443)..(443): n equals a,t,g, or c
  misc_feature (479)..(479): n equals a,t,g, or c
  misc_feature (523)..(523): n equals a,t,g, or c
  misc_feature (526)..(526): n equals a,t,g, or c
  misc_feature (535)..(535): n equals a,t,g, or c
  misc_feature (537)..(537): n equals a,t,g, or c
gccaaggtgctcggtccttccgaggaagctaaggctgcgttggggtgaggccctcacttcatccggcgactagcaccgcgtccggcagcgccagccctacactcgcccgcgccatggcctctgtctccgagctcgcctgcatctactcggccctcattctgcacgacgatgaggtgacagtcacggaggataagatcaatgccctcattaaagcagccggtgtaaatgttgagcctttttggcctggcttgtttgcaaaggccctggccaacgtcaacattgggagcctcatctgcaatgtaggggccggtggacctgctccagcagctggtgctgcaccagnaaggaggtcctgcccctccactggtgctgctccagctgangagaagaaagtggaancaaagaaagaagaatccnaggagtnttgatgaatganatgggcntttggctttttgactaaaacctcttttataacaagnttaaataaaaagctgaactttaaaaaaaaaaaaaaagggggggnccnttttaaaanancaaattta

SEQ ID NO: 1255 - DNA, 677 bp, Homo sapiens
  misc_feature (477)..(477): n equals a,t,g, or c
  misc_feature (525)..(525): n equals a,t,g, or c
  misc_feature (654)..(654): n equals a,t,g, or c
  misc_feature (661)..(661): n equals a,t,g, or c
  misc_feature (664)..(664): n equals a,t,g, or c
  misc_feature (674)..(675): n equals a,t,g, or c
gaaaaaaagaaaaaccttctagagctgatttgatggacaatggagagagctttccctgtgattataaaaaaggaagctagctgctctacggtcatctttgcttagagtatactttaacctggcttttaaagcagtagtaactgccccaccaaaggtcttaaaagccatttttggagcctattgcactgtgttctcctactgcaaatattttcatatgggaggatggttttctcttcatgtaagtccttggaattgattctaaggtgatgttcttagcactttaattcctgtcaaattttttgttctccccttctgccatcttaaatgtaagctgaaactggtctactgtgtctctagggttaagccaaaagacaaaaaaaattttactacttttgagattgccccaatgtacagaattatataattctaacgcttaaatcatgtgaaagggttgctgctgcaagccttgcccactgngacttcaaacccaaggaggaactcttggatcaagatgcccaaccctgngatcagaaaccttccaaatactgccatgagaaactagaagggcaagtcttcattaaaaagcccttttggaacccccctttccttgcccctgggggttaggaagaaaaggggataatttgggcccccttnacttggnaantttcccaagnnac

SEQ ID NO: 1256 - DNA, 327 bp, Homo sapiens
  misc_feature (3)..(3): n equals a,t,g, or c
  misc_feature (7)..(7): n equals a,t,g, or c
  misc_feature (37)..(37): n equals a,t,g, or c
  misc_feature (48)..(48): n equals a,t,g, or c
  misc_feature (83)..(83): n equals a,t,g, or c
  misc_feature (106)..(106): n equals a,t,g, or c
  misc_feature (121)..(121): n equals a,t,g, or c
  misc_feature (160)..(160): n equals a,t,g, or c
  misc_feature (176)..(176): n equals a,t,g, or c
  misc_feature (189)..(189): n equals a,t,g, or c
  misc_feature (211)..(213): n equals a,t,g, or c
  misc_feature (225)..(225): n equals a,t,g, or c
  misc_feature (237)..(237): n equals a,t,g, or c
  misc_feature (270)..(270): n equals a,t,g, or c
  misc_feature (273)..(273): n equals a,t,g, or c
  misc_feature (298)..(298): n equals a,t,g, or c
  misc_feature (323)..(323): n equals a,t,g, or c
tancccncaactttaatgcgcccagatatacctcagncgttgtagaanaactgtgatacctggcacagtgctttgatcttacnatgccctctgtactgacctgaangagacctaagagtcntttccctttttgaggttgaatcatagccttgatgtggantctaggtttatggccntgttcctaatgtnaaagtgcttaactgcttcttgnnngtattgggtagnattgggataagnttttaactgggtattcttgaattgcttttacantanaccaattttataacttttaaatttntcaactttttacatttgtggtattntcag

SEQ ID NO: 1257 - DNA, 553 bp, Homo sapiens
  misc_feature (13)..(13): n equals a,t,g, or c
  misc_feature (34)..(34): n equals a,t,g, or c
  misc_feature (36)..(36): n equals a,t,g, or c
  misc_feature (39)..(39): n equals a,t,g, or c
  misc_feature (67)..(67): n equals a,t,g, or c
  misc_feature (101)..(101): n equals a,t,g, or c
  misc_feature (251)..(251): n equals a,t,g, or c
  misc_feature (257)..(257): n equals a,t,g, or c
  misc_feature (268)..(268): n equals a,t,g, or c
  misc_feature (272)..(272): n equals a,t,g, or c
  misc_feature (293)..(293): n equals a,t,g, or c
  misc_feature (341)..(341): n equals a,t,g, or c
  misc_feature (352)..(352): n equals a,t,g, or c
  misc_feature (383)..(383): n equals a,t,g, or c
  misc_feature (409)..(409): n equals a,t,g, or c
  misc_feature (447)..(447): n equals a,t,g, or c
  misc_feature (485)..(485): n equals a,t,g, or c
  misc_feature (497)..(497): n equals a,t,g, or c
  misc_feature (518)..(518): n equals a,t,g, or c
  misc_feature (522)..(522): n equals a,t,g, or c
  misc_feature (553)..(553): n equals a,t,g, or c
gcgagctgcgcgnggccccggaggagcacccagngntgntgaccgaggcccccctgaaccccaaggncaacagagagaagatgactcaaattatgtttganaccttcaacaccccggccatgtacgtggtcatacaggccgtgctgtccctctacgcctctgggcgcaccactggcattgtcatggactctggagacggggtcacccacacggtgcccatctacgagggctacgcccttccccacgccatnctgcgnctggacctggntggncgggacctgaccgactacctnatgaagatcctcactgagcgaggctacagtttcaccaccacggtcgancgggaaatcgngcgcgacatcaaggagaagctgtgctacgtngccctggacttcgagcaggagatggncaccgtcgcatctcctcttctctggagaagagctactnagctgcccgatggccaggtcatcaccattggcaatgancggttcccggtntccggaggcgcttgttccagncttnctttctgggtatggaatcttgccgggattcn

SEQ ID NO: 1258 - DNA, 223 bp, Homo sapiens
  misc_feature (3)..(3): n equals a,t,g, or c
  misc_feature (9)..(9): n equals a,t,g, or c
  misc_feature (41)..(41): n equals a,t,g, or c
  misc_feature (60)..(60): n equals a,t,g, or c
  misc_feature (70)..(70): n equals a,t,g, or c
  misc_feature (167)..(167): n equals a,t,g, or c
  misc_feature (178)..(178): n equals a,t,g, or c
  misc_feature (186)..(186): n equals a,t,g, or c
  misc_feature (190)..(190): n equals a,t,g, or c
  misc_feature (219)..(219): n equals a,t,g, or c
ttnttcctnctgacctattgctataccaatgatgttgagtngcattatctttttagaatngttcattaanatatattccatatgtactactatcatatcaaactaacgtgattattttttacaaccctcttaacattttatggagatgacatttctgattttcaganattaacatacnatccacangcangattccgtaagctgataactctggacagntgat

SEQ ID NO: 1259 - DNA, 139 bp, Homo sapiens
  misc_feature (84)..(84): n equals a,t,g, or c
  misc_feature (106)..(106): n equals a,t,g, or c
  misc_feature (114)..(114): n equals a,t,g, or c
  misc_feature (133)..(133): n equals a,t,g, or c
  misc_feature (139)..(139): n equals a,t,g, or c
actaaagggaacaaaagctggagctccaccgcggcggcggccgctctagaactagtggatcccccgggctgcaggaattccatntcttatgtatggataaccttanggttcctnctcttcttctactctatgngcttgn

SEQ ID NO: 1260 - DNA, 651 bp, Homo sapiens
  misc_feature (1)..(1): n equals a,t,g, or c
  misc_feature (72)..(72): n equals a,t,g, or c
  misc_feature (510)..(510): n equals a,t,g, or c
  misc_feature (548)..(548): n equals a,t,g, or c
  misc_feature (620)..(620): n equals a,t,g, or c
  misc_feature (640)..(640): n equals a,t,g, or c
  misc_feature (646)..(647): n equals a,t,g, or c
  misc_feature (650)..(650): n equals a,t,g, or c
nactcactatagggaaagctggtacgcctgcaggtaccggtccggaattcccgggtcgacccacgcgtccgncgccatcttccagtaattcgccaaaatgacgaacacaaagggaaagaggagaggcacccgatatatgttctctaggccttttagaaaacatggagttgttcctttggccacatatatgcgaatctataagaaaggtgatattgtagacatcaagggaatgggtactgttcaaaaaggaatgccccacaagtgttaccatggcaaaactggaagagtctacaatgttacccagcatgctgttggcattgttgtaaacaaacaagttaagggcaagattcttgccaagagaattaatgtgcgtattgagcacattaagcactctaagagccgagatagcttcctgaaacgtgtgaaggaaaatgatcagaaaaagaaagaagccaaagagaaaggtacctgggttcaactaaagcgccagcctgctccacccagagaagnacactttgtgagaaccaatgggaaggagcctgagctgntggaacctattccctatgaattcatggcataataggtgttaaaaaaaaaaataaaggaccttttgggcttcnaaaaaaaaaaaaaaaggggncccccnnttna

SEQ ID NO: 1261 - DNA, 630 bp, Homo sapiens
  misc_feature (583)..(583): n equals a,t,g, or c
  misc_feature (602)..(602): n equals a,t,g, or c
  misc_feature (606)..(606): n equals a,t,g, or c
  misc_feature (627)..(628): n equals a,t,g, or c
cactatagggaaagctggtacgcctgcaggtaccggtccggaattcccgggtcgacccacgcgtccgtttgcggccatcaccgaagcgggagcggccaaaatgaagtttaatccctttgtgacttccgaccgaagcaagaatcgcaaaaggcatttcaatgcaccttcccacattcgaaggaagattatgtcttcccctctttccaaagagctgagacagaagtacaacgtgcgatccatgcccatccgaaaggatgatgaagttcaggttgtacgtggacactataaaggtcagcaaattggcaaagtagtccaggtttacaggaagaaatatgttatctacattgaacgggtgcagcgggaaaaggctaatggcacaactgtccacgtaggcattcaccccagcaaggtggttatcactaggctaaaactggacaaagaccgcaaaaagatcctcgaacggaaagccaaatctcgccaagtaggaaaggaaaagggcaaatacaaggaagaaaccattgagaagatgcaggaataaagtaatcttatatacaagctttgattaaaacttgaaacaaagaanaaaaaaaaaaaaggggcgncccntttaaaggatccaagtttacnncc

SEQ ID NO: 1262 - DNA, 636 bp, Homo sapiens
  misc_feature (588)..(588): n equals a,t,g, or c
  misc_feature (607)..(610): n equals a,t,g, or c
gggaaagctggtacgcctgcaggtaccggtccggaattcccgggtcgacccacgcgtccgcagtaattcgccaaaatgacgaacacaaagggaaagaggagaggcacccgatatatgttctctaggccttttagaaaacatggagttgttcctttggccacatatatgcgaatctataagaaaggtgatattgtagacatcaagggaatgggtactgttcaaaaaggaatgccccacaagtgttaccatggcaaaactggaagagtctacaatgttacccagcatgctgttggcattgttgtaaacaaacaagttaagggcaagattcttgccaagagaattaatgtgcgtattgagcacattaagcactctaagagccgagatagcttcctgaaacgtgtgaaggaaaatgatcagaaaaagaaagaagccaaagagaaaggtacctgggttcaactaaagcgccagcctgctccacccagagaagcacactttgtgagaaccaatgggaaggagcctgagctgctggaacctattccctatgaattcatggcataataggtgttaaaaaaaaaaataaaggacctntgggcttccaaaaaaaaannnnaaaaaaaaggggggcccttttaaggg

SEQ ID NO: 1263 - DNA, 575 bp, Homo sapiens
  misc_feature (259)..(259): n equals a,t,g, or c
  misc_feature (279)..(279): n equals a,t,g, or c
  misc_feature (538)..(538): n equals a,t,g, or c
  misc_feature (543)..(543): n equals a,t,g, or c
  misc_feature (558)..(558): n equals a,t,g, or c
  misc_feature (562)..(562): n equals a,t,g, or c
  misc_feature (572)..(572): n equals a,t,g, or c
gggaaagctggtacgcctgcaggtaccggtccggaattcccgggtcgacccacgcgtccggttctttgaagtgatgttccttaggatactcactctttttttccaagcaaaaaggccagctgccttctcacccttggattcattctagaatccagatagattctttgattctttgatcaggatatccttgattctataataacttccacttcaatcttttaggagatacactctttttgcttggtactagactggtggnctgaggactatcttacattntatgtatctgggttttagcagagtctgtgaggaagactgctgtgatatgcttatggattgaatgggaaagtgtggctggttcttcagccggtaaaatgaccgaactcaaagaatgcatgttgacagactgatgtagactggagagaaactgcaaatgacatgccaccatgttcattaacgacttaggtgacaatataaggcatggtcaaatttgcatggagggaaactagaagttataataaataccaatactaatganaaacnaaaaaaaaggggcgnccgntttagaggancca

SEQ ID NO: 1264 - DNA, 362 bp, Homo sapiens
  misc_feature (8)..(8): n equals a,t,g, or c
  misc_feature (23)..(23): n equals a,t,g, or c
  misc_feature (28)..(28): n equals a,t,g, or c
  misc_feature (48)..(48): n equals a,t,g, or c
  misc_feature (74)..(74): n equals a,t,g, or c
  misc_feature (101)..(101): n equals a,t,g, or c
  misc_feature (123)..(123): n equals a,t,g, or c
  misc_feature (128)..(128): n equals a,t,g, or c
  misc_feature (133)..(133): n equals a,t,g, or c
  misc_feature (137)..(137): n equals a,t,g, or c
  misc_feature (160)..(160): n equals a,t,g, or c
  misc_feature (164)..(164): n equals a,t,g, or c
  misc_feature (167)..(167): n equals a,t,g, or c
  misc_feature (173)..(173): n equals a,t,g, or c
  misc_feature (175)..(175): n equals a,t,g, or c
  misc_feature (193)..(193): n equals a,t,g, or c
  misc_feature (200)..(200): n equals a,t,g, or c
  misc_feature (204)..(204): n equals a,t,g, or c
  misc_feature (208)..(208): n equals a,t,g, or c
  misc_feature (240)..(240): n equals a,t,g, or c
  misc_feature (248)..(248): n equals a,t,g, or c
  misc_feature (251)..(251): n equals a,t,g, or c
  misc_feature (280)..(280): n equals a,t,g, or c
  misc_feature (285)..(285): n equals a,t,g, or c
  misc_feature (324)..(325): n equals a,t,g, or c
  misc_feature (346)..(346): n equals a,t,g, or c
ggccccgncggaccccaaggccnccgtngtgacaagggtgaaacaggnaaacagggcgacagaggcataaaggntcaccgtggcttctctggccttcaggntccccctgccctcctggctctnctggngaacnaggnccctctggagcctctggtcctgntggnccncgaggncnccctggctctgctggtgntcctggnaaanatgnactcaacggtctccctgacccattgggcccantggtcctngangtcacactggtgatgctggtcctgttggnccccncagtcctcctggacctcctggtccccctggacctgccanncgctgggttcgacttcagctnactgccccagccacct

SEQ ID NO: 1265 - DNA, 178 bp, Homo sapiens
  misc_feature (45)..(46): n equals a,t,g, or c
  misc_feature (95)..(95): n equals a,t,g, or c
  misc_feature (125)..(125): n equals a,t,g, or c
  misc_feature (137)..(137): n equals a,t,g, or c
  misc_feature (145)..(145): n equals a,t,g, or c
  misc_feature (153)..(153): n equals a,t,g, or c
gtttaaagactgtaattagtgcagtaacagtggggttctttttgnncaactcttctaaaaacattcataatgcagtcatgtttatttttttctgntaaaatgtttttgacagttttaagagcagncttttggctctnaccatttnttgttctntttccaatgaaatcaataaataaaa

SEQ ID NO: 1266 - DNA, 366 bp, Homo sapiens
  misc_feature (10)..(10): n equals a,t,g, or c
  misc_feature (24)..(24): n equals a,t,g, or c
  misc_feature (57)..(57): n equals a,t,g, or c
  misc_feature (73)..(73): n equals a,t,g, or c
  misc_feature (91)..(91): n equals a,t,g, or c
  misc_feature (112)..(112): n equals a,t,g, or c
  misc_feature (136)..(136): n equals a,t,g, or c
  misc_feature (139)..(139): n equals a,t,g, or c
  misc_feature (145)..(145): n equals a,t,g, or c
  misc_feature (147)..(147): n equals a,t,g, or c
  misc_feature (217)..(217): n equals a,t,g, or c
  misc_feature (328)..(328): n equals a,t,g, or c
  misc_feature (339)..(339): n equals a,t,g, or c
  misc_feature (342)..(343): n equals a,t,g, or c
  misc_feature (359)..(359): n equals a,t,g, or c
aatctccaanaatgggcagacccnagagcatgcccttctggcttacacactgggtgngaaacaactaattgtnggtgttaacaaaatggantccactgagccaccctacagncagaagagatatgaggaaattgtnaangaagtnancacttacattaagaaaattggctacaaccccgacacagtagcatttgtgccaatttttggatggaatggngacaacatgctggagccaagtgctaacatgccttggttcaagggatggaaagtcacccgtaaggatggcaatgccagtggaaccacgctgcttgaggctctggactgcatnctaccaccaantcnncaactgacaagccctngtgcctg

SEQ ID NO: 1267 - DNA, 573 bp, Homo sapiens
  misc_feature (27)..(27): n equals a,t,g, or c
  misc_feature (30)..(30): n equals a,t,g, or c
  misc_feature (38)..(38): n equals a,t,g, or c
  misc_feature (42)..(42): n equals a,t,g, or c
  misc_feature (491)..(491): n equals a,t,g, or c
  misc_feature (566)..(566): n equals a,t,g, or c
  misc_feature (572)..(572): n equals a,t,g, or c
acgcctgcaggtaccggtccggaattnctngctggatncganccatccgcgccgcttgtgctgcagccatgtctctagtgatccctgaaaagttccagcatattttgcgagtactcaacaccaacatcgatgggcggcggaaaatagcctttgccatcactgccattaagggtgtgggccgaagatatgctcatgtggtgttgaggaaagcagacattgacctcaccaagagggcgggagaactcactgaggatgaggtggaacgtgtgatcaccattatgcagaatccacgccagtacaagatcccagactggttcttgaacagacagaaggatgtaaaggatggaaaatacagccaggtcctagccaatggtctggacaacaagctccgtgaagacctggagcgactgaagaagattcgggcccatagagggctgcgtcacttctggggccttcgtgtccgaggccagcacaccaagaccactggccgncgtggccgcaccgtgggtgtgtccaagaagaaataagtctgtagccttgtctgttaataaatagtttatatccanaaaaana

SEQ ID NO: 1268 - DNA, 536 bp, Homo sapiens
  misc_feature (2)..(2): n equals a,t,g, or c
  misc_feature (8)..(8): n equals a,t,g, or c
  misc_feature (10)..(10): n equals a,t,g, or c
  misc_feature (28)..(28): n equals a,t,g, or c
  misc_feature (65)..(65): n equals a,t,g, or c
  misc_feature (104)..(104): n equals a,t,g, or c
  misc_feature (168)..(168): n equals a,t,g, or c
  misc_feature (277)..(277): n equals a,t,g, or c
  misc_feature (411)..(411): n equals a,t,g, or c
  misc_feature (428)..(428): n equals a,t,g, or c
  misc_feature (464)..(464): n equals a,t,g, or c
  misc_feature (475)..(475): n equals a,t,g, or c
  misc_feature (522)..(522): n equals a,t,g, or c
  misc_feature (524)..(524): n equals a,t,g, or c
  misc_feature (535)..(535): n equals a,t,g, or c
anaaaacnanaagagcttactggtaganaggaatgggacaagacccatctttatgcaaagccagngttacagtaatgttccagcatctcataatctatcctggngaattcagctgcctcccagggtgaatacaggtattcctgatgacagtctgcctctatcttacanagcagcttgatgctatataccattgaaaagccttcagagctgagaggtactactaaccaataacctgcttggctcaaagggccagcaccttctctctaaagcccaagangagtttgaggaaaactaggtgtctgtgttcactccaggctgaagttacaggtctgagcaaataaggtgtataaaaaatggaatctgcttggaggacatcagaaggtgaattttccaagttcttggacaacctanctgttgaaaaagctttntggtttggggggtatttcagatggaccttaaagtgntacagacccanattaagacacttggagccaatgaaacagcaattgaagggtttgctgngnattacattttnt

SEQ ID NO: 1269 - DNA, 157 bp, Homo sapiens
  misc_feature (3)..(3): n equals a,t,g, or c
  misc_feature (15)..(16): n equals a,t,g, or c
  misc_feature (86)..(86): n equals a,t,g, or c
  misc_feature (89)..(89): n equals a,t,g, or c
  misc_feature (104)..(104): n equals a,t,g, or c
  misc_feature (131)..(131): n equals a,t,g, or c
  misc_feature (154)..(154): n equals a,t,g, or c
ccntttgggaatacnngaaagctggtacgcctgcaggtaccggtccggaattcccgggtcgacccacgcgtccgcgcgcgtccagnatnatagacgagctcttncaggacaggttcttcacccgggagccncaggatacctaccactacctgcnctt

SEQ ID NO: 1270 - DNA, 263 bp, Homo sapiens
  misc_feature (25)..(25): n equals a,t,g, or c
  misc_feature (57)..(57): n equals a,t,g, or c
  misc_feature (59)..(59): n equals a,t,g, or c
  misc_feature (61)..(61): n equals a,t,g, or c
  misc_feature (65)..(65): n equals a,t,g, or c
  misc_feature (67)..(67): n equals a,t,g, or c
  misc_feature (102)..(102): n equals a,t,g, or c
  misc_feature (126)..(126): n equals a,t,g, or c
  misc_feature (143)..(143): n equals a,t,g, or c
  misc_feature (149)..(149): n equals a,t,g, or c
  misc_feature (195)..(195): n equals a,t,g, or c
  misc_feature (222)..(222): n equals a,t,g, or c
  misc_feature (227)..(227): n equals a,t,g, or c
  misc_feature (229)..(229): n equals a,t,g, or c
  misc_feature (263)..(263): n equals a,t,g, or c
gcttcatgctcggcgccaaagctgntggtgagaccattctaaaaggcctccagtccngntntccntnagcaggggatggcggagtcggcgcacacctggcangaccatggctatttagcaacctanacaaacaagaacggcanctttgncaatttgagaatttacccacatggattggtgttgctggaccttcanagttatgatggctgatgcgcatggcanatatnanatctgacagtatttttgaacaaagtataatgaan

SEQ ID NO: 1271 - DNA, 180 bp, Homo sapiens
  misc_feature (4)..(4): n equals a,t,g, or c
  misc_feature (10)..(10): n equals a,t,g, or c
  misc_feature (19)..(19): n equals a,t,g, or c
  misc_feature (30)..(30): n equals a,t,g, or c
  misc_feature (94)..(94): n equals a,t,g, or c
  misc_feature (103)..(103): n equals a,t,g, or c
  misc_feature (130)..(130): n equals a,t,g, or c
  misc_feature (151)..(151): n equals a,t,g, or c
  misc_feature (164)..(164): n equals a,t,g, or c
gaanccactnggaagaccncgggacgcttnccggtaccggtccggaattcccgggtcgacccacgcgtccgggcgccctgcttagaggccaacnccgccgcancccagaggaggcagcagctggaggctnagcgagcagaggccgaccggntgcggcagcgggnggctgagctggaggct

SEQ ID NO: 1272 - DNA, 759 bp, Homo sapiens
  misc_feature (673)..(673): n equals a,t,g, or c
  misc_feature (675)..(675): n equals a,t,g, or c
ggcggcctctactaggtggctgtgattaaatgtcccaagcaaggatagggaaggggaatggttgagcctctggagatcattgtaaccaatcctgccagacctgtttggggcagtggggagcaaacctagataaggacctgtttggggcagcagggagcaaaatctcctttaacaaccaagcagttcctcattcacatcaacagagcgaggctgtgataacttaggaggcagcaatcctaatagtccttcagtgcattttagtctgtctccaactggacaccagtaggtagtgtcaagccagagattcggggcagtagataaatgttcattttactgatgcactttagtttttggtctgttacctgttttccagaaatttgtggccttttaggcgggagttaggcgaccaaaccagtgagagccccaatccctgcagttttgtggcttcaagtgtgggtggacagtcctaatggggatctccagctccttccctgtgggctgccacagacagctacccccagaagggtcaatgttgggagtggttgtggctctgagctgctctacagagcttcagtgttagaggatcgagccattgaaagctcattaccagtaggacataattttggctcttcctattcacaaccagtgcacagttttgacacagtgggctcangntcacagtgcaccatgtcacttggctatcctacgaaatcatttgttctaagtggggttattcctggagggacattgcaccccgaa

SEQ ID NO: 1273 - DNA, 762 bp, Homo sapiens
  misc_feature (479)..(479): n equals a,t,g, or c
  misc_feature (608)..(608): n equals a,t,g, or c
  misc_feature (664)..(664): n equals a,t,g, or c
  misc_feature (699)..(699): n equals a,t,g, or c
gggggagaggagatggctggagcaaggagccaggcatttttcttatctcaacatgtgtttgcagcctcctccaaaactgcccagtggagtgttcagtctggaatttcaagattttgtgaataaatgcttaataaaaaaccccgcagagagagcagatttgaagcaactcatggttcatgcttttatcaagagatctgatgctgaggaagtggattttgcaggttggctctgctccaccatcggccttaaccagcccagcacaccaacccatgctgctggcgtctaagtgtttgggaagcaacaaagagcgagtcccctgcccggtggtttgccatgtcgcttttgggcctccttcccatgcctgtctctgttcagatgtgcatttcacctgtgacaaaggatgaagaacacagcatgtgccaagattctactcttgtcatttttaatattactgtctttattcttattactattattgntcccctaagtggattggctttgtgcttggggctatttgtgtgtatgctgatgatcaaaacctgtgccaggctgaattacagtgaaattttggtgaatgtgggtagtcattcttacaattgcactgctgntcctgctccatgactggctgctgctgtattttccggattctttgacatttggtggnactttaatcttgctgggcatactttcttttagganggagccttgtgagatcctttacaggcaagtgcatgtgaaaccatgctttgctgctatgaaaat

SEQ ID NO: 1274 - DNA, 758 bp, Homo sapiens
  misc_feature (593)..(593): n equals a,t,g, or c
  misc_feature (640)..(640): n equals a,t,g, or c
  misc_feature (704)..(704): n equals a,t,g, or c
ggaagatcctggtgtcgccatgggccgccgccccgcccgttgttaccggtattgtaagaacaagccgtacccaaagtctcgcttctgccgaggtgtccctgatgccaagattcgcatttttgacctggggcggaaaaaggcaaaagtggatgagtttccgctttgtggccacatggtgtcagatgaatatgagcagctgtcctctgaagccctggaggctgcccgaatttgtgccaataagtacatggtaaaaagttgtggcaaagatggcttccatatccgggtgcggctccaccccttccacgtcatccgcatcaacaagatgttgtcctgtgctggggctgacaggctccaaacaggcatgcgaggtgcctttggaaagccccagggcactgtggccagggttcacattggccaagttatcatgtccatccgcaccaagctgcagaacaaggagcatgtgattgaggccctgcgcagggccaagttcaagtttcctggccgccagaagatccacatctcaaagaagtggggcttcaccaagttcaatgctgatgaatttgaagacatggtggctgaaaaagcggctcatnccagatggcttgtggggtcaaagtacatccccaagtcgtggcccttntggacaaagtggccgggccccttgcacttcatgaaggctttccaaatggggcttgccccccttnttaaatacttcacccaattaaaattctaactttccctggtcccaaaaaaaaaaa

SEQ ID NO: 1275 - DNA, 751 bp, Homo sapiens
  misc_feature (48)..(48): n equals a,t,g, or c
  misc_feature (66)..(66): n equals a,t,g, or c
  misc_feature (143)..(143): n equals a,t,g, or c
  misc_feature (197)..(197): n equals a,t,g, or c
  misc_feature (348)..(348): n equals a,t,g, or c
  misc_feature (370)..(370): n equals a,t,g, or c
  misc_feature (403)..(403): n equals a,t,g, or c
  misc_feature (410)..(410): n equals a,t,g, or c
  misc_feature (424)..(424): n equals a,t,g, or c
  misc_feature (477)..(477): n equals a,t,g, or c
  misc_feature (498)..(498): n equals a,t,g, or c
  misc_feature (507)..(507): n equals a,t,g, or c
  misc_feature (511)..(511): n equals a,t,g, or c
  misc_feature (513)..(513): n equals a,t,g, or c
  misc_feature (516)..(516): n equals a,t,g, or c
  misc_feature (520)..(520): n equals a,t,g, or c
  misc_feature (527)..(527): n equals a,t,g, or c
  misc_feature (530)..(530): n equals a,t,g, or c
  misc_feature (533)..(533): n equals a,t,g, or c
  misc_feature (537)..(537): n equals a,t,g, or c
  misc_feature (556)..(556): n equals a,t,g, or c
  misc_feature (588)..(588): n equals a,t,g, or c
  misc_feature (594)..(594): n equals a,t,g, or c
  misc_feature (597)..(597): n equals a,t,g, or c
  misc_feature (606)..(606): n equals a,t,g, or c
  misc_feature (609)..(609): n equals a,t,g, or c
  misc_feature (613)..(613): n equals a,t,g, or c
  misc_feature (626)..(626): n equals a,t,g, or c
  misc_feature (645)..(645): n equals a,t,g, or c
  misc_feature (673)..(673): n equals a,t,g, or c
  misc_feature (701)..(701): n equals a,t,g, or c
  misc_feature (706)..(706): n equals a,t,g, or c
  misc_feature (720)..(720): n equals a,t,g, or c
  misc_feature (743)..(743): n equals a,t,g, or c
gctgggacagcgtttcgggaggtttcttggcctcactgagagggatgnggagctgctgtaccccgncaaggagaaggtattctacagcctgatgagggagagcggctacatgcacatccagtgcaccaagcctgacaccgtangctctgctctgaatgactctcctgtgggtctggctgcctatattctagagaagntttccacctggaccaatacggaattccgatacctggaggatggaggcctggaaaggaagatctccctggacgacctgctgaccaacgtcatgctctactggacaacaggcaccatcatctcctcccagcgcttctacaaggagaacctggnacagggctggatgacccagaancatgagcggatgaaggtctatgtgcccactggnttctctnccttcccttttganctattgcacacgcctgaaaagtgggtgaggttcaagtacccaaagctcatctnctattcctacatggttcgtgngggccactntgcngnctntgangagccgnagntgntcgnccaggacatccgcaagatnctgtcggtgctggaaccggtaatgacccaccnctcttncancggctgcanctncccncccaagtgccctncagcttttctttggggaanaaaccccttttctgaagaatgagtttgncttcggcccctgcccatgcttgggaagnccaancttaaccccttaanccttccaagttaattcccaaccncaaattcc

SEQ ID NO: 1276 - DNA, 751 bp, Homo sapiens
  misc_feature (520)..(520): n equals a,t,g, or c
  misc_feature (634)..(634): n equals a,t,g, or c
  misc_feature (647)..(647): n equals a,t,g, or c
  misc_feature (657)..(657): n equals a,t,g, or c
  misc_feature (690)..(690): n equals a,t,g, or c
  misc_feature (706)..(706): n equals a,t,g, or c
  misc_feature (719)..(719): n equals a,t,g, or c
  misc_feature (744)..(744): n equals a,t,g, or c
gccagaaaggccatgtacaagaggaagtactcagccgctaaatccaaggttgaaaagaaaaagaaggagaaggttctcgcaactgttacaaaaccagttggtggtgacaagaacggcggtacccgggtggttaaacttcgcaaaatgcctagatattatcctactgaagatgtgcctcgaaagctgttgagccacggcaaaaaacccttcagtcagcacgtgagaaaactgcgagccagcattacccccgggaccattctgatcatcctcactggacgccacaggggcaagagggtggttttcctgaagcagctggctagtggcttattacttgtgactggacctctggtcctcaatcgagttcctctacgaagaacacaccagaaatttgtcattgccacttcaaccaaaatcgatatcagcaatgtaaaaatcccaaaacatcttactgatgcttacttcaagaagaagaagctgcggaagcccagacaccaggaaggtgagatcttcgacacagaanaagagaaatatgagattacggagcagcgcaagattgatcagaaagctgtggactcacaaattttaccaaaaatcaaagctattcctcaacttcaggggctaccttgcgatctgnggttgctctgacnaaatgggaanttattcctcacaaaattggggggttctaaaagncttaaggaaccctaanttaaataagcttnacttacccaaaaaaaaaaaaaaaanggggggg

SEQ ID NO: 1277 - DNA, 621 bp, Homo sapiens
  misc_feature (256)..(256): n equals a,t,g, or c
  misc_feature (273)..(273): n equals a,t,g, or c
  misc_feature (534)..(534): n equals a,t,g, or c
  misc_feature (545)..(545): n equals a,t,g, or c
  misc_feature (570)..(570): n equals a,t,g, or c
  misc_feature (574)..(574): n equals a,t,g, or c
  misc_feature (590)..(590): n equals a,t,g, or c
ggtggaaacaataattcacccagtttagtgggtggtagggtacgtggccagacacagtcacccagtttttgttcataccagggtcatgcgttgagctactgacaaactcaggcggaggtgaccatgcccttcaccaaagctgcctcccagtggccacacagaactctccctgctggactcacctgaggaaagaggctccagcatggggtgggtcagagatgtgcttgcaaggtccagggactgcgtggtctgcaanttaaaatgctcctcggnctggcccaaggtgctgaccttgccacaggcagatgaatgtcttgaaagctcccgggcctcagcctcccatctcctctccttcccaggaatccttgatctcatgactattaaaatgttgctctggttttaaggtcagtcctgaattgctcgtatatatgaactgaaggtaaccgaagtattaggggtttgaggaagtgcgtgcgtgtaagtgtgcttgtgtgtgtgccgtgcatggtgggggagaggatgggaagggggcgnggcagtggaanggaaaggaaggaaagaaaaatcgtnctanaccaggatacacccgngggacaattttcttactggctggactttaca

SEQ ID NO: 1278 - DNA, 663 bp, Homo sapiens
  misc_feature (253)..(253): n equals a,t,g, or c
  misc_feature (265)..(265): n equals a,t,g, or c
  misc_feature (556)..(556): n equals a,t,g, or c
  misc_feature (574)..(574): n equals a,t,g, or c
  misc_feature (644)..(644): n equals a,t,g, or c
  misc_feature (648)..(648): n equals a,t,g, or c
  misc_feature (651)..(651): n equals a,t,g, or c
ggttcttgccagggccgcggttagtccctgctggccaccccactgcgaccatgttcgttccctgcggggagtcggcccccgaccttgccggcttcaccctcctaatgccagcagtatctgttggaaatgttggccagcttgcaatggatctgattatttctacactgaatatgtctaagattggttacttctataccgattgtcttgtgccaatggttggaaacaatccatatgcgaccacagaaggaaattnaacagaacttancataaatgctgaagtgtattcattgcttcaagaaagctggtggctctacagttaagatccatttttattaagtataaatcaaagccattctgtgaaaaactgctttcctgggtgaaaagcagtggctgtgccagagtcattgttctttcaagcagtcattcatatcagcgtaatgatctgcagcttcgtagtactcccttccggtacctacttacaccttccatgcaaaaaagtgttcaaaataaaataaagagccttactgggaagaaatggaaaaaaagccgggcattnctgaaatagatgaatccnagtttggatcccaattccgggaggaggtttacaaaacctttttgatgaaactgttttaagaaatccaaangganttntgtgaaaattgt

SEQ ID NO: 1279 - DNA, 651 bp, Homo sapiens
  misc_feature (608)..(608): n equals a,t,g, or c
  misc_feature (624)..(624): n equals a,t,g, or c
  misc_feature (635)..(635): n equals a,t,g, or c
  misc_feature (641)..(641): n equals a,t,g, or c
  misc_feature (643)..(643): n equals a,t,g, or c
gtcagcattgacaagacgggagagaatttccgtctgatctatgacaccaagggtcgctttgctgtacatcgtattacacctgaggaggccaagtacaagttgtgcaagtgagaaagatctttgtgggcacaaaaggaatccctcatctggtgactcatgatgcccgcaccatccgctaccccgatcccctcatcaaggtgaatgataccattcagattgatttagagactggcaagattactgatttcatcaagttcgacactggtaacctgtgtatggtgactggaggtgctaacctaggaagaattggtgtgatcaccaacagagagaggcaccctggatcttttgacgtggttcacgtgaaagatgccaatggcaacagctttgccactcgactttccaacatttttgttattggcaagggcaacaaaccatggatttctcttccccgaggaaagggtatccgcctcaccattgctgaagagagagacaaaagactggcggccaaacagagcagtgggtgaaatgggtccctgggtgacatgtcagatctttgtacgtaattaaaaatattgtggcaaggattaaaaaaaaaaaaaaaaaggggnggccgttttaaagganccaagtttacntacccntncttgcaaa

SEQ ID NO: 1280 - DNA, 759 bp, Homo sapiens
  misc_feature (708)..(708): n equals a,t,g, or c
  misc_feature (747)..(747): n equals a,t,g, or c
gcttggacaacaacaagcttaccagagtacctggtgggctggcagagcataagtacatccaggttgtctaccttcataacaacaatatctctgtagttggatcaagtgacttctgcccacctggacacaacaccaaaaaggcttcttattcgggtgtgagtcttttcagcaacccggtccagtactgggagatacagccatccaccttcagatgtgtctacgtgcgctctgccattcaactcggaaactataagtaattctcaagaaagccctcatttttataacctggcaaaatcttgttaatgtcattgctaaaaaataaataaaagctagatactggaaacctaactgcaatgtggatgttttacccacatgacttattatgcataaagccaaatttccagtttaagtaattgcctacaataaaaagaaattttgcctgccattttcagaatcatcttttgaagctttctgttgatgttaactgagctactagagatattcttatttcactaaatgtaaaatttggagtaaatatatatgtcaatatttagtaaagcttttcttttttaatttccaggaaaaaataaaaagagtatgagtcttctgtaattcattgagcagttagctcatttgagataaagtcaaatgccaaacactagctctgtattaatccccatcattactggtaaagcctcatttgaatgnggtgaattcaatacaggctatgtaaaattttactaatgncattattttgaa

SEQ ID NO: 1281 - DNA, 748 bp, Homo sapiens
  misc_feature (502)..(502): n equals a,t,g, or c
  misc_feature (613)..(613): n equals a,t,g, or c
  misc_feature (675)..(675): n equals a,t,g, or c
  misc_feature (698)..(698): n equals a,t,g, or c
  misc_feature (704)..(704): n equals a,t,g, or c
  misc_feature (737)..(737): n equals a,t,g, or c
  misc_feature (742)..(742): n equals a,t,g, or c
ggaagaggagaagattcgtgtggacattttggagaaccagaccatggacaaccatatgcagctgggcatgatctgctacaatccagaatttgagaaactgaagccaaagtacttggaggaactccctgaaaagctaaagctctactcagagtttctggggaagcggccatggtttgcaggaaacaagatcacttttgtagattttctcgtctatgatgtccttgacctccaccgtatatttgagcccaactgcttggacgccttcccaaatctgaaggacttcatctcccgctttgagggcttggagaagatctctgcctacatgaagtccagccgcttcctcccaagacctgtgttctcaaagatggctgtctggggcaacaagtagggccttgaaggccaggaggtgggagtgaggagcccatactcagcctgctgcccaggctgtgcagcgcagctggactctgcatcccagcacctgcctcctcgtcctttctcctgnttattcccatctttactcccaagacttcattgtccctcttcactccccctaaacccctgtcccatgcaggccctttgaagcctcagctacccactatccttcgtgaacatnccctccatcattacccttcctgcactaaagccagcctgacttctttctggtagtgggtgggnctgctttaaaggggctgcctggncccttngcttgtggagcttaaccccgaacttgtccccgnggttncatgaa

SEQ ID NO: 1282 - DNA, 710 bp, Homo sapiens
  misc_feature (3)..(3): n equals a,t,g, or c
  misc_feature (13)..(13): n equals a,t,g, or c
  misc_feature (82)..(82): n equals a,t,g, or c
  misc_feature (130)..(130): n equals a,t,g, or c
  misc_feature (143)..(143): n equals a,t,g, or c
  misc_feature (147)..(147): n equals a,t,g, or c
  misc_feature (154)..(154): n equals a,t,g, or c
  misc_feature (156)..(156): n equals a,t,g, or c
  misc_feature (162)..(162): n equals a,t,g, or c
  misc_feature (179)..(179): n equals a,t,g, or c
  misc_feature (194)..(194): n equals a,t,g, or c
  misc_feature (196)..(196): n equals a,t,g, or c
  misc_feature (202)..(202): n equals a,t,g, or c
  misc_feature (207)..(207): n equals a,t,g, or c
  misc_feature (209)..(209): n equals a,t,g, or c
  misc_feature (212)..(213): n equals a,t,g, or c
  misc_feature (219)..(219): n equals a,t,g, or c
  misc_feature (221)..(221): n equals a,t,g, or c
  misc_feature (223)..(223): n equals a,t,g, or c
  misc_feature (236)..(236): n equals a,t,g, or c
  misc_feature (249)..(249): n equals a,t,g, or c
  misc_feature (274)..(274): n equals a,t,g, or c
  misc_feature (277)..(277): n equals a,t,g, or c
  misc_feature (281)..(281): n equals a,t,g, or c
  misc_feature (284)..(284): n equals a,t,g, or c
  misc_feature (292)..(292): n equals a,t,g, or c
  misc_feature (295)..(296): n equals a,t,g, or c
  misc_feature (310)..(310): n equals a,t,g, or c
  misc_feature (324)..(325): n equals a,t,g, or c
  misc_feature (329)..(329): n equals a,t,g, or c
  misc_feature (331)..(331): n equals a,t,g, or c
  misc_feature (336)..(336): n equals a,t,g, or c
  misc_feature (342)..(342): n equals a,t,g, or c
  misc_feature (352)..(352): n equals a,t,g, or c
  misc_feature (362)..(362): n equals a,t,g, or c
  misc_feature (370)..(370): n equals a,t,g, or c
  misc_feature (379)..(379): n equals a,t,g, or c
  misc_feature (383)..(383): n equals a,t,g, or c
  misc_feature (392)..(392): n equals a,t,g, or c
  misc_feature (395)..(396): n equals a,t,g, or c
  misc_feature (401)..(401): n equals a,t,g, or c
  misc_feature (404)..(404): n equals a,t,g, or c
  misc_feature (414)..(414): n equals a,t,g, or c
  misc_feature (459)..(459): n equals a,t,g, or c
  misc_feature (490)..(490): n equals a,t,g, or c
  misc_feature (499)..(499): n equals a,t,g, or c
  misc_feature (537)..(537): n equals a,t,g, or c
  misc_feature (543)..(543): n equals a,t,g, or c
  misc_feature (553)..(553): n equals a,t,g, or c
  misc_feature (556)..(556): n equals a,t,g, or c
  misc_feature (561)..(561): n equals a,t,g, or c
  misc_feature (569)..(569): n equals a,t,g, or c
  misc_feature (573)..(573): n equals a,t,g, or c
  misc_feature (577)..(577): n equals a,t,g, or c
  misc_feature (607)..(607): n equals a,t,g, or c
  misc_feature (619)..(619): n equals a,t,g, or c
  misc_feature (656)..(656): n equals a,t,g, or c
  misc_feature (667)..(667): n equals a,t,g, or c
  misc_feature (681)..(681): n equals a,t,g, or c
  misc_feature (688)..(688): n equals a,t,g, or c
  misc_feature (710)..(710): n equals a,t,g, or c
ggnactggactgncttgattgacatggggaagggggttagtagactatgtggattgcggcagcagaggctgcagcctaacgngtggatttaatgaccagcacgcaaggcacaaagcattttgcacagtgnttgttttcctgtnttgnacttacnantaaggnctatgggagtaccatgnaaaacgtttgctgtnantccttnttttntnaanngttttngntnaaaatttgatcgncttaactactgcnaacatagcctatttttgggcttaanaanctgnatnggaaactntcnncgtgcagatgctgnactgttctagaagnntttngntaaangggctnctaatttgantgtaatggcntttaaagnatacaatcnaacnttaaaaagntgnnaaaanggncttggaaccntatctttagttacttgaagagtttctagtttttttaaaatacagnttatgttaaaataatttttattaatttaganaagacaatnaatggctgtgagaaaaacggatttcttttggaatttcnttttgnggccattgtnaangaatngtttttcntttntaancgacaattttcctttggttaaaacttaaantggacatttaanttttggcaatctaagaggttaatttctgagggggaanacttataagcngttaagtttgcctntgggggntgggaaattttaaactggggcn

SEQ ID NO: 1283 - DNA, 693 bp, Homo sapiens
  misc_feature (580)..(580): n equals a,t,g, or c
  misc_feature (627)..(627): n equals a,t,g, or c
  misc_feature (636)..(636): n equals a,t,g, or c
  misc_feature (655)..(655): n equals a,t,g, or c
  misc_feature (660)..(660): n equals a,t,g, or c
  misc_feature (667)..(667): n equals a,t,g, or c
gctgacacccagctcgctgcctcctagcattcacttctggagcaccctgagtcccattgcgccccgtagcccggccaagctctccttccagtttccatccagtggcagcgcccaggtgcacatcccttctatcagcgtggatggcctctcgacccccgtggtgctctccccagggccccagaagccatgactactaccaccaccaccaccaccccttctggggtcactccatccatgctctctccagccagccatctcaaggagaaacataagtttaactggaaagactcatgctctgattgtggtggggtggggatccttgggaagaattactcccaagagtaactctcattatctcctccacagaaaacacacagcttccacaacttctctgttttctgtcagtcccccagtggccgccttacacgtctcctacttcaatggtaggggcggtttatttatttattttttgaaggccactgggaggagcctgactaaccttttagggtggttaggacatttccccacttcccacttttttcccaagacaagacaaatcgaggtctggcttgagaacganctttctttctttaattcttaaacctggcctttgggaaaataaggaanccctgttgngttttttggatgtaagtanaaaanttaggtnggttgggttaataattccgggcataa

SEQ ID NO: 1284 - DNA, 503 bp, Homo sapiens
  misc_feature (337)..(337): n equals a,t,g, or c
  misc_feature (500)..(503): n equals a,t,g, or c
ggtcgccgctgcggagggagccgccgccatgtctgcgcatctgcaatggatggtcgtgcggaactgctccagtttcctgatcaagaggaataagcagacctacagcactgagcccaataacttgaaggcccgcaattccttccgctacaacggactgattcaccgcaagactgtgggcgtggagccggcagccgacggcaaaggtgtcgtggtggtcattaagcggagatccggccagcggaagcctgccacctcctatgtgcggaccaccatcaacaagaatgctcgcgccacgctcagcagcatcagacacatgatccgcaagaacaagtaccgncccgacctgcgcatggcagccatccgcagggccagcgccatcctgcgcagccagaagcctgtgatggtgaagaggaagcggacccgccccaccaagagctcctgagccccctgcccccagagcaataaagtcaagcttggctttctacctgaaaaaaaaaaannnn

SEQ ID NO: 1285 - DNA, 379 bp, Homo sapiens
  misc_feature (11)..(11): n equals a,t,g, or c
  misc_feature (15)..(15): n equals a,t,g, or c
  misc_feature (55)..(55): n equals a,t,g, or c
  misc_feature (59)..(59): n equals a,t,g, or c
  misc_feature (85)..(85): n equals a,t,g, or c
  misc_feature (128)..(128): n equals a,t,g, or c
  misc_feature (154)..(155): n equals a,t,g, or c
  misc_feature (162)..(162): n equals a,t,g, or c
  misc_feature (184)..(184): n equals a,t,g, or c
  misc_feature (206)..(206): n equals a,t,g, or c
  misc_feature (254)..(254): n equals a,t,g, or c
  misc_feature (300)..(300): n equals a,t,g, or c
  misc_feature (309)..(309): n equals a,t,g, or c
  misc_feature (320)..(320): n equals a,t,g, or c
  misc_feature (357)..(357): n equals a,t,g, or c
  misc_feature (367)..(367): n equals a,t,g, or c
tttgactagtnttgnggagctgctggctcttttaacaggagctgacctattggancaanctgagactgaaattgacatttgtggntaggttatctagctgaggcttttaacaatggagcagataatgnctggtcctgaagaggatccatttaanntcctatntgagtactctcacttaacaagnattatctattctgaacctttgngatgggaatttaaggactattggcaaaggctattaatggtaaacaagnatatgcaaaacaattcacatatgggtaaaaatttcaaaatgggggnttttggttntgctttttagnttcaaagattaggtatgtagcagcaatatcataaccnaagcaagtangaagttgactgg

SEQ ID NO: 1286 - DNA, 774 bp, Homo sapiens
  misc_feature (686)..(686): n equals a,t,g, or c
  misc_feature (722)..(722): n equals a,t,g, or c
  misc_feature (769)..(769): n equals a,t,g, or c
gcgcaaggaaggtaccggctctactgccacctcttccagctccaccgccggcgcagcagggaaaggcaaaggcaaaggcggctcgggagattcagccgtgaagcaagtgcagatagatggccttgtggtattaaagataatcaaacattatcaagaagaaggacaaggaactgaagttgttcaaggagtgcttttgggtctggttgtagaagatcggcttgaaattaccaactgctttcctttccctcagcacacagaggatgatgctgactttgatgaagtccaatatcagatggaaatgatgcggagccttcgccatgtaaacattgatcatcttcacgtgggctggtatcagtccacatactatggctcattcgttacccgggcactcctggactctcagtttagttaccagcatgccattgaagaatctgtcgttctcatttatgatcccataaaaactgcccaaggatctctctcactaaaggcatacagactgactcctaaactgatggaagtttgtaaagaaaaggatttttcccctgaagcattgaaaaaagcaaatatcacctttgagtacatgtttgaagaagtgcccgattgtaattaaaaattcacatctgatcaatggcctaatgtgggaacttgaaaagaagtcagctgttgcagataaacatgaattggtnagcttgcagcagcaatcatttggggaagaatctacngttgctgatggaccaaatggattaaatgagccaggaaatagtaaatnccacc

SEQ ID NO: 1287 - DNA, 759 bp, Homo sapiens
  misc_feature (9)..(9): n equals a,t,g, or c
  misc_feature (11)..(11): n equals a,t,g, or c
  misc_feature (13)..(13): n equals a,t,g, or c
  misc_feature (16)..(16): n equals a,t,g, or c
  misc_feature (19)..(19): n equals a,t,g, or c
  misc_feature (574)..(574): n equals a,t,g, or c
  misc_feature (630)..(630): n equals a,t,g, or c
  misc_feature (654)..(654): n equals a,t,g, or c
  misc_feature (673)..(673): n equals a,t,g, or c
  misc_feature (710)..(710): n equals a,t,g, or c
  misc_feature (723)..(723): n equals a,t,g, or c
  misc_feature (747)..(747): n equals a,t,g, or c
  misc_feature (756)..(756): n equals a,t,g, or c
gccattgancncnttnctncggtcgtcccgaatccgggttcatccgacaccagccgcctccaccatgccgccgaagttcgaccccaacgagatcaaagtcgtatacctgaggtgcaccggaggtgaagtcggtgccacttctgccctggcccccaagatcggcccccaagaagggcctgaggattacagtgaaactgaccattcagaacagacaggcccagattgaggtggtgccttctgcctctgccctgatcatcaaagccctcaaggaaccaccaagagacagaaagaaacagaaaaacattaaacacagtgggaatatcacttttgatgagattgtcaacattgctcgacagatgcggcaccgatccttagccagagaactctctggaaccattaaagagatcctggggactgcccagtcagtgggctgtaatgttgatggccgccatcctcatgacatcatcgatgacatcaacagtggtgctgtggaatgcccagccagttaagcacaaaggaaaacatttcaataaaggatcatttgacaaaaaaaaaaaaaaaaaagggcggccgntctagaggatccaagcttacgtacgcgtgcatgcgacgcataagctcttctatagnggcacctaaattcaattcactggncggcggtttacaacggcgngactggggaaaaccctggggcggtaccccaacttaancggccttgcaagnacaatccccccttttcggccaagnttgggcggnaaa

SEQ ID NO: 1288 - DNA, 821 bp, Homo sapiens
  misc_feature (62)..(62): n equals a,t,g, or c
  misc_feature (70)..(71): n equals a,t,g, or c
  misc_feature (74)..(74): n equals a,t,g, or c
  misc_feature (81)..(81): n equals a,t,g, or c
  misc_feature (85)..(85): n equals a,t,g, or c
  misc_feature (91)..(91): n equals a,t,g, or c
  misc_feature (96)..(96): n equals a,t,g, or c
  misc_feature (111)..(111): n equals a,t,g, or c
  misc_feature (113)..(113): n equals a,t,g, or c
  misc_feature (120)..(120): n equals a,t,g, or c
  misc_feature (128)..(128): n equals a,t,g, or c
  misc_feature (139)..(139): n equals a,t,g, or c
  misc_feature (147)..(147): n equals a,t,g, or c
  misc_feature (154)..(156): n equals a,t,g, or c
  misc_feature (159)..(159): n equals a,t,g, or c
  misc_feature (163)..(163): n equals a,t,g, or c
  misc_feature (177)..(177): n equals a,t,g, or c
  misc_feature (212)..(212): n equals a,t,g, or c
  misc_feature (218)..(218): n equals a,t,g, or c
  misc_feature (220)..(220): n equals a,t,g, or c
  misc_feature (229)..(229): n equals a,t,g, or c
  misc_feature (254)..(254): n equals a,t,g, or c
  misc_feature (305)..(305): n equals a,t,g, or c
  misc_feature (356)..(356): n equals a,t,g, or c
  misc_feature (400)..(400): n equals a,t,g, or c
  misc_feature (444)..(444): n equals a,t,g, or c
  misc_feature (453)..(453): n equals a,t,g, or c
  misc_feature (466)..(466): n equals a,t,g, or c
  misc_feature (480)..(480): n equals a,t,g, or c
  misc_feature (484)..(484): n equals a,t,g, or c
  misc_feature (487)..(487): n equals a,t,g, or c
  misc_feature (546)..(547): n equals a,t,g, or c
  misc_feature (572)..(572): n equals a,t,g, or c
  misc_feature (588)..(588): n equals a,t,g, or c
  misc_feature (626)..(626): n equals a,t,g, or c
  misc_feature (638)..(638): n equals a,t,g, or c
  misc_feature (651)..(651): n equals a,t,g, or c
  misc_feature (653)..(653): n equals a,t,g, or c
  misc_feature (655)..(655): n equals a,t,g, or c
  misc_feature (667)..(668): n equals a,t,g, or c
  misc_feature (672)..(673): n equals a,t,g, or c
  misc_feature (684)..(684): n equals a,t,g, or c
  misc_feature (695)..(695): n equals a,t,g, or c
  misc_feature (719)..(719): n equals a,t,g, or c
  misc_feature (730)..(730): n equals a,t,g, or c
  misc_feature (732)..(732): n equals a,t,g, or c
  misc_feature (734)..(734): n equals a,t,g, or c
  misc_feature (743)..(743): n equals a,t,g, or c
  misc_feature (763)..(763): n equals a,t,g, or c
  misc_feature (789)..(789): n equals a,t,g, or c
  misc_feature (812)..(812): n equals a,t,g, or c
  misc_feature (820)..(820): n equals a,t,g, or c
gttagtgaaagatgaaaatagtacccaaagaagactttttgggaagcaaacccgaactttgnaactagannaanatggtcngggnggcagntactnttccaatcaaaagcnantggctgnggctttgntggactggacngggaaaantttctannntgntacnttaaaggtttttcnggcactggatggacaccaactggctggtatatgcntggacntntcttatganggagcacttatagcaactggcttcnctgataggaatgtgaaaatctggggtttggactttggggactgccacaagnctctctttgcacatgatgacagtgtgatgtacctacagtttgtacccaagnctcacctcttcttcactgccggaaaagatcatatagattaaacngtgggatgcacacaaatttgaacacatacagactctggaggggncatcaccangaaatatggtgtntcggcttgtaagcnccantgngagactatgttgtatcatcgcccatggacaaaatctctgagactttggggagagaacannggagcctcttaattctttgaggaanaaaaggggagaatggnaagagaaagcataatattgatggagagtgtgggcccanaagaaagacccnacccgccagtttncngngagaagacttcnnaggnngacagtttacntttactggganaagaaaaaacttttggaaaccacnggaaaaggcancntnaaaaagganttattggaggctattggagntgtacccgaggaaagaaacttgccanaatggaaggaaccccaaaggccnttgtaaanc

SEQ ID NO: 1289 - DNA, 697 bp, Homo sapiens
  misc_feature (11)..(11): n equals a,t,g, or c
  misc_feature (483)..(483): n equals a,t,g, or c
  misc_feature (487)..(487): n equals a,t,g, or c
  misc_feature (576)..(576): n equals a,t,g, or c
  misc_feature (631)..(631): n equals a,t,g, or c
  misc_feature (647)..(647): n equals a,t,g, or c
  misc_feature (652)..(652): n equals a,t,g, or c
  misc_feature (672)..(672): n equals a,t,g, or c
  misc_feature (679)..(679): n equals a,t,g, or c
ggaaggaaatngcaaattcacctacacagttctggaggatggttgcacgaaacacactggggaatggagcaaaacagtctttgaatatcgaacacgcaaggctgtgagactacctattgtagatattgcaccctatgacattggtggtcctgatcaagaatttggtgtggacgttggccctgtttgctttttataaaccaaactctatctgaaatcccaacaaaaaaaatttaactccatatgtgttcctcttgttctaatcttgtcaaccagtgcaagtgacccgacaaaattccagttatttatttccaaaatgtttggaaacagtataatttgacaaagaaaaatgatacttctctttttttgctggtccaccaaatacaattcaaatgctttttggtttatttttttaccaattccaatttcaaaatgtctcaatggtgctataataaataaacttcaacactctttatgataacaacnctgngttatattctttgaatcctagcccatctgcagagcaatgactggctcaccagtaaaaggataacctttctttctgaaatagcaaattcnaaattagaaaagcccttcctatttaactaccttaactggtcagaaacccagatgnattctatgagtcccanaagangaaaaaatttttacgtgatnaaacttntaattcttggtaatctcc

SEQ ID NO: 1290 - DNA, 772 bp, Homo sapiens
  misc_feature (72)..(72): n equals a,t,g, or c
  misc_feature (74)..(74): n equals a,t,g, or c
  misc_feature (683)..(683): n equals a,t,g, or c
  misc_feature (718)..(718): n equals a,t,g, or c
  misc_feature (744)..(744): n equals a,t,g, or c
ggcgtgatgtctcacagaaagttctccgctcccagacatgggtccctcggcttcctgcctcggaagcgcagnancaggcatcgtgggaaggtgaagagcttccctaaggatgacccatccaagccggtccacctcacagccttcctgggatacaaggctggcatgactcacatcgtgcgggaagtcgacaggccgggatccaaggtgaacaagaaggaggtggtggaggctgtgaccattgtagagacaccacccatggtggttgtgggcattgtgggctacgtggaaacccctcgaggcctccggaccttcaagactgtctttgctgagcacatcagtgatgaatgcaagaggcgtttctataagaattggcataaatctaagaagaaggcctttaccaagtactgcaagaaatggcaggatgaggatggcaagaagcagctggagaaggacttcagcagcatgaagaagtactgccaagtcatccgtgtcattgcccacacccagatgcgcctgcttcctctgcgccagaagaaggcccacctgatggagatccaggtgaacggaggcactgtggccgagaagctggactggcccgcgagaggcttgagcagcaggtacctgtgaaccagtgtttggcaggatgagatgatcgacgcatcggggtgacaaggcaaggtacnaagggtaccagtcgtgccaccagagctgccgagancacagctgcaagtgctgatggcatgnatctgtcggagctttggaccctggaaag

SEQ ID NO: 1291 - DNA, 624 bp, Homo sapiens
  misc_feature (25)..(25): n equals a,t,g, or c
  misc_feature (72)..(72): n equals a,t,g, or c
  misc_feature (180)..(180): n equals a,t,g, or c
  misc_feature (233)..(233): n equals a,t,g, or c
  misc_feature (261)..(261): n equals a,t,g, or c
  misc_feature (287)..(287): n equals a,t,g, or c
  misc_feature (291)..(291): n equals a,t,g, or c
  misc_feature (311)..(311): n equals a,t,g, or c
  misc_feature (319)..(319): n equals a,t,g, or c
  misc_feature (321)..(321): n equals a,t,g, or c
  misc_feature (334)..(334): n equals a,t,g, or c
  misc_feature (381)..(381): n equals a,t,g, or c
  misc_feature (400)..(400): n equals a,t,g, or c
  misc_feature (408)..(408): n equals a,t,g, or c
  misc_feature (426)..(426): n equals a,t,g, or c
  misc_feature (434)..(434): n equals a,t,g, or c
  misc_feature (443)..(443): n equals a,t,g, or c
  misc_feature (466)..(466): n equals a,t,g, or c
  misc_feature (497)..(497): n equals a,t,g, or c
  misc_feature (514)..(514): n equals a,t,g, or c
  misc_feature (549)..(549): n equals a,t,g, or c
  misc_feature (582)..(582): n equals a,t,g, or c
  misc_feature (595)..(595): n equals a,t,g, or c
  misc_feature (603)..(603): n equals a,t,g, or c
  misc_feature (610)..(610): n equals a,t,g, or c
gtctaccgctacgtcgcgcaggctnacgacaagccccgctacaccctgcactataagacggacgcaccgctnaacatccgcagcatcttctacgtgcccgacatgaaaccgtccatgtttgatgtgagccgggagctgggctccagcgttgcactgtacagccgcaaagtcctcatccanaccaaggccacggacatcctgcccaagtggctgcgcttcatccgaggtgtggnggacagtgaggacattcccctgaacctnagtcgggagctgctgcaggagagcgnactnatcatgaaacttcgggacgntttacagnanaggctgatcaaantcttcattgaccagagtaaaaaagatgctgagaagtatgcaaagttntttgaagattacggcctgncatgctgnaagggcattgtgacccgncacccgancaggaggtnaaggaggacatagcaaagctgcntgcgcttacgaagtccttggcgctgcccttncgggcaagctaaccagnctttcagaataccgcccagtcgcatgccgggcccngcacccgtaacaatcttactacctgtggcgccncccaaaccgtaancttggcanaagcaanttaccctactatta

SEQ ID NO: 1292 - DNA, 765 bp, Homo sapiens
  misc_feature (350)..(350): n equals a,t,g, or c
  misc_feature (374)..(374): n equals a,t,g, or c
  misc_feature (388)..(388): n equals a,t,g, or c
  misc_feature (394)..(394): n equals a,t,g, or c
  misc_feature (457)..(457): n equals a,t,g, or c
  misc_feature (467)..(467): n equals a,t,g, or c
  misc_feature (478)..(478): n equals a,t,g, or c
  misc_feature (483)..(483): n equals a,t,g, or c
  misc_feature (507)..(507): n equals a,t,g, or c
  misc_feature (547)..(547): n equals a,t,g, or c
  misc_feature (554)..(554): n equals a,t,g, or c
  misc_feature (578)..(578): n equals a,t,g, or c
  misc_feature (592)..(592): n equals a,t,g, or c
  misc_feature (606)..(606): n equals a,t,g, or c
  misc_feature (639)..(639): n equals a,t,g, or c
  misc_feature (647)..(647): n equals a,t,g, or c
  misc_feature (664)..(664): n equals a,t,g, or c
  misc_feature (692)..(692): n equals a,t,g, or c
  misc_feature (704)..(704): n equals a,t,g, or c
  misc_feature (728)..(728): n equals a,t,g, or c
  misc_feature (745)..(745): n equals a,t,g, or c
  misc_feature (747)..(747): n equals a,t,g, or c
ggccgaaaggaaagaaggccaagggaaagaaggtggctccggccccagctgtcgtgaagaagcaggaggctaagaaagtggtgaatcccctgtttgagaaaaggcctaagaattttggcattggacaggacatccagcccaaaagagacctcacccgctttgtgaaatggccccgctatatcaggttgcagcggcagagagccatcctctataagcggctgaaagtgcctcctgcgattaaccagttcacccaggccctggaccgccaaacagctactcagctgcttaagctggcccacaagtacagaccagagaccaagcaagagaaagaagcagagactgttggcccnggccgagaagaaaggctgctggcnaaagggggaacgtncccaangaaagaagacccaccttgtcccttcgagccaggaagtttaaccacccgtcacccacctttggntggaagaacnaaggaaaagcntcaancttgggtgggtggaattggcaccnaaaccttgggaattccccaattcgaagccttgggtttggncctttcntttggccttgggccccttgggggnccgtaaaaaaaatngggggggttccccnttaacttggcaatttaattcaaaggggaaaaanggccaagnaacttggggaaccgttntaaggtccccccagggaaagaaccttgnaacccaattggncggcctttaacaccaggttgaacnttggaaagacaaaggcncntttggcttaacttggtgg

SEQ ID NO: 1293 - DNA, 657 bp, Homo sapiens
  misc_feature (20)..(20): n equals a,t,g, or c
  misc_feature (289)..(289): n equals a,t,g, or c
  misc_feature (291)..(291): n equals a,t,g, or c
  misc_feature (300)..(300): n equals a,t,g, or c
  misc_feature (306)..(306): n equals a,t,g, or c
  misc_feature (315)..(315): n equals a,t,g, or c
  misc_feature (330)..(330): n equals a,t,g, or c
  misc_feature (343)..(343): n equals a,t,g, or c
  misc_feature (361)..(361): n equals a,t,g, or c
  misc_feature (366)..(366): n equals a,t,g, or c
  misc_feature (371)..(371): n equals a,t,g, or c
  misc_feature (373)..(373): n equals a,t,g, or c
  misc_feature (385)..(385): n equals a,t,g, or c
  misc_feature (393)..(393): n equals a,t,g, or c
  misc_feature (403)..(403): n equals a,t,g, or c
  misc_feature (407)..(407): n equals a,t,g, or c
  misc_feature (419)..(419): n equals a,t,g, or c
  misc_feature (429)..(429): n equals a,t,g, or c
  misc_feature (437)..(437): n equals a,t,g, or c
  misc_feature (440)..(440): n equals a,t,g, or c
  misc_feature (471)..(471): n equals a,t,g, or c
  misc_feature (478)..(479): n equals a,t,g, or c
  misc_feature (481)..(481): n equals a,t,g, or c
  misc_feature (496)..(496): n equals a,t,g, or c
  misc_feature (499)..(499): n equals a,t,g, or c
  misc_feature (529)..(529): n equals a,t,g, or c
  misc_feature (554)..(554): n equals a,t,g, or c
  misc_feature (602)..(602): n equals a,t,g, or c
  misc_feature (618)..(618): n equals a,t,g, or c
  misc_feature (626)..(626): n equals a,t,g, or c
  misc_feature (638)..(638): n equals a,t,g, or c
  misc_feature (641)..(641): n equals a,t,g, or c
gaacacagttgtcgtgattnactacccctaaaagccaaaatgggaaaggaaaagactcatatcaacattgtcgtcattggacacgtagattcgggcaagtccaccactactggccatctgatctataaatgcggtggcatcgacaaaagaaccattgaaaaatttgagaaggaggctgctgagatgggaaagggctccttcaagtatgcctgggtcttggataaactgaaagctgagcgtgaaccgtggtatcaccattgatatctcccttgggggaaatttgagaccngnaagtctatnggactntcaatggangcccccaaggacacnggaggcctttttncaaaaccattgattaccngggancattntnaaggcttgcctngtgcttgnccctggaatnggtngcttgcttgggnggttgggtgnaaatttgnaancttgggaattcttccaaaaaaatggggccanaaccccnnanaagccattggccccnttnttgggctttaccaccacttggggttgtggnaaaaccaaccttaaattgggccggngggtttaaccaaaaatggggatttccccttggacccaccctttacagnccccgaaagaagaatnttgaaggnaaatttgttaanggnaagtcaagtacttacc

SEQ ID NO: 1294 - DNA, 542 bp, Homo sapiens
  misc_feature (6)..(6): n equals a,t,g, or c
  misc_feature (236)..(236): n equals a,t,g, or c
  misc_feature (358)..(358): n equals a,t,g, or c
  misc_feature (455)..(455): n equals a,t,g, or c
  misc_feature (460)..(460): n equals a,t,g, or c
  misc_feature (540)..(542): n equals a,t,g, or c
gctcgntttgagtgactgggttttgtgattgcctctgaagcctatgtatgccatggaggcactaacaaactctgaggtttccgaaatcagaagcgaaaaaatcagtgaataaaccatcatcttgccactaccccctcctgaagccacagcagggtttcaggttccaatcagaactgttggcaaggtgacatttccatgcataaatgcgatccacagaaggtcctggtggtatttgnaactttttgcaaggcatttttttatatataattttgggcacatttttttttacgttctttagaaaaccaaaggatttcaaaatatatttatggcgaaccattcatattttgaagtggagccntataatggcagtagtttatcttctctattatctcaactactggcaattgtaagaaatatatatgatatataatgggaatggcgcttttcaaggtagncccgnggatttttccttgactaaaatggatcaaagggacattatatgcctagcaataaaagctaatggttcatggtaaaaaaaannn

SEQ ID NO: 1295 - DNA, 683 bp, Homo sapiens
  misc_feature (250)..(250): n equals a,t,g, or c
  misc_feature (258)..(258): n equals a,t,g, or c
  misc_feature (260)..(260): n equals a,t,g, or c
  misc_feature (276)..(276): n equals a,t,g, or c
  misc_feature (279)..(279): n equals a,t,g, or c
  misc_feature (287)..(290): n equals a,t,g, or c
  misc_feature (295)..(295): n equals a,t,g, or c
  misc_feature (299)..(299): n equals a,t,g, or c
  misc_feature (305)..(307): n equals a,t,g, or c
  misc_feature (314)..(314): n equals a,t,g, or c
  misc_feature (319)..(320): n equals a,t,g, or c
  misc_feature (328)..(328): n equals a,t,g, or c
  misc_feature (342)..(342): n equals a,t,g, or c
  misc_feature (365)..(365): n equals a,t,g, or c
  misc_feature (593)..(593): n equals a,t,g, or c
  misc_feature (648)..(648): n equals a,t,g, or c
  misc_feature (660)..(660): n equals a,t,g, or c
  misc_feature (669)..(670): n equals a,t,g, or c
gccccgagcgccgctccggctgcaccgcgctcgctccgagtttcaggctcgtgctaagctagcgccgtcgtcgtctcccttcagtcgccatcatgattatctaccgggacctcatcagccacgatgagatgttctccgacatctacaagatccgggagatcgcggacgggttgtgcctggaggtggaggggaagatggtcagtaggacagaaggtaacattgatgactcgctcattggtggaaatgcctncgctgaangncccgaaggccaaagtnccnaaagcacnnnnattanttgnggtcannntggcatngaccnntaacttgnaggaaccaagtttnacaaaagaagcctacaagaagtncatcaaagattacatgaaatcaatcaaagggaaacttgaagaacagagaccagaaagagtaaaaccttttatgacaggggctgcagaacaaatcaagcacatccttgctaatttcaaaaactaccagttcttttattggtgaaaacatgaatccagatggcatggttgctctattggactaccgtgaaggatggtgtgaccccatatatgaatttctttaaggatggnttagaaatgggaaaatgttaccaatgtggcaatatttttggatctatcacctggnattataactggnttctggtgnnttcacacaacaac

SEQ ID NO: 1296 - DNA, 608 bp, Homo sapiens
  misc_feature (7)..(8): n equals a,t,g, or c
  misc_feature (388)..(388): n equals a,t,g, or c
  misc_feature (395)..(395): n equals a,t,g, or c
  misc_feature (427)..(427): n equals a,t,g, or c
  misc_feature (436)..(436): n equals a,t,g, or c
  misc_feature (454)..(454): n equals a,t,g, or c
  misc_feature (461)..(461): n equals a,t,g, or c
  misc_feature (468)..(468): n equals a,t,g, or c
  misc_feature (478)..(478): n equals a,t,g, or c
  misc_feature (503)..(503): n equals a,t,g, or c
  misc_feature (507)..(507): n equals a,t,g, or c
  misc_feature (514)..(514): n equals a,t,g, or c
  misc_feature (545)..(545): n equals a,t,g, or c
  misc_feature (602)..(603): n equals a,t,g, or c
  misc_feature (605)..(605): n equals a,t,g, or c
gcccggnnccatccactcactcctgagagggctccggcccagaatgggaacctcagagaagagctctaaggagaagaaaccccatagcgtcagagaggatatgtctggcttccaagagaaaggaggctccgttttgcaaagtggaggagggacgagggacaggggtttcaccagccagcaacctgggccttgtactgtctgtgtttttaaaaccactaaagtgcaagaattacattgcactgtttctccactttttattttctcttaggcttttgtttctatttcaaacatactttcttggttttctaatggagtatatagtttagtcatttcacagactctggcctcctctcctgaaatccttttggatggggaaagggaaagtggngagggtncgagggggaaaggggaccccagctttccctgngcccggttnaccccaatttcaccagtnccccggncggccangccggaaggnttcctttttttaccggccaattgtnacanccggaanccccacaatgggattggcaccagtttgtcangaaccaggaattcctttcggaaattcccgagtttggcctaacccggttgggttttcnntnggt

SEQ ID NO: 1297 - DNA, 754 bp, Homo sapiens
  misc_feature (2)..(2): n equals a,t,g, or c
  misc_feature (392)..(392): n equals a,t,g, or c
  misc_feature (534)..(534): n equals a,t,g, or c
  misc_feature (669)..(669): n equals a,t,g, or c
  misc_feature (675)..(675): n equals a,t,g, or c
  misc_feature (697)..(697): n equals a,t,g, or c
  misc_feature (728)..(728): n equals a,t,g, or c
  misc_feature (736)..(736): n equals a,t,g, or c
gnttgaaatgctgttttcattctgcatttgtgtagtttggtgctttgttccaagttaagtgttttcagaaaagtatgttttgcatgtatttttttacagtctaaattttgactgctgagaagtttctattgtacaaaacttcatttaaaaggtttttctactgaatccagggtattctgaagatcgaagcctgtgtaaaatgctaccaaatggcaaaaagcaacaataaacagtttgatttttacttttctttctaacatatcaatgcttagcagaactattcagattgtcagtagtaaatttaaagacaaatgcccgttttcctccagtccatgaaacataccatacttatatacctgcaactaagtgtttaaaattatgctctgtaactntgtactgctagtattagaactaaaaatcttaaaatacagccagtgcttaatgcttatatcaatgtggatttgtcggcttttatgtaatctgtaatatgtatagcaggaaatacgaagagttacacagtgtatgccttaaaangctggttcttaaaagtggtaccaaaggggataatggtatttcaactagttatcagcaaggtgacaatacatttccaccacaaatacactcttggtcttctagcttttagactatatgaaaaaaaccgggtgcttnaaaagnacctgataagggaacactattnctggcatgggtgactgaaaaatttgccgggnattttttnaaaataatttaagggcct

SEQ ID NO: 1298 - DNA, 716 bp, Homo sapiens
  misc_feature (531)..(531): n equals a,t,g, or c
  misc_feature (662)..(662): n equals a,t,g, or c
  misc_feature (709)..(709): n equals a,t,g, or c
  misc_feature (713)..(714): n equals a,t,g, or c
gccaaactgcaggcacaagtgcgcattggtgggaaaggaactgctcgcagaaagaagaaggtggttcatagaacagccacagcagatgacaaaaaacttcagttctccttaaagaagttaggggtaaacaatatctctggtattgaagaggtgaatatgtttacaaaccaaggaacagtgatccactttaacaaccctaaagttcaggcatctctggcagcgaacactttcaccattacaggccatgctgagacaaagcagctgacagaaatgctacccagcatcttaaaccagcttggtgcggatagtctgactagtttaaggagactggccgaagctctgcccaaacaatctgtggatggaaaagcaccacttgctactggagaggatgatgatgatgaagttccagatcttgtggagaattttgatgaggcttccaagaatgaggcaaactgaattgagtcaacttctgaagataaaacctgaagaagttactgggagctgctattttatattatgactgctttttangaaatttttggttatggatctgataaaatctagatctctaatatttttaagcccaagccccttggacactgcagctcttttcaagtttttgcttatacacaattcattctttgcagctaattaagcccaanaagcctgggaatcaaggttggaacaaagattaataaagttcttttgnctannaa

SEQ ID NO: 1299 - DNA, 551 bp, Homo sapiens
  misc_feature (343)..(343): n equals a,t,g, or c
  misc_feature (377)..(377): n equals a,t,g, or c
  misc_feature (391)..(391): n equals a,t,g, or c
  misc_feature (414)..(414): n equals a,t,g, or c
  misc_feature (420)..(421): n equals a,t,g, or c
  misc_feature (477)..(477): n equals a,t,g, or c
  misc_feature (485)..(485): n equals a,t,g, or c
  misc_feature (511)..(511): n equals a,t,g, or c
  misc_feature (537)..(537): n equals a,t,g, or c
  misc_feature (551)..(551): n equals a,t,g, or c
gggggcgggtatgggactagctggcgtgtgcgccctgagacgctcagcgggctatatactcgtcggtggggccggcggtcagtctgcggcagcggcagcaagacggtgcagtgaaggagagtgggcgtctggcggggtccgcagtttcagcagagccgctgcagccatggccccaatcaaggtgggagatgccatcccagcagtggaggtgtttgaaggggagccagggaacaaggtgaacctggcagagctgttcaagggcaagaagggtgtgctgtttggagttcctggggccttcaccctgggatgttccaagacacacctgccagggtttgtggagcangctgaggctcttaaggccaagggagtccaggtgntgcctgctgaatgntaatgatgcctttgtgactggcnagtggnncgacccacaaggcggaaggcaaggtcggcttctggctgatccactggggctttggnaagagacngacttaatactagatgatcgtggttncatctttggaatcactctcagaggtntcatgggggacagn

SEQ ID NO: 1300 - DNA, 583 bp, Homo sapiens
  misc_feature (277)..(277): n equals a,t,g, or c
  misc_feature (354)..(354): n equals a,t,g, or c
  misc_feature (405)..(406): n equals a,t,g, or c
  misc_feature (420)..(420): n equals a,t,g, or c
  misc_feature (426)..(426): n equals a,t,g, or c
  misc_feature (443)..(443): n equals a,t,g, or c
  misc_feature (468)..(468): n equals a,t,g, or c
  misc_feature (525)..(525): n equals a,t,g, or c
  misc_feature (559)..(559): n equals a,t,g, or c
  misc_feature (579)..(579): n equals a,t,g, or c
  misc_feature (581)..(581): n equals a,t,g, or c
ggcacccgtggctttctctgggcgaccgggtcccagactccccccagcacagcagagcgcttccctgcccacccgcggaaaccgccccaggatgcagcaccgaggcttcctcctcctcaccctcctcgccctgctggcgctcacctccgcggtcgccaaaaagaaagataaggtgaagaagggcggcccggggagcgagtgcgctgagtgggcctgggggccctgcacccccagcagcaaggattgcggcgtgggtttccgcgagggcacctgcggngcccagacccagcgcatccggtgcagggtgccctgcaactggaagaaggagtttggagccgactgcaagtaccaagnttgagaactggggtgccgtgtgatggggggcacaggaccaaaagttccggnnaggcacccttgaanaaaggngccgcttacaatgcttnagtgccaggagaacattccggggtnaaccaaagcccttgaacccccaagaaccaagcaaaaggccaaaagccaagaaagggnaagggaaagggattagaaccccaagcctggattnccaaggaacccctggggggnanaa

SEQ ID NO: 1301 - DNA, 439 bp, Homo sapiens
  misc_feature (1)..(2): n equals a,t,g, or c
  misc_feature (22)..(22): n equals a,t,g, or c
  misc_feature (56)..(56): n equals a,t,g, or c
  misc_feature (138)..(138): n equals a,t,g, or c
  misc_feature (175)..(175): n equals a,t,g, or c
  misc_feature (222)..(222): n equals a,t,g, or c
  misc_feature (301)..(301): n equals a,t,g, or c
  misc_feature (362)..(362): n equals a,t,g, or c
  misc_feature (367)..(367): n equals a,t,g, or c
  misc_feature (406)..(406): n equals a,t,g, or c
  misc_feature (409)..(409): n equals a,t,g, or c
  misc_feature (429)..(429): n equals a,t,g, or c
nngaacttcacgggtcactggnggcccactcttccagggtcatcgatgcatcctgngctgtgctgaggcagtgctgtctcgctcagtctttccagaccagcggggcagcacctgggaggcctgtctgaagcatgcagntctgtggtgctgctcggggatggactccatgcacagnccactttttgacacattctcacactgtggctggagacccattttttncatcccatgtggaatgagaatcttgagttgcccacagacagacttgacctttgtgccagaactgtccagagctgtgagntttgttactgaattgcctgtccctgagcttggcctgctggagcatgatgctggaggctgtntgcgnccaggcttgtgctcccttgggagaagggctgctacttancangggaaggcctggccacaggnagtcccccta

SEQ ID NO: 1302 - DNA, 454 bp, Homo sapiens
  misc_feature (242)..(242): n equals a,t,g, or c
  misc_feature (301)..(301): n equals a,t,g, or c
  misc_feature (305)..(305): n equals a,t,g, or c
  misc_feature (315)..(315): n equals a,t,g, or c
  misc_feature (374)..(374): n equals a,t,g, or c
  misc_feature (385)..(385): n equals a,t,g, or c
  misc_feature (426)..(426): n equals a,t,g, or c
  misc_feature (453)..(454): n equals a,t,g, or c
ggcagctgagagccctgctgtgggagagcgaagggggtcaaaggaagacttgaagcacagagggctagggaggtggggtacatttctctgagcagtcagggtgggaagaaagaatgcaagagtggactgaatgtgcctaatggagaagacccacgtgctaggggatgaggggcttcctgggtcctgttccctaccccatttgtggtcacagccatgaagtcaccgggatgaacctatccttncaagtggctcgctccctgtagctctgccttcctctccatatctccttcccctacacctncctncccacacctncctactccctgggcatcttctggcttgactggatggaaggagacttaagaacctaacanttggccatganggcttttcttctttttcttttttttaacaaaaacagaacanaacccaaaaaatggtccaaaaaaaaann

SEQ ID NO: 1303 - DNA, 572 bp, Homo sapiens
  misc_feature (9)..(10): n equals a,t,g, or c
  misc_feature (434)..(434): n equals a,t,g, or c
  misc_feature (447)..(447): n equals a,t,g, or c
  misc_feature (518)..(518): n equals a,t,g, or c
  misc_feature (528)..(528): n equals a,t,g, or c
  misc_feature (546)..(546): n equals a,t,g, or c
  misc_feature (548)..(548): n equals a,t,g, or c
  misc_feature (562)..(562): n equals a,t,g, or c
gcatccttnngattctgaagtatgaagtctgagggaaaccagagtctgtatttttctaaactccctggctgttctgatcggccagttttcggaaacactgacttaggtttcaggaagttgccatgggaaacaaataatttgaactttggaacagggttggaattcaaccacgcaggaagcctactatttaaatccttggcttcaggttagtgacatttaatgccatctagctagcaattgcgaccttaatttaactttccagtcttagctgaggctgagaaagctaaagtttggttttgacaggttttccaaaagtaaagatgctacttcccactgtatgggggagattgaactttccccgtctcccgtcttctgcctcccactccataccccgccaaggaaaggcatgtacaaaaattatgcaattcaagtgntccaagtctctgngtaaccagctcaatggttttggtggaaaaaacattttaaggtttactgataatttgagggtagatggggangatgaaatgncacatctattcacactgncnaacaggttggtggngggtcattgg

SEQ ID NO: 1304 - DNA, 710 bp, Homo sapiens
  misc_feature (672)..(672): n equals a,t,g, or c
  misc_feature (693)..(693): n equals a,t,g, or c
ggttcaggatggcattgagctacaggcaggagatgaggtggagttctcagtgattcttaatcagcgcactggcaagtgcagcgcctgtaatgtttggcgagtctgtgagggccccaaggctgttgcagctcctcgacctgatcggttggtcaatcgcttgaagaatatcactctggatgatgccagtgctcctcgcctaatggttcttcgtcagccaaggggaccagataactcaatggggtttggtgcagaaagaaagattcgtcaagctggtgtcattgactaaccacatccacaaagcacaccattaatccactatgatcaagttggggggaatctggtgaagggttctgaatatctccctcttcatccctcccgaaatctggaatacttattctattgagctattacaccagttttaacaccttcctcgtgttatgtttaaaaaaataaataaatttaagaaaaccattttaaataatgcacagttgcagcctggaaaaacttaaggtggcgccttatagtatcaattttaggagctttatttggtgcatttaacgcaactggtaattgcagaatccactttgcctgtgtaagtgaaaaatatagactggtatcttggtggccctatgaaattctgcacttttcattatatactctaccttcattaantacttctggcaagatgtctgncttaacactcaattgct

SEQ ID NO: 1305 - DNA, 562 bp, Homo sapiens
  misc_feature (2)..(3): n equals a,t,g, or c
  misc_feature (485)..(485): n equals a,t,g, or c
  misc_feature (499)..(499): n equals a,t,g, or c
  misc_feature (524)..(524): n equals a,t,g, or c
  misc_feature (546)..(546): n equals a,t,g, or c
gnntcaaggtgcctgccatcaatgtcaatgactccgtcaccaagagcaagtttgacaacctctatggctgccgggagtccctcatagatggcatcaagcgggccacagatgtgatgattgccggcaaggtagcggtggtagcaggctatggtgatgtgggcaagggctgtgcccaggccccacctctcctccctaagagctaatggcaccaactttgtgattggtttgtcagtgtcccccatcgactctctggggctgatcacttagtttttggcctctgctgcagccgtcatactgttccaaatgtggcagcgggaacagagtaccctcttcaagccccggtcatgatggaggtcccagccacagggaaccatgagctcagtggtcttggaacagctcactaagtcagtccttccttagcctggaagtcagtagtggagtcacaaagcccatgtgttttgccatctaggccttcacctggctgnggacttatacctgngtgcttggtttacaggtccaggggntcttcacccatgacagaatganaaggggctatattgaa

SEQ ID NO: 1306 - DNA, 651 bp, Homo sapiens
  misc_feature (407)..(408): n equals a,t,g, or c
  misc_feature (412)..(412): n equals a,t,g, or c
  misc_feature (423)..(423): n equals a,t,g, or c
  misc_feature (444)..(444): n equals a,t,g, or c
  misc_feature (526)..(526): n equals a,t,g, or c
  misc_feature (528)..(529): n equals a,t,g, or c
  misc_feature (572)..(572): n equals a,t,g, or c
  misc_feature (597)..(597): n equals a,t,g, or c
  misc_feature (618)..(618): n equals a,t,g, or c
  misc_feature (625)..(625): n equals a,t,g, or c
  misc_feature (647)..(647): n equals a,t,g, or c
tgcggtggagccgccaccaaaatgcagattttcgtgaaaacccttacggggaagaccatcaccctcgaggttgaaccctcggatacgatagaaaatgtaaaggccaagatccaggataaggaaggaattcctcctgatcagcagagactgatctttgctggcaagcagctggaagatggacgtactttgtctgactacaatattcaaaaggagtctactcttcatcttgtgttgagacttcgtggtggtgctaagaaaaggaagaagaagtcttacaccactcccaagaagaataagcacaagagaaagaaggttaagctggctgtcctgaaatattataaggtggatgagaatggcaaaattagtcgccttcgtcgagagtgcccttctgatgaatgtggtgtggnngtgnttatggcaagncactttgacagacattattgnggcaaatggtgtctgacttactggttcaacaaaccagaagaccagtaactgtattgaggtaataaaagacatgaactaacanannaaaaaaaaaagggcgggccgctttaaaggatccctcgaggggncccaacttacgccgtgctggccaanggcataagctctctcctaaangggaggnccggaattataaagcttaggcntggg

SEQ ID NO: 1307 - DNA, 632 bp, Homo sapiens
  misc_feature (78)..(79): n equals a,t,g, or c
  misc_feature (174)..(174): n equals a,t,g, or c
  misc_feature (231)..(231): n equals a,t,g, or c
  misc_feature (249)..(249): n equals a,t,g, or c
  misc_feature (263)..(263): n equals a,t,g, or c
  misc_feature (265)..(265): n equals a,t,g, or c
  misc_feature (280)..(280): n equals a,t,g, or c
  misc_feature (331)..(331): n equals a,t,g, or c
  misc_feature (433)..(433): n equals a,t,g, or c
  misc_feature (467)..(467): n equals a,t,g, or c
  misc_feature (498)..(498): n equals a,t,g, or c
  misc_feature (537)..(537): n equals a,t,g, or c
  misc_feature (546)..(546): n equals a,t,g, or c
  misc_feature (552)..(552): n equals a,t,g, or c
  misc_feature (623)..(623): n equals a,t,g, or c
  misc_feature (629)..(629): n equals a,t,g, or c
gctcccccaaacatgtccaccggctccctcagcgatgtggaggaccttcaagaggtggagatgttggaatgtgacggnntgaaaatggattcgaacaaggaatttgtgacttccaacgagagcaccgaggagagctccaactgcgagaatgggtctccccagaagggccgcggnggcctgggcaagaggaggaaggcgcccaccaagaagagccccctgagcggtgtcagncaggaggggaagcaggtncagcgcaacgccgncnacgcgcgagagcggncccgcatgcgagtgctgagcaaggccttctccagactcaagaccaccctgncctgggtgccccccgacaccaagctctccaagctggacacgctcaggctggcgtccagctacatcgcccacttgaggcagatcctggctaacgaccaatacnagaacgggtacattacccgggcaactgacgtggncctttatggtggcgggaaacccgagagtganctgaaagaagtggttgaccgcgagccggttatgtggaancaccgcgtnctgacntgaagtgccaagtctgggaaaggcgcgcttccgggggagcgggccccgggaaggcgaaccctggccttaangctttntgg

SEQ ID NO: 1308 - DNA, 578 bp, Homo sapiens
  misc_feature (392)..(392): n equals a,t,g, or c
  misc_feature (405)..(405): n equals a,t,g, or c
  misc_feature (409)..(409): n equals a,t,g, or c
  misc_feature (432)..(432): n equals a,t,g, or c
  misc_feature (446)..(446): n equals a,t,g, or c
  misc_feature (462)..(462): n equals a,t,g, or c
  misc_feature (469)..(469): n equals a,t,g, or c
  misc_feature (525)..(525): n equals a,t,g, or c
  misc_feature (542)..(542): n equals a,t,g, or c
  misc_feature (560)..(560): n equals a,t,g, or c
  misc_feature (563)..(563): n equals a,t,g, or c
  misc_feature (574)..(574): n equals a,t,g, or c
gagcttgaccactatgctatcatcaagtttccgctgaccactgagtctgccatgaagaagatagaagacaacaacacacttgtgttcattgtggatgttaaagccaacaagcaccagattaaacaggctgtgaagaagctgtatgacattgatgtggccaaggtcaacaccctgattcggcctgatggagagaagaaggcatatgttcgactggctcctgattacgatgctttggatgttgccaacaaaattgggatcatctaaactgagtccagctgctaattctgaatatatatatatatatatcttttcaccataaaaaaaaaaaaaaagggcggccgtttagaggatccttcgagggcccaagcttacgcgggatgcgaaggcataantttctcctatagngagncggattataactagcctggccgncgtttacaacgtcnggatggaaaactggtncttgganctttgggaaggaacttacttttggggggggcataattggacaactacctacggganttaaagctttaaggaantttaaaattttaaggggnaangggtaactaanttga

SEQ ID NO: 1309 - DNA, 581 bp, Homo sapiens
  misc_feature (56)..(56): n equals a,t,g, or c
  misc_feature (95)..(95): n equals a,t,g, or c
  misc_feature (105)..(105): n equals a,t,g, or c
  misc_feature (139)..(139): n equals a,t,g, or c
  misc_feature (156)..(156): n equals a,t,g, or c
  misc_feature (215)..(215): n equals a,t,g, or c
  misc_feature (329)..(329): n equals a,t,g, or c
  misc_feature (420)..(420): n equals a,t,g, or c
  misc_feature (448)..(448): n equals a,t,g, or c
  misc_feature (453)..(453): n equals a,t,g, or c
  misc_feature (496)..(496): n equals a,t,g, or c
  misc_feature (510)..(510): n equals a,t,g, or c
  misc_feature (519)..(519): n equals a,t,g, or c
  misc_feature (555)..(555): n equals a,t,g, or c
  misc_feature (565)..(565): n equals a,t,g, or c
gctgaaaaccccctcagccgcctacctgtgggtgggtacaggagccagcgaggcanagaagacgggggcccaggagctgctcagggtgctgcggncccaacctgngcaggtggcagaaggcagcgagccagatggcttntgggaggccctgggcgntaaggctgcctaccgcacatccccacggctgaaggacaagaagatggatgcccatcctnctcgcctctttgcctgctccaacaagattggacgttttgagatcgaagaggttcctggtgagctcatgcaggaagacctggcaacggatgacgtcatgcttctggacacctggnaccaggtctttgtctgggttggaaaggattctcaagaagaagaacagacagaaccttgacttctgctaagcggtacatcgaagacggaccnaggcaatcgggatcggtggacggccatnaccgnggtgaaaccaaggctttgagccttccttcttttgagggctggnttccttgggttggnatgaatgantactggtctggggacccccttggacaagggcatggntgaactggcntccctgaagaagggca

SEQ ID NO: 1310 - DNA, 492 bp, Homo sapiens
ttctgggaggagggctgcgatgtgtgcacctgcaccgacatggaggatgccgtgatgggcctccgcgtggcccagtgctcccagaagccctgtgaggacagctgtcggtcgggcttcacttacgttctgcatgaaggcgagtgctgtggaaggtgcctgccatctgcctgtgaggtggtgactggctcaccgcggggggactcccagtcttcctggaagagtgtcggctcccagtgggcctccccggagaacccctgcctcatcaatgagtgtgtccgagtgaaggaggaggtctttatacaacaaaggaacgtctcctgcccccagctggaggtccctgtctgcccctcgggctttcagctgagctgtaagacctcagcgtgctgcccaagctgtcgctgtggtaagagcgcatggaggcctgcatgctcaatggcactgtcattgggcccgggaagactgtgatgatcgatgtgtgcacgacctgccgct

SEQ ID NO: 1311 - DNA, 480 bp, Homo sapiens
cacaaggccttgacctgccgagtcagcatgccccatctctctgcacagctgtcccctaaacccaactcacgtttctgtatgtcttaggccagtatcccaaacctcttccacgtcactgttctttccacccattctccctttgcatcttgagcagttatccaactaggatctgccaagtggatactggggtgccactcccctgagaaaagactgagccaggaactacaagctccccccacattcctcccagcctggacctaattcttgagaggggctctctcttcacggactgtgtctggactttgagcaggcttctgccccttgcgttggctctttgctgccagccatcaggtgggggattagagcctggtgtaagtgcgccagactcttccggtttccaaagttcgtgcctgcgaacccaaacctgtgagtctcttctgcatgcaggagtttctcctgggcagctggtcactccccaga

SEQ ID NO: 1312 - DNA, 461 bp, Homo sapiens
ctcgccatggtaaatacatggcttgctgcctgttataccgtggtgacgtggttcccaaagatgtcaatgctgccattgccaccatcaaaaccaagcgtaccatccagtttgtggattggtgccccactggcttcaaggttggcattaattaccagcctcccactgtggtgcctggcggagacctggccaaggtacagagagctgtgtgcatgctgagcaataccacagctgttgccgaggcctgggctcgcctggaccacaagtttgacctgatgtatgccaagcgtgcctttgttcactggtacgttggtgaggggatggaggaaggcgagttttcagaggcccgtgaggacatggctgcccttgagaaggattatgaggaggttggagcagatagtgctgacggagaggatgagggtgaagagtattaacctgtgtgctgcacttttacactcctttgt

SEQ ID NO: 1313 - DNA, 426 bp, Homo sapiens
agcatacctttcactttcagattggctgcagatttggcattagcagcctggaaggaaacctctcctgtcatacccagctgacagttatgaaggatcagaatatgcttctttccatcctcaatgatttcacagtcctgtttggagtgagggttagaaggaaagaaagaacatcatttatatagttattcctacaaatcatcaagatattttatgccttttttcaccctacacaaccaagcaacccctctcctatataattagctaatcttgacttacaggggaagctgtcaaaggctgtcctttcagcttccactggccgtgaacatcaggttcagaaagttcaatttcaaagtgggctgtttcaccaacaaacacctctactccgtacagaggcttttccacttttattagtcgagctgaaatgat

SEQ ID NO: 1314 - DNA, 303 bp, Homo sapiens
ctaataaataggcaggcagttgtgttattggcactattaagtcgtcctttttcttattacccacaaaaacaggtgagaccctaggtttccctgtctatgcctcccgagaaaagagaggcatagttataggaaactggaaagataatgagtggcgccctgaaaggatcatacagtattatgggcctgccacatgggcacaagacggctcatggggataccgaacccccatttacatgctcaatcggatcatacggttgcaggccatcttagaaataattactaatgaaactggcagagctttga

SEQ ID NO: 1315 - DNA, 511 bp, Homo sapiens
attcgatggaagagtttcagctttgttcgtgttatttccctgggactggttgttttcttagtttctgctctttcattgggtcctttcctggccttgaatcagctgcctcaagtcttttcccgactctttcctttcaagaggggcctctgtcatgcatattgggctccaaacttctgggctttgtacaatgctttggacaaagtgctgtctgtcatcgggcccagaggctttctccgatgtctaactctttgtgccttgagctcctttatgtttgggtggcatgttcatgaaaaagccatacttctagcaattctcccaatgagccttttgtctgtgggaaaagcaggagacgcttcgatttttctgattctgaccacaacaggacattattccctctttcctctgctcttcactgcaccagaacttcccattaaaatcttactcatgttactattcaccatatatagtatttcgtcactgaagactttattcagaaaagaaaaacctcttt

SEQ ID NO: 1316 - DNA, 268 bp, Homo sapiens
  misc_feature (241)..(241): n equals a,t,g, or c
  misc_feature (255)..(255): n equals a,t,g, or c
  misc_feature (261)..(261): n equals a,t,g, or c
  misc_feature (263)..(263): n equals a,t,g, or c
  misc_feature (265)..(265): n equals a,t,g, or c
gggcttaagcggagggagtcgagccagcgtcgccgcgatggtgttgttggagagcgagcagttcctgacggagctgaccagacttttccagaagtgccggacgtcgggcagcgtctatatcaccttgaagaagtatgacggtcgaaccaaacccattccaaagaaaggtactgtggagggctttgagcccgcagacaacaagtgtctgttaagagctaccgatgggaagaagaagatcagnactgtggtgagctncaaggnangngaa

SEQ ID NO: 1317 - DNA, 86 bp, Homo sapiens
  misc_feature (69)..(69): n equals a,t,g, or c
taaattaattatagacagagagaggcatttagctgatctcttacccctggtatttcttttttttgttgntttcgtttttttaaatc

SEQ ID NO: 1318 - DNA, 512 bp, Homo sapiens
cgccgaagaagcatcgttaaagtctctcttcaccctgccgtcatgtctaagtcagagtctcctaaagagcccgaacagctgaggaagctcttcattggagggttgagctttgaaacaactgatgagagcctgaggagccattttgagcaatggggaacgctcacggactgtgtggtaatgagagatccaaacaccaagcgctccaggggctttgggtttgtcacatatgccactgtggaggaggtggatgcagctatgaatgcaaggccacacaaggtggatggaagagttgtggaaccaaagagagctgtctccagagaagattctcaaagaccaggtgcccacttaactgtgaaaaagatatttgttggtggcattaaagaagacactgaagaacatcacctaagagattattttgaacagtatggaaaaattgaagtgattgaaatcatgactgaccgaggcagtggcaagaaaaggggctttgcctttgtaacctttgacgaccatga

SEQ ID NO: 1319 - DNA, 426 bp, Homo sapiens
agaagcccctggccccccacgagagctggagagccatgtatatggcttcaaagccacctacggcagggacacactcgtgagcatgtgtggcctgcagttcaggtgatacatttaccagtgttcttgtttgtgtggtgccaggaaattgattttggaaaaagtgaaataacattaaaggtgaatgtgaggcttctacttttatccaaaaggagctatattagctaggctgtttctgatatccaatcattggtttaacaataaaggcaatttgtttaatcagttaacggaaatttcttggcttatgaaagtgaaaagtccagtggtattggcattggcagcaggtgagcaatttcacccagtgtcttctgcctccctctgcgttggtatctgctacatcccaggccaccacctccgaggatgaaaaga

SEQ ID NO: 1320 - DNA, 478 bp, Homo sapiens
cacgcaccggttagtgagacagggctgccacggcaaccgccaagcccccctcaaggtgggacagtaccccggacccatccactcactcctgagagggctccggcccagaatgggaacctcagagaagagctctaaggagaagaaaccccatagcgtcagagaggatatgtctggcttccaagagaaaggaggctccgttttgcaaagtggaggagggacgagggacaggggtttcaccagccagcaacctgggccttgtactgtctgtgtttttaaaaccactaaagtgcaagaattacattgcactgtttctccactttttattttctcttaggcttttgtttctatttcaaacatactttcttggttttctaatggagtatatagtttagtcatttcacagactctggcctcctctcctgaaatccttttggatggggaaagggaaggtggggagggtccgaggggaaggggaccc

SEQ ID NO: 1321 - DNA, 507 bp, Homo sapiens
tcacataatattttgaagaaaacttggctgtcgaaacatttttctctctgactgctgcttgaatgttcttggaggctgtttcttatgtatgggttttttttaatgtgatcccttcatttgaatattaatggctttttccattaaagaataaaatattttggacaatgccgataaatgtatgaagttagtatccacatcataaattcagagtgatgtttagcagtaaatcaatattttgaagtgatacacagatgtctttcctccccacaaacttttttaaacaaaaaacaagacctcttttctttagatggtgccacctatgcccaccacaacagagattttacatggaaaccgggctcagtgagaactgatttcctgcccaatatttgtctttgggctgtctctagtgactaattattaaggaatctagctggttatacagttcaaggctttctatgttgttaatgaacctcaaaatagccgttaagacatgaaatacagcagcag

SEQ ID NO: 1322 - DNA, 419 bp, Homo sapiens
caactgaaaaggtgttgtctacatctactggcctaacaaaaacagtgtataatccagctgctttgaaggctgcacagaaaaccttacttgtttccacctctgcagttgataataatgaagcacagaaaaaaaaacaggaggcattgaaacttcagcaggatgtaaggaaaaggaaacaagaaattttagaaaagcacattgaaacacagaagatgttaatttcaaaactggagaaaaacaaaacaatgaagtctgaagataaagcagaaataatgaaaactttagaggttttgacaaaaaatattaccaagttgaaagatgaggtcaaagctgcttctcctggacgctgtcttccaaaaagtataaaaaccaagactcagatgcagaaggaattacttgacacagaactggatttatat

SEQ ID NO: 1323 - DNA, 371 bp, Homo sapiens
agaggggacccagatgactccacagcatatggaggagctggcagagcaggagattgctaggctagtactgacagatgaggagaagagtctattggagaaggaggggcttattctgcctgagacacttcctctcactaagacagaggaacaaattctgaaacgtgtgcggaggaagattcgaaataaaagatctgctcaagagagccgcaggaaaaagaaggtgtatgttgggggtttagagagcagggtcttgaaatacacagcccagaatatggagcttcagaacaaagtacagcttctggaggaacagaatttgtcccttctagatcaactgaggaaactccaggccatggtgattgagatatcaaaca

SEQ ID NO: 1324 - DNA, 285 bp, Homo sapiens
  misc_feature (15)..(15): n equals a,t,g, or c
  misc_feature (261)..(261): n equals a,t,g, or c
  misc_feature (272)..(272): n equals a,t,g, or c
  misc_feature (279)..(279): n equals a,t,g, or c
  misc_feature (281)..(282): n equals a,t,g, or c
gtgaggacccaacanctaaccacgtttacacgacttgagttttgaaccccgattaatgtctgtacgtcacctttcctagttctgaccctgagccctggggaacaggaaagcgtggctggcctcttgcactgctttgtctccaaaataaactactgaaatcaaaccgcatttcacacgtgtttacacatgttgctcaagtttgttatgtcatactcccagtccttaaaagacgtttaataaaacagctttaccttttaaaanaaaaaaaaaanaaaatananntta

SEQ ID NO: 1325 - DNA, 262 bp, Homo sapiens
  misc_feature (235)..(235): n equals a,t,g, or c
  misc_feature (259)..(262): n equals a,t,g, or c
gcctttattgtgtttgtcattagcctgagtagaaaggcctttaaaatttttttagaaagcatttgaatgcattttgtttggtattgtatttattcaataaagtatttaattagtgctaagtgtgaactggaccctgttgctaagccccagcaagcaatcctaggtagggtttaatccccagtaaaattgccatattgcacatgtcttaatgaagtttgaatgttaaataaattgnatattcactttaaaataaaaaatnnnn

SEQ ID NO: 1326 - DNA, 457 bp, Homo sapiens
gtgaaaaagttgagaagccagatactaaagagaagaaacccgaagccaagaaggttgatgctggtggcaaggtgaaaaagggtaacctcaaagctaaaaagcccaagaaggggaagccccattgcagccgcaaccctgtccttgtcagaggaattggcaggtattcccgatctgccatgtattcagaaaggccatgtacaagaggaagtactcagccgctaaatccaaggttgaaaagaaaaagaaggagaaggttctcgcaactgttacaaaaccagttggtggtgacaagaacggcggtacccgggtggttaaacttcgcaaaatgcctagatattatcctactgaagatgtgcctcgaaagctgttgagccacggcaaaaaacccttcagtcagcacgtgagaaaactgcgagccagcattacccccgggaccattctgatcatcctcactgga

SEQ ID NO: 1327 - DNA, 511 bp, Homo sapiens
gcgcttcgggagccgcggcttatggtgcagacatggccaagtccaagaaccacaccacacacaaccagtcccgaaaatggcacagaaatggtatcaagaaaccccgatcacaaagatacgaatctcttaagggggtggaccccaagttcctgaggaacatgcgctttgccaagaagcacaacaaaaagggcctaaagaagatgcaggccaacaatgccaaggccatgagtgcacgtgccgaggctatcaaggccctcgtaaagcccaaggaggttaagcccaagatcccaaagggtgtcagccgcaagctcgatcgacttgcctacattgcccaccccaagcttgggaagcgtgctcgtgcccgtattgccaaggggctcaggctgtgccggccaaaggccaaggccaaggccaaggccaaggccaaggatcaaaccaaggcccaggctgcagccccagcttcagttccagctcaggctcccaaacgtacccaggcccctacaaaggcttc

SEQ ID NO: 1328 - DNA, 488 bp, Homo sapiens
aagcctaccatgaacagctttctgtagcagagatcaccaatgcttgctttgagccagccaaccagatggtgaaatgtgaccctcgccatggtaaatacatggcttgctgcctgttgtaccgtggtgacgtggttcccaaagatgtcaatgctgccattgccaccatcaaaaccaagcgcagcatccagtttgtggattggtgccccactggcttcaaggttggcatcaactaccagcctcccactgtggtgcctggtggagacctggccaaggtacagagagctgtgtgcatgctgagcaacaccacagccattgctgaggcctgggctcgcctggaccacaagtttgacctgatgtatgccaagcgtgcctttgttcactggtacgtgggtgaggggatggaggaaggcgagttttcagaggcccgtgaagatatggctgcccttgagaaggattatgaggaggttggtgtggattctgttgaagga

SEQ ID NO: 1329 - DNA, 510 bp, Homo sapiens
gttgacaagctatggtaggattaggaaagtttgctgaagaggatctttgacgccacagtgggactagccaggaatgagggagaaatgccctttctggcaattgttggagctggataggtaagttttataagggagtacattttgactgagcacttagggcatcaggaacagtgctacttactgatgggtagactgggagaggtggtgtaacttagttcttgatgatcccacttcctgtttccatctgcttgggatataccagagtttaccacaagtgttttgacgatatactcctgagctttcactctgctgcttctcccaggcctcttctactatggcaggagatgtggcgtgctgttgcaaagttttcacgtcattgtttcctggctagttcatttcattaagtggctacatcctaacatatgcatttggtcaaggttgcagaagaggactgaagattgactgccaagctagtttgggtgaagttcactccagcaagtctcaggccac

SEQ ID NO: 1330 - DNA, 611 bp, Homo sapiens
  misc_feature (430)..(430): n equals a,t,g, or c
  misc_feature (525)..(525): n equals a,t,g, or c
  misc_feature (531)..(531): n equals a,t,g, or c
  misc_feature (554)..(554): n equals a,t,g, or c
  misc_feature (572)..(572): n equals a,t,g, or c
  misc_feature (585)..(585): n equals a,t,g, or c
ggcggcccatgaggcggagcagttgagagcctacctggatggcacgtgcgtggagtggctccgcagatacctggagaacgggaaggagacgctgcagcgcacggacccccccaagacacatatgacccaccaccccatctctgaccatgaggccaccctgaggtgctgggccctgggcttctaccctgcggagatcacactgacctggcagcgggatggggaggaccagacccaggacacggagctcgtggagaccaggcctgcaggggatggaaccttccagaagtggcggctgtggtggtgccttctggagaggagcagagatacacctgccatgtgcagcatgagggtctgccaagcccctcaccctgagatgggagctgtcttcccagcccaccatccccatcgtgggcatcattgctggcctggntctccttggagctgtgatcactggagctgtggtcgctgccgtgatgtggaggaggaagagctccccaatcatctttcctggttcaaaaaagtggngctgangggcttcatctctgctcaacttnatggggcactgagcttgnaacttcttccttncctattaaaatagaaccttagataaa

SEQ ID NO: 1331 - DNA, 667 bp, Homo sapiens
  misc_feature (301)..(301): n equals a,t,g, or c
  misc_feature (392)..(392): n equals a,t,g, or c
  misc_feature (489)..(489): n equals a,t,g, or c
  misc_feature (508)..(508): n equals a,t,g, or c
  misc_feature (540)..(540): n equals a,t,g, or c
  misc_feature (567)..(567): n equals a,t,g, or c
  misc_feature (638)..(638): n equals a,t,g, or c
  misc_feature (642)..(642): n equals a,t,g, or c
  misc_feature (645)..(645): n equals a,t,g, or c
  misc_feature (650)..(650): n equals a,t,g, or c
  misc_feature (653)..(653): n equals a,t,g, or c
ggaaagactgaaggggatgctaaaggagataaagccaaggtgaaggatgaatcacagagaagatctgcgaggttgtctgctaaacctgctcctccaaagccagagcccaagcctaaaaaggcccctgcaaagaagggagagaaggtacccaaagggaaaaagagaaaagctgatgctggcaaggagcgggaaggtgctggagatcccaagtgaagtgtgtgcattttttataactgtacttctggtgactgtacagtttgaaatattctttatcaagttttataaaaatgcagaattttgntttactttttttaagctatggtggtagcacacagaacacttcattggtggttttgggggaaggggtatgtgtcactaatagaatatctctnaagctggattgatccggggaaaacatcttttccttctaggtttgagagactttctcttggctccaggaagagggaattcctgctttgacaccatggncacttgccaaaaccttgtngtatggaaaaccaaatcgttttaggctctttnctttctcttcacataactaaccttaanccaacttttttggacctgacccggcatggtaccaagggctgcattggcttccggatccctaatgccctgcnaaancanggtcnttnagatatggacttgg

SEQ ID NO: 1332 - DNA, 500 bp, Homo sapiens
  misc_feature (99)..(99): n equals a,t,g, or c
  misc_feature (161)..(161): n equals a,t,g, or c
  misc_feature (183)..(183): n equals a,t,g, or c
  misc_feature (193)..(193): n equals a,t,g, or c
  misc_feature (233)..(233): n equals a,t,g, or c
  misc_feature (246)..(246): n equals a,t,g, or c
  misc_feature (253)..(253): n equals a,t,g, or c
  misc_feature (265)..(265): n equals a,t,g, or c
  misc_feature (287)..(287): n equals a,t,g, or c
  misc_feature (406)..(406): n equals a,t,g, or c
  misc_feature (481)..(481): n equals a,t,g, or c
  misc_feature (497)..(497): n equals a,t,g, or c
gaaaaaggggcatcaactccagctggattattttggagcctgcaaatctattcctacttgtacggactttgaagtgattcagtttcctctacggatganagactggctcaagaatatcctcatgcagctttatgaagccaactctgaacacgctggttatntaaatgagaagcagagaaatanagtcaagaanatttacctggatgaaaagaggcttttggctggggaccatnccatttgcccttntcttaangggactttaagnaaaaactaccacatgtatgtgnatcctgtgcactggcagtttagtgaacttgaccaacaccctatggatagagtcttgacacattctgaacttgctcctctgcgagcatctctggtgcccatggaacactgcataacccgnttctttgaggagtgtgaccccaacaaggataagcacatcaccctgaaggagtggggccactgctttggaattaangaagaggacatagatnatt

SEQ ID NO: 1333 - DNA, 481 bp, Homo sapiens
  misc_feature (11)..(11): n equals a,t,g, or c
  misc_feature (13)..(13): n equals a,t,g, or c
  misc_feature (21)..(21): n equals a,t,g, or c
  misc_feature (25)..(25): n equals a,t,g, or c
  misc_feature (37)..(37): n equals a,t,g, or c
  misc_feature (188)..(188): n equals a,t,g, or c
  misc_feature (465)..(465): n equals a,t,g, or c
  misc_feature (470)..(470): n equals a,t,g, or c
  misc_feature (474)..(474): n equals a,t,g, or c
  misc_feature (477)..(477): n equals a,t,g, or c
  misc_feature (481)..(481): n equals a,t,g, or c
gctaccctctngncagctgtntacnacggcttgtctntccctcacagtaccaaacgattccctggttatgattctgaaagcaaggaatttaatgcagaagtacatcggaagcacatcatgggccagaatgttgcagattacatgcgctacttaatggaagaagatgaagatgcttacaagaaaccagntctctcaatacataaagaacagcgtaactccagacatggaggagatgtataagaaagctcatgctgctatacgagagaatccagtctatgaaaagaagcccaagaaagaagttaaaaagaagaggtggaaccgtcccaaaatgtcccttgctcagaagaaggatcgggtagctcaaaagaaggcaagcttcctcagagctcaagagccgggcttgctgagagctaaacccagcaattttctatgatttttttcagatatagataataaacttatgancagcnactntanaaan

SEQ ID NO: 1334 - DNA, 594 bp, Homo sapiens
  misc_feature (292)..(292): n equals a,t,g, or c
  misc_feature (309)..(309): n equals a,t,g, or c
  misc_feature (314)..(314): n equals a,t,g, or c
  misc_feature (352)..(352): n equals a,t,g, or c
  misc_feature (379)..(379): n equals a,t,g, or c
  misc_feature (387)..(387): n equals a,t,g, or c
  misc_feature (391)..(391): n equals a,t,g, or c
  misc_feature (399)..(399): n equals a,t,g, or c
  misc_feature (421)..(421): n equals a,t,g, or c
  misc_feature (446)..(446): n equals a,t,g, or c
  misc_feature (547)..(547): n equals a,t,g, or c
  misc_feature (561)..(561): n equals a,t,g, or c
  misc_feature (568)..(568): n equals a,t,g, or c
  misc_feature (574)..(574): n equals a,t,g, or c
  misc_feature (577)..(577): n equals a,t,g, or c
gagcaggctccgggctgaagattgcttctcttctctcctccaaggtctagtgacggagcccgcgcgcggcgccaccatgcggcagaaggcggtatcgcttttcttgtgctacctgctgctcttcacttgcagtggggtggaggcaggtaagaaaaagtgctcggagagctcggacagcggctccgggttctggaaggccctgaccttcatggccgtcggaggaggactcgcagtcgccgggctgcccgcgctgggcttcaccggcgccggcatcgggggccaattcggtggnttgccttcgcttatganctggnctgcgatccttgaatgggggcggcgtgccccggccggnggggctaagtgggccacggcttgcaanagcccttngggngccttggntgggcaagcaaagcggtccggnccattaagggtaaaataaattgggntggcccccttggaatgggggccttaacggcccaaccccaaccaaaggtaaatccttcggaataaggttggaagggaaggggaatggaaggggaagttaagnccccaaggccccanttttttnaacccnttnaaacccccccccaaaaa

SEQ ID NO: 1335 - DNA, 681 bp, Homo sapiens
  misc_feature (304)..(304): n equals a,t,g, or c
  misc_feature (330)..(330): n equals a,t,g, or c
  misc_feature (439)..(439): n equals a,t,g, or c
  misc_feature (476)..(476): n equals a,t,g, or c
  misc_feature (482)..(482): n equals a,t,g, or c
  misc_feature (548)..(548): n equals a,t,g, or c
  misc_feature (550)..(550): n equals a,t,g, or c
  misc_feature (574)..(574): n equals a,t,g, or c
  misc_feature (609)..(609): n equals a,t,g, or c
  misc_feature (633)..(633): n equals a,t,g, or c
  misc_feature (661)..(661): n equals a,t,g, or c
  misc_feature (680)..(681): n equals a,t,g, or c
gctgggggcttagttgggctggagctgttggactgaggttcttccttatggctccatgcttctccctccctcccttcaggggccggtgagcccaacttcgatggcctggagagtaatccatacagaagccggaagcagcgccatgagtgggaggtgaaggccctgctagagaaggtacctgcagagcttatttgtctggacccacgagccctggccgaggtggatgtcatctccctggagcagggaaagaaggagcagatagagaggctgggctatgacccgcaggctaaggctccctttcagnccaaggccaagcaagaagggccgaantccacggcaagcctggtgaagaaggaagaaggaaggtcatggatgaggaacacagggtaaatgagcattgcatggcccggccttccacaggctgcaccctcctgcttgngcctctgcccttgtcagcctgccacttctcactctgngcctgngtcctccccgtctccggtccccaggacaaggtccgcagagccttcacagcagcatcataaggaagncnaagccaagcccacgggggcccggncatctgcctggacagatttgtgcgcttagccaganttcagggttgcctgggaacagctnttcccaagaatacctggaaggaaaaggngttcctggaaacaaggagnn

SEQ ID NO: 1336 - DNA, 554 bp, Homo sapiens
  misc_feature (58)..(59): n equals a,t,g, or c
  misc_feature (322)..(322): n equals a,t,g, or c
  misc_feature (330)..(330): n equals a,t,g, or c
  misc_feature (343)..(343): n equals a,t,g, or c
  misc_feature (371)..(371): n equals a,t,g, or c
  misc_feature (430)..(430): n equals a,t,g, or c
  misc_feature (505)..(505): n equals a,t,g, or c
  misc_feature (511)..(511): n equals a,t,g, or c
  misc_feature (518)..(518): n equals a,t,g, or c
  misc_feature (542)..(542): n equals a,t,g, or c
  misc_feature (549)..(549): n equals a,t,g, or c
ggggaggtggtcatgggttcctcaacatggtatgcaattggcattgcctacaaatcanntccaaagaatgaatggattggcaagaatgcctcctcatgggtcttctctcgctgcaatagtaacttcgtggtgaattttctaaacttccatggtttacatatttatatatgactaccaagatggagcaatccacggatggacttttgaataaactcaaatatttgatactgcttcctccaaggaatggagagtgtcaggcaggtaggtaagaaccactcctacacttatttctagcttctgaacccactgcagccttggaccnatggctgnatttgctgtgtgntacaggttgccaaactgattgccatcangtcagacaaaactgccttttatggtgtagtctgccagcttcagacatatgctgtaatgntggtaatggctagactatttattagactattggtggactattttttatcaaatgctttaccccacgcctggttgnaatggnaagcttntggaccaatagtggctctctaagngacgganatatg

SEQ ID NO: 1337 - DNA, 594 bp, Homo sapiens
  misc_feature (370)..(370): n equals a,t,g, or c
  misc_feature (539)..(539): n equals a,t,g, or c
gggaaccctgcggagggacttcaatcacatcaatgtagaactcagccttcttggaaagaaaaaaaagaggctccgggttgacaaatggtggggtaacagaaaggaactggctaccgttcggactatttgtagtcatgtacagaacatgatcaagggtgttacactgggcttccgttacaagatgaggtctgtgtatgctcacttccccatcaacgttgttatccaggagaatgggtctcttgttgaaatccgaaatttcttgggtgaaaaatatatccgcagggttcggatgagaccaggtggtgcttggtcagtatcttcaggcccagaaggatgaattaatccttgaaggaaatgacattgagcttgnttcaaattcagcggctttgattcagcaagccacaacagttaaaaacaaggatatcaggaaatttttggatggtatctatgtctctgaaaaaggaactgttcagcaggctgatgaataagatctaagagttacctgctacagaaagaagatgccagatgacacttaaganctacttgggataattaaatgatgcaataaaagacctatggatttggaaaaaaaaa

SEQ ID NO: 1338 - DNA, 730 bp, Homo sapiens
  misc_feature (102)..(102): n equals a,t,g, or c
  misc_feature (181)..(181): n equals a,t,g, or c
  misc_feature (277)..(277): n equals a,t,g, or c
  misc_feature (300)..(300): n equals a,t,g, or c
  misc_feature (311)..(311): n equals a,t,g, or c
  misc_feature (334)..(334): n equals a,t,g, or c
  misc_feature (336)..(336): n equals a,t,g, or c
  misc_feature (339)..(339): n equals a,t,g, or c
  misc_feature (535)..(535): n equals a,t,g, or c
  misc_feature (561)..(561): n equals a,t,g, or c
  misc_feature (592)..(592): n equals a,t,g, or c
  misc_feature (600)..(600): n equals a,t,g, or c
  misc_feature (606)..(606): n equals a,t,g, or c
  misc_feature (622)..(622): n equals a,t,g, or c
  misc_feature (630)..(630): n equals a,t,g, or c
  misc_feature (675)..(675): n equals a,t,g, or c
  misc_feature (700)..(700): n equals a,t,g, or c
  misc_feature (710)..(710): n equals a,t,g, or c
  misc_feature (718)..(718): n equals a,t,g, or c
  misc_feature (730)..(730): n equals a,t,g, or c
ggcgcccagagagacaccagagaacccaccatggccccctttgagcccctggcttctggcatcctgttgttgctgtggctgatagcccccagcagggcctgnacctgtgtcccaccccacccacagacggccttctgcaattccgacctcgtcatcagggccaagttcgtggggacaccanaagtcaaccagaccaccttataccagcgttatgagatcaagatgaccaagatgtataaagggttccaagccttaggggatgccgctgacatccggntcgtctacacccccgccatggangagtgttgccngatctttccacagggtccacacngnaangaggagtttctcattgctggaaaactgcaggatggactcttgcacatcactacctgcagttttgtggctccctggaacagcctgagcttagctcagcgccggggcttcaccaagacctacactggtgctgtgaggaatgcacagtgtttcctgtttatccatcccctgcaactgcatagtggcactcaatgcttgnggacggaccagctcctccaggctttnaaaagggcttccagtcccgcaccttgcctgntgcttggnagccanggctggcaactggaanccttgcgncccagatagcctgaatctggccggaatggaacttaacctggcagnggccacctggtcccattccatcttntttcggcaangaataagngttccccccgcn

SEQ ID NO: 1339 - DNA, 681 bp, Homo sapiens
  misc_feature (237)..(237): n equals a,t,g, or c
  misc_feature (271)..(271): n equals a,t,g, or c
  misc_feature (332)..(332): n equals a,t,g, or c
  misc_feature (429)..(429): n equals a,t,g, or c
  misc_feature (572)..(572): n equals a,t,g, or c
  misc_feature (611)..(611): n equals a,t,g, or c
  misc_feature (676)..(676): n equals a,t,g, or c
ggggactagctggcgtgtgcgccctgagacgctcagcgggctatatactcgtcggtggggccggcggtcagtctgcggcagcggcagcaagacggtacagtgaaggagagtgggcgtctggcggggtccgcagtttcagcagagccgctgcagccatggccccaatcaaggtgggagatgccatcccagcagtggaggtgtttgaaggggagccagggaacaaggtgaacctggcanagctgttcaagggcaagaagggtgtgctgtttgnagttcctggggccttcacccctggatgttccaagacacacctgccagggtttgtggagcangctgaggctctgaaggccaagggagtccaggtggtggcctgtctgagtgttaatgatgcctttgtgactggcgagtggggccgagcccacaaggcgnaaggcaaggttcggctcctggctgatcccactggggcctttgggaaggagacagacttattactagatgattcgctggtgtccatctttgggaatcgacgtctcaagaggttctccatggtggtacaggatggcatagtgaangccctgaatgtggaaccagatggcacaggccttaactgnagcctggcacccaatatcatcttacagcttttaaggccctgggccagaatacttcttcaaccttncttat

SEQ ID NO: 1340 - DNA, 676 bp, Homo sapiens
  misc_feature (574)..(574): n equals a,t,g, or c
  misc_feature (590)..(590): n equals a,t,g, or c
  misc_feature (600)..(600): n equals a,t,g, or c
  misc_feature (636)..(636): n equals a,t,g, or c
gcttttttttttttcagactgaccgcggggcagctgcggagcatgtcgaccccggcccggaggaggctcatgcgggatttcaagcggttacaagaggacccacctgtgggtgtcagtggcgcaccatctgaaaacaacatcatgcagtggaatgcagttatatttggaccagaagggacaccttttgaagatggtacttttaaactagtaatagaattttctgaagaatatccaaataaaccaccaactgttaggtttttatccaaaatgtttcatccaaatgtgtatgctgatggtagcatatgtttagatatccttcagaatcgatggagtccaacatatgatgtatcttctatcttaacatcaattcagtctctgctggatgaaccgaatcctaacagtccagccaatagccaggcagcacagctttatcaggaaaacaaacgagaatatgagaaaagagtttcggccattgttgaacaaagctggaatgattcataatagacaactggtctgttaatctttttcatcattggtgtgtataatttacctctcattagaaaggctaacaaantttaagtgccacaggntttaaggatntgcagaaaaaaaagaaaaagtccttcagtttagaanctacaaaagcttggggatcttggataaaggccttttaatg

SEQ ID NO: 1341 - DNA, 451 bp, Homo sapiens
  misc_feature (267)..(267): n equals a,t,g, or c
  misc_feature (282)..(282): n equals a,t,g, or c
  misc_feature (374)..(374): n equals a,t,g, or c
  misc_feature (407)..(407): n equals a,t,g, or c
  misc_feature (438)..(438): n equals a,t,g, or c
  misc_feature (440)..(440): n equals a,t,g, or c
gctgtaaatgtgacattgatttgctcttactacagcttcagtgattgggggaggaaaagtcccaacccaatgggctcaaacttctaaggggtactcctctcatccccttatccttctccctcgacattttctccctctttcttcccatgaccccaaagccaagggcaacagatcagtaaagaacgtggtcagagtagaacccctgaagtattttttaatcctacctcaaaatttaacagttacctgagagatttaacattatctagntcattgaatcattgnatgtggtcatggataaattgccaccttggaattcgctttctaaaggaaatcaaatgaatggaggaactttccaaacaccactttacttgggntatatagccaatataactatctctactgaatgncattgaaaaactaaaaaattaaacttatttncnaataggtaaaa

SEQ ID NO: 1342 - DNA, 676 bp, Homo sapiens
  misc_feature (324)..(324): n equals a,t,g, or c
  misc_feature (504)..(504): n equals a,t,g, or c
  misc_feature (533)..(533): n equals a,t,g, or c
  misc_feature (542)..(542): n equals a,t,g, or c
  misc_feature (576)..(576): n equals a,t,g, or c
  misc_feature (587)..(587): n equals a,t,g, or c
  misc_feature (598)..(598): n equals a,t,g, or c
  misc_feature (610)..(610): n equals a,t,g, or c
  misc_feature (651)..(651): n equals a,t,g, or c
  misc_feature (674)..(674): n equals a,t,g, or c
gggcggtggcacatcacacaacagctgcattcatccgggtcgtgggctcggagtttgtacagaagtatctgggtgagggcccccgcatggtccgggatgtgttccgcctggccaaggagaatgcacctgccatcatcttcatagacgagattgatgccatcgccaccaagagattcgatgctcagacaggggccgacagggaggttcagaggatcctgctggagctgctgaatcagatggatggatttgatcagaatggcaatggcaaggtaatcatggccacaaacagagcagacaccctggatccgcccttgctacggcagnacggctggaccgtaaaattgaatttccacttcctgaccgccgccagaagagattgattttctccactatcactagcaagatgaacctctctgaggaggttgacttggaagactatgtggcccggccagataagatttcaggagctgatattaactccatctgtcaggagaagtggaatgntggctgtcccgtgaaaaccgctacattgncctgcccangacttcgagaaagcataccagactgtcatcaagnaaggacagcangaagcatgagntttacaagtgancctttcctttccttcacaaaacaattcaaggcttgggcttnttttgaacccccaggactttttncc

SEQ ID NO: 1343 - DNA, 378 bp, Homo sapiens
  misc_feature (173)..(173): n equals a,t,g, or c
  misc_feature (255)..(255): n equals a,t,g, or c
  misc_feature (318)..(318): n equals a,t,g, or c
  misc_feature (346)..(346): n equals a,t,g, or c
  misc_feature (368)..(368): n equals a,t,g, or c
  misc_feature (370)..(370): n equals a,t,g, or c
  misc_feature (378)..(378): n equals a,t,g, or c
gtgctggctagcttgtagaatcggtgataactaatgaatatcccctttcttctacctgctggtatgaaacagtgagacggtttaagcggaacatcttactgccattgactgccagcatttggctcggagtcacttggctgtgacccagcccttcggtcaaagatggacaaacngagatccgaaccatggtctctatcctaaaccgagaacaaaaagagggagtaggggtcagggaagtcaaagatgcatccctgnagttcttccttagcaggcaagcagccgtgcaccaatggacattggccaaaagcaattctgttnggccaggacagctgttcagggactctgnaggggtgacatggatctttccntngcaggagn

SEQ ID NO: 1344 - DNA, 558 bp, Homo sapiens
  misc_feature (499)..(499): n equals a,t,g, or c
gcacgttctcatttccctgccagcagacgagtctggacgcgggaatcttgatcacgtggacaaagggttttaaggcaacagactgcgtgggccacgatgtagtcaccttactaagggatgcgataaaaaggagagaggaatttgacctggacgtggtggctgtggtcaacgacacagtgggcaccatgatgacctgtgcttatgaggagcccacctgtgaggttggactcattgttgggaccggcagcaatgcctgctacatggaggagatgaagaacgtggagatggtggagggggaccaggggcagatgtgcatcaacatggagtggggggcctttggggacaacgggtgtctggatgatatcaggacacactacgacagactggtggacgaatattccctaaatgctgggaaacaaaggtatgagaagatgatcagtggtatgtacctgggtgaaatcgtccgcaacatcttaatcgacttcaccaagaaagggantcctctttcgagggcagatctcttagacgcttaaaacccggggcatctttgagaccaag

SEQ ID NO: 1345 - DNA, 747 bp, Homo sapiens
  misc_feature (16)..(16): n equals a,t,g, or c
  misc_feature (600)..(600): n equals a,t,g, or c
  misc_feature (691)..(691): n equals a,t,g, or c
  misc_feature (697)..(698): n equals a,t,g, or c
  misc_feature (719)..(719): n equals a,t,g, or c
  misc_feature (733)..(733): n equals a,t,g, or c
gctctgcttttccacnaaaactccatcttagtgaattttaaattatccagagatgtcaaactgccaaataaaaatatttcagtagtctttgcatcagcttaccttgtaccagaaacatttccaatttactatcaaattatagtaactgagcctgtgtgaagtatctcatcattttcgaaaggaacaccttgtgtgatgccagtgagcatttctaaaaagggtgtgaggtagaggtaaaaataaggtgagagaccatttcagaatgcactgttgctcaaaaaggtgatctggttctttcttcagagatttctacggggatagaaaattgggagtctgccctcattaatctgtgattccacctcttgcaccaaatcaatatctatttgttgagcacttattgattaagaccttgcatatgtctgtccattttgatttgagatacaactttttgtgtgggttgaatgacaaatcactccaaacaaagctgggcacagagaatcagctaggagaccagttattcagggtccatttctcttggatgtaaaggagtcctgggtaaaatgtggctgtaacctaaaccaactagtccttgtgatttgnttctgccctctgtggtttcctgttgtcaaatgctaaatgtgtgttttgcagtcatgaactaaagcacaaaaggatcatgagacattgtagncatatnnctgggggacactttggagcanaaaccttgcatggnaataaaaaatttcc

SEQ ID NO: 1346 - DNA, 498 bp, Homo sapiens
  misc_feature (1)..(1): n equals a,t,g, or c
  misc_feature (19)..(19): n equals a,t,g, or c
  misc_feature (34)..(34): n equals a,t,g, or c
  misc_feature (41)..(41): n equals a,t,g, or c
  misc_feature (74)..(74): n equals a,t,g, or c
  misc_feature (102)..(102): n equals a,t,g, or c
  misc_feature (105)..(105): n equals a,t,g, or c
  misc_feature (110)..(110): n equals a,t,g, or c
  misc_feature (119)..(119): n equals a,t,g, or c
  misc_feature (127)..(127): n equals a,t,g, or c
  misc_feature (137)..(137): n equals a,t,g, or c
  misc_feature (146)..(146): n equals a,t,g, or c
  misc_feature (160)..(160): n equals a,t,g, or c
  misc_feature (189)..(189): n equals a,t,g, or c
  misc_feature (207)..(207): n equals a,t,g, or c
  misc_feature (237)..(237): n equals a,t,g, or c
  misc_feature (242)..(242): n equals a,t,g, or c
  misc_feature (246)..(246): n equals a,t,g, or c
  misc_feature (256)..(256): n equals a,t,g, or c
  misc_feature (268)..(268): n equals a,t,g, or c
  misc_feature (273)..(273): n equals a,t,g, or c
  misc_feature (277)..(277): n equals a,t,g, or c
  misc_feature (281)..(281): n equals a,t,g, or c
  misc_feature (294)..(294): n equals a,t,g, or c
  misc_feature (296)..(296): n equals a,t,g, or c
  misc_feature (326)..(326): n equals a,t,g, or c
  misc_feature (347)..(347): n equals a,t,g, or c
  misc_feature (352)..(352): n equals a,t,g, or c
  misc_feature (356)..(356): n equals a,t,g, or c
  misc_feature (375)..(375): n equals a,t,g, or c
  misc_feature (381)..(381): n equals a,t,g, or c
  misc_feature (391)..(391): n equals a,t,g, or c
  misc_feature (398)..(398): n equals a,t,g, or c
  misc_feature (411)..(411): n equals a,t,g, or c
  misc_feature (418)..(418): n equals a,t,g, or c
  misc_feature (445)..(445): n equals a,t,g, or c
  misc_feature (450)..(451): n equals a,t,g, or c
nagtagggtcgtgatctancctgaacaagaggangaaggangagaaaaagaagcgtgagttgttttagaggggntgtacaggacaagaccgaagactgaggnatntgatnattgatggntctaaaanattttaaggnaaggatggnaggccaagatgttnatttgggctatttagctaatggttgactntatgttatctttaatgtntgaagcccctttttccaaagggaataaaantaagntgcnctacttgccntggggaattccnggttnaatngaantgcgcaggtcacncnttccataaaaattgtaaacattgaactgancacattacctataatggattnggttnatgncttaatgaagcaaagctgntttggncagacaagtntaccccnaacttttatatantataccngaaggctatcacactttgtgaaattcncttgnntaacctgaatttgcctttcatgggtggtacatggcatactggtattg

SEQ ID NO: 1347 - DNA, 426 bp, Homo sapiens
  misc_feature (3)..(3): n equals a,t,g, or c
  misc_feature (342)..(342): n equals a,t,g, or c
  misc_feature (384)..(384): n equals a,t,g, or c
  misc_feature (388)..(388): n equals a,t,g, or c
  misc_feature (406)..(406): n equals a,t,g, or c
  misc_feature (425)..(425): n equals a,t,g, or c
ggnccttctggcttacttctgggtgtgaaacaactaattgtcggtgttaacaaaatggattccactgagccaccctacagccagaagagatatgaggaaattgttaaggaagtcagcacttacattaagaaaattggctacaaccccgacacagtagcatttgtgccaatttctggttggaatggtgacaacatgctggagccaagtgctaacatgccttggttcaagggatggaaagtcacccgtaaggatggcaatgccagtggaaccacgctgcttgaggctctggactgcatcctaccaccaactcgtccaactgacaagcccttgcgcctgcctctncaggatgtctacaaaattggtggtatttggtactgttcctgntggncgaattggagactggggnttttaaaccccggtttggng

SEQ ID NO: 1348 - DNA, 625 bp, Homo sapiens
  misc_feature (504)..(504): n equals a,t,g, or c
  misc_feature (520)..(520): n equals a,t,g, or c
  misc_feature (603)..(603): n equals a,t,g, or c
  misc_feature (620)..(623): n equals a,t,g, or c
gcactggttgacagtactgaggcttaaggcagctggactctcttgctggtgacctggcatcctcaattgtttcctcctgaagtggaagctggggccttagactctgccctggtgacaccagcaattatgactttgtctacccttcctccccagttattgttgcagattctggttaagcagaggcttcagaaccactgaacttgaaacttaccctctagggatgcaggtgggatgtccagggactataggtttgggaaaaccataccttaaggttggtcagcagtcagacaactctaatgtgtgtagtgataagagattcaagtaacatcagttctcctccttttcatgcttttccttcccaggtgcagcctgtgattctgatggggactggtaaatctgtgcctctgcctcctaggacttattttcccaggaggccatttacaaggggatctggatgacctgctgatggagatccagcttgccagggacttaagtttatcctgntttggttgctactggntacaaattctattttctgtacaattagtcagactaaaggtttcactggggttggttggcaaaacaaattaaaccaaaagtaanggtttttaaaaaaaaannnnaa

SEQ ID NO: 1349 - DNA, 743 bp, Homo sapiens
  misc_feature (478)..(478): n equals a,t,g, or c
  misc_feature (523)..(523): n equals a,t,g, or c
  misc_feature (685)..(685): n equals a,t,g, or c
  misc_feature (724)..(724): n equals a,t,g, or c
gggagagccctcaggaaatcgccaggaaagtagaaggtcagctggggtgcaagccggaagtcaccatcgagtgcacgggggcagaggcctccatccaggcgggcatctacgccactcgctctggtgggaccctcgtgcttgtggggctgggctctgagatgaccaccgtacccctactgcatgcagccatccgggaggtggatatcaagggcgtgtttcgatactgcaacacgtggccagtggcgatttcgatgcttgcgtccaagtctgtgaatgtaaaacccctcgtcacccataggtttcctctggagaaagctctggaggcctttgaaacatttaaaaagggattggggttgaaaatcatgctcaagtgtgaccccagtgaccagaatccctgatgttaatgggctctgccctcatccccacagtcttgggatctcagggcacaatggctggacatgggtgggctctgatgcanaactttctcttttgaatggtaagaataactaatacaattcattgngaacagaaatccttaagcagaggaattggtgtgccttaaagataccaatctgggatagtttgggggaacttgtagccagaatgcctggtcatgctgagcaaagttcagcaagtagagcaaagttttggcaaggcaggtgccaaggaacttcccctttctttnctgggaagtggcctttcatttgagggaaaggaaaatctngggcccttggggtttttcc

SEQ ID NO: 1350 - DNA, 564 bp, Homo sapiens
attttttaatgaataacaaatgtgccaccaatcacctagaactattagggaggctccaaagcatcaaaggctaaactaaacaccatggctggagagggaatgaactggaggagggaaaggaggaaagactggggggacccagagctctccacccttgtcctctcgctccagcctggtctgttcttgctcattcagaaactggttggagtaaaaagattccccttttcaagatcgccaaaagtggaactgatcgctttcgaagggactccttcaggaagaaggagaaaaattcgagaaacttacctgtttctctccctggaatgccttctgaaccctgagatttactttcctcaataaagaagctcgcctcgcccacccagcccactcttcctaggagcagcgaggatcgctgtccctccagcacatactagtcaactcgagtcatctgaatatgggcatattgggcacatatttctttgtaatggttcctctcctattacaatatggatctgttgtttcatcgttagattgaaagctctctaagattatggtaacagtgttaca

SEQ ID NO: 1351 - DNA, 733 bp, Homo sapiens
  misc_feature (499)..(499): n equals a,t,g, or c
  misc_feature (693)..(693): n equals a,t,g, or c
  misc_feature (722)..(722): n equals a,t,g, or c
gcggacgcgtgggcagattcaagcccaggaggctgaaaacgagggcccaggaccagaatcgctgcctcctctccccagccccaccttgtacacacagtgtttcattgctccgcgtcttcccagccccagaaaccggctaaaggaccctgcaccatgagagccgaggcctggaggagcccgggtcaggctggggaggaacagaactgggccctcccagagcacctccgcttcccccctgcttccccaggtctctatccagagagagtccccaggtacaacaaatgctaattagatgacagcaaattaaccccctggaggcttctcctggcagagcctccctggggccggggcaggctgtggatggggcggagcagggcagaagatggactgggggagggggcagagagaggagaccaaaatgaggtggtggcacagggtggggcaaggagatcctctctaaggcctctggggtctttgctggcccatcctagggggcggngaggggacgtaaatccctaactttaagcccgacttgaggctgaagagcagctggaagtttgggtttggtggtttgggggcccggggcaagccaactgtattggggcaggacagacagactaatgtagtgaggggaactttagcttaagcttactgggaagggatgccaacttggttggactatgggaccaaaancgggtccccacgcccttgcttgaattctnggggcctgggc

SEQ ID NO: 1352 - DNA, 499 bp, Homo sapiens
  misc_feature (237)..(237): n equals a,t,g, or c
  misc_feature (352)..(352): n equals a,t,g, or c
  misc_feature (388)..(388): n equals a,t,g, or c
  misc_feature (434)..(434): n equals a,t,g, or c
  misc_feature (481)..(482): n equals a,t,g, or c
  misc_feature (489)..(489): n equals a,t,g, or c
  misc_feature (497)..(497): n equals a,t,g, or c
ggtgaatatgaaaaggaaaaactgaatgaacggcttgcaaaactttcagatggagtggctgtgctgaaggttggtgggacaagtgatgttgaagtgaatgaaaagaaagacagagttacagatgcccttaatgctacaagagctgctgttgaagaaggcattgttttgggagggggttgtgccctccttcgatgcattccagccttggactcattgactccagctaatgaagatcanaaaattggtatagaaattattaaaagaacactcaaaattccagcaatgaccattgctaagaatgcaggtgttgaaggatctttgatagttgagaaaattatgcaaaggtcctcanaaagttggttattaagctatggcttggagaatttgnggaatatgggtgggaaaaaagggaatcattggaccccaaccaaaanggtttgtgaagaaactggcttttaatttgggaatgccttgctttggnngtggggncctcttcntg

SEQ ID NO: 1353 - DNA, 543 bp, Homo sapiens
  misc_feature (3)..(3): n equals a,t,g, or c
  misc_feature (6)..(6): n equals a,t,g, or c
  misc_feature (10)..(10): n equals a,t,g, or c
  misc_feature (20)..(20): n equals a,t,g, or c
  misc_feature (37)..(37): n equals a,t,g, or c
  misc_feature (42)..(42): n equals a,t,g, or c
  misc_feature (78)..(78): n equals a,t,g, or c
  misc_feature (84)..(84): n equals a,t,g, or c
  misc_feature (89)..(89): n equals a,t,g, or c
  misc_feature (94)..(95): n equals a,t,g, or c
  misc_feature (97)..(97): n equals a,t,g, or c
  misc_feature (110)..(110): n equals a,t,g, or c
  misc_feature (113)..(113): n equals a,t,g, or c
  misc_feature (115)..(115): n equals a,t,g, or c
  misc_feature (151)..(151): n equals a,t,g, or c
  misc_feature (197)..(197): n equals a,t,g, or c
  misc_feature (208)..(208): n equals a,t,g, or c
  misc_feature (224)..(225): n equals a,t,g, or c
  misc_feature (240)..(240): n equals a,t,g, or c
  misc_feature (261)..(261): n equals a,t,g, or c
  misc_feature (270)..(270): n equals a,t,g, or c
  misc_feature (272)..(272): n equals a,t,g, or c
  misc_feature (279)..(279): n equals a,t,g, or c
  misc_feature (282)..(283): n equals a,t,g, or c
  misc_feature (308)..(308): n equals a,t,g, or c
  misc_feature (344)..(344): n equals a,t,g, or c
  misc_feature (363)..(363): n equals a,t,g, or c
  misc_feature (391)..(391): n equals a,t,g, or c
  misc_feature (442)..(442): n equals a,t,g, or c
  misc_feature (463)..(463): n equals a,t,g, or c
  misc_feature (493)..(493): n equals a,t,g, or c
  misc_feature (502)..(502): n equals a,t,g, or c
  misc_feature (528)..(528): n equals a,t,g, or c
  misc_feature (533)..(533): n equals a,t,g, or c
ggnagngcgnaggccgcacnatgcctggagttactgnaaaanacgtgaaccagcatgagttcagtaagagctatggcngccttnctcanaaagnncnggaagctgaaagnccncnaatgggtggataccgtcaagctggccaagcacaaanagcttgctccctaccatgagaactggttctacacgcgagctgcttncacagagcggnacctgtacctccgggnnggcgctagcgttggntccatgaccaacatctatggnggacgtcananaaacggngtnntgcccagccacttcagccgaggctncaagagtgtggcccgtcaggtctccaagccctgtangggctgaaaatggtggaanaggaccaatatggccgggcgctcttgangatgcaagcttaccttccgcgtgcatgcgacggcatagctcttctatagtnccacctaaattcaattactgncccgcggtttacaacgttgtgactttgggnaaacaaaantttgggttaaaaaaaggattaaggcnttttnaaaaggggga

SEQ ID NO: 1354 - DNA, 510 bp, Homo sapiens
  misc_feature (314)..(314): n equals a,t,g, or c
  misc_feature (455)..(455): n equals a,t,g, or c
  misc_feature (506)..(508): n equals a,t,g, or c
  misc_feature (510)..(510): n equals a,t,g, or c
tggcgaatctttgcgcctaatcatgtcgtcgccaagtcccgcttctggtactttgtatctcagttaaagaagatgaagaagtcttcaggggagattgtctactgtgggcaggtgtttgagaagtcccccctgcgggtgaagaacttcgggatctggctgcgctatgactcccggagcggcacccacaacatgtaccgggaataccgggacctgaccaccgcaggcgctgtcacccagtgctaccgagacatgggtgcccggcaccgcgcccgagcccactccattcagatcatgaaggtggaggagatcgcggncagcaagtgccgccggccggttgtcaagcagttccacgactccaagatcaagttcccgctgcccaccgggtcctgcgccgtcagcacaagccacgcttaccaccaagaggcccaacaccttcttctaggtgcagggccctngtccgggtgtgccccaaataaactcaggaacgccccggtgaaaaaaaaaannntn

SEQ ID NO: 1355 - DNA, 669 bp, Homo sapiens
  misc_feature (2)..(2): n equals a,t,g, or c
  misc_feature (4)..(4): n equals a,t,g, or c
  misc_feature (161)..(161): n equals a,t,g, or c
  misc_feature (474)..(474): n equals a,t,g, or c
  misc_feature (491)..(491): n equals a,t,g, or c
  misc_feature (515)..(515): n equals a,t,g, or c
  misc_feature (566)..(566): n equals a,t,g, or c
  misc_feature (589)..(589): n equals a,t,g, or c
  misc_feature (596)..(597): n equals a,t,g, or c
  misc_feature (606)..(606): n equals a,t,g, or c
  misc_feature (623)..(623): n equals a,t,g, or c
gntntcggactgagcaggactttccttatcccagttgattgtgcagaatacactgcctgccgcttgtcttctattcaccatggcttcttctgatatccaggtgaaagaactggagaagcgtgcctcaggccaggcttttgagctgattctcagccctcggncaaaagaatctgttccagaattccccctttcccctccaaagaagaaggatctttccctggaggaaattcagaagaaattagaagctgcagaagaaagacgcaagtcccatgaagctgaggtcttgaagcagctggctgagaaacgagagcacgagaaagaagtgcttcagaaggcaatagaagagaacaacaacttcagtaaaatggcacgaagagaaactgacccacaaaatggaagctaataaagagaaccgagaggcacaaatggctgccaaactggaacgtttgcgagagaaggataagcacattgaanaagttgcggaagaacanaggaatccaaagaccctgctgacnagactgaagctgactaaatttgctcttgagaactgacttttctcccccatnccctttcctaaaatatcccaaangacctgnncttggcccnggtggccaatttttaanttttttcccctccctgggccaaaaaattttttagaaagcttaaagg

SEQ ID NO: 1356 - DNA, 707 bp, Homo sapiens
  misc_feature (14)..(14): n equals a,t,g, or c
  misc_feature (20)..(20): n equals a,t,g, or c
  misc_feature (31)..(31): n equals a,t,g, or c
  misc_feature (44)..(45): n equals a,t,g, or c
  misc_feature (98)..(98): n equals a,t,g, or c
  misc_feature (133)..(133): n equals a,t,g, or c
  misc_feature (409)..(409): n equals a,t,g, or c
  misc_feature (595)..(595): n equals a,t,g, or c
  misc_feature (634)..(634): n equals a,t,g, or c
gggggggggatggnaacggnaaacttcgacntactcttcggaannctgccacgcctgcaggtaccggtccggaattcccgggtcgacccacgtgcctngccgagccacatcgctcagacaccatggggaaggngaaggtcggagtcaacggatttggtcgtattgggcgcctggtcaccagggctgcttttaactctggtaaagtggatattgttgccatcaatgaccccttcattgacctcaactacatggtttacatgttccaatatgattccacccatggcaaattccatggcaccgtcaaggctgagaacgggaagcttgtcatcaatggaaatcccatcaccatcttccaggagcgagatccctccaaaatcaagtggggcgatgctggcgctgagtacgtcgnggagtccactggcgtcttcaccaccatggagaaggctggggctcatttgcaggggggagccaaaagggtcatcatctctgccccctctgctgatgcccccatgttcgtcatgggtgtgaaccatgagaagtatgacaacagcctcaagatcatcagcaatgcctcctgcaccaccaactgcttagnacccctggccaaggtcatccatgacaactttggtatcgnggaaggactcatgaccacagtccatgccatcactgccacccagaagactgtggatggcccctccgggaaactg

SEQ ID NO: 1357 - DNA, 573 bp, Homo sapiens
  misc_feature (22)..(22): n equals a,t,g, or c
  misc_feature (33)..(33): n equals a,t,g, or c
  misc_feature (50)..(50): n equals a,t,g, or c
  misc_feature (65)..(65): n equals a,t,g, or c
  misc_feature (74)..(74): n equals a,t,g, or c
  misc_feature (119)..(119): n equals a,t,g, or c
  misc_feature (125)..(125): n equals a,t,g, or c
  misc_feature (138)..(138): n equals a,t,g, or c
  misc_feature (239)..(239): n equals a,t,g, or c
  misc_feature (264)..(264): n equals a,t,g, or c
  misc_feature (293)..(293): n equals a,t,g, or c
  misc_feature (318)..(318): n equals a,t,g, or c
  misc_feature (322)..(322): n equals a,t,g, or c
  misc_feature (326)..(326): n equals a,t,g, or c
  misc_feature (403)..(403): n equals a,t,g, or c
  misc_feature (425)..(425): n equals a,t,g, or c
  misc_feature (433)..(433): n equals a,t,g, or c
  misc_feature (480)..(480): n equals a,t,g, or c
  misc_feature (518)..(518): n equals a,t,g, or c
  misc_feature (541)..(541): n equals a,t,g, or c
  misc_feature (567)..(567): n equals a,t,g, or c
  misc_feature (569)..(569): n equals a,t,g, or c
ggaatctttcccagggaagaancttcaggctcntggagtcagcaaagtanagaaagagcattggntgtatcctnagcaaattaccaccaaccaatggaaaaatggagctaccagggatnctaggngaaaaatgctgtnaccagccaccaagccagagtggcaaaggagggcagaatctgcagaaactcgaatcgccactcttcttcagcaggatgcaatgggaaaccatggaagacacnaattctgcacatgcaaccagagaantcctatgctccccatgtggatcacatagncctggatctggaatgctgcccctgncctncagntggctagaggaggtagatcctgggacacatgggatccacgtgcgagtggcccttaaatgtatcagttcagtccaggntgtcatcccttttgacccctgnagatcagnttttttcatattttatagccctgaaagcaggctctagatcaattcanattatttcattcggctttcattgataacagaaaatganatacctgtttgggagaagcagcntggcccattgaaatgaggcttcatcngngcaa

SEQ ID NO: 1358 - DNA, 683 bp, Homo sapiens
  misc_feature (2)..(2): n equals a,t,g, or c
  misc_feature (561)..(561): n equals a,t,g, or c
  misc_feature (656)..(656): n equals a,t,g, or c
  misc_feature (671)..(671): n equals a,t,g, or c
  misc_feature (683)..(683): n equals a,t,g, or c
gntcaggtcggtcggtccccactatgggcctggagctgtacctggacctgctgtcccagccctgccgcgctgtttacatctttgccaagaagaacgacattcccttcgagctgcgcatcgtggatctgattaaaggacctgcaggcccgtgcccgtgtggatgagtacctggcatggcagcacacgactctgcggagaagctgcctccgggccttgtggcataaggtgatgttccctgttttcctgggtgagccagtatctccccagacactggcagccaccctggcagagttggatgtgaccctgcagttgctcgaggacaagttcctccagaacaaggccttccttactggtcctcacatctccttagctgacctcgtagccatcacggagctgatgcatcccgtgggtgctggctgccaagtcttcgaaggccgacccaagctggccacatggcggcagcgcgtggaggcagcagtgggggaggacctcttccaggaggcccatgaggtcattctgaaggccaaggactttccacctgcagaccccaccataaagcanaagctgatgccctgggtgctggccatgatccggtgagctgggaaacctcacccttgaccgtcctcagcagtccacaaagcatttttatttctaanggccatgggaaccangcccaaaaaggn

SEQ ID NO: 1359 - DNA, 489 bp, Homo sapiens
  misc_feature (6)..(6): n equals a,t,g, or c
  misc_feature (65)..(65): n equals a,t,g, or c
  misc_feature (125)..(125): n equals a,t,g, or c
  misc_feature (274)..(274): n equals a,t,g, or c
  misc_feature (296)..(296): n equals a,t,g, or c
  misc_feature (373)..(373): n equals a,t,g, or c
  misc_feature (401)..(401): n equals a,t,g, or c
  misc_feature (438)..(438): n equals a,t,g, or c
  misc_feature (459)..(459): n equals a,t,g, or c
  misc_feature (466)..(466): n equals a,t,g, or c
  misc_feature (479)..(479): n equals a,t,g, or c
gatcantgtacaaatcagcacccacatcccctttcttgacaaatgatttttctagagaactatgntcttccctgactttagggaaggtgaatgtgttcccgtcctcccgcagtcagaaaggagantctgcctccctcctcctcactgagtgcctcatcctaccgggtgtccctttgccaccctgcctgggacatcgcttgaacctgaccatgccaggatcatgggaccaggcgagagggcaccctcccttcctcccccatgtgataaatgggtncagggctgatcaaagaactctnactgcagaactgccgctctcagtggacagggcatctgttatcctgagacctgtggcagacacgtcttgttttcattngatttttgttaagagtgcagtattgcanagtctagaggaatttttgcttccttgattaacatgantttcctgggtggtacattcanggcatgnaaatggcctcagncttaaacttt

SEQ ID NO: 1360 - DNA, 615 bp, Homo sapiens
  misc_feature (1)..(1): n equals a,t,g, or c
  misc_feature (17)..(17): n equals a,t,g, or c
  misc_feature (21)..(21): n equals a,t,g, or c
  misc_feature (26)..(26): n equals a,t,g, or c
  misc_feature (48)..(48): n equals a,t,g, or c
  misc_feature (508)..(508): n equals a,t,g, or c
  misc_feature (554)..(554): n equals a,t,g, or c
  misc_feature (585)..(585): n equals a,t,g, or c
  misc_feature (596)..(596): n equals a,t,g, or c
  misc_feature (604)..(604): n equals a,t,g, or c
  misc_feature (608)..(608): n equals a,t,g, or c
ntctattgaataccctngagnactcntttggaatggcccgcctgcagntaccggtccggaattcccgggtcgacccacgcgtccggttgtgtgagctggcccaggacaaggaggcggccgacgccattgatgcagagggggcctcggccccactcatggagttgctgcactcccgcaacgagggcactgccacctacgctgctgccgtcctgttccgcatctccgaggacaagaacccagactaccggaagcgcgtgtccgtggagctcaccaactccctcttcaagcatgacccggctgcctgggaggctgcccagagcatgattcccatcaatgagccctatggagatgacttggatgccacctaccgccccatgtactccagcgatgtgccccttgacccgctggagatgcacatggacatggatggagactaccccatcgacacctacagcgacggcctcaggcccccgtaccccactgcagaccacatgctggcctaggcggnctggccccagtgcggttcctcatctgagaggctctccgtgcaggcnatggggcaagacagaaaagtgcctgacttgngaaagccgggnggaacttnctgntgacctg

SEQ ID NO: 1361 - DNA, 656 bp, Homo sapiens
  misc_feature (9)..(9): n equals a,t,g, or c
  misc_feature (13)..(13): n equals a,t,g, or c
  misc_feature (29)..(29): n equals a,t,g, or c
  misc_feature (35)..(35): n equals a,t,g, or c
  misc_feature (81)..(81): n equals a,t,g, or c
  misc_feature (437)..(437): n equals a,t,g, or c
  misc_feature (579)..(579): n equals a,t,g, or c
  misc_feature (586)..(586): n equals a,t,g, or c
  misc_feature (607)..(607): n equals a,t,g, or c
  misc_feature (624)..(624): n equals a,t,g, or c
  misc_feature (626)..(626): n equals a,t,g, or c
tgaaatacnccangaaaccctgttggaanggcccncctgcaggtaccggtccggaattcccgggtcgacccacgcgtccgnttggcccctttatccctgcactctcgctctcctgccccaccccgaggtaaagggggcgactaagagaagatggtgttgctcaccgcggtcctcctgctgctggccgcctatgcggggccggcccagagcctgggctccttcgtgcactgcgagccctgcgacgagaaagccctctccatgtgcccccccagccccctgggctgcgagctggtcaaggagccgggctgcggctgctgcatgacctgcgccctggccgaggggcagtcgtgcggcgtctacaccgagcgctgcgcccaggggctgcgctgcctcccccggcaggacgaggagaagccgctgcacgccctgctgacggncgcggggtttgcctcaacgaaaagagctaccgcgagcaagtcaagatcgagagagactcccgtgagcacgaggagcccaccacctctgagatggccgaggagacctactcccccaagaatctttcgggccaaacacacccgnatctccnagcttgaaggcttgaaagcantgaaaaaaggaaccggnanaaaggaagcttgaccaagtccaaggttttg

SEQ ID NO: 1362 - DNA, 276 bp, Homo sapiens
  misc_feature (14)..(14): n equals a,t,g, or c
  misc_feature (208)..(208): n equals a,t,g, or c
  misc_feature (226)..(226): n equals a,t,g, or c
  misc_feature (243)..(243): n equals a,t,g, or c
  misc_feature (260)..(260): n equals a,t,g, or c
  misc_feature (263)..(263): n equals a,t,g, or c
ggtggaaggttttnaaaaggaatttagctgaaggatggcttatatggactacatttttcttatctctccttataagaatttttgattagatcatttccagcatcctttctgctctaaaatctcatggttttgtgtattacatgtcatccacgactctgctttaaatagaaaagtcagaattattgaagtctgtcttgttctctgcatncccaccagctgggattgngcctgtacctagtatgngctcgacacatgtttgnggnatggataaatgcg

SEQ ID NO: 1363 - DNA, 745 bp, Homo sapiens
  misc_feature (7)..(7): n equals a,t,g, or c
  misc_feature (15)..(15): n equals a,t,g, or c
  misc_feature (54)..(54): n equals a,t,g, or c
  misc_feature (63)..(64): n equals a,t,g, or c
  misc_feature (630)..(630): n equals a,t,g, or c
  misc_feature (666)..(666): n equals a,t,g, or c
  misc_feature (685)..(685): n equals a,t,g, or c
  misc_feature (692)..(692): n equals a,t,g, or c
  misc_feature (696)..(696): n equals a,t,g, or c
  misc_feature (740)..(740): n equals a,t,g, or c
taccccngcaggcancggtccggaattcccgggtcgacccacgcgtccggaganttatgaaanntcaagccctaagagacaaggggaacaggggaatacatggcagcaaagaaacacctggagataaaccctgaccattccattattgagaccttaaggcaaaaggcagaggctgataagaacgacaagtctgtgaaggatctggtcatcttgctttatgaaactgcgctcctgtcttctggcttcagtctggaagatccccagacacatgctaacaggatctacaggatgatcaaacttgggtctggggtattgatgaagatgaccctactgctgatgataccagtgctgctgtaactgaagaaatgccaccccttgaaggagatgacgacacatcacgcatggaagaagtagactaatctctggctgagggatgacttacctgttcagtactctacaattcctctgataatatattttcaaggatgattttctttatttttggtaatattaaaaagtctgtatggcatgacaactactttaaggggaagataagatttctgctactaagtgatgctgtgataccttaggcactaaagcagagctagtaatgctttttgagtttcatgntgggttattttcacagattggggtaacgtgcactgnaagacgtatgtaacatganggtaacnttgngtggtctaagtgttaactggcaagccggtgcctaagtagacaantttgg

SEQ ID NO: 1364 - DNA, 719 bp, Homo sapiens
  misc_feature (7)..(7): n equals a,t,g, or c
  misc_feature (18)..(18): n equals a,t,g, or c
  misc_feature (37)..(37): n equals a,t,g, or c
  misc_feature (70)..(70): n equals a,t,g, or c
  misc_feature (77)..(77): n equals a,t,g, or c
  misc_feature (105)..(105): n equals a,t,g, or c
  misc_feature (376)..(376): n equals a,t,g, or c
  misc_feature (516)..(516): n equals a,t,g, or c
  misc_feature (520)..(521): n equals a,t,g, or c
  misc_feature (523)..(524): n equals a,t,g, or c
  misc_feature (527)..(530): n equals a,t,g, or c
  misc_feature (532)..(533): n equals a,t,g, or c
  misc_feature (536)..(536): n equals a,t,g, or c
  misc_feature (538)..(538): n equals a,t,g, or c
  misc_feature (578)..(578): n equals a,t,g, or c
  misc_feature (584)..(584): n equals a,t,g, or c
  misc_feature (602)..(602): n equals a,t,g, or c
  misc_feature (628)..(628): n equals a,t,g, or c
  misc_feature (642)..(642): n equals a,t,g, or c
  misc_feature (653)..(653): n equals a,t,g, or c
  misc_feature (693)..(693): n equals a,t,g, or c
  misc_feature (697)..(697): n equals a,t,g, or c
aatctcnttggctgttcncctgcaggcaccggtccgnaattcccgggtcgacccacgcgtccgccgcgcngccacantggtgcgcatgaatgtcctggcagatgntctcaagagtatcaacaatgccgaaaagagaggcaaacgccaggtgcttattaggccgtgctccaaagtcatcgtccggtttctcactgtgatgatgaagcatggttacattggcgaatttgaaatcattgatgaccacagagctgggaaaattgttgtgaacctcacaggcaggctaaacaagtgtggggtgatcagccccagatttgacgtgcaactcaaagacctggaaaaatggcagaataatctgcttccatcccgccagtttggnttcattgtactgacaacctcagctggcatcatggaccatgaagaagcaagacgaaaacacacaggagggaaaatcctgggattctttttctagggatgtaatacatatatttacaaataaaatgcctcatggacaaaaanaaannannaannnnannaanangaaaaaaagggcggccgctctagaggatccaagcttacgnacgcgngcatgcgacggcataagntctttataggggcacctaaattcaantcactggccggcgntttacaacgtngggactgggaaaaacctgggggtaccaattaatcggcttngagnaaatcccctttgccagttggcg

SEQ ID NO: 1365 - DNA, 573 bp, Homo sapiens
  misc_feature (11)..(11): n equals a,t,g, or c
  misc_feature (19)..(19): n equals a,t,g, or c
  misc_feature (34)..(34): n equals a,t,g, or c
  misc_feature (85)..(86): n equals a,t,g, or c
  misc_feature (113)..(113): n equals a,t,g, or c
  misc_feature (565)..(565): n equals a,t,g, or c
  misc_feature (568)..(568): n equals a,t,g, or c
  misc_feature (570)..(571): n equals a,t,g, or c
  misc_feature (573)..(573): n equals a,t,g, or c
gcggaacgaancgaactcnccttaggctgttacncctgcaggcaccggtccggaattcccgggtcgacccacgcgtccggcggtnnctgggatcgccgttcagtcgccaatangcagctctttgtccgcgcccaggagctacacaccttcgaggtgaccggccaggaaacggtcgcccagatcaaggctcatgtagcctcactggagggcattgccccggaagatcaagtcgtgctcctggcaggcgcgcccctggaggatgaggccactctgggccagtgcggggtggaggccctgactaccctggaagtagcaaggccgcatgcttggaggtaaagtccatgggtccctggcccgtgctggaaaagtgagaggtcagactcctaaggtggccaaacaggagaagaagaagaagaagacaggtcgggctaagcggcggatgcagtacaaccggcgctttgtcaacgttgtgcccacctttggcaagaagaagggccccaatgccaactcttaagtcttttgtaattctggctttctctaataaaaaagccacttagttcaaaanaangnnan

SEQ ID NO: 1366 - DNA, 772 bp, Homo sapiens
  misc_feature (393)..(393): n equals a,t,g, or c
  misc_feature (418)..(418): n equals a,t,g, or c
  misc_feature (421)..(423): n equals a,t,g, or c
  misc_feature (429)..(429): n equals a,t,g, or c
  misc_feature (431)..(433): n equals a,t,g, or c
  misc_feature (435)..(435): n equals a,t,g, or c
  misc_feature (454)..(454): n equals a,t,g, or c
  misc_feature (493)..(493): n equals a,t,g, or c
  misc_feature (503)..(503): n equals a,t,g, or c
  misc_feature (524)..(524): n equals a,t,g, or c
  misc_feature (541)..(541): n equals a,t,g, or c
  misc_feature (557)..(557): n equals a,t,g, or c
  misc_feature (577)..(577): n equals a,t,g, or c
  misc_feature (589)..(589): n equals a,t,g, or c
  misc_feature (599)..(599): n equals a,t,g, or c
  misc_feature (619)..(619): n equals a,t,g, or c
  misc_feature (632)..(632): n equals a,t,g, or c
  misc_feature (665)..(665): n equals a,t,g, or c
  misc_feature (683)..(683): n equals a,t,g, or c
  misc_feature (692)..(692): n equals a,t,g, or c
  misc_feature (706)..(706): n equals a,t,g, or c
  misc_feature (728)..(728): n equals a,t,g, or c
  misc_feature (731)..(731): n equals a,t,g, or c
  misc_feature (733)..(733): n equals a,t,g, or c
  misc_feature (736)..(736): n equals a,t,g, or c
  misc_feature (744)..(744): n equals a,t,g, or c
  misc_feature (746)..(746): n equals a,t,g, or c
  misc_feature (749)..(749): n equals a,t,g, or c
  misc_feature (753)..(753): n equals a,t,g, or c
gcgccatttttttggaaacctctgcgccatgagagccaagtggaggaagaagcgaatgcgcaggctgaagcgcaaaagaagaaagatgaggcagaggtccaagtaaaccgctagcttgttgcaccgtggaggccacaggagcagaaacatggaatgccagacgctggggatgctggtacaagttgtgggactgcatgctactgtctagagcttgtctcaatggatctagaacttcatcgccctctgatcgccgatcacctctgagacccaccttgctcataaacaaaatgcccatgttggtcctctgccctggacctgtgacattctggactatttctgtgtttatttgtggccgagtgtaacaaccatataataaatcacctcttccgctgntttagctgaagaattaaatcacaanaannnaaactnannnanaaaaaaaaaaaaagggcgnccgctctagaggatccaagcttacgtacgcgtgcatgcnacgtcatagntcttctatagtgtcacctaanttcaattcactggccgncgttttacaacgtcgngactggtaaaaccctggcgntacccaacttantcgccttgcncacatccccctttcgccagntggcgtaatagcnaaaagggcccgcaccgatcgcccttcccaacanttgcgcaaccctgaatgncgaatgggnacgcgcccttgtancggcgcaattaagcgccgccgnttngnggngggttacncncancggnggaccggtacactttgcca

SEQ ID NO: 1367 - DNA, 790 bp, Homo sapiens
  misc_feature (493)..(493): n equals a,t,g, or c
  misc_feature (603)..(603): n equals a,t,g, or c
  misc_feature (667)..(667): n equals a,t,g, or c
  misc_feature (684)..(684): n equals a,t,g, or c
  misc_feature (710)..(710): n equals a,t,g, or c
  misc_feature (744)..(744): n equals a,t,g, or c
  misc_feature (759)..(759): n equals a,t,g, or c
  misc_feature (769)..(769): n equals a,t,g, or c
  misc_feature (774)..(774): n equals a,t,g, or c
  misc_feature (782)..(782): n equals a,t,g, or c
  misc_feature (785)..(785): n equals a,t,g, or c
ggtttggatggtttgttgttctgcctggagacaaggtgctaacatagatttaagtgaatacattaacggtgctaaaaatgaaaattctaacccaagacatgacattcttagctgtaacttaactattaaggccttttccacacgcattaatagtcccatttttctcttgccatttgtagctttgcccattgtcttattggcacatgggtggacacggatctgctgggctctgccttaaacacacattgcagcttcaacttttctctttagtgttctgtttgaaactaatacttaccgagtcagactttgtgttcatttcatttcagggtcttggctgcctgtgggcttccccaggtggcctggaggtgggcaaagggaagtaacagacacacgatgttgccaaggatggttttgggactagaggctcagtggtgggagagatccctgcagaacccaccaaccagaacgtggtttgcctgaggctgtaactganagaaagattctggggctgtgttatgaaaatatagacattctcacataagcccagttcatcaccatttcctcctttacctttcagtgcagtttcttttcacattaggctgntggttcaaacttttgggagcacggactgtcagttctctgggaagtggtcaagcgcatcctgcanggcttctcctcctctgncttttggagaaccagggctcttctcngggctctagggactggcaggcttgtttcagccangaagggccaaaatcnagagtgagantgtanaaaggtgnacntagca

SEQ ID NO: 1368 - DNA, 639 bp, Homo sapiens
  misc_feature (466)..(466): n equals a,t,g, or c
  misc_feature (514)..(514): n equals a,t,g, or c
  misc_feature (559)..(559): n equals a,t,g, or c
  misc_feature (613)..(613): n equals a,t,g, or c
  misc_feature (624)..(625): n equals a,t,g, or c
  misc_feature (632)..(632): n equals a,t,g, or c
gggcaaaggaaattttaacaaaagaatcaaatgtgcaagaggttcgttgccctgttactgtctgtggagatgtgcatggtcaatttcatgatcttatggaactctttagaattggtggaaaatcaccggatacaaactacttattcatgggtgactatgtagacagaggatattattcagtggagactgtgactcttcttgtagcattaaaggtgcgttatccagaacgcattacaatattgagaggaaatcacgaaagccgacaaattacccaagtatatggcttttatgatgaatgtctgcgaaagtatgggaatgccaacgtttggaaatattttacagatctctttgattatcttccacttacagctttagtagatggacagatattctgcctccatggtggcctctctccatccatagacacactggatcatataagagccctggatcggttacaggaagnttcacatgagggcccaatggggtgatctggtatggtcagatccagatnatcgtggtggatggggtatttcaccacgtggtgcttgctacacanttggacaaggacatttctgaaacctttaaccatgcccatggtcttcacactggnttctcgggccnncacttgnaatggga

SEQ ID NO: 1369 - DNA, 739 bp, Homo sapiens
  misc_feature (9)..(9): n equals a,t,g, or c
  misc_feature (21)..(21): n equals a,t,g, or c
  misc_feature (128)..(129): n equals a,t,g, or c
  misc_feature (542)..(542): n equals a,t,g, or c
  misc_feature (562)..(562): n equals a,t,g, or c
  misc_feature (575)..(575): n equals a,t,g, or c
  misc_feature (589)..(589): n equals a,t,g, or c
  misc_feature (591)..(591): n equals a,t,g, or c
  misc_feature (602)..(602): n equals a,t,g, or c
  misc_feature (621)..(621): n equals a,t,g, or c
  misc_feature (629)..(629): n equals a,t,g, or c
  misc_feature (631)..(631): n equals a,t,g, or c
  misc_feature (638)..(638): n equals a,t,g, or c
  misc_feature (672)..(672): n equals a,t,g, or c
  misc_feature (683)..(683): n equals a,t,g, or c
  misc_feature (707)..(707): n equals a,t,g, or c
  misc_feature (712)..(712): n equals a,t,g, or c
  misc_feature (725)..(725): n equals a,t,g, or c
  misc_feature (739)..(739): n equals a,t,g, or c
tttaagttnggacccctgccngtaccggtccggaattcccgggtcgacccacgcgtccgaaaagttttttttaggaaatcctagatgtccagtctcgggctctttgaatgttccaataagaccggccnnttcgttgtcactgagatcacagacttcacccaggatgacctgaaccctactgacgtgatgctcctagatacctgggaccaggtgttcttgaggattggggctgaggccaatgccacggagaaggagagtgcccttgccacagcacagcaagtacctgcacactcaccccagcggccgagatcccgacacaccaatcctgatcattaagcaggggtttgagcctcccatcttcacaggctggttcctagcctgggaccctaacatttggagtgcaggaaaaacatatgaacaattaaaagaagagctgggagatgctgctgctatcatgcgaatcactgctgacatgaagaatgcaaccctctcccctgaattctaatgacaggtgagccaaaatattaccctatagcagctcnggttgaaaaaccagaatcangagcttgcctgangatgtaaaccctgncnaaaaggagaantacctctctgaacaggacnttggggcngngtttggnatcacaagaagggcaatttggaactttgcctggntgggaaaaagntccaaaggagaaaggaaagggggnttttntaaagcaaggaanggctatcctatggn

SEQ ID NO: 1370 - DNA, 681 bp, Homo sapiens
  misc_feature (361)..(361): n equals a,t,g, or c
  misc_feature (373)..(374): n equals a,t,g, or c
  misc_feature (378)..(378): n equals a,t,g, or c
  misc_feature (381)..(381): n equals a,t,g, or c
  misc_feature (388)..(388): n equals a,t,g, or c
  misc_feature (392)..(392): n equals a,t,g, or c
  misc_feature (395)..(395): n equals a,t,g, or c
  misc_feature (580)..(580): n equals a,t,g, or c
  misc_feature (620)..(620): n equals a,t,g, or c
  misc_feature (635)..(635): n equals a,t,g, or c
  misc_feature (640)..(640): n equals a,t,g, or c
  misc_feature (668)..(668): n equals a,t,g, or c
  misc_feature (670)..(670): n equals a,t,g, or c
gggggaccgagtctttgtccactacactggctggctattagatggcacaaagtttgactccagtctggatcgcaaggacaaattctcctttgacctgggaaaaggggaggtcatcaaggcttgggacattgccatagccaccatgaaggtgggggaggtgtgccacatcacctgcaaaccagaatatgcctacggttcagcaggcagtcctccaaagattccccccaatgccacgcttgtatttgaggtggagttgtttgagtttaagggagaagatctgacggaagagaagctggaacagagcaccatagtgaaagagcggggcactgtgtacttcaaggaaggtaaataccagcaaagntttacttccggnntagnagnatcgggncttnggntggaatatgaagtctagtttttccaatgaggaagcacagaaagcacaggcccttcgactggcctctcacctcaacctgccatgtgtcatctgaaactacaggccttctctgctgccattgaaagctgtaacaaggcctagaactggacagcaacaacgagaagggctcttccgccggggagaggnccacctggccgtgaatgactttgaactggcacggcttganttccagaaggtctgnagttntccccacacaagccgcaagacccacttntngtgccacacgg

SEQ ID NO: 1371 - DNA, 626 bp, Homo sapiens
  misc_feature (420)..(420): n equals a,t,g, or c
  misc_feature (453)..(453): n equals a,t,g, or c
  misc_feature (580)..(581): n equals a,t,g, or c
  misc_feature (599)..(599): n equals a,t,g, or c
  misc_feature (619)..(619): n equals a,t,g, or c
  misc_feature (626)..(626): n equals a,t,g, or c
ggttttaaagggcccgcgcgttgccgccccctcggcccgccatgctgctatccgtgccgctgctgctcggcctcctcggcctggccgtcgccgagcctgccgtctacttcaaggagcagtttctggacggagacgggtggacttcccgctggatcgaatccaaacacaagtcagattttggcaaattcgttctcagttccggcaagttctacggtgacgaggagaaagataaaggtttgcagacaagccaggatgcacgcttttatgctctgtcggccagtttcgagcctttcagcaacaaaggccagacgctggtggtgcagttcacggtgaaacatgagcagaacatcgactgtgggggcggctatgtgaagctgtttctaatagtttggaccagacagacatgcaccggaaactcanaatacaacatcatggttggtccccgacatctgngggccctggcaccaaagaaggttcatgtcatctttaactacaagggcaagaacgggctgatcaacaaaggacatccgttgcaaggatgatgaagttacacacctgtacacaactgattgggcgggcnngacaacacctatgaaggngaaaaatggccaacagccanggggagn

SEQ ID NO: 1372 - DNA, 637 bp, Homo sapiens
  misc_feature (48)..(48): n equals a,t,g, or c
  misc_feature (52)..(53): n equals a,t,g, or c
  misc_feature (280)..(280): n equals a,t,g, or c
  misc_feature (291)..(291): n equals a,t,g, or c
  misc_feature (338)..(338): n equals a,t,g, or c
  misc_feature (364)..(364): n equals a,t,g, or c
  misc_feature (458)..(458): n equals a,t,g, or c
  misc_feature (485)..(485): n equals a,t,g, or c
  misc_feature (503)..(503): n equals a,t,g, or c
  misc_feature (548)..(548): n equals a,t,g, or c
  misc_feature (588)..(588): n equals a,t,g, or c
  misc_feature (590)..(590): n equals a,t,g, or c
  misc_feature (592)..(592): n equals a,t,g, or c
  misc_feature (594)..(594): n equals a,t,g, or c
  misc_feature (612)..(612): n equals a,t,g, or c
  misc_feature (631)..(631): n equals a,t,g, or c
gaaactctatgggaagccaatacgggtgaacaaagcatcagctcacangggnnacctggatgtaggggccaacattttcattgggaacctggaccctgagattgatgagaagttgctttatgatactttcagcgcctttggggtcatcttacaaacccccaaaattatgcgggaccctgacacaggcaactccaaaggttatgcctttattaattttgcttcatttgatgcttcggatgcagcaattgaagccatgaatgggcagtacctctgtaaccgncctatcaccgnatcttatgcctttaagaaggacttcaagggtgagcgccatggctcancagccgaacgacttctggcaagttanaaaccggtcttccaggcttgacgccttataacttgtttgcagatgcaccttcttcaacctttggttccaatcctgggggaataatcattggggnctggcttttttcaacaggcatgcctcntcctgggttctttcccanccccagggccactttcttggagcccttccacctggggaaaccccnaggcattgccccaacaacttaatgccttcctggggctttnangnanatgggcccccattgggangggaaccccaggggcaggnaaatcc

SEQ ID NO: 1373 - DNA, 573 bp, Homo sapiens
  misc_feature (121)..(121): n equals a,t,g, or c
  misc_feature (256)..(256): n equals a,t,g, or c
  misc_feature (437)..(437): n equals a,t,g, or c
  misc_feature (452)..(452): n equals a,t,g, or c
  misc_feature (531)..(531): n equals a,t,g, or c
  misc_feature (534)..(534): n equals a,t,g, or c
  misc_feature (550)..(550): n equals a,t,g, or c
  misc_feature (553)..(554): n equals a,t,g, or c
ggcgccgctgaacggatggctgagggagccccgcggatcgtttaggaaagccggccagctgatcgtcgtgtgttgccacccattcatgtcaagatgactaagtttggatttttgcgattgncctatgagaagcaggacacacttttgaagcttctcattctgtcaatggctgctgtattatccttctccactcgtctgtttgctgtcctgagatttgaaagtgttatccatgagtttgatccgtactttaattatnggactaccaggttcctggctgaggaggggttttataaattccataactggtttgatgaccgagcctggtaccctttgggacgaatcattggaggaacaatttacccaggtttaatgatcacctctgctgcaatctaccatgtactccattttttccacatcaccatcgacattcggaatgnctgtgtggtcctggnccctctcttttccttctttacaccatcgtacgtaccaacttaacaaagaacttaaggatgcaggggctgggcttcttgntgntggcatgaattgctgnaannttctggatatatctcccga

SEQ ID NO: 1374 - DNA, 640 bp, Homo sapiens
  misc_feature (4)..(4): n equals a,t,g, or c
  misc_feature (492)..(492): n equals a,t,g, or c
  misc_feature (497)..(497): n equals a,t,g, or c
  misc_feature (537)..(537): n equals a,t,g, or c
  misc_feature (565)..(565): n equals a,t,g, or c
  misc_feature (569)..(569): n equals a,t,g, or c
  misc_feature (611)..(612): n equals a,t,g, or c
  misc_feature (627)..(627): n equals a,t,g, or c
gcgncagttgatgaatgtggcttgcaaaggttaattaaaaatggttttgcagccaacaaacacggggctttagtaatttagtaatggaatatttaatatgccatattaatatacaaacatttatccattaaaatgtatttctatttagtatattcaatatacatattttattccattgtggaataccgtgtagaatgtttatgatttgaaaagatgctttaaatgaaagccctttagtctgtactgaatcctttaatcatctccctccatcttttttttttttttttttttctggtcacagcgattgaacaggagaagcaagcaggcgaatcgtaatgaggcgtgcgccgccaatatgcactgtacattccacaagcattgccttcttattttacttcttttagctggttaactttgtaagatgcaaagaggttggatcaagtttaaatgactgtgctgcccctttcacatcaaagaactactgcaacgaangccgngcctgcctttccatctggctatctatctggctggcagggnaagggaaagaactttgatgttggtgaangaanaagtggtgtggaagaagggggtgggacgaccggtgaatctanngtaaaaccaacttgnccaaggtggcccg

SEQ ID NO: 1375 - DNA, 485 bp, Homo sapiens
  misc_feature (11)..(12): n equals a,t,g, or c
  misc_feature (335)..(335): n equals a,t,g, or c
  misc_feature (359)..(359): n equals a,t,g, or c
  misc_feature (422)..(422): n equals a,t,g, or c
  misc_feature (428)..(428): n equals a,t,g, or c
  misc_feature (458)..(458): n equals a,t,g, or c
  misc_feature (464)..(464): n equals a,t,g, or c
  misc_feature (470)..(470): n equals a,t,g, or c
  misc_feature (473)..(473): n equals a,t,g, or c
  misc_feature (484)..(484): n equals a,t,g, or c
ggccaacatgnnccgcgttcgcaccaaaaccgtgaagaaggcggcccgggtcatcatagaaaagtactacacgcgcctgggcaacgacttccacacgaacaagcgcgtgtgcgaggagatcgccattatccccagcaaaaagctccgcaacaagatagcaggttacgtcacgcatctcatgaagcgaattcagagaggcccagtaagaggtatctccatcaagctgcaggaggaggagagagaaaggagagacaattatgttcctgaggtctcagccttggatcaggagattattgaagtacatcctgacactaaggaaatgctgaagcttttgnacttcggcagtctgtccaaccttnaggtcactcaacctacagttgggatgaatttcaaaacgcctcggggacctgtttgaatttttnctgtanagctgggattatttccaataaaaggtgggnccaccnaaaaanaanaaaaaaaatgng

SEQ ID NO: 1376 - DNA, 269 bp, Homo sapiens
  misc_feature (45)..(45): n equals a,t,g, or c
  misc_feature (47)..(47): n equals a,t,g, or c
  misc_feature (184)..(184): n equals a,t,g, or c
  misc_feature (249)..(250): n equals a,t,g, or c
  misc_feature (261)..(261): n equals a,t,g, or c
  misc_feature (268)..(268): n equals a,t,g, or c
gcttccatctgtgccatacttgttctgtattcgaaatgagctcanantgattttttaatttctatgaaggatccatctttgtatatttacatgcttagaggggtgaaaattattttggaaattgagtctgaagcactctcgcacacacagtgattccctcctcccggcactccacgcagctggnacagagcacagtgatcaccagcgtgagtggtggacgaggacacttggatatttttttagattttnncctgttcggcntaccagnt

SEQ ID NO: 1377 - DNA, 573 bp, Homo sapiens
  misc_feature (19)..(19): n equals a,t,g, or c
  misc_feature (23)..(23): n equals a,t,g, or c
  misc_feature (240)..(240): n equals a,t,g, or c
  misc_feature (357)..(357): n equals a,t,g, or c
  misc_feature (366)..(366): n equals a,t,g, or c
  misc_feature (427)..(427): n equals a,t,g, or c
  misc_feature (431)..(431): n equals a,t,g, or c
  misc_feature (463)..(463): n equals a,t,g, or c
  misc_feature (467)..(467): n equals a,t,g, or c
  misc_feature (476)..(476): n equals a,t,g, or c
  misc_feature (492)..(492): n equals a,t,g, or c
  misc_feature (517)..(517): n equals a,t,g, or c
  misc_feature (538)..(538): n equals a,t,g, or c
  misc_feature (550)..(550): n equals a,t,g, or c
  misc_feature (556)..(556): n equals a,t,g, or c
  misc_feature (565)..(565): n equals a,t,g, or c
gctaagatgatcgcccggntggncaaggagatcaacaacccagagtccgtgtattactgggcccagaagaaccacatccctgtgtttagtcccgcacttacagacggctcgctgggcgacatgatcttcttccattcctacaagaacccgggcctggtcctggacatcgttgaggacctgaggctcatcaacacacaggccatctttgccaagtgcactgggatgatcattctgggcggnggcgtggtcaagcaccacattgccaatgccaacctcatgcggaacggggccgactacgctgtttacatcaacacagcccaggagtttgatggctctgactcaagtgcccgacagacnaggctgctnctggggcaagatccgggtggatgcacagcccgtcaagggctatgcttgacgccttcctggncttncccctgcttggggcttaaaccttttgcccaanaaanatgggatgncctttatgccatgganaaagaaacgagggacttgaaccggnttgcgggtccccaggaaaggnctttaacccccnctttcnaatttattnaaatttgg

SEQ ID NO: 1378 - DNA, 566 bp, Homo sapiens
  misc_feature (251)..(251): n equals a,t,g, or c
  misc_feature (267)..(267): n equals a,t,g, or c
  misc_feature (514)..(514): n equals a,t,g, or c
  misc_feature (535)..(535): n equals a,t,g, or c
  misc_feature (542)..(542): n equals a,t,g, or c
  misc_feature (544)..(544): n equals a,t,g, or c
  misc_feature (556)..(556): n equals a,t,g, or c
gtggcgactgttaacaaaggctgtaacagattaagtactattttatatccagaaagtcttctctatgtagagaagtcagagagactagatgctttcactagggaatgtcttcccacccagccatcacaaatgtggacaatcactgcatccacatctgtaggcatatttctatggaagtttaattgacagctatattcattatttattttacaatttcatttttctacacctttgagatttatgaatgcagntttttcttaaaaattnattttaacttgacagtatgtttttagttcccccaatttaattaatggaccatgtgcatatatatgggagtgtgcttacatgttaataatttacttgcatacttatgagaatttcacattggaattcataatggtaaaacaacatacatctgccaatatacgttttttctgtggtttaagagaagataactgacagctttacctacttcctacagatgcatctaaacccagatttactgagaagaggnattgactcttagtgtaagaanagtatgngntttttggtttangtctgctcta

SEQ ID NO: 1379 - DNA, 601 bp, Homo sapiens
  misc_feature (545)..(545): n equals a,t,g, or c
  misc_feature (548)..(548): n equals a,t,g, or c
  misc_feature (557)..(557): n equals a,t,g, or c
  misc_feature (576)..(576): n equals a,t,g, or c
  misc_feature (591)..(591): n equals a,t,g, or c
ggagatctgcaatccaaataaaataaattcattgctaacctttttcttttcttttcaggtttgaagatgccgcatttggattggatgaattccaaattctgcttgcttgctttttaatattgatatgcttatacacttacactttatgcacaaaatgtagggttataataatgttaacatggacatgatcttctttataattctactttgagtgctgtctccatgtttgatgtatctgagcaggttgctccacaggtagctctaggagggctggcaacttagaggtggggagcagagaattctcttatccaacatcaacatcttggtcagatttgaactcttcaatctcttgcactcaaagcttgttaagatagttaagcgtgcataagttaacttccaatttacatactctgcttagaatttgggggaaaatttagaaatataattgacaggattattggaaatttgttataatgaatgaaacattttgtcatataagattcatatttacttcttatacatttgataaagtaaggcatggttgnggntaatctggnttatttttggtccacaagntaaataaatcataanacttgaaaaa

SEQ ID NO: 1380 - DNA, 566 bp, Homo sapiens
  misc_feature (264)..(264): n equals a,t,g, or c
  misc_feature (285)..(285): n equals a,t,g, or c
  misc_feature (328)..(328): n equals a,t,g, or c
  misc_feature (434)..(434): n equals a,t,g, or c
  misc_feature (520)..(520): n equals a,t,g, or c
  misc_feature (539)..(539): n equals a,t,g, or c
  misc_feature (548)..(548): n equals a,t,g, or c
  misc_feature (552)..(552): n equals a,t,g, or c
  misc_feature (564)..(566): n equals a,t,g, or c
ggcctactgtgtggagaagctacgactcccccctgagaaggtgaaccccctggggggtgcagtggccttagggcacccactgggctgcactggggcacgacaggtcatcacgctgctcaatgagctgaagcgccgtgggaagagggcatacggagtggtgtccatgtgcatcgggactggaatgggagccgctgccgtctttgaataccctgggaactgagtgaggtcccaggctggaagcgctacgcaagacagtcctgctgntctaacaagaaagggcagtanccaccacaaaagcaaaaccacatgggaaaaactcagcacttgntggtggtgcaagtggacagatcaaggcacttcaactcatttggaaaatgtgaacactgatacatggtataggagtggtggggtgttgagccacccatcagaccctntttactgtgcaagataaaacaagctgggtcacccaggccacaaggccatgggtaaatcttaaggcaaggcaaatccatggatgaanaagtgcaatggggcatagnaaaagggcntgantttaaaaaaaannn

SEQ ID NO: 1381 - DNA, 537 bp, Homo sapiens
  misc_feature (266)..(266): n equals a,t,g, or c
  misc_feature (278)..(278): n equals a,t,g, or c
  misc_feature (321)..(321): n equals a,t,g, or c
  misc_feature (416)..(416): n equals a,t,g, or c
  misc_feature (428)..(428): n equals a,t,g, or c
  misc_feature (450)..(450): n equals a,t,g, or c
  misc_feature (456)..(456): n equals a,t,g, or c
  misc_feature (502)..(502): n equals a,t,g, or c
  misc_feature (525)..(526): n equals a,t,g, or c
  misc_feature (529)..(530): n equals a,t,g, or c
gggcccggcgggcagctgcagcttctgctgctgaggccgggattgctacgactgggactgaagactcagacgatgccctgctgaagatgaccatcagccagcaagagtttggccgcactgggcttcctgacctaagcagtatgactgaggaagagcagattgcttatgccatgcagatgtccctgcagggagcagagtttggccaggcggaatcagcagacattgatgccagctcagctatggacacatctgaccaagccaaggangaggatgatacnacgtgatcaagaccccgagttcttcagagggcctagaaacctnccaggtgtgatccacaatgaagccattcgaaatgtatggctcctggctccaggcaccaaggacggaagaagcaagaagaggaaacagaagtgagntgaggaaggtantaattgttaaggatgatggaanacgatnaggtaatgggtttgacatcagctaataagtggacttaaaaaaaaanaaaaaaaaaaaagggccttaaannttnnccgggga

SEQ ID NO: 1382 - DNA, 309 bp, Homo sapiens
  misc_feature (25)..(25): n equals a,t,g, or c
  misc_feature (29)..(30): n equals a,t,g, or c
  misc_feature (165)..(165): n equals a,t,g, or c
  misc_feature (195)..(195): n equals a,t,g, or c
  misc_feature (271)..(271): n equals a,t,g, or c
  misc_feature (275)..(275): n equals a,t,g, or c
  misc_feature (280)..(280): n equals a,t,g, or c
  misc_feature (299)..(299): n equals a,t,g, or c
  misc_feature (307)..(307): n equals a,t,g, or c
gccgaagcaggtcgtccatctgtgncctnntggcagcccctcaaacacacaccaccccatgtcacacgggtatccagagcaaggctggatctgggctaggtgacccctggggcctcagacctctgagtgggccccagagcccagctgaggaagccacacagcctncaggacgtggcacggttcccctccacttgntgcaagtcgctgcatgggcgaggaggctgaccccagataaggcctcccagtgagaagaagtgttccctcttatagncaanctatngggaacgctatgtcttgtnctaacatntt

SEQ ID NO: 1383 - DNA, 494 bp, Homo sapiens
  misc_feature (285)..(285): n equals a,t,g, or c
  misc_feature (323)..(323): n equals a,t,g, or c
  misc_feature (354)..(354): n equals a,t,g, or c
  misc_feature (384)..(384): n equals a,t,g, or c
  misc_feature (441)..(441): n equals a,t,g, or c
  misc_feature (453)..(453): n equals a,t,g, or c
  misc_feature (467)..(467): n equals a,t,g, or c
  misc_feature (482)..(482): n equals a,t,g, or c
  misc_feature (487)..(487): n equals a,t,g, or c
ggtgccgtcgatgccatggactttatcaacgacgccacccgacgtcaacgatgccctgggctatgtgacccgcttctaccgcgaggcctcgtccggcgctgccaagaagaggctgctgctcttctcagatggcaactcgcagggcgccacgcccgctgccatcgagaaggccgtgcaggaagcccagcgggcaggcatcgagatcttcgtggtggtcgtggccgcaggtgaatgagccccacatccgcgtcctggtcaccggcaagacggccgagtacgacgtgnctacggcgagagcacctgtccgtgtcccagctaccagncctgttccgcgtgcttcaccaacagtctcangaaggtgcgctggctagccacctgacgcgnacaaacctgctccacctccactatatacagagaaagtagcatttccacactgtcgtnattttaagaaantgaagcgccacgtntctgttgcagctcgntactntgatact

SEQ ID NO: 1384 - DNA, 579 bp, Homo sapiens
  misc_feature (1)..(2): n equals a,t,g, or c
  misc_feature (20)..(20): n equals a,t,g, or c
  misc_feature (28)..(28): n equals a,t,g, or c
  misc_feature (142)..(142): n equals a,t,g, or c
  misc_feature (295)..(295): n equals a,t,g, or c
  misc_feature (425)..(425): n equals a,t,g, or c
  misc_feature (550)..(550): n equals a,t,g, or c
  misc_feature (558)..(558): n equals a,t,g, or c
  misc_feature (570)..(570): n equals a,t,g, or c
  misc_feature (574)..(574): n equals a,t,g, or c
  misc_feature (579)..(579): n equals a,t,g, or c
nntaaagctggtacgcctangggacttnaatggaatcccgggtcgatccacgcgtccgtgtttgttgaatgtctcctctctctttccactctgggaaacctaggtttctgccattctgggtgaccctgtatttctttctggngcccattccatttgtccagttaatacttcctcttaaaaatctccaagaagctgggtctccagatcccatttagaaccaaccaggtgctgaaaacacatgtagataatggccatcatcctaagcccaaagtagaaaatggtagaaggtagtggngaagaagcactatataaggaaggggatgggattttccattctaaaagttttggagagggaaatccaggctattaaagtcactaaatttctaagtatgtccatttcccatctcagcttcaagggaggtgtnagcagtattatctccactttcaatctccctccaagctctactctggaggagtctgcccactctgtcaagtggaatccttccctttccaactctacctccctcacttagctcctttccctgatcanagaaaggnatcaaagggggntggnaaggn

SEQ ID NO: 1385 - DNA, 600 bp, Homo sapiens
  misc_feature (4)..(4): n equals a,t,g, or c
  misc_feature (12)..(12): n equals a,t,g, or c
  misc_feature (46)..(47): n equals a,t,g, or c
  misc_feature (56)..(56): n equals a,t,g, or c
  misc_feature (119)..(119): n equals a,t,g, or c
  misc_feature (181)..(181): n equals a,t,g, or c
  misc_feature (187)..(187): n equals a,t,g, or c
  misc_feature (192)..(192): n equals a,t,g, or c
  misc_feature (202)..(202): n equals a,t,g, or c
  misc_feature (214)..(214): n equals a,t,g, or c
  misc_feature (242)..(242): n equals a,t,g, or c
  misc_feature (267)..(267): n equals a,t,g, or c
  misc_feature (288)..(288): n equals a,t,g, or c
  misc_feature (316)..(316): n equals a,t,g, or c
  misc_feature (391)..(391): n equals a,t,g, or c
  misc_feature (412)..(412): n equals a,t,g, or c
  misc_feature (424)..(424): n equals a,t,g, or c
  misc_feature (439)..(440): n equals a,t,g, or c
  misc_feature (449)..(449): n equals a,t,g, or c
  misc_feature (462)..(462): n equals a,t,g, or c
  misc_feature (493)..(493): n equals a,t,g, or c
  misc_feature (514)..(514): n equals a,t,g, or c
  misc_feature (538)..(538): n equals a,t,g, or c
  misc_feature (545)..(545): n equals a,t,g, or c
  misc_feature (581)..(581): n equals a,t,g, or c
  misc_feature (590)..(590): n equals a,t,g, or c
tcangcctgccncaaggagaacatggcggtcgccgtaggaactttnnaggaacagntggaaaaggccaaagagagtcttaagaacgtggatgagaacattcgcaagctcaccggtcggnatccgaatgacgtgaggtaagggcctaacgggaactcggatctcggagctcggagaggcagncctcangtcgntgtgaattgncggcggtgaggncggtcagccttaagaagactggaacctngaggcctgttcgcggggcggcattnaaaacccttgttgtcgtctangtggagaggccccaggtcccctccgtanagcgctggtctcaggtccctgaatgaaggagagcgaggcctgggtgccccgcatgctttcttggcctgtgagaanaccggactgctgattaccgtntcggccttgcanggccggaactgcagnncaaagtccnttccgcttcggangacaccggcccgttttggcccgagaccttgncggacgcaacaagccgcttanccagttctggccacggcagctctngggaagncggatgggaccgatcaggcttgtaatggggctcttnaaggattanttttgccagt

SEQ ID NO: 1386 - DNA, 591 bp, Homo sapiens
  misc_feature (52)..(52): n equals a,t,g, or c
  misc_feature (255)..(256): n equals a,t,g, or c
  misc_feature (314)..(314): n equals a,t,g, or c
  misc_feature (320)..(320): n equals a,t,g, or c
  misc_feature (355)..(355): n equals a,t,g, or c
  misc_feature (440)..(440): n equals a,t,g, or c
  misc_feature (472)..(472): n equals a,t,g, or c
  misc_feature (488)..(488): n equals a,t,g, or c
  misc_feature (506)..(506): n equals a,t,g, or c
  misc_feature (540)..(540): n equals a,t,g, or c
  misc_feature (549)..(549): n equals a,t,g, or c
  misc_feature (556)..(556): n equals a,t,g, or c
  misc_feature (591)..(591): n equals a,t,g, or c
gcggcgcgggtcggcagcgggagggcgcgcggccgagcggaggcggagtcgncgccgagaacatggctggaggcaaagctggaaaggacagtgggaaggccaaggctaaggcagtatctcgctcacagagagctgggctacagtttcctgtgggccgcatccacagacacttgaagactcgcaccacaagccatggaagggtgggtgccactgctgccgtgtacagtgctgcgattctggagtacctcactgcannaggtgctggagctggcaggtaatgcttctaaggatctcaaagtaaagcgtatcactcncgcgtnacttgcagcttgcaatccgtggtgatgaaagagtnggattctcttatcaaggctaccatactgtgggtaggtgtgatccctcacattcacaaatctctgattggaaagaaggtacagcanaaaactgcttaaagggatgctttaccaacctnttcttcccgtcattgnactgtactgggacagaanaaataatggggatatgtggaaatttaacaacagntaaatgganaactaancatatgagctgataaagaacattgatgttctagan

SEQ ID NO: 1387 - DNA, 587 bp, Homo sapiens
  misc_feature (522)..(522): n equals a,t,g, or c
  misc_feature (526)..(526): n equals a,t,g, or c
  misc_feature (533)..(533): n equals a,t,g, or c
  misc_feature (572)..(572): n equals a,t,g, or c
  misc_feature (580)..(580): n equals a,t,g, or c
gcttgaaaccatatccagtttctccatcggataaagtccttattcaagaaaaaacacagttgaagggatctgaactggaaattacactcaccagaggatcttcccttcctggtcctgcttgtgcatatgtcaatcttaacatttgtgcaaatggcagtgaacaaggtggagtattgctcctggaaaatccaaaaggtgacaataggttggaccttttaaagctgaagagtgttgtcactagcatttttggtgtgaaaaatacagagctggctgtcttccatgatgaaacagaaatacaaaaccaaactgacttactgagtcttagtggaaaaacactttgtgtgactgcaggattggctccctctctgatcaacagttctagtactcttctttggcagtatatcaacctacagcttctgaatgcaaagccacaagagtggttaatggggacagtgggcactcttctgcttgaaacccacttgggcagaatggactcacccacaaggcttctggatgaacaancaanggggttnggccttcggagcaagaagctaagctgttttgaatggagnaccaaacncaggaaa

SEQ ID NO: 1388 - DNA, 373 bp, Homo sapiens
  misc_feature (3)..(3): n equals a,t,g, or c
  misc_feature (8)..(8): n equals a,t,g, or c
  misc_feature (19)..(19): n equals a,t,g, or c
  misc_feature (53)..(53): n equals a,t,g, or c
  misc_feature (59)..(59): n equals a,t,g, or c
  misc_feature (248)..(248): n equals a,t,g, or c
  misc_feature (271)..(271): n equals a,t,g, or c
  misc_feature (307)..(307): n equals a,t,g, or c
  misc_feature (322)..(322): n equals a,t,g, or c
  misc_feature (326)..(326): n equals a,t,g, or c
  misc_feature (348)..(348): n equals a,t,g, or c
  misc_feature (370)..(370): n equals a,t,g, or c
ctntaaanggggggatctntcctaaatggggaaaaactcctctattagggggnaaaagntttgggtcaccgcctggcagcctaacccgggtccgggaaaatttcccgggggtcgggacccacggccgtcccgggggcataatcctggtcgtttgtgggaccgggggcccatggggggccgggaagctcggtcccggcaatgggtgcttggaaatgggcttgaggggaccttcccaagtctccccaaangtcccggggccttttcccttggngggaaattttggaatctaagcctaaaagtttccctnaaggcttttcttggncttnagcaaacttttcccatctttgnctctcttggatgatgttggccngca

SEQ ID NO: 1389 - DNA, 558 bp, Homo sapiens
  misc_feature (338)..(338): n equals a,t,g, or c
  misc_feature (356)..(356): n equals a,t,g, or c
  misc_feature (365)..(365): n equals a,t,g, or c
  misc_feature (388)..(389): n equals a,t,g, or c
  misc_feature (401)..(401): n equals a,t,g, or c
  misc_feature (425)..(425): n equals a,t,g, or c
  misc_feature (497)..(497): n equals a,t,g, or c
  misc_feature (508)..(508): n equals a,t,g, or c
  misc_feature (513)..(513): n equals a,t,g, or c
  misc_feature (542)..(542): n equals a,t,g, or c
  misc_feature (545)..(545): n equals a,t,g, or c
ggaaagggtggtatcctggctggtgtcctcagataatccccaacccgagatggaagtccgggaccgcatgtggctcaagatcaccatccctaatgcctttctgggctcggatgtggttgactggctctaccatcacgtggagggctttcctgagcggcgggaggcccgcaagtatgccagcgggctgctcaaagcaggcctgatccgacacaccgtcaacaagatcaccttctctgagcagtgctattacgtcttcggagacctcagtggtggctgtgagagctacctagtcaacctgtctctcaatgacaacgatggcttcagggggggtttagacnaggataccctgggtactntgctggggncaacccctgggccctggtgccannttttctaacagnacctggccaaaaccctacggccgnagctcacctacatgagtttatctacactatgtggagcagtgcagagcagatagtgaggcagcgacagggtcnacgaggtgggncagcnacggagccagagggcccagcagtcgaggnagngtagctcagcagg

SEQ ID NO: 1390 - DNA, 666 bp, Homo sapiens
  misc_feature (550)..(550): n equals a,t,g, or c
  misc_feature (616)..(616): n equals a,t,g, or c
  misc_feature (648)..(648): n equals a,t,g, or c
  misc_feature (650)..(650): n equals a,t,g, or c
  misc_feature (663)..(664): n equals a,t,g, or c
tatgatccgctttatcctcatccagaaccgggcaggcaagacgcgcctggccaagtggtacatgcagtttgatgatgatgagaaacagaagctgatcgaggaggtgcatgccgtggtcaccgtccgagacgccaaacacaccaactttgtggagttccggaactttaagatcatttaccgccgctatgctggcctctacttctgcatctgtgtggatgtcaatgacaacaacctggcttacctggaggccattcacaacttcgtggaggtcttaaacgaatatttccacaatgtctgtgaactggacctggtgttcaacttctacaaggtttacacggtcgtggacgagatgttcctggctggcgaaatccgagagaccagccagacgaaggtgctgaaacagctgctgatgctacagtccctggagtgagggcaggcgagccccaccccggccccggcccctcctggactcgcctgctcgcttccccttcccaggcccgtggccaacccagcagtccttccctcagctgcctaggaggaagggacccanctgggtctgggccacaagggaggagactgcacccactgctctgggcctggctgtggcagaggccancgtgtgtgtcccgagtaaccgtgccgttgcgngngatgccataacgnntg

SEQ ID NO: 1391 - DNA, 743 bp, Homo sapiens
  misc_feature (2)..(2): n equals a,t,g, or c
  misc_feature (4)..(4): n equals a,t,g, or c
  misc_feature (7)..(7): n equals a,t,g, or c
  misc_feature (30)..(30): n equals a,t,g, or c
  misc_feature (126)..(126): n equals a,t,g, or c
  misc_feature (147)..(147): n equals a,t,g, or c
  misc_feature (151)..(151): n equals a,t,g, or c
  misc_feature (155)..(156): n equals a,t,g, or c
  misc_feature (205)..(205): n equals a,t,g, or c
  misc_feature (239)..(239): n equals a,t,g, or c
  misc_feature (241)..(241): n equals a,t,g, or c
  misc_feature (251)..(251): n equals a,t,g, or c
  misc_feature (261)..(261): n equals a,t,g, or c
  misc_feature (285)..(285): n equals a,t,g, or c
  misc_feature (298)..(298): n equals a,t,g, or c
  misc_feature (304)..(304): n equals a,t,g, or c
  misc_feature (313)..(313): n equals a,t,g, or c
  misc_feature (333)..(333): n equals a,t,g, or c
  misc_feature (354)..(354): n equals a,t,g, or c
  misc_feature (402)..(402): n equals a,t,g, or c
  misc_feature (426)..(426): n equals a,t,g, or c
  misc_feature (466)..(467): n equals a,t,g, or c
  misc_feature (547)..(547): n equals a,t,g, or c
  misc_feature (571)..(571): n equals a,t,g, or c
  misc_feature (623)..(623): n equals a,t,g, or c
  misc_feature (633)..(633): n equals a,t,g, or c
  misc_feature (678)..(678): n equals a,t,g, or c
  misc_feature (685)..(685): n equals a,t,g, or c
  misc_feature (698)..(698): n equals a,t,g, or c
  misc_feature (742)..(743): n equals a,t,g, or c
gntnagngacaccagagaacccaccatggncccctttgagcccctggcttctggcatcctgttgttgctgtggctgatagcccccagcagggcctgcacctgtgtcccaccccacccacagacggncttctgcaattccgacctcgncatnaggnncaagttcgtggggacaccagaagtcaaccagaccaccttataccagtgntatgagatcaagatgaccaagatgtataaagggntncaagccttangggatgccgntgacatccggttcgtctacacccncgccatggagagngtctgnggatacttncacaggtcccacaaccgcancgaggagtttctcattgctgnaaaactgcaggatggactcttgcacatcactacctgcagttttgtggntccctggaacagcctgagcttagntcagcgccggggcttcaccaagacctacactgttggctgnnaggaatgcacagtgtttccctgattatccatcccctgcaaactgcacagtggcactcattgcttgtggacggaccagctnctcctaggctcttaaaagggcttncagtcccgtcaacttgcctgcctgcctcgggagccagggctgtgcacctggnagtccctgcngtcccagatagcctgaatctggccggagtggaagctgaaacctgnacagggncaccctgttccantccatcttttcttccggacaatgaaataaagagtaccacccagnn

SEQ ID NO: 1392 - DNA, 727 bp, Homo sapiens
  misc_feature (597)..(597): n equals a,t,g, or c
  misc_feature (690)..(690): n equals a,t,g, or c
  misc_feature (703)..(704): n equals a,t,g, or c
  misc_feature (710)..(710): n equals a,t,g, or c
  misc_feature (723)..(723): n equals a,t,g, or c
ggtcaacttccacatgtttgacgtgggtggccagcagcgatgaacgccgcaagtggatccagtgcttcaacgatgtgactgccatcatcttcgtggtggccagcagcagctacaacatggtcatccgggaggacaaccagaccaaccgcctgcaggaggctctgaacctcttcaagagcatctggaacaacagatggctgcgcaccatctctgtgatcctgttcctcaacaagcaagatctgctcgctgagaaagtccttgctgggaaatcgaagattgaggactactttccagaatttgctcgctacactactcctgaggatgctactcccgagcccggagaggacccacgcgtgacccgggccaagtacttcattcgagatgagtttctgaggatcagcactgccagtggagatgggcgtcactactgctaccctcatttcacctgcgctgtggacactgagaacatccgccgtgtgttcaacgactgccgtgacatcattcagcgcatgcaccttcgtcagtacgagctgctctaagaagggaacccccaaatttaattaaagccttaacacaattaattaaaaagtgaaacgnaattgtccaagcaggttaatcacccaccatagggcatgattaacaaagcaaccttttcctttccccgagtgaattttgcgaaacccccttttncctttaagcttgnntaaaangttccaaatttanaaag

SEQ ID NO: 1393 - DNA, 777 bp, Homo sapiens
  misc_feature (421)..(421): n equals a,t,g, or c
  misc_feature (560)..(560): n equals a,t,g, or c
  misc_feature (564)..(564): n equals a,t,g, or c
  misc_feature (601)..(601): n equals a,t,g, or c
  misc_feature (628)..(628): n equals a,t,g, or c
  misc_feature (636)..(636): n equals a,t,g, or c
  misc_feature (649)..(649): n equals a,t,g, or c
  misc_feature (687)..(687): n equals a,t,g, or c
  misc_feature (696)..(696): n equals a,t,g, or c
  misc_feature (728)..(728): n equals a,t,g, or c
  misc_feature (756)..(756): n equals a,t,g, or c
  misc_feature (770)..(770): n equals a,t,g, or c
  misc_feature (777)..(777): n equals a,t,g, or c
gagcagatcatcaaagggagagatgtcatcgcacagtctcagtccggcacaggaaaaacagccaccttcagtatctcagtcctccagtgtttggatattcaggttcgtgaaactcaagctttgatcttggctcccacaagagagttggctgtgcagatccagaaggggctgcttgctctcggtgactacatgaatgtccagtgccatgcctgcattggaggcaccaatgttggcgaggacatcaggaagctggattacggacagcatgttgtcgcgggcactccagggcgtgtttttgatatgattcgtcgcagaagcctaaggacacgtgctatcaaaatgttggttttggatgaagctgatgaaatgttgaataaaggtttcaaagagcagatttacgatgtatacaggtacctgcctncagccacacaggtggttctcatcagtgccacgctgccacacgagattctggagatgaccaacaaggtcatgaccgacccaatccgcatcttggtgaaacgtgatgaattgactctggaaggcatcaagcaatttttcgngcantggaaaagggaagaagtggaaatttgacactctgggngaacctctacgacacactggccattanttcaggcnggcatctttttgnaacaaccaaaagaaaaggtgggactggcttgaccgganaaaaatgangggaagcccactttactggatccccaatgctnggagaccttgccccaaaagagcggaagnccttcttgaaggantttcggn

SEQ ID NO: 1394 - DNA, 336 bp, Homo sapiens
  misc_feature (30)..(30): n equals a,t,g, or c
  misc_feature (33)..(34): n equals a,t,g, or c
  misc_feature (38)..(38): n equals a,t,g, or c
  misc_feature (137)..(137): n equals a,t,g, or c
  misc_feature (140)..(140): n equals a,t,g, or c
  misc_feature (154)..(154): n equals a,t,g, or c
  misc_feature (163)..(163): n equals a,t,g, or c
  misc_feature (169)..(169): n equals a,t,g, or c
  misc_feature (182)..(182): n equals a,t,g, or c
  misc_feature (205)..(205): n equals a,t,g, or c
  misc_feature (268)..(268): n equals a,t,g, or c
  misc_feature (301)..(301): n equals a,t,g, or c
  misc_feature (328)..(328): n equals a,t,g, or c
  misc_feature (334)..(334): n equals a,t,g, or c
  misc_feature (336)..(336): n equals a,t,g, or c
acgcgtccgctttacctacagaacctgtgntannctgnttaggcccttccgatttgtggaagaggtccagaatgttgcaaggaaggagtgaagttcgatgaacgtgagaaaactaaggagagcgtgaagcagttganaangaatttgacctctnctgaattgnatgaangataaagccttanggcacgattgaaaaggctgtggngctcagcgctgcagaatctccgtgtgctttggtggcagccagtacggatggctggcaacatgnagagaatcatgaaagcacaagcgtaccaaacgncaaggacatctctaccattactatccnagtcanan

SEQ ID NO: 1395 - DNA, 777 bp, Homo sapiens
  misc_feature (323)..(323): n equals a,t,g, or c
  misc_feature (325)..(325): n equals a,t,g, or c
  misc_feature (435)..(435): n equals a,t,g, or c
  misc_feature (495)..(495): n equals a,t,g, or c
  misc_feature (508)..(508): n equals a,t,g, or c
  misc_feature (572)..(572): n equals a,t,g, or c
  misc_feature (621)..(621): n equals a,t,g, or c
  misc_feature (643)..(643): n equals a,t,g, or c
  misc_feature (649)..(649): n equals a,t,g, or c
  misc_feature (720)..(720): n equals a,t,g, or c
  misc_feature (723)..(723): n equals a,t,g, or c
  misc_feature (750)..(750): n equals a,t,g, or c
ggtgaacagggagcggggcttttgtctgttggtctccctggactgaagagagggagaatagaagcccaagactaagattctcaaaatggtttattacccagaactctttgtctgggtcagtcaagaaccatttccaaacaaggacatggagggaaggcttctaagggaaagacttcctgtcccaaaggaagtgaaccgcaagaagaacgatgagacaaacgcttgcctccttgattcaatgggcaagaatggactttaattccccaagaatcagttacctccactttttttaatcgtaacacctccatttgaatacatatggngnatgggtattgatgaggtcatggtatcatatatgggatttttttctgtgtaaatcatcaagtataagaagaaactatgggactctgagccttgctttagagaatttacagnggacaaataggtgtcatcaaaccagtttttaatcattctgactcaagggaaacgcttaanaatttcacactgngaatccacgtttacaacccttacaggggggcctttaggcctggttcgttacaacaatggctttncacaacttaaacttccaccgggcttacacaaaccgggccaattctggcnttttacttacacaggttccgantggttnttggcaaaagcttgaaagtcccccccacctttttttattaaaagaaccaactagaattatgtcataatgcnganaccctatattaatcaggcctttgaggnaaatagttgaaccatgttcttggaagg

SEQ ID NO: 1396 - DNA, 645 bp, Homo sapiens
  misc_feature (542)..(542): n equals a,t,g, or c
  misc_feature (559)..(559): n equals a,t,g, or c
  misc_feature (578)..(578): n equals a,t,g, or c
  misc_feature (603)..(603): n equals a,t,g, or c
  misc_feature (633)..(633): n equals a,t,g, or c
  misc_feature (641)..(641): n equals a,t,g, or c
gcaccagcgtccgcagcagccccatgcctcctggacgccctcctccgggacgctctccaagccctcgacgccgtgctcctcctcgtcctggaaagggtacagagtcgtcccaggctatgctgcaggtgtggggccctggaactctttgtagtcagcgcggtcctcctcgacctgtgcgcctaggagtggggacggcggtggcggggtcatgcagcgctcccagccaccctgcggccgggtcccagccagcagcaccatgtcagcggccggaggcgtgggctgggggccggggcaccgtcccggaaaaccgggcgcgccccaaggtccctgcttctcgcttccgcgtccccagagaagccgtagctcccgcccccagcccggcagaaacctcctttctttacattattaagtttggtttcattttaattttcttaggacattgataaaatcactttcggatttttgagattaaaaattaaataattttcatctttaccctttttaaaattttacactttattttaatgcttttaatcttttgnaaattttaattaatggnaatttatatcttcaattantaatgggaagaaattttagaaaagnctttttacaataataaaggactaaattaanggaactanttaa

SEQ ID NO: 1397 - DNA, 659 bp, Homo sapiens
  misc_feature (31)..(31): n equals a,t,g, or c
  misc_feature (352)..(352): n equals a,t,g, or c
  misc_feature (354)..(354): n equals a,t,g, or c
  misc_feature (360)..(360): n equals a,t,g, or c
  misc_feature (376)..(376): n equals a,t,g, or c
  misc_feature (403)..(403): n equals a,t,g, or c
  misc_feature (439)..(439): n equals a,t,g, or c
  misc_feature (459)..(459): n equals a,t,g, or c
  misc_feature (491)..(491): n equals a,t,g, or c
  misc_feature (495)..(495): n equals a,t,g, or c
  misc_feature (518)..(518): n equals a,t,g, or c
  misc_feature (527)..(527): n equals a,t,g, or c
  misc_feature (529)..(529): n equals a,t,g, or c
  misc_feature (550)..(550): n equals a,t,g, or c
  misc_feature (584)..(584): n equals a,t,g, or c
  misc_feature (602)..(602): n equals a,t,g, or c
  misc_feature (605)..(605): n equals a,t,g, or c
  misc_feature (627)..(628): n equals a,t,g, or c
gaactggaggaagagtatgagtatgaggatnatgaggctgagggtgaaatccgagtgcgccccaagaagaccaccaagaagcgtgtgagccgtaggagcatctttgaaatgtatgagcccagtgagctagaaagcagccacctcacagatcaggacaatgaaatccgagccactgacctgcctgagaggttccagctccgctccatcccagtcaagggggctgaagatgatgaggatgacgatgtcgataccaagaagcagaagaccgacgaggatgactagacagcaaaaaaggaaaagttaaactaaaaaaaaaaaggccgccgggcctattcacccttcactttccggntnaaaatntaaacggggcaccttngagtaaaaaggcccgcccggccaccgngggcagtgccacccccaaatgacacccgcttttcancacccaacccaaaccattgngaattttgcaccaggggaggaaaaaagaaccnaaantttcaagggccctggtttttttnttaaaaggncnttttaaaagggaaatttgttnggattttttaattacccttttaaaatttttgggnccattttggttaggggcnagncccttttttaaaggacctcggnnggacccaaacccaggccttttggagggggtt

SEQ ID NO: 1398 - DNA, 194 bp, Homo sapiens
  misc_feature (2)..(2): n equals a,t,g, or c
  misc_feature (25)..(25): n equals a,t,g, or c
  misc_feature (28)..(28): n equals a,t,g, or c
  misc_feature (32)..(32): n equals a,t,g, or c
  misc_feature (38)..(38): n equals a,t,g, or c
  misc_feature (51)..(51): n equals a,t,g, or c
  misc_feature (83)..(83): n equals a,t,g, or c
  misc_feature (117)..(117): n equals a,t,g, or c
  misc_feature (125)..(125): n equals a,t,g, or c
  misc_feature (131)..(131): n equals a,t,g, or c
  misc_feature (140)..(140): n equals a,t,g, or c
  misc_feature (152)..(152): n equals a,t,g, or c
gntaaagcctatgatgtgtgcattntanagtntcggantttagcctctgantaccttctccattgggggaaagatattcttgnaaccactcatgacatatcttagaaggcattgacnatgtatanactaantggtggttngatatttatgtnaatatcagtttaccatgctttaaattttgcccattcgactat

SEQ ID NO: 1399 - DNA, 502 bp, Homo sapiens
  misc_feature (402)..(402): n equals a,t,g, or c
  misc_feature (423)..(423): n equals a,t,g, or c
  misc_feature (442)..(442): n equals a,t,g, or c
  misc_feature (475)..(475): n equals a,t,g, or c
  misc_feature (477)..(477): n equals a,t,g, or c
  misc_feature (482)..(482): n equals a,t,g, or c
gttatgatcaaggatatggaaattacaatagtgcctatggtggtgatcaaaactatagtggctatggcggatatgattatactgggtataactatgggaactatggatatggacagggatatgcagactacagtggccaacagagcacttatggcaaggcatctcgagggggtggcaatcaccaaaacaattaccagccatactaaaggagaacattggagaaaacaggaggagatgttaaagtaacccatcttgcaggacgacattgaagattggtcttctgttgatctaagatgattattttgtaaaagactttctagtgtacaagacaccattgtgtccaactgtatatagctgccaattagttttctttggttttactttgtcctttgctatctgtgntatgactcaatgtggatttgnttatacacattttatttgnatcatttcatggtaaacctcaaataaatgcttncntatgngaaaaaaaaaaaaaaagggg

SEQ ID NO: 1400 - DNA, 636 bp, Homo sapiens
  misc_feature (5)..(5): n equals a,t,g, or c
  misc_feature (463)..(463): n equals a,t,g, or c
  misc_feature (501)..(501): n equals a,t,g, or c
  misc_feature (569)..(569): n equals a,t,g, or c
  misc_feature (580)..(580): n equals a,t,g, or c
  misc_feature (601)..(601): n equals a,t,g, or c
  misc_feature (603)..(603): n equals a,t,g, or c
  misc_feature (613)..(613): n equals a,t,g, or c
gcttncatcggagccatccgcatcaacacacaggaatatctagatgtgttgggcaggcccatggtgctggcaggcaaggaggccaagcaggtgcagtggaccaacgtgtatgaggatgcactgggactggggttggtggtaacagggaccctccctgttttcaacctgacacaggatggccctggggaaaagaagaaccagctgatcctgggcgtgatgggcatttgacgtggctctgaatgacatcaagaggctgacccccaactacacgcttggagccaacgctatgtgtttgccattgacctgaacggctacctgttgctgcaccccaatctcaagccccagaccaccaacttccgggagcctgtgactctggacttcctggatgcggagctagaggatgagaacaaggaagagatccgtcggagcatgattgatggcaacaagggccacaagcagatanaacgttggtcaagtccctggatgaaaggtacatagatnaggtgacacgggaactacacctggggtgcctataaggagcactactacagcctggggttgggggctcncctacagaacntttacttccaggccatttagngncagatctgcngtaagttgccatcacaattaagg

SEQ ID NO: 1401 - DNA, 560 bp, Homo sapiens
  misc_feature (8)..(8): n equals a,t,g, or c
  misc_feature (27)..(28): n equals a,t,g, or c
  misc_feature (37)..(37): n equals a,t,g, or c
  misc_feature (61)..(61): n equals a,t,g, or c
  misc_feature (65)..(65): n equals a,t,g, or c
  misc_feature (79)..(79): n equals a,t,g, or c
  misc_feature (83)..(83): n equals a,t,g, or c
  misc_feature (105)..(105): n equals a,t,g, or c
  misc_feature (127)..(127): n equals a,t,g, or c
  misc_feature (131)..(132): n equals a,t,g, or c
  misc_feature (156)..(156): n equals a,t,g, or c
  misc_feature (161)..(161): n equals a,t,g, or c
  misc_feature (168)..(168): n equals a,t,g, or c
  misc_feature (171)..(171): n equals a,t,g, or c
  misc_feature (229)..(229): n equals a,t,g, or c
  misc_feature (249)..(249): n equals a,t,g, or c
  misc_feature (259)..(259): n equals a,t,g, or c
  misc_feature (284)..(284): n equals a,t,g, or c
  misc_feature (293)..(293): n equals a,t,g, or c
  misc_feature (326)..(327): n equals a,t,g, or c
  misc_feature (337)..(337): n equals a,t,g, or c
  misc_feature (355)..(355): n equals a,t,g, or c
  misc_feature (364)..(364): n equals a,t,g, or c
  misc_feature (372)..(372): n equals a,t,g, or c
  misc_feature (410)..(411): n equals a,t,g, or c
  misc_feature (424)..(424): n equals a,t,g, or c
  misc_feature (427)..(427): n equals a,t,g, or c
  misc_feature (431)..(431): n equals a,t,g, or c
  misc_feature (434)..(434): n equals a,t,g, or c
  misc_feature (445)..(445): n equals a,t,g, or c
  misc_feature (456)..(456): n equals a,t,g, or c
  misc_feature (499)..(499): n equals a,t,g, or c
  misc_feature (507)..(507): n equals a,t,g, or c
  misc_feature (521)..(521): n equals a,t,g, or c
  misc_feature (526)..(526): n equals a,t,g, or c
  misc_feature (539)..(539): n equals a,t,g, or c
gcctcccnggagcggagcgcacctagnntccctcttncgtccccccagcccagctacccgntcanaccagcagtctcgngggncacccccccgtcagcctgcctncctcccgctcagccctggcagngttnnccagacatgaatctcttccgattnctggnagacctnttncacctcctcgccatcattattgctacatgctcaaaattttggaagtcccgctcgtganccggaatttcagggaagagncaggtcctgnttgctgtgggtgttcactgcccganatgtggacntcttcaccaactacatctcactctacaacacgnntatgaagcgnaggctacatagcctgctnctttaccangatctggntgatttatagcacggtcaaagctacttacgatgggaannatgacacgctcanagngtanttnctggtagttcncacagtcattntggcgatcctgggcaatcatgactttacccctctggagattcnctggaccntctccatctactgnagtantggaccatcttgncgaacttgttatggtaagcta

SEQ ID NO: 1402 - DNA, 591 bp, Homo sapiens
  misc_feature (316)..(316): n equals a,t,g, or c
  misc_feature (349)..(349): n equals a,t,g, or c
  misc_feature (388)..(388): n equals a,t,g, or c
  misc_feature (413)..(413): n equals a,t,g, or c
  misc_feature (418)..(418): n equals a,t,g, or c
  misc_feature (445)..(445): n equals a,t,g, or c
  misc_feature (466)..(466): n equals a,t,g, or c
  misc_feature (471)..(471): n equals a,t,g, or c
  misc_feature (483)..(483): n equals a,t,g, or c
  misc_feature (516)..(516): n equals a,t,g, or c
  misc_feature (541)..(541): n equals a,t,g, or c
  misc_feature (556)..(556): n equals a,t,g, or c
  misc_feature (589)..(589): n equals a,t,g, or c
  misc_feature (591)..(591): n equals a,t,g, or c
ggggagctttctctgtgtattcggacttcctgctctacaagtcaggagtgtaccaacacgtcaccggagagatgatgggtggccatgccatccgcatcctgggctggggagtggagaatggcacaccctactggctggttgccaactcctggaacactgactggggtgacaatggcttctttaaaatactcagaggacaggatcactgtggaatcgaatcacaagtggtggctggaattccacgcaccgatcagtactgggaaaagatctaatctgccgtgggcctgtcgtgccagtcctgggggcgagatcgggntagaaatgcattttattctttaagttcacgtangatacaagtttcaggcagggtctgaaggactggattggncatgtgagccaccgctgcagcacanagcgngctttcccctgtagactagtgccgtanggagtacctgctggcccaatnactgngggccccttcgngatccatccatttcagggagcaagacagagacncagaatggaaacggagttctaacangataaagttcccatnagttcccagacttccagcaagactttccaattntn

SEQ ID NO: 1403 - DNA, 599 bp, Homo sapiens
  misc_feature (15)..(15): n equals a,t,g, or c
  misc_feature (296)..(296): n equals a,t,g, or c
  misc_feature (302)..(303): n equals a,t,g, or c
  misc_feature (314)..(314): n equals a,t,g, or c
  misc_feature (443)..(443): n equals a,t,g, or c
  misc_feature (485)..(485): n equals a,t,g, or c
  misc_feature (543)..(543): n equals a,t,g, or c
  misc_feature (577)..(578): n equals a,t,g, or c
  misc_feature (589)..(589): n equals a,t,g, or c
  misc_feature (596)..(596): n equals a,t,g, or c
ggtggggccctgtantgtggtcaaagtcaaggcctccgggcaggactcgcggcccctccggctggcgggtggggttgacccgcacgtcccgccccgcctctccctccgcgctccggacgggcgacggtagctcgagacccgggactccgcccgcctccccgcgagtatttgaggtccggggcggctccggcgcctctgcccgccgttctgctcgctcgctccccgctctggagtctgccatcatggatgttctcgcagaagcaaatggcacctttgccttaaaccttttgaaaacncttggnnaagacaactcnaaaaatgtgtttttctacccatgagcatgtcctgtgccctgccatggtctacatgggggcaaagggaaacaccgctgcacagatggccagatactttctttcaataaaagtggcggtggtggagacatncaccagggcttcagtctcttttaccgaatgaacaagactggnacgcaatacttgcttaagggggcaacaggtctttggggaaaagcttgggaattctctnactttaaaaattctgcaaaatttacaagaaaganngaggacttganttataangcc

SEQ ID NO: 1404 - DNA, 571 bp, Homo sapiens
  misc_feature (28)..(28): n equals a,t,g, or c
  misc_feature (33)..(33): n equals a,t,g, or c
  misc_feature (40)..(40): n equals a,t,g, or c
  misc_feature (46)..(46): n equals a,t,g, or c
  misc_feature (54)..(54): n equals a,t,g, or c
  misc_feature (105)..(105): n equals a,t,g, or c
  misc_feature (109)..(109): n equals a,t,g, or c
  misc_feature (180)..(180): n equals a,t,g, or c
  misc_feature (193)..(193): n equals a,t,g, or c
  misc_feature (200)..(200): n equals a,t,g, or c
  misc_feature (226)..(226): n equals a,t,g, or c
  misc_feature (270)..(270): n equals a,t,g, or c
  misc_feature (287)..(287): n equals a,t,g, or c
  misc_feature (331)..(331): n equals a,t,g, or c
  misc_feature (336)..(337): n equals a,t,g, or c
  misc_feature (344)..(344): n equals a,t,g, or c
  misc_feature (405)..(405): n equals a,t,g, or c
  misc_feature (454)..(454): n equals a,t,g, or c
  misc_feature (479)..(479): n equals a,t,g, or c
  misc_feature (510)..(510): n equals a,t,g, or c
  misc_feature (527)..(527): n equals a,t,g, or c
  misc_feature (544)..(544): n equals a,t,g, or c
  misc_feature (553)..(553): n equals a,t,g, or c
gccggaattgccgggtcgacccacgcgnacggnaaaatgntgattnatttgagnttctcagtgaaagccaagcataatctaatgacagttgaacagaataatggntcanctcagaacaagttgttggcacctgatatgtttacagaatctgatgatatgtttgctgcgtattttgatagngctcgtcttcggnccggtgncattggaaaagatttcaaagagaatnccaacctcagagataactggaccgatgcagaaggctattatcgngtgaacataggtgaagncctagataaacgttacaatgtgtatggctacactgggcaaaggngaatnnaggaatngttgtacgagccagagataatgcatgagccaaccaagaagtggctgtaaagatcatcaganacaatgagctcatgcaaaagactggtttaaaagaattagagcttttganaaaacttaatgatgctgatcctgangacaaattacattgtctgagactctttaggnacttctatacaagcagnatctttgtttggaattngaggctctnagaagaacttacgagagg

SEQ ID NO: 1405 - DNA, 611 bp, Homo sapiens
  misc_feature (1)..(1): n equals a,t,g, or c
  misc_feature (13)..(13): n equals a,t,g, or c
  misc_feature (24)..(24): n equals a,t,g, or c
  misc_feature (73)..(74): n equals a,t,g, or c
  misc_feature (378)..(378): n equals a,t,g, or c
  misc_feature (423)..(423): n equals a,t,g, or c
  misc_feature (469)..(469): n equals a,t,g, or c
  misc_feature (503)..(503): n equals a,t,g, or c
  misc_feature (559)..(559): n equals a,t,g, or c
  misc_feature (567)..(567): n equals a,t,g, or c
  misc_feature (571)..(571): n equals a,t,g, or c
  misc_feature (573)..(573): n equals a,t,g, or c
  misc_feature (596)..(596): n equals a,t,g, or c
nacgcctgtttgnaccggtccgcnattcccgggtcgacccacgcgtccgcaaagtccatatgaaagatggctnnaacaggctacaagaattagttgatcgagtgctggaacgttttcaggcatctggactaatagtgaaagagtggaatagtgtgaaactgcatgctacagttatgaatacactattcaggaaagaccccaatgttgtttgagaacttctactttggctccctaaagctgaattcaattcacatctctcagaggttcaccgtagacagctttggaaactacgcttcctgtggacaaattgacttctcctgaggtggatcttggaaagcactagaaactaaacatcttcaccaggtgctgaagaaaagnggcttcgttttaattgccaagcagggatgtggacatttggatggngactttcctgggtggttcccatagattcaccattgcctctaatggngctacacccgcatactaccagctgagatggtggnggcataaggagaatttggcctataacccttagggggtccggtttttttcttttaanttttaaantggngnaaatactcataaaacatactggntttaccatttttaag

SEQ ID NO: 1406 - DNA, 746 bp, Homo sapiens
  misc_feature (601)..(601): n equals a,t,g, or c
  misc_feature (640)..(640): n equals a,t,g, or c
  misc_feature (686)..(686): n equals a,t,g, or c
  misc_feature (716)..(716): n equals a,t,g, or c
  misc_feature (744)..(746): n equals a,t,g, or c
gcaggaggtgagaatacttctcctgggcttggataatgctggcaagaccactcttctgaagcagcttgcatctgaagacatcagccacatcacacctacacagggtttcaacatcaaaagtgtacaatcacaaggttttaaactgaatgtatgggacattggtggacagaggaaaatcagaccatactggaagaattattttgaaaataccgatattcttatatatgtaatcgacagtgcagacagaaaaagatttgaagagacgggtcaggaactagcggaattactggaggaagaaaaactaagttgtgtgccagtgctcatctttgctaataagcaggatttgctcacagcagcccctgcctctgaaattgcagaaggactgaacctgcataccatccgcgaccgagtctggcagatccagtcttgctcagctctcacaggagagggcgttcaggatggcatgaactgggtctgcaaaaatgtcaatgcaaagaagaaataaaatctagaccaatggagatgcaggagctgcgggagccgaattcggtcctgaaaaacactaatttgctgctttctgaccaaatggttttccatctgnggacagcttcagctgtttgaagagagggaacaacacggnttagaaagaatccccattccagcagtagatttaactgatctctgangttcaagtatcatttttcaaataaaggaantatattatttcctctgcaaaaaaaaaannn

SEQ ID NO: 1407 - DNA, 632 bp, Homo sapiens
  misc_feature (7)..(7): n equals a,t,g, or c
  misc_feature (628)..(632): n equals a,t,g, or c
gggggcntgtttcctgaaaccatgatgtactttttcatacatgagtctgtccagagtgcttgctaccgtgttcggagtctcgctgcctccctcccgcgggaggtttctcctctttttgaaaattccgtctgtgggatttttagacatttttcgacatcagggtatttgttccaccttggccaggcctcctcggagaagcttgtcccccgtgtgggagggacggagccggactggacatggtcactcagtaccgcctgcagtgtcgccatgactgatcatggctcttgcatttttgggtaaatggagacttccggatcctgtcagggtgtcccccatgcctggaagaggagctggtggctgccagccctgggtcccggcacaggcctgggccttccccttccctcaagccagggctcctcctcctgtcgtgggctcattgtgaccactggcctctctacagcacggcctgtggcctgttcaaggcagaaccacgacccttgactcccgggtggggaggtggccaaggatgctggagctgaatcagacgctgacagttcttcaggcatttctatttcacaatcgaattgaacacattggccaaataaaggttgaaattttaaaaaaaaannnnn

SEQ ID NO: 1408 - DNA, 782 bp, Homo sapiens
  misc_feature (647)..(647): n equals a,t,g, or c
  misc_feature (717)..(717): n equals a,t,g, or c
  misc_feature (727)..(727): n equals a,t,g, or c
ggaaacagatgccttctataaaagagaaatgtttgatccggcagaaaagtacaaaatggaccacaggaggagaggaattgctttaatcttcaatcatgagaggttcttttggcacttaacactgccagaaaggcggggcacctgcgcagatagagacaatcttacccgcaggttttcagatctaggatttgaagtgaaatgctttaatgatcttaaagcagaagaactactgctcaaaattcatgaggtgtcaactgttagccacgcagatgccgattgctttgtgtgtgtcttcctgagccatggcgaaggcaatcacatttatgcatatgatgctaaaatcgaaattcagacattaactggcttgttcaaaggagacaagtgtcacagcctggttggaaaacccaagatatttatcattcaggcatgtcggggaaaccagcacgatgtgccagtcattcctttggatgtagtagataatcagacagagaagttggacaccaacataactgaggtggatgcagcctccgtttacacgctgcctgctggagctgacttcctcatgtggtactctgttgcagaaggatattattctcaccgggaaactgtgaacggctcatggtacattcaagaattgtgtgagatgntgggaaaatatggctcctccttagagttacagaacttctcacactggtgaacaggaaaggttcttaacgnccagtggacnttttgcaaagaccaagtgcaattggaaagaagcaggttcctggttttgcctcaat

SEQ ID NO: 1409 - DNA, 592 bp, Homo sapiens
  misc_feature (187)..(187): n equals a,t,g, or c
  misc_feature (260)..(260): n equals a,t,g, or c
  misc_feature (266)..(266): n equals a,t,g, or c
  misc_feature (364)..(364): n equals a,t,g, or c
  misc_feature (366)..(366): n equals a,t,g, or c
  misc_feature (410)..(410): n equals a,t,g, or c
  misc_feature (417)..(417): n equals a,t,g, or c
  misc_feature (422)..(422): n equals a,t,g, or c
  misc_feature (445)..(445): n equals a,t,g, or c
  misc_feature (451)..(451): n equals a,t,g, or c
  misc_feature (497)..(497): n equals a,t,g, or c
  misc_feature (518)..(518): n equals a,t,g, or c
  misc_feature (532)..(533): n equals a,t,g, or c
  misc_feature (592)..(592): n equals a,t,g, or c
caagagctaggtctgcaccctctgagtcccgctaggggaaagtggggaacccaaggaggacgcaggtcctgggtagggaaagccgaggcccagcctaagtcttggcggacatcgcctcttgcttcccacagtgccgggcggcggtgtccgtcgccttcgctgaagtggagcggcggctgcgctcggntggggcggctcaagcagcattgcggacggagctgagcgcttgcgggcccctgtccgcgctgaaaaccaggcgnagctgntgggggcgctgcaggcactggtgggaggtgtagtgcaagtatgatgggcagacgggagcgccgctaagcgtgcgacagctctgcggacttctcctcgncnacgggggcaaccgcagccactccacgccctactgcgggcttcgncggtcgntgcanattgtcttgcacagcctggccanaagtgnttaagcttttcccgagcagagacagtggcacagcttaggagcacanaacctcaactgtctggtgtgngtgaccggcagtgnntgtatcagacatgtaccgagttcggcttctgggacacagacccctggcatgggctaagn

SEQ ID NO: 1410 - DNA, 451 bp, Homo sapiens
gcgtttgagctgctgattttcatgagtcgccttcaaaactctcgtgtagggttgacaatgtgggggggtgggggatccagcttattcttttattttcaagtccattcttggggctggtggggaggcaggagaatacccctccctaagcccttagtgtgtgccgagcttgctttgtgatgttggcaggggaggggagacctgggtggtgactgagttccctttatcaaacccttcaatgggcacaaaattgagtgcttgattttaggttttatttttttatgaatgtccaaatctgtgtttccccctgccctcccagactgtgtggccagttgaaagtgtctggtttgtgttcatctctccctcatttctggagcagggcctgagaccctgccacatctcctatgctctgcatccacgcctcttttggacattaaaggttgattgatgcaaa

SEQ ID NO: 1411 - DNA, 649 bp, Homo sapiens
  misc_feature (518)..(518): n equals a,t,g, or c
  misc_feature (526)..(526): n equals a,t,g, or c
  misc_feature (545)..(545): n equals a,t,g, or c
  misc_feature (570)..(570): n equals a,t,g, or c
  misc_feature (607)..(607): n equals a,t,g, or c
  misc_feature (610)..(610): n equals a,t,g, or c
  misc_feature (623)..(623): n equals a,t,g, or c
  misc_feature (641)..(641): n equals a,t,g, or c
  misc_feature (649)..(649): n equals a,t,g, or c
ggaaattgtgaaaacagggctttgggtaggcgattgcttcatttacacaagttctgtgaacagattaaattattatgttggaggagaaatagtcaccattgcccacttggacaggacgatgtatctcctaggctacattcctaaagacaacaggctttatctgggggataaagaattgaacatcattagctattccctgctggtttcagtcctggaataccagacagctgtcatgcggagggactttagcatggctgataaggtccttcctaccattccaaaagaacagaggaccagagttgcacactttttggaaaagcagggcttcaagcagcaagctcttacagtatccacagatcctgagcatcgttttgagcttgctcttcagcttggagagttaaaaattgcataccagttagcaagtggaagcagagtcagaacagaagtggaaacaacttgctgaacttgccattagtaaatgcagtttggcctagcccagatgcctgatatgccaggantatggggnctgttgttttgcactgctntggaaagctaaatgggacaagctancaaggggccgaaagagatgaaaaaaagggattatgantantttcgggcaggtntccgctaagttaataaangcgtgcan

SEQ ID NO: 1412 - DNA, 656 bp, Homo sapiens
  misc_feature (463)..(463): n equals a,t,g, or c
  misc_feature (504)..(504): n equals a,t,g, or c
  misc_feature (506)..(506): n equals a,t,g, or c
  misc_feature (538)..(538): n equals a,t,g, or c
  misc_feature (541)..(541): n equals a,t,g, or c
  misc_feature (579)..(579): n equals a,t,g, or c
  misc_feature (603)..(603): n equals a,t,g, or c
  misc_feature (615)..(615): n equals a,t,g, or c
  misc_feature (640)..(640): n equals a,t,g, or c
  misc_feature (654)..(654): n equals a,t,g, or c
ggttgaatactttttacaatttaaaaaaatgatctgttttgaaggcaaaattgcaaatcttgaaattaagaaggcaaaaatgtaaaggagtcaaaactataaatcaagtatttgggaagtgaagactggaagctaatttgcattaaattcacaaacttttatactctttctgtatatacattttttttctttaaaaaacaactatggatcagaatagccacatttagaacactttttgttatcagtcaatatttttagatagttagaacctggtcctaagcctaaaagtgggcttgattctgcagtaaatcttttaccactgcttggcacacataacctttttaaaaatagacactccccgaagctttggtcgcatggcacacactgatccttagatgttccagtaatctaatatggcccagtagtcttgatgaccaaagtcctttttttccatctttagaanactacatgggaacaaacagatcgaacagttttgaagctacngngtgtgtgaatgaacactcttgctttattccanaangctgacatctattttggatggaaaatggggttgggganttacgctttgaataaaggaacttnttatggaatggnttgcattggacacaactggaattanaagaatggttaaanag

SEQ ID NO: 1413 - DNA, 701 bp, Homo sapiens
  misc_feature (9)..(9): n equals a,t,g, or c
  misc_feature (13)..(13): n equals a,t,g, or c
  misc_feature (22)..(22): n equals a,t,g, or c
  misc_feature (26)..(27): n equals a,t,g, or c
  misc_feature (438)..(438): n equals a,t,g, or c
  misc_feature (444)..(444): n equals a,t,g, or c
  misc_feature (542)..(542): n equals a,t,g, or c
  misc_feature (583)..(583): n equals a,t,g, or c
  misc_feature (594)..(594): n equals a,t,g, or c
  misc_feature (660)..(660): n equals a,t,g, or c
  misc_feature (679)..(679): n equals a,t,g, or c
  misc_feature (681)..(682): n equals a,t,g, or c
  misc_feature (701)..(701): n equals a,t,g, or c
aaagggggngaangaggggggngatnnactatagggaaagctggtacgcctgcaggtaccggtccggaattcccgggtcgacccacgcgtccggtctcactgagcaccgtcccagcatccggacaccacagcggcccttcgctccacgcagaaaaccacacttctcaaaccttcactcaacacttccttccccaaagccagaagatgcacaaggaggaacatgaggtggctgtgctgggggcaccccccagcaccatccttccaaggtccaccgtgatcaacatccacagcgagacctccgtgcccgaccatgtcgtctggtccctgttcaacaccctcttcttgaactggtgctgtctgggcttcatagcattcgctactccgtgaagtctagggacaggaagatggtggcgactgaccgggcccaggctatgcctncaccgncaagtgcctgacatctggccctgattctggcatcctcatgaccattggattcatcctggtactggtattcggctctgtgacagtctaccatattatgntacagataatacaggaaaaacggggttactaagtagcccgnccatagcctgnaacctttgcacttcactgggcaatgcttgccctgcaccttgggctggtggccctggcccccttggncctggcccttagattccgnanntttatacccacaaaacttn

SEQ ID NO: 1414 - DNA, 712 bp, Homo sapiens
  misc_feature (18)..(19): n equals a,t,g, or c
  misc_feature (35)..(36): n equals a,t,g, or c
  misc_feature (280)..(280): n equals a,t,g, or c
  misc_feature (312)..(312): n equals a,t,g, or c
  misc_feature (398)..(398): n equals a,t,g, or c
  misc_feature (419)..(419): n equals a,t,g, or c
  misc_feature (422)..(422): n equals a,t,g, or c
  misc_feature (466)..(466): n equals a,t,g, or c
  misc_feature (494)..(494): n equals a,t,g, or c
  misc_feature (497)..(497): n equals a,t,g, or c
  misc_feature (563)..(563): n equals a,t,g, or c
  misc_feature (604)..(604): n equals a,t,g, or c
  misc_feature (654)..(654): n equals a,t,g, or c
  misc_feature (657)..(657): n equals a,t,g, or c
  misc_feature (667)..(667): n equals a,t,g, or c
  misc_feature (690)..(690): n equals a,t,g, or c
  misc_feature (692)..(692): n equals a,t,g, or c
gggggggaatgaggcgcnnaagttggtacgcctgnnggtaccggtccggaattcccgggtcgacccacgcgtccggcaattcagaccctcgaggattcggtcatattggaattgctgttcctgatgtatacatgtgcttgtaaaaggtttgaagaactgggagtcaaatttgtgaagaaacctgatgatggtaaaatgaaaggcctggcatttattcaagatcctgatggctactggattgaaattttgaatcctaacaaaatggcaaccttaatgtagngctgtgagaattctcctttgagatttcagaanaaaggaaacaatgtgattcaagatatttacataccagaagcatctaggactgatggatcactgtcccgaatcaaaatattcttcantccatttccccttcctatttnagntgttccttttcacctactgttcagtcattctggttttcaagcantgctttatctcatgtccttgaatatagntgngtaactttattttttaggtaataattagaacaggtcccttcagaggctgcatttgccttcttctgncacctaaatattacttcccttcaaatctgcctttgaatcancatttttaaaaaaaaattaacatggttttgttgaagttatcttctggggnttnaattcctcanaaaccacttttttccaacggaangnaaagaacctagggtctttcg

SEQ ID NO: 1415 - DNA, 730 bp, Homo sapiens
  misc_feature (7)..(8): n equals a,t,g, or c
  misc_feature (11)..(11): n equals a,t,g, or c
  misc_feature (27)..(27): n equals a,t,g, or c
  misc_feature (40)..(40): n equals a,t,g, or c
  misc_feature (362)..(362): n equals a,t,g, or c
  misc_feature (375)..(375): n equals a,t,g, or c
  misc_feature (399)..(399): n equals a,t,g, or c
  misc_feature (444)..(444): n equals a,t,g, or c
  misc_feature (548)..(548): n equals a,t,g, or c
  misc_feature (662)..(662): n equals a,t,g, or c
  misc_feature (664)..(664): n equals a,t,g, or c
  misc_feature (688)..(688): n equals a,t,g, or c
  misc_feature (719)..(719): n equals a,t,g, or c
  misc_feature (721)..(721): n equals a,t,g, or c
atgaagnnggngattactatagggaangctggtacgcctncaggtaccggtccggaattcccgggtcgacccacgcgtccggtttcaacagcatctctgctgttgacaatggctctctggccaacacgcctcatctgagggagcttcacttggacaacaacaagcttaccagagtacctggtgggctggcagagcataagtacatccaggttgtctaccttcataacaacaatatctctgtagttggatcaagtgacttctgcccacctggacacaacaccaaaaaggcttcttattcgggtgtgagtcttttcagcaacccggtccagtactgggagatacagccatccaccttcagatgngctacgtgcgctntggcatttaacttcggaactatangtaattctcaagaagccctcatttttataacctgcaaaatcttgntaatgcattgctaaaaaataaataaaagctagatactggaaacctaactgcaatgtggatgttttacccacatgacttattatgcataaagccaaatttccagnttaagtaattgcctaccataaaaaagaaatttttgcctgccattttcagaatcatcttttgaagctttctggtgatggtaactgagctactagagatattcttaattcctaaangnaaaatttggagtaaatatatatgncaatatttagtaagcttttcttttttaattncnggaaaaatt

SEQ ID NO: 1416 - DNA, 633 bp, Homo sapiens
  misc_feature (457)..(457): n equals a,t,g, or c
  misc_feature (527)..(527): n equals a,t,g, or c
  misc_feature (579)..(579): n equals a,t,g, or c
  misc_feature (603)..(603): n equals a,t,g, or c
  misc_feature (610)..(610): n equals a,t,g, or c
  misc_feature (625)..(626): n equals a,t,g, or c
gcatgaaccaggaaaaactcgccaaactgcaggcacaagtgcgcattggtgggaaaggaactgctcgcagaaagaagaaggtggttcatagaacagccacagcagatgacaaaaaacttcagttctccttaaagaagttaggggtaaacaatatctctggtattgaagaggtgaatatgtttacaaaccaaggaacagtgatccactttaacaaccctaaagttcaggcatctctggcagcgaacactttcaccattacaggccatgctgagacaaagcagctgacagaaatgctacccagcatcttaaaccagcttggtgcggatagtctgactagtttaaggagactggccgaagctctgcccaaacaatctgtggatggaaaagcaccacttgctactggagaggatgatgatgatgaagttccagatcttgtggagaattttgatgaggcttncaagaatgaggcaaactgaattgagtcaacttctgaagataaaacctgaagaagttactgggagctgtantttatattatgactgctttttaagaaatttttggttatggatcttataaaanctagatctcttaaaatttttaagncccaagncccttggaacttggnnttttttt

SEQ ID NO: 1417 - DNA, 666 bp, Homo sapiens
  misc_feature (546)..(546): n equals a,t,g, or c
  misc_feature (593)..(593): n equals a,t,g, or c
  misc_feature (631)..(631): n equals a,t,g, or c
  misc_feature (662)..(662): n equals a,t,g, or c
  misc_feature (665)..(665): n equals a,t,g, or c
gcatttatccaagaagctgattttcccttcaacaattacctcagcatgctagacactgtttctgggaacagcgtgtatgaggttatcacatcctggatggaaaacatgccagaaggaaaatggcctaactggatgattggtggaccagacagttcacggctgacttcgcgtttggggaatcagtatgtcaacgtgatgaacatgcttcttttcacactccctggaactcctataacttactatggagaagaaattggaatgggaaatattgtagccgcaaatctcaatgaaagctatgatattaatacccttcgctcaaagtcaccaatgcagtgggacaatagttcaaatgctggtttttctgaagctagtaacacctggttacctaccaattcagattaccacactgtgaatgttgatgtccaaaagactcagcccagatcggctttgaagttatatcaagatttaagtctacttcatgccaatgagctactcctcaacaggggctggttttgccatttgaggaatgacagccactatttgtgnacacaagaaactggatggcatcgacagaactttaacggggtttgaantttgagaatcacctggtaaactacataaatgattcggncttccgttaataagaataggtaagaccaatnttnc

SEQ ID NO: 1418 - DNA, 699 bp, Homo sapiens
  misc_feature (3)..(3): n equals a,t,g, or c
  misc_feature (21)..(21): n equals a,t,g, or c
  misc_feature (23)..(23): n equals a,t,g, or c
  misc_feature (27)..(27): n equals a,t,g, or c
  misc_feature (80)..(80): n equals a,t,g, or c
  misc_feature (510)..(510): n equals a,t,g, or c
  misc_feature (522)..(522): n equals a,t,g, or c
  misc_feature (551)..(551): n equals a,t,g, or c
  misc_feature (575)..(575): n equals a,t,g, or c
  misc_feature (598)..(598): n equals a,t,g, or c
  misc_feature (678)..(678): n equals a,t,g, or c
  misc_feature (682)..(683): n equals a,t,g, or c
  misc_feature (691)..(691): n equals a,t,g, or c
  misc_feature (696)..(696): n equals a,t,g, or c
ttngaatatcccgttagctgnangccngcaggtaccggtccggaattcccgggtcgacccacgcgtccggcccaactcantgcctgctggaagctctgtgggaatcagatgaaacttgagggaattgtgactctgttccctgttcagggtcccctgcccttctatctgggagctagggaaggtatgggggaggaaagagaatggatttatagctacccttaccctcacacatacacttgaaaaaactttcagcctagccagttctagcccctgtcctcttagatatatccccctttctgggtgaactataggctctgtgcctctcagacaaattctgatctctaagagatccccagacctcacttgcctctgctccatcttggccctgattcaaccctaagataatagcacaacaaaattcttcataaagatatttttattcacctggtccgtgctatatggaggaggccaagtccatttagtgacatttcttcccataatgtgagtggngaggattgtggngaggaggggctttgggttcctggggttgngcatatgaaggggaagatgggggntaggtggaggaagaaagcagcgnggttagctaagggtaatggtttttggggcaaaactaattaaatggcaggaaactcttcaaaaaaaaaaaaaaaagggggngccnntttaaagnacccngtt

SEQ ID NO: 1419 - DNA, 636 bp, Homo sapiens
  misc_feature (21)..(21): n equals a,t,g, or c
  misc_feature (35)..(35): n equals a,t,g, or c
  misc_feature (45)..(45): n equals a,t,g, or c
  misc_feature (49)..(49): n equals a,t,g, or c
  misc_feature (495)..(495): n equals a,t,g, or c
  misc_feature (612)..(612): n equals a,t,g, or c
  misc_feature (616)..(616): n equals a,t,g, or c
  misc_feature (622)..(623): n equals a,t,g, or c
  misc_feature (629)..(629): n equals a,t,g, or c
gtgacttccgaatggcaccgntctgaatataccgntagctggtangccngcaggtacccggtccggaattcccgggtcgacccacgcgtccggccacagccttccgcgcctcgctcagctccaacatggcaaaaatctccagccctacagagactgagcggtgcatcgagtccctgattgctgtcttccagaagtatgctggaaaggatggttagaactacactctctccaagacagagttcctaagcttcatgaatacagaactagctgccttcacaaagaaccagaaggaccctggtgtccttgaccgcatgatgaagaaactggacaccaacagtgatggtcagctagatttctcagaatttcttaatctgattggtggcctagctatggcttgccatgactccttcctcaaggctgcccttccagaagcggacctgaggaccccttggccctggccttcaacccaccccctttccttccaagcctttctgncatcatcttcacaggccacccatccctgagcacactaaccacttaatgcaggccccaactggcaatagtaataaaagcaatggcacttttttaaaacatggaaaaaaaaaaaaaaangggngcccgnntttagnggaccca

SEQ ID NO: 1420 - DNA, 659 bp, Homo sapiens
  misc_feature (4)..(5): n equals a,t,g, or c
  misc_feature (16)..(16): n equals a,t,g, or c
  misc_feature (18)..(18): n equals a,t,g, or c
  misc_feature (26)..(26): n equals a,t,g, or c
  misc_feature (280)..(280): n equals a,t,g, or c
  misc_feature (303)..(303): n equals a,t,g, or c
  misc_feature (346)..(346): n equals a,t,g, or c
  misc_feature (579)..(579): n equals a,t,g, or c
  misc_feature (615)..(615): n equals a,t,g, or c
  misc_feature (640)..(640): n equals a,t,g, or c
  misc_feature (653)..(653): n equals a,t,g, or c
  misc_feature (655)..(655): n equals a,t,g, or c
cctnngttcccccagntntaatacgnctcactatagggaaagctggtaccgcctgcaggtaccggtccggaattcccgggtcgacccacgcgtccgcaacttccttcggtcgtcccgaatccgggttcatccgacaccagccgcctccaccatgccgccgaagttcgaccccaacgagatcaaagtcgtatacctgaggtgcaccggaggtgaagtcggtgccacttctgccctggcccccaagatcggccccctgggtctgtctccaaaaaaagttggngatgacattgccaaggcaacggntgactggaagggcctgaggattacagtgaaactgaccattcanaacagacaggcccagattgaggtggtgccttctgcctctgccctgatcatcaaagccctcaaggaaccaccaagagacagaaagaaacagaataacattaaacacagtgggaatatcacttttgatgagattgtcaacattgctcgacagatgcggcaccgatccttagccagagaactctcttgaaccattaaagagatcctggggactggccagtcagtgggctgtaatgntgatggccgccattcctcatgacattcatccgattnacatcaacaggtggttgcttgtggnaatgcccagcccngnttaa

SEQ ID NO: 1421 - DNA, 674 bp, Homo sapiens
  misc_feature (290)..(290): n equals a,t,g, or c
  misc_feature (322)..(322): n equals a,t,g, or c
  misc_feature (335)..(335): n equals a,t,g, or c
  misc_feature (346)..(346): n equals a,t,g, or c
  misc_feature (349)..(349): n equals a,t,g, or c
  misc_feature (356)..(356): n equals a,t,g, or c
  misc_feature (421)..(421): n equals a,t,g, or c
  misc_feature (493)..(494): n equals a,t,g, or c
  misc_feature (554)..(554): n equals a,t,g, or c
  misc_feature (560)..(560): n equals a,t,g, or c
  misc_feature (600)..(600): n equals a,t,g, or c
  misc_feature (614)..(614): n equals a,t,g, or c
  misc_feature (645)..(645): n equals a,t,g, or c
  misc_feature (661)..(661): n equals a,t,g, or c
  misc_feature (671)..(671): n equals a,t,g, or c
gctcccccatgggcccccactccatgtcggtgcccaccacacccaccctgggcttcagcactggcagcccccagctcagctcacctatgaaccccgtcagcagcagcgaggacatcaagccccccctgggcctcaatggcgtcctcaaggtccccgcccacccctcaggaaacatggcttccttcaccaagcacatctgcgccatctgcggggaccgctcctcaggcaagcactatggagtgtacagctgcgaggggtgcaagggcttcttcaagcggacggtgcgcaanggacttgacctaaaacttggcgggacaaccanggactggcttgantgacaagcggnaancggaacnggtgccaagtattgccgttaccagaagtgcctggcatgggcatgaagcgggaagccgtgcaggangacggcaagcgtgcaaggaccggaacgagaatgaggtggagtcgaccagcagcgccacgagacatgccggtnnagaggatcctggagctgagcttgccgtggagccaagaccgagactactggaggcaacatngggttnacccagttggcaaagactttaccacattgcaagaaccacnacagttttacttgngaggggcagggatcaactttaaattcctggnaaagtatcgttggaantgaagtgtancct

SEQ ID NO: 1422 - DNA, 672 bp, Homo sapiens
  misc_feature (331)..(331): n equals a,t,g, or c
  misc_feature (473)..(473): n equals a,t,g, or c
  misc_feature (483)..(483): n equals a,t,g, or c
  misc_feature (497)..(497): n equals a,t,g, or c
  misc_feature (502)..(502): n equals a,t,g, or c
  misc_feature (504)..(504): n equals a,t,g, or c
  misc_feature (512)..(512): n equals a,t,g, or c
  misc_feature (519)..(519): n equals a,t,g, or c
  misc_feature (530)..(530): n equals a,t,g, or c
  misc_feature (550)..(550): n equals a,t,g, or c
  misc_feature (566)..(566): n equals a,t,g, or c
  misc_feature (599)..(599): n equals a,t,g, or c
  misc_feature (619)..(619): n equals a,t,g, or c
  misc_feature (636)..(636): n equals a,t,g, or c
  misc_feature (660)..(660): n equals a,t,g, or c
  misc_feature (667)..(667): n equals a,t,g, or c
gcccaaaccttgttgcaagtttttgcattggcatctttggatttcagtcttgatgtttgttctatcagacttaaccttttatttcctgtccttccttgaaattgctgattgttctgctccctctacagatatttatatcaattcctacagctttcccctgccatccctgaactctttctagcccttttagattttggcactgtgaaacccctgctggaaacctgagtgaccctccctccccaccaagagtccacagacctttcatctttcacgaacttgatcctggtaacaggtggtaataccatgggtgctgggacactacagcattganaggtggaaggaagcccttttccttggactggatcttttcaactattggtttatcctgctttgggggcaatgtgtcaaaagtcccctcaggaattttcagaggaaagaacattttatgaggctttctctaaaggttcctttgnataaggaagnatgctcacttaaanttacngnaaagaggngaactgnggtaaaacctnaaaagttaaaaagctactgntaaactggaacaaagnggctatattggaactaaggcaattgaaagcttnaagcttcggaacatggaccnttaagctggggactccntttaaaaatagggatgaataaaangcccaanaaggg

SEQ ID NO: 1423 - DNA, 711 bp, Homo sapiens
  misc_feature (286)..(286): n equals a,t,g, or c
  misc_feature (297)..(298): n equals a,t,g, or c
  misc_feature (327)..(327): n equals a,t,g, or c
  misc_feature (364)..(364): n equals a,t,g, or c
  misc_feature (375)..(375): n equals a,t,g, or c
  misc_feature (386)..(386): n equals a,t,g, or c
  misc_feature (410)..(410): n equals a,t,g, or c
  misc_feature (418)..(418): n equals a,t,g, or c
  misc_feature (457)..(457): n equals a,t,g, or c
  misc_feature (522)..(522): n equals a,t,g, or c
  misc_feature (534)..(535): n equals a,t,g, or c
  misc_feature (571)..(572): n equals a,t,g, or c
  misc_feature (583)..(583): n equals a,t,g, or c
  misc_feature (587)..(587): n equals a,t,g, or c
  misc_feature (591)..(591): n equals a,t,g, or c
  misc_feature (606)..(606): n equals a,t,g, or c
  misc_feature (637)..(637): n equals a,t,g, or c
  misc_feature (694)..(694): n equals a,t,g, or c
  misc_feature (707)..(707): n equals a,t,g, or c
  misc_feature (709)..(710): n equals a,t,g, or c
gcagagccaaaagtgaaccgaggaaaagcaggtgtgaaacgatctgcagcggagatgtacggctcctcttttgacttggactatgactttcaacgggactattatgataggatgtacagttacccagcacgtgtacctcctcctcctcctattgctcgggctgtagtgccctcgaaacgtcagcgtgtatcaggaaacacttcacgaaggggcaaaagtggcttcaattctaagagtggacagcggggatcttccaagtctggaaagttgaaaggagatgaccttnaggccatttannaaggacttgacccagattaaaccaaaagnggattctcttctggaaaaactgggaaaaaattgaaangaacagagcanacaagcagtanagatgaagaatgataagtcagaanaggagcanagcagcagctccgtgaagaaagatgagactaatgtgaanatggagtctgagggggggtgcagatgactctgctgaggagggggacctactggatgatgatgatnatgaagatcggnnggatgaccaagctggagttgatcaaggatgatcaannaagagcttgangaangganaggatgacggagacngcgcccattggccaaggatgactcttaagcncataaggggggttaaaaatcttatcccattatttctttacctaagcccttggctaanaacaaattttttncnna

SEQ ID NO: 1424 - DNA, 795 bp, Homo sapiens
  misc_feature (9)..(9): n equals a,t,g, or c
  misc_feature (528)..(528): n equals a,t,g, or c
  misc_feature (584)..(584): n equals a,t,g, or c
  misc_feature (645)..(645): n equals a,t,g, or c
  misc_feature (677)..(677): n equals a,t,g, or c
  misc_feature (717)..(717): n equals a,t,g, or c
  misc_feature (768)..(768): n equals a,t,g, or c
  misc_feature (787)..(787): n equals a,t,g, or c
  misc_feature (795)..(795): n equals a,t,g, or c
gcccccctntgaaccttgtctaccacgactactatagggaaagctggtacgcctgcaggtaccggtccggaattcccgggtcgacccacgcgtccggtccactggcgtcttcaccaccatggagaaggctggggctcatttgcaggggggagccaaaagggtcatcatctctgccccctctgctgatgcccccatgttcgtcatgggtgtgaaccatgagaagtatgacaacagcctcaagatcatcagcaatgcctcctgcaccaccaactgcttagcacccctggccaaggtcatccatgacaactttggtatcgtggaaggactcatgaccacagtccatgccatcactgccacccagaagactgtggatggcccctccgggaaactgtggcgtgatggccgcggggctctccagaacatcatccctgcctctactggcgctgccaaggctgtggcaaggtcatccctgagctgaacgggaagctcactgcatggccttccgtgtccccactgccaacgtgtcantggtggacctgacctgccgtctagaaaaacctgccaaatatgatgacatcaagaangtggtgaaacaaggcgtcggaaggcccccttcaaggggcatcctgggctacacttgagcanccaagtgggcctcctcttgactttcaacaagngacacccaattcctccaccttttaaccttgggcttggcantggcctttaacgaccaatttttcaagctcaatttccgggatgacaccaaanttggttaccgcaacagggnggggaacn

SEQ ID NO: 1425 - DNA, 708 bp, Homo sapiens
  misc_feature (2)..(3): n equals a,t,g, or c
  misc_feature (65)..(65): n equals a,t,g, or c
  misc_feature (176)..(176): n equals a,t,g, or c
  misc_feature (187)..(187): n equals a,t,g, or c
  misc_feature (222)..(222): n equals a,t,g, or c
  misc_feature (250)..(250): n equals a,t,g, or c
  misc_feature (285)..(285): n equals a,t,g, or c
  misc_feature (312)..(312): n equals a,t,g, or c
  misc_feature (321)..(321): n equals a,t,g, or c
  misc_feature (402)..(402): n equals a,t,g, or c
  misc_feature (422)..(422): n equals a,t,g, or c
  misc_feature (450)..(450): n equals a,t,g, or c
  misc_feature (534)..(534): n equals a,t,g, or c
  misc_feature (553)..(553): n equals a,t,g, or c
  misc_feature (576)..(576): n equals a,t,g, or c
  misc_feature (589)..(589): n equals a,t,g, or c
  misc_feature (652)..(652): n equals a,t,g, or c
  misc_feature (662)..(662): n equals a,t,g, or c
  misc_feature (664)..(664): n equals a,t,g, or c
  misc_feature (668)..(668): n equals a,t,g, or c
  misc_feature (686)..(686): n equals a,t,g, or c
gnntgaaagtgcctcctgcgattaaccagttcacccaggccctggaccgccaaacagctactcanctgcttaagctggcccacaagtacagaccagagacaaagcaagagaagaagcagagactgttggcccgggccgagaagaaggctgctggcaaaggggacgtcccaacgaanagaccacctgnccttcgagcaggagttaacaccgtcaccaccttgntggagaacaagaaagctcagctggtggngattgcacacgacgtggatcccatcgagctggttngcttctttgctgcctgggcggaaaaangggggtccntaatggattatcaaggggaaagggcaagactgggacgtctaagtccacaaggaaggacctggaaccaacttgtcgcctttnacacaaggtgaaacttcggnaagacaaaaggcgcttttgggcttaaanctgggtgggaaagcttatcaagggacccaatttacaaatggaccggattaccaatgaagaatcccggccgtcaacttgggggtnggcaatggtccttggggtncctaaagtcttgggggcttcggnaatcggccaagcnttggaaaaagggcaaaaggcttaaaaggaaactttggccacttaaactggggtttaaaatggnaccacctggntnaaanttttctgggaccattaanaaataaatttgaaattaattac

SEQ ID NO: 1426 - DNA, 659 bp, Homo sapiens
  misc_feature (311)..(311): n equals a,t,g, or c
  misc_feature (536)..(536): n equals a,t,g, or c
  misc_feature (538)..(538): n equals a,t,g, or c
  misc_feature (549)..(549): n equals a,t,g, or c
  misc_feature (606)..(606): n equals a,t,g, or c
  misc_feature (610)..(610): n equals a,t,g, or c
  misc_feature (630)..(630): n equals a,t,g, or c
  misc_feature (646)..(646): n equals a,t,g, or c
  misc_feature (653)..(653): n equals a,t,g, or c
gcgcaatggaagaagagatcgccgcgctggtcattgacaatggctccggcatgtgcaaagctggttttgctggggacgacgctccccgagccgtgtttccttccatcgtcgggcgccccagacaccagggcgtcatggtgggcatgggccagaaggactcctacgtgggcgacgaggcccagagcaagcgtggcatcctgaccctgaagtaccccattgagcatggcatcgtcaccaactgggacgacatggagaagatctggcaccacaccttctacaacgagctgcgcgtggccccggaggaacaccantgcttgtgaccgaggcccccttgaaccccaaggccaacagagagaagatgactcagattatgtttgagaccttcaacaccccggccattgtacgtggccatccaggcccggcttgtccctctacgcctctgggccgcaccactggcattgtcatggactctggagacggggtcacccacacggtgcccatttacgagggctacgcccttccccacgccattctgngnctggacctggntggccgggaccttgaccgactacctcatgaagatcctacttgacgaggttcagtttnccancacggccaaccggaaattgngcgcgacatcaagganaacttgngttcgt

SEQ ID NO: 1427 - DNA, 450 bp, Homo sapiens
  misc_feature (9)..(9): n equals a,t,g, or c
  misc_feature (103)..(103): n equals a,t,g, or c
  misc_feature (248)..(248): n equals a,t,g, or c
  misc_feature (254)..(254): n equals a,t,g, or c
  misc_feature (262)..(262): n equals a,t,g, or c
  misc_feature (295)..(295): n equals a,t,g, or c
  misc_feature (315)..(316): n equals a,t,g, or c
  misc_feature (328)..(328): n equals a,t,g, or c
  misc_feature (380)..(380): n equals a,t,g, or c
  misc_feature (411)..(411): n equals a,t,g, or c
  misc_feature (417)..(417): n equals a,t,g, or c
  misc_feature (431)..(431): n equals a,t,g, or c
  misc_feature (446)..(446): n equals a,t,g, or c
gatttaagntaaaatattgaaccatttaacataaccataacttttttctgattcctcttaataaggatatacttaccaagatatgagctaaacacctacaagntctgccatctttgaacgtctcacagagattctcattctaggcagagatcctacaagaatccaggatgatgatcccagattgccagcgcaggttggaagccgcatatttggatcttcaacggatactagtaagcaaagacttctgngcatgnttaaattntttttttcaatccaatacatgggaaagccaaangtttaaatatttaacactgnnaactagttggcngcatttctaatccttggcctttaaaccggtatattttaaaataattaatggnggttaaattggggtttgaattatgcctccgnaaaagnactggttctagcanggttggtcagtttantaaa

SEQ ID NO: 1428 - DNA, 600 bp, Homo sapiens
  misc_feature (465)..(465): n equals a,t,g, or c
  misc_feature (485)..(485): n equals a,t,g, or c
  misc_feature (496)..(496): n equals a,t,g, or c
  misc_feature (550)..(550): n equals a,t,g, or c
  misc_feature (566)..(566): n equals a,t,g, or c
  misc_feature (569)..(569): n equals a,t,g, or c
  misc_feature (573)..(573): n equals a,t,g, or c
  misc_feature (586)..(586): n equals a,t,g, or c
gcccaggtgtacttgagctgtgaggtcatcggaatcccgacacctgtcctcatctggaacaaggtaaaaaggggtcactatggagttcaaaggacagaactcctgcctggtgaccgggacaacctggccattcagacccggggtggcccagaaaagcatgaagtaactggctgggtgctggtatctcctctaagtaaggaagatgctggagaatatgagtgccatgcatccaattcccaaggacaggcttcagcatcagcaaaaattacagtggttgatgccttacatgaaataccagtgaaaaaaggtgaaggtgccgagctataaacctccagaatattattagtctgcatggttaaaagtagtcatggataactacattacctgttcttgcctaataagtttcttttaatccaatccactaacactttagttatattcactggttttacacagagaaatacnaaataaagatcacacatcangactatctacnaaaatttattatatatttacagaagaaaagcatgcatatcattaaacaaataanatactttttatcacanaanaganaaaaaaaaggggngccgttttagagaa

SEQ ID NO: 1429 - DNA, 548 bp, Homo sapiens
  misc_feature (297)..(297): n equals a,t,g, or c
  misc_feature (311)..(311): n equals a,t,g, or c
  misc_feature (319)..(319): n equals a,t,g, or c
  misc_feature (347)..(347): n equals a,t,g, or c
  misc_feature (384)..(384): n equals a,t,g, or c
  misc_feature (411)..(411): n equals a,t,g, or c
  misc_feature (451)..(451): n equals a,t,g, or c
  misc_feature (493)..(493): n equals a,t,g, or c
gggggagggagcccacgcctcaggtggagtgggcagaggtgcaagagagggatgtactgaagcttcttcccgtcctgccacagacacttctcctgccttcccaccctgacccggcagaacccaccaagtgcctgtgtgcagcctcctgtgcctcacccagggcctgaccccagagtggtcccaacaacccggtctcatgcccactccccatccctgcttcccaaaaattgcactgtgtgcagtttgcaacaaagaatcccgctggcatcctgtccttgggaaccctttctcattctncaagcctgggcaantttgctgnacaaggcagaagtggccttaagcccaanattagcaacactcataagttttggcaattaccaatanacacttatgggaaccattttaactggnactttctcttttctttcacttaatttcttaaacttggtgntttacactagacacatgcaaatgtatggtttaaacacaccanaacagatatgcccaatgaattgcctgtcaaagcttgaaggcaagaagagggcctg

SEQ ID NO: 1430 - DNA, 498 bp, Homo sapiens
ataatggatttggtaatgatggaagcaattttggaggtggtggaagctacaatgattttgggaattacaacaatcagtcttcaaattttggacccatgaagggaggaaattttggaggcagaagctctggcccctatggcggtggaggccaatactttgcaaaaccacgaaaccaaggtggctatggcggttccagcagcagcagtagctatggcagtggcagaagattttaattaggaaacaaagcttagcaggagaggagagccagagaagtgacagggaagctacaggttacaacagatttgtgaactcagccaagcacagtggtggcagggcctagctgctacaaagaagacatgttttagacaaatactcatgtgtatgggcaaaaaactcgaggactgtatttgtgactaattgtataacaggttattttagtttctgttctgtggaaagtgtaaagcattccaacaaagggttttaatgtagatttttttt

SEQ ID NO: 1431 - DNA, 306 bp, Homo sapiens
  misc_feature (5)..(5): n equals a,t,g, or c
  misc_feature (14)..(14): n equals a,t,g, or c
  misc_feature (64)..(64): n equals a,t,g, or c
  misc_feature (120)..(120): n equals a,t,g, or c
  misc_feature (125)..(125): n equals a,t,g, or c
  misc_feature (155)..(155): n equals a,t,g, or c
  misc_feature (171)..(171): n equals a,t,g, or c
  misc_feature (206)..(206): n equals a,t,g, or c
  misc_feature (244)..(244): n equals a,t,g, or c
  misc_feature (279)..(279): n equals a,t,g, or c
  misc_feature (282)..(282): n equals a,t,g, or c
  misc_feature (296)..(296): n equals a,t,g, or c
  misc_feature (302)..(302): n equals a,t,g, or c
ggcanaggaaaaanaggacttcaaagatttaattagacaaggaattctaaaaaatgaaaatggnggctccagaagatgaagagaaattttgaaagaagctattaaaaatgtaaacacagncactnaaatacaactcaaatcccaagcagtattgnaagatatatttaatgntgatcgctgcataaatatcaccaaacagaactccntcattttggattttaagctcgtgccttaaagggatttntggccaaagagggtcaagggaaatttaccctgttncgnggcacattccggtntggttngcag

SEQ ID NO: 1432 - DNA, 413 bp, Homo sapiens
  misc_feature (2)..(2): n equals a,t,g, or c
  misc_feature (102)..(102): n equals a,t,g, or c
  misc_feature (145)..(145): n equals a,t,g, or c
  misc_feature (185)..(185): n equals a,t,g, or c
  misc_feature (283)..(283): n equals a,t,g, or c
  misc_feature (285)..(285): n equals a,t,g, or c
  misc_feature (354)..(354): n equals a,t,g, or c
  misc_feature (387)..(387): n equals a,t,g, or c
  misc_feature (390)..(390): n equals a,t,g, or c
  misc_feature (392)..(392): n equals a,t,g, or c
  misc_feature (394)..(394): n equals a,t,g, or c
tnctagagcctgctgtgcaccaagattgtcctggtcaagaggatgcagaggcaaataggacatggttcttccattcaaggacttcgtggtctggtgcacagntaaatcatagataatgtcatacgtgcccatgactcatggcagntgccaggaggccgcagagacccagaggaaggggcatctgnagttagatgggggagagaagggaggctcctcatagagggagttgctgagctaaatttagaagagccaaaagcagttggctaggtgaccaaagggagtngnggggagagttcatccagcctgaaggtttttacacatatttccaccccacactgcatttattatataatnttatacacacgtatacccttttatgggggggtnccntncngtaaggattaacttggaaa

SEQ ID NO: 1433 - DNA, 500 bp, Homo sapiens
  misc_feature (354)..(354): n equals a,t,g, or c
  misc_feature (374)..(375): n equals a,t,g, or c
  misc_feature (379)..(379): n equals a,t,g, or c
  misc_feature (385)..(385): n equals a,t,g, or c
  misc_feature (387)..(387): n equals a,t,g, or c
  misc_feature (394)..(394): n equals a,t,g, or c
  misc_feature (404)..(404): n equals a,t,g, or c
  misc_feature (406)..(406): n equals a,t,g, or c
  misc_feature (408)..(408): n equals a,t,g, or c
  misc_feature (413)..(414): n equals a,t,g, or c
  misc_feature (426)..(426): n equals a,t,g, or c
  misc_feature (432)..(432): n equals a,t,g, or c
  misc_feature (444)..(444): n equals a,t,g, or c
  misc_feature (447)..(447): n equals a,t,g, or c
  misc_feature (449)..(449): n equals a,t,g, or c
  misc_feature (464)..(464): n equals a,t,g, or c
  misc_feature (471)..(471): n equals a,t,g, or c
  misc_feature (480)..(480): n equals a,t,g, or c
  misc_feature (489)..(489): n equals a,t,g, or c
ggcagagggatattctaatattgctgttttaggacttactatgaacacagaaagaagaaatacgatgcatttgtcagatttaaagaaaagtaattcaatattgaatgcaagaaaagttttaattgtatctagctagaagtacaagtatatgttacatgtaaattttcttacataactatcattggtacatggaactacatcagaccaattacattgttttaagtttctgaacaaaccaaaattacttaatggtttaattaaataacaataccatcctaaacatacaggacacaacttcacaaccccttaccctcacctttgggcacgattttcattacacgggacaggactgtncagtttaacctccggtgttnntccncgttcntncattggnccttggttgncntngattnntttggtaatctncttccnttttttcttcanccngngtggtttcggatccnctgaggnactgagggnaaattaggntttccattgcc

SEQ ID NO: 1434 - DNA, 281 bp, Homo sapiens
  misc_feature (51)..(51): n equals a,t,g, or c
  misc_feature (60)..(60): n equals a,t,g, or c
  misc_feature (102)..(102): n equals a,t,g, or c
  misc_feature (113)..(113): n equals a,t,g, or c
  misc_feature (135)..(135): n equals a,t,g, or c
  misc_feature (143)..(143): n equals a,t,g, or c
  misc_feature (150)..(150): n equals a,t,g, or c
  misc_feature (153)..(153): n equals a,t,g, or c
  misc_feature (164)..(164): n equals a,t,g, or c
  misc_feature (174)..(174): n equals a,t,g, or c
  misc_feature (179)..(180): n equals a,t,g, or c
  misc_feature (196)..(196): n equals a,t,g, or c
  misc_feature (198)..(198): n equals a,t,g, or c
  misc_feature (247)..(247): n equals a,t,g, or c
  misc_feature (257)..(257): n equals a,t,g, or c
  misc_feature (268)..(268): n equals a,t,g, or c
ggcagagcctgccggggatagcaccatgcctgcttgtcgcctaggcccgcnagtcgccgncctcctcctcagcctgctgctgttcggcttcaccctagtctnaggggacaggnggcagagaagactggcgtgtgncccgtagntccaggntgnaccagaactgncacgcaagantgcgnncttcggaacagcgaantncgctcggaccaaccttcaagtgctgcagcgcgggactgtggccaccttnctggctattntgggccaatgnataaggaagggtt

SEQ ID NO: 1435 - DNA, 332 bp, Homo sapiens
  misc_feature (127)..(127): n equals a,t,g, or c
  misc_feature (273)..(273): n equals a,t,g, or c
  misc_feature (278)..(278): n equals a,t,g, or c
  misc_feature (286)..(286): n equals a,t,g, or c
  misc_feature (294)..(294): n equals a,t,g, or c
  misc_feature (316)..(316): n equals a,t,g, or c
ggcacgaggtagaaggaggaggaaatgtagaaaaagatccagatggtgctaaaagccaagaaaaagaggaaccagaaatctccacggaaaaagaagactctgcacgtttggatgatcacgaggaggnggaggaagaggatgaagagccatcccacaacgaggaccatgttaccctatgcagatgcagatgggcatgatgggcacccagccatatgcccagcagccaatgcagaccccaccccacggtgaacatgatgtacacgggcccccggnacatncacggctnacatggancacaggcatgttccaaacagtntgttcaatggattcct

SEQ ID NO: 1436 - DNA, 547 bp, Homo sapiens
gcacatctgaaactcatctgtacctcacttagaaagtcgacagaaacctaatgggaccattgaagaattccaaacaggtatttgcataggaatcagaggagttaatcttgtctcttctcacaggtttgaatcttcagacaaacttctgggaggactcggtccctgcctcgcagcagatgttccctgtcactcagtagccaatccgggggacccaggacatgccccagctatagtgatgcagattacctttctgctcctgaatcgcacctgtgcctcagactttctcccctcagcttgagactgcatgtaaactggcactggctctgccatcctgcctcatttccatcatgcattcagataattgatttttaaagtgtatttttcgtattctggaagatgttttaagaagcattttaaatgtcagttacaatatgagaaagatttggaaaacgagactgggactatggcttattcagtgatgactggcttgagatgataagagaattctcgaactgcatgtattgtgccaatctgtcctgagtgttca

SEQ ID NO: 1437 - DNA, 66 bp, Homo sapiens
  misc_feature (37)..(37): n equals a,t,g, or c
  misc_feature (54)..(54): n equals a,t,g, or c
ggaatctctcacgatgactactgcgccttctctttcnaaaaactcttaatttantgacttatggcc

SEQ ID NO: 1438 - DNA, 527 bp, Homo sapiens
  misc_feature (171)..(171): n equals a,t,g, or c
  misc_feature (207)..(207): n equals a,t,g, or c
  misc_feature (266)..(266): n equals a,t,g, or c
  misc_feature (285)..(285): n equals a,t,g, or c
  misc_feature (418)..(418): n equals a,t,g, or c
  misc_feature (472)..(472): n equals a,t,g, or c
  misc_feature (476)..(476): n equals a,t,g, or c
  misc_feature (497)..(497): n equals a,t,g, or c
gcctttttccatttctggccagtaagtaatcccgttcctgacaacagtccctttgttttctcaagtggtctgatgaaggactgcaaaccacagctcttgtgttttttgcaccatgggttttaaaatccgtcctctgcctcccacaaggagctactacccaagggaaggganaagattaattggtgacctttcgccgtgttaaaatangatgagtatgttgctggtcaaggcagaaacgctaacttccaactgtggtctgttaaganatctgctgggaaccttcanaagcactgccttccaaggcggggccacagcttggggtgttcagcacttgaggacgggtggagcttgttcaacccaaagatgtgtgcgatgaacggatctacacactggaaatacgtatcaaaactgcaacagnaaaatcatattttgtaaattaaaattgtgtttacttactgtgactactgttcantctntattcacaaacctttttatangctttcttaacataaaaaaaaaaaaaaaaa

SEQ ID NO: 1439 - DNA, 604 bp, Homo sapiens
  misc_feature (302)..(302): n equals a,t,g, or c
  misc_feature (310)..(310): n equals a,t,g, or c
  misc_feature (325)..(325): n equals a,t,g, or c
  misc_feature (458)..(458): n equals a,t,g, or c
  misc_feature (531)..(531): n equals a,t,g, or c
  misc_feature (538)..(538): n equals a,t,g, or c
  misc_feature (562)..(562): n equals a,t,g, or c
  misc_feature (586)..(586): n equals a,t,g, or c
  misc_feature (588)..(588): n equals a,t,g, or c
gcttgtatgtacatttattgctatccagtgtcagaacagttagtttaggaaaagtatgcaaactttaatcgcacatcttctgtattccacaatagtacttactcttgagaagcataactttatgacaacttagggggcttgagccatgaaatactcacgtttaagtcagtaaggatacacatgttaacattcaggcttttgtcttgatgcccgtcttttggtttacgtcatcattgtagccatatggtaaatttttatttgttaaatttttaaaaattacttagctcaaaatggcagtgggnaaattttnaaattggagtaaagngattcttctttgctcttatttaaaatcgacagcattctagttccttgacattccatataatttttaggattaagttggacttatttacaaaacagtcttggtcagatttttacagaaattgagttaagtctgnggataatctggtaagaatgggatctttactaaggtgggccttggagtcatgagtgcaggagtaggcctttaanttataanagttaacattccttaaggattcantaagggtaaaaatttcacggatanancccatgcattttggta

SEQ ID NO: 1440 - DNA, 291 bp, Homo sapiens
  misc_feature (43)..(43): n equals a,t,g, or c
  misc_feature (94)..(94): n equals a,t,g, or c
  misc_feature (97)..(97): n equals a,t,g, or c
  misc_feature (100)..(100): n equals a,t,g, or c
  misc_feature (131)..(131): n equals a,t,g, or c
  misc_feature (138)..(138): n equals a,t,g, or c
  misc_feature (143)..(143): n equals a,t,g, or c
  misc_feature (185)..(185): n equals a,t,g, or c
  misc_feature (227)..(227): n equals a,t,g, or c
  misc_feature (229)..(229): n equals a,t,g, or c
  misc_feature (252)..(252): n equals a,t,g, or c
  misc_feature (259)..(259): n equals a,t,g, or c
  misc_feature (283)..(283): n equals a,t,g, or c
gtgacggtggcgtttccttgaagaacagtgagggtgccaactnttctgcttatctgggaggtgttgggcgcggacagtccatatgtcataaaanaancanccggtacacttacgtctgtttcaggaagacnacgagtntgaanagttccctgccgaagactgggctggcttagatgatgatgaanatgcacatgtctgggaggataattgggatgattacaatgtanangatgacttctctaatcacttacnaactganctagataaacatggttctgagatngagacttc

SEQ ID NO: 1441 - DNA, 621 bp, Homo sapiens
  misc_feature (6)..(6): n equals a,t,g, or c
  misc_feature (115)..(115): n equals a,t,g, or c
  misc_feature (186)..(186): n equals a,t,g, or c
  misc_feature (254)..(254): n equals a,t,g, or c
  misc_feature (262)..(262): n equals a,t,g, or c
  misc_feature (275)..(275): n equals a,t,g, or c
  misc_feature (313)..(313): n equals a,t,g, or c
  misc_feature (409)..(409): n equals a,t,g, or c
  misc_feature (428)..(428): n equals a,t,g, or c
  misc_feature (430)..(430): n equals a,t,g, or c
  misc_feature (471)..(471): n equals a,t,g, or c
  misc_feature (473)..(473): n equals a,t,g, or c
  misc_feature (483)..(483): n equals a,t,g, or c
  misc_feature (492)..(492): n equals a,t,g, or c
  misc_feature (501)..(501): n equals a,t,g, or c
  misc_feature (562)..(562): n equals a,t,g, or c
  misc_feature (570)..(571): n equals a,t,g, or c
  misc_feature (607)..(607): n equals a,t,g, or c
gatgtnctgttggaaaccctcaggagtggaagaaattgttcaaaccctgtgctgcccagagactctttcttccgaacagcatgattccaacaggcctggcttgggaggacatgtngtaccctctgtaccagaagtacaagaatgccatcacgtggggagaccaggatttattaaatattatttgangatttcaacccagagtgtctctatgtattcccctgccagtggaactaccgtcccgatcactgcatgtncggaagcnactgcagagaggntgagcatgaaggtgtgtctgttctgcatggaaaccgangcgtctaccatgacgataagcaaccaacgttcagagcactctatgaagcaatacgggattttccctttcaagacaatctctttcaatccatgtatnacccccttcagctgaagtntntggagactgtgcacactttatgtggacgaatcccgcaagtntntctgaagcanattgagaanacaatgaanagggcttatgagaaacacgtcatcatccatgttgggccccaccagatgcactgaatatctngtcttgtnncaatcaattaagtgtcttgtgaacaaagaaatactnatctctaaaaaaaa

SEQ ID NO: 1442 - DNA, 473 bp, Homo sapiens
  misc_feature (59)..(59): n equals a,t,g, or c
  misc_feature (106)..(106): n equals a,t,g, or c
  misc_feature (110)..(110): n equals a,t,g, or c
  misc_feature (236)..(236): n equals a,t,g, or c
  misc_feature (252)..(252): n equals a,t,g, or c
  misc_feature (301)..(301): n equals a,t,g, or c
  misc_feature (379)..(379): n equals a,t,g, or c
  misc_feature (385)..(385): n equals a,t,g, or c
  misc_feature (396)..(396): n equals a,t,g, or c
  misc_feature (402)..(402): n equals a,t,g, or c
  misc_feature (407)..(407): n equals a,t,g, or c
gatttattaaagagaaatagaaaatgtgtaacctgactcttgagtaacactttcatgtngctcatttcaaagtccaatagttaactcatttggttcaatgtagatnaaancttactttttaagaaagaggtctttaacttgtagaattttagagccgggaaaatccctacagatcttctcactttacagtttgggatactgagtctaagagagcccagtgcttctttggatgtgtnacttttactgctgtangaggaaaaataaacgtaaattatcaaaaaataatgaaaaggttattatnttgtgaaaacatggcagcaatttttaaagggaaaatggaagaaaaataatgattaaacatcttgtattatcatttgtnattaanataaattaatnccaganactangttttttcttttatacattttcataggaaatattcttaccgaaatccatctgcagccatgggcctt

SEQ ID NO: 1443 - DNA, 603 bp, Homo sapiens
  misc_feature (68)..(68): n equals a,t,g, or c
  misc_feature (147)..(147): n equals a,t,g, or c
  misc_feature (303)..(303): n equals a,t,g, or c
  misc_feature (333)..(333): n equals a,t,g, or c
  misc_feature (349)..(349): n equals a,t,g, or c
  misc_feature (351)..(351): n equals a,t,g, or c
  misc_feature (392)..(392): n equals a,t,g, or c
  misc_feature (427)..(427): n equals a,t,g, or c
  misc_feature (441)..(441): n equals a,t,g, or c
  misc_feature (450)..(450): n equals a,t,g, or c
  misc_feature (454)..(454): n equals a,t,g, or c
  misc_feature (546)..(546): n equals a,t,g, or c
  misc_feature (577)..(577): n equals a,t,g, or c
  misc_feature (584)..(584): n equals a,t,g, or c
  misc_feature (587)..(587): n equals a,t,g, or c
  misc_feature (590)..(590): n equals a,t,g, or c
gattatgtctcagtttcagtttctgtaaaaaaaaaaaaaaatgaggtggataaaaatacgtatctcanaaggtttttctaaataagataatatttttcaagaaactggcatgtactaggagtcagtaattgttaattatctcatttncccaactgtgacccagtatttttcagtttctttctatccctgcatgtagttagactacttttctctatactcatatttatatagcagcaacttacattgacccagggagaactcagtcattaaaatgggaacagcagtttatgcagtttgaagaanattctagagtaactggatgattagtatcanaagtattgggtctganantctttcttcaagtgatgaacattgctgttaatatcaatganagtttttttcttggaatataggaaaaaagggggancagcccctaggaancagtgggangaanaattaccatacaatttcctcatgttccattataagcaatttgtttttaggacacagaaactattgatcttaaagggcatgttcaacatgaantgaccatggtacagggccgttccaccctttngggtttnccnggnacttgaaacaata

SEQ ID NO: 1444 - DNA, 590 bp, Homo sapiens
  misc_feature (146)..(146): n equals a,t,g, or c
  misc_feature (269)..(269): n equals a,t,g, or c
  misc_feature (401)..(401): n equals a,t,g, or c
  misc_feature (413)..(413): n equals a,t,g, or c
  misc_feature (421)..(421): n equals a,t,g, or c
  misc_feature (459)..(459): n equals a,t,g, or c
  misc_feature (462)..(462): n equals a,t,g, or c
  misc_feature (500)..(500): n equals a,t,g, or c
  misc_feature (519)..(519): n equals a,t,g, or c
  misc_feature (528)..(528): n equals a,t,g, or c
  misc_feature (530)..(530): n equals a,t,g, or c
  misc_feature (540)..(540): n equals a,t,g, or c
ggtacaaaagaactatttagcctggagggggttttgtttgttatgtaggtgtaagtaagtatcaggtctccttcatacattataaataatctttgctgtgcctccatgttccccattattgtatttctggaagagattccaattanttttcaattatttaaatgctagtagtatctaagctttttaactggaataatattggtatacacttgaggtcactcagcgtcatcattattggaatgtgcttctcacaataggttatttacganctgaatgtggtagtggctaagaaagtcagtaggactacttttcagtgatgggaaactttctggaaagcctgttaatggactgtcattgacatttcctaagatagcgagatactgtggttcaaaacatctacnaaagagaatgtnaaaattanaaaggtaacgtcgaattctctcccattggtaataaaantantaaagatacagttgaaagcctctttcaaacaaaattanctgttggtattaaattganaaatatttnanccatgaatcntaaatacttaaaattaataatgggcctttaaactaaaaaaaaaaaaaaaa

SEQ ID NO: 1445 - DNA, 632 bp, Homo sapiens
  misc_feature (462)..(462): n equals a,t,g, or c
  misc_feature (484)..(484): n equals a,t,g, or c
  misc_feature (491)..(491): n equals a,t,g, or c
  misc_feature (493)..(493): n equals a,t,g, or c
  misc_feature (544)..(544): n equals a,t,g, or c
  misc_feature (546)..(546): n equals a,t,g, or c
  misc_feature (583)..(583): n equals a,t,g, or c
  misc_feature (622)..(622): n equals a,t,g, or c
  misc_feature (626)..(626): n equals a,t,g, or c
gtctgtcaggcactcttcagtgacttgaggtgctgaatgactcacactgtactgggagatgaccacctgtgtgcatccaacacagtcacagatagtgccattgagccaccaggagcagccacagaccatcagtggttgtgctttggaatacgcaattttgtgtttctggtgagctgtaatcttttcttttcccatagaattatttttcattgaattatgctattaaaactcatctttgggtttcttgtaacgtcattgccgagaacgttatttttgcatttcacagtgatttcttgaggaggaagtaagaagtaattgttttctggactcactgtctgaaaaacttgcactttactgaagcgattgttttgtttacactaagtaacaatatgagttttgttagctttttggatggactacaaagcataaaaccaactttgttcctcatctctggcaaaaatngaagggtgttggcttgtgttgntgtgatnantctaatacctggctctgtctgctctggcttttggcttacatttcaaaaacncnctttttttcctttccttttttaaaaaatattttatcncatgaatttcctatacattttaataaaaatttccttttngttnaaaaaa

SEQ ID NO: 1446 - DNA, 458 bp, Homo sapiens
  misc_feature (3)..(3): n equals a,t,g, or c
  misc_feature (46)..(46): n equals a,t,g, or c
  misc_feature (56)..(56): n equals a,t,g, or c
  misc_feature (59)..(59): n equals a,t,g, or c
  misc_feature (119)..(119): n equals a,t,g, or c
  misc_feature (121)..(121): n equals a,t,g, or c
  misc_feature (141)..(141): n equals a,t,g, or c
  misc_feature (151)..(151): n equals a,t,g, or c
  misc_feature (175)..(175): n equals a,t,g, or c
  misc_feature (180)..(181): n equals a,t,g, or c
  misc_feature (196)..(196): n equals a,t,g, or c
  misc_feature (204)..(204): n equals a,t,g, or c
  misc_feature (209)..(209): n equals a,t,g, or c
  misc_feature (236)..(236): n equals a,t,g, or c
  misc_feature (243)..(243): n equals a,t,g, or c
  misc_feature (248)..(248): n equals a,t,g, or c
  misc_feature (252)..(252): n equals a,t,g, or c
  misc_feature (270)..(270): n equals a,t,g, or c
  misc_feature (305)..(305): n equals a,t,g, or c
  misc_feature (315)..(315): n equals a,t,g, or c
  misc_feature (335)..(335): n equals a,t,g, or c
  misc_feature (343)..(343): n equals a,t,g, or c
  misc_feature (345)..(345): n equals a,t,g, or c
  misc_feature (371)..(371): n equals a,t,g, or c
  misc_feature (380)..(380): n equals a,t,g, or c
  misc_feature (399)..(399): n equals a,t,g, or c
  misc_feature (417)..(417): n equals a,t,g, or c
  misc_feature (421)..(421): n equals a,t,g, or c
gcnaagatatatttctacaaggtgatctctttctgtctatgtaganaagtggctanaancttcttcaaattgagaaagaccaaaggtctttattgtgtttggtgaaggaaaagaataantnttcctgcttccctggtcttnatattatcantatctctctcacagtttctcaacngcttnnatgaatactaattcngcaatatnggaanaagtgactgacacaccaccatgtacanatattantgcangganacaggaaatacatcaaancccgaaaatatgacccatcctaagggatacaatanttatccagcnatagatccccatcaccaaanaattaacncnttctgggaaaagttatttacagtatngattctaangaagttcagggatattcangataattttgaaaagcanttcngataaattgaaaaggctatcccgatatttaataaatt

SEQ ID NO: 1447 - DNA, 610 bp, Homo sapiens
  misc_feature (231)..(231): n equals a,t,g, or c
  misc_feature (281)..(281): n equals a,t,g, or c
  misc_feature (292)..(292): n equals a,t,g, or c
  misc_feature (332)..(332): n equals a,t,g, or c
  misc_feature (528)..(528): n equals a,t,g, or c
  misc_feature (537)..(537): n equals a,t,g, or c
  misc_feature (559)..(559): n equals a,t,g, or c
  misc_feature (567)..(567): n equals a,t,g, or c
  misc_feature (599)..(599): n equals a,t,g, or c
ggaaagaaacaaacaattatgctcttaatataaaataaggttttataaactagctgaaggaggaaggtgtttatccctctcatacaggactgccctatatccactatgtatgtaaacctgagtccatttctctggcctaactcactatttccctgtgtcacacaatccatcctttccccttgtctacccacaagtatacttaaaatcattcatgtagcccttccatacacntaatctacttgtgtttgcttttcaagacctgattgcttccctcgcagtanatataaaagantgtcattctcttacacttagtttttattcctgattaccanaattacaggtttcttttgctgtattgtgcaaatgtcatatacttaaaacagatataacgttaactttaaaagaatttttttggtatgaaaatgtggggaaagtgttcaaacattttccctttaaatatgtttaaattgggacataccccttttcccctgaaaggaaaatgttcttaatgtttaccgaataataaantatgatatntttgggaaaatccaacataatngccactcncaaaataactgtaatggtgaataatccccccngcctttaaatt

SEQ ID NO: 1448 - DNA, 638 bp, Homo sapiens
  misc_feature (7)..(7): n equals a,t,g, or c
  misc_feature (40)..(40): n equals a,t,g, or c
  misc_feature (111)..(111): n equals a,t,g, or c
  misc_feature (130)..(130): n equals a,t,g, or c
  misc_feature (174)..(174): n equals a,t,g, or c
  misc_feature (176)..(176): n equals a,t,g, or c
  misc_feature (182)..(182): n equals a,t,g, or c
  misc_feature (186)..(186): n equals a,t,g, or c
  misc_feature (196)..(196): n equals a,t,g, or c
  misc_feature (257)..(257): n equals a,t,g, or c
  misc_feature (323)..(323): n equals a,t,g, or c
  misc_feature (390)..(390): n equals a,t,g, or c
  misc_feature (444)..(444): n equals a,t,g, or c
  misc_feature (501)..(501): n equals a,t,g, or c
  misc_feature (515)..(515): n equals a,t,g, or c
  misc_feature (549)..(549): n equals a,t,g, or c
  misc_feature (585)..(585): n equals a,t,g, or c
  misc_feature (608)..(609): n equals a,t,g, or c
  misc_feature (615)..(615): n equals a,t,g, or c
gtacaanagggcctggcaaggggcaaattggtggttgaantgactggggtggacagagaacttcagggaagggttgaggtggatgtgagcccttcctggaatgatgggtanatgtcactgggcagggtanattcaggcaaaggcttcaggtttataaattcagggagacaaacnangaagangtcntggggtgcanttgtgcgatatccacagtttggaaaaagctttggtcttggattcacgaaagatgggcatancaaggaatcttttgggaaattcagtggatttgttgccaggggacctctcttccctccttgtctcanggctgtgccattatgtttctcaaaaaagggcctgcttgaatccaggtgtgtggctacaactactcanaaatctggcaggtacatctgtcgtccaagaaaaacttggatgtgagactttaanaacctctgaagacacagctgatgtccaagctgccatcatccccacctaaggggtgtnaacatatctggccncagcttccaccctgtttacaatgttctctccccnccaataaaaccatttaataatttgccctcagcacancttataaaaaatacttttttttnnagggtntccaactaatttaaaaaggtcca

SEQ ID NO: 1449 - DNA, 481 bp, Homo sapiens
  misc_feature (262)..(262): n equals a,t,g, or c
  misc_feature (319)..(319): n equals a,t,g, or c
  misc_feature (362)..(362): n equals a,t,g, or c
  misc_feature (441)..(441): n equals a,t,g, or c
  misc_feature (466)..(466): n equals a,t,g, or c
  misc_feature (472)..(472): n equals a,t,g, or c
  misc_feature (477)..(478): n equals a,t,g, or c
gtcccggtgagcgctgctggctcggctaatgaaactcccgaaataccggacaacgtgggagattggcttcggggcgtctaccgctttgccactgataggaatgacttccggaggaacttgatactaaatttgggactctttgctgcgggagtttggctggccaggaacttgagtgacattgacctcatggcacctcagccaggggtgtagccaagtagacaaatggaatcctgtgctgaacccgaatcttccaaaaaacagnctacaatctgtgaccaccacaagatgtgccctgatggcaagctgaagtttgattcanatgggcacttttcttccccttccctgcctaagtttccttttgntccttgagtccacgcagaattccattctctgtcaagcagacaggcttaagcttaaagtatttgctctaatctgtaaagntctgcacatagtttcccaagctttntgcaanggggnngat

SEQ ID NO: 1450 - DNA, 390 bp, Homo sapiens
  misc_feature (152)..(152): n equals a,t,g, or c
  misc_feature (154)..(154): n equals a,t,g, or c
  misc_feature (187)..(188): n equals a,t,g, or c
  misc_feature (194)..(194): n equals a,t,g, or c
  misc_feature (245)..(245): n equals a,t,g, or c
  misc_feature (255)..(255): n equals a,t,g, or c
  misc_feature (334)..(334): n equals a,t,g, or c
  misc_feature (390)..(390): n equals a,t,g, or c
gagcagagggcgctttaaactgcacccggctctcactggtcttacgccaccttctggacactccctccttgagggcagaaaggagtcccaggcctgtccctagggacaaggcccagggaagagtgtatttggggagcaggggaggggagggngntgagaaagctgaactggagtcaatcacccttcnnacaaantcaccaaactgctggaactctccagccaaatgctgggagaaggacctgganggtgagtctntgctgacctctctctactctcaggcatgacttttgtccttttcggccatctatttctgtctgtcgctcactcgccccgntttctctgtctcaccttcatccactctgcaggcctgctccaccacagccctaatcn

SEQ ID NO: 1451 - DNA, 545 bp, Homo sapiens
  misc_feature (286)..(286): n equals a,t,g, or c
  misc_feature (317)..(317): n equals a,t,g, or c
  misc_feature (414)..(414): n equals a,t,g, or c
  misc_feature (472)..(472): n equals a,t,g, or c
  misc_feature (503)..(503): n equals a,t,g, or c
  misc_feature (517)..(517): n equals a,t,g, or c
  misc_feature (522)..(522): n equals a,t,g, or c
  misc_feature (540)..(540): n equals a,t,g, or c
gaaaaggtgaggttcatcagattatctgagatatcagtgtaatttgacttttaaagacagtgttaaacaattaagacttatttttctccatttttgcatctagaactgttttaatctctccccaccaagacacacacacacacacaaatggttagtattacaagtatagttgtgttctgtaactattgatctgggaatcatattgtttggttctacaaggaggacatggtctggccctacagctctgtattggtaagctagacatcttacatgatagaagcctttnaaaggttgattcatctatttaggtaataagnagatgacttttaatggtacaatattgacatatgctttaactggacaatgcttacatttcttaatttatcttggcattatttttcaaaaaaaaaatgnttcttttaaaaaattaaattgaacctttagggcaataaatatttatacttaaaggccntagagaaggaattattagaggacagcatggnctagcaattaaaancaganttttacgggtaacaaggnatctg

SEQ ID NO: 1452 - DNA, 485 bp, Homo sapiens
gcctaaatgcctgatttgaaggggaaatatttaaatagtaaaaatagatgtataccataagaggtcattgttactaaaaaatcctgaggccatttttttgttatcccatcaacaattaacagtgttacatgttcagaactgagagaatctaagtatgcatttataaaagacaagagtgaacatggtttttatgttactgactagctaaaaagaattttaagatgtgattaagacttatacaaaagccaaggttgttagtgtatagtatactttgtcatcttgagaatcataatttgttgatagtttaataatttggtgtgcagctttgcctcaggctcagttctataatcagcattacatcagtataactggccgggtatgtttcaatctacagattgaaaggagtaaatagtatcaacttgcttttgcattgactacagtaaacaatcttttattatgtgacttcagctttggtttagcttggg

SEQ ID NO: 1453 - DNA, 435 bp, Homo sapiens
  misc_feature (323)..(323): n equals a,t,g, or c
  misc_feature (325)..(325): n equals a,t,g, or c
  misc_feature (330)..(330): n equals a,t,g, or c
  misc_feature (366)..(366): n equals a,t,g, or c
  misc_feature (372)..(372): n equals a,t,g, or c
  misc_feature (393)..(393): n equals a,t,g, or c
  misc_feature (403)..(403): n equals a,t,g, or c
  misc_feature (430)..(430): n equals a,t,g, or c
gccagattcagacgtcctctcagaaataatgcattcttttgcaaagtgcattgaagtaatgggagatggatgccttaataatgaacactttgaagaactgggaggtatattgaaagcaaagcttgaagaacattttaaaaatcaagaattacgacaagttaaaagacaagatgaagactatttttctattggtataacccgcccacctgaaggggaaagggaaatcaaattaatttttctcgttagacataaggaaatttaaggaaaaacagctttaagaacagttactcagcgtagatgtgtgttcacaccaaatggtcttnantcagnggtcattgggaattgggaatgtgagtctttctgtanggtaanaaagaaaccctcttaccaggnaaacccgttnaccccaaaagtttgaaaaaaacttggntgacc

SEQ ID NO: 1454 - DNA, 373 bp, Homo sapiens
  misc_feature (318)..(318): n equals a,t,g, or c
  misc_feature (335)..(336): n equals a,t,g, or c
  misc_feature (363)..(364): n equals a,t,g, or c
ggttgcactgaacatcccatcatcaaatcccagctccatctgctcatcctggtccaaagtggacgagaatcccattgttaagacatgtctcattaagacttctctaagatggagccagcaaacagcccagtagcatcgaggctgctgcctgggaaagagtcccctcctctcccctgttcattaatgattatgggaggttttattccccccaacaaaagtgttaattagacatcatcggaacagggatattacacaaatgaattaaactcaaaccaatcaacaagctggctttgggcttcaagtcccccgaacgaaaangggaattgaaaggcttnnaatgggaaaccaaaccggtaaaaaggnntttcccaaa

SEQ ID NO: 1455 - DNA, 70 bp, Homo sapiens
  misc_feature (17)..(17): n equals a,t,g, or c
  misc_feature (26)..(26): n equals a,t,g, or c
  misc_feature (34)..(34): n equals a,t,g, or c
  misc_feature (68)..(68): n equals a,t,g, or c
gcagaaactccgaagtngggatattnttcacctnatgtacaggcatacctcctttcattgtacttcantg

SEQ ID NO: 1456 - DNA, 325 bp, Homo sapiens
  misc_feature (317)..(317): n equals a,t,g, or c
  misc_feature (319)..(319): n equals a,t,g, or c
  misc_feature (323)..(323): n equals a,t,g, or c
gagcaaacataatgaaccattattaccatcacagacacttgccacttagtgagtccactttgcttctgctgcttttttctttcttctctgagcctggcctctttcctgtcctctatcctactcctgccttccatcctgcctttttctttttctgtggcccagcctgatattatgtcaaatgcctctttctcatacaactgcttatcttttcccctacttaaaaaaaaaaaaaaaaaggctgagcagaatagctatgatcaaggagtgtttgtgtcaggggaggaaggggatgggccatgtgttaagggggtgggggntngctnct

SEQ ID NO: 1457 - DNA, 532 bp, Homo sapiens
  misc_feature (425)..(425): n equals a,t,g, or c
  misc_feature (497)..(497): n equals a,t,g, or c
  misc_feature (499)..(499): n equals a,t,g, or c
gaaattcttaagaatggaatttttggcttaaatgttaaatgcatctttaaattttatgaagaactgccatacagttatctgaagtggttgtaccattttatatatctacctccagtgtatgtttctcttgttaagtctgttcagatcttttcctcatttttatgttgagttggatgattcacatactacctgatttcaaaactttttaataaagctacagtaatcaaagctatgtggtattggtaaaagggcacagaaaataggaacacaacagagtccagaaataggcctacatggtatagcagtttttttcaacaaagatgccaaaacaatcctgtagaaaaagagaaagaatagtcttttctagaaatgaggcttgaacacctcgacccaaaagctttcagtacatacagaaattaactcanaatgaatatagacatacatataaaaacctaaaactattaaacttttccaagaacacatcggaaggccagacncngtggctcacgcctataatcccagcgcttgggac

SEQ ID NO: 1458 - DNA, 458 bp, Homo sapiens
  misc_feature (66)..(66): n equals a,t,g, or c
  misc_feature (380)..(380): n equals a,t,g, or c
  misc_feature (404)..(404): n equals a,t,g, or c
  misc_feature (411)..(411): n equals a,t,g, or c
  misc_feature (446)..(446): n equals a,t,g, or c
  misc_feature (458)..(458): n equals a,t,g, or c
gggacagcgtgtgacttgtgtactgcaaatgatgcaatagctaaatatcctagtgtgagttaaggntgattaagtgatcatctttaactctgcttttcccagggctctttgaactcttgttttattaggtaatatgctatgctgttattttattgctgtttaaaaaaccttctcttttgggaaagaaaacatgtgaattctttggtttctagatagaaattagcaatcttttgctcggaatgtaaaagtatgctgtattatcacaaactgaccctcctcctcccccagaattctagggagtaaaatgcgtgcacaggaaatcagaaatggatcaacagagttataggttttaaaaaaactgccttgcatttttgccctgnaattaattttcagtgaaaattaanatatttnttctgttcatctggaatcagtttttacttcattancaggaaatgctn

SEQ ID NO: 1459 - DNA, 590 bp, Homo sapiens
  misc_feature (241)..(241): n equals a,t,g, or c
  misc_feature (254)..(254): n equals a,t,g, or c
  misc_feature (471)..(471): n equals a,t,g, or c
  misc_feature (480)..(481): n equals a,t,g, or c
  misc_feature (490)..(490): n equals a,t,g, or c
  misc_feature (514)..(514): n equals a,t,g, or c
  misc_feature (525)..(525): n equals a,t,g, or c
  misc_feature (548)..(548): n equals a,t,g, or c
  misc_feature (559)..(559): n equals a,t,g, or c
  misc_feature (561)..(561): n equals a,t,g, or c
gtaaaataataaaagtcatacagtgaaaaagatttttattcaaggcatcattaaggattaaaactatgccatattggagttgagtcttgatgagtaacattttcattggtattttccatcctaagctggatatgtttcacgtttatttcagttacgcttcttgataggaaacacatggcttcattggcagcctgcagtttccataagtatcttatgagctcttcctgttcagagcactggngatatttaaaggnaaagggttttcccgttttatttttggatgctaatgacttccatctccacaggcattggaatggatacttgtgtcattcctttgaggcacggtgggctttccttggttcaaaccacagattacatttacccgatcgtagacgacccttacatgatggtaagcgtgagcccgatgtgtttttgtgactggaagggcttatttggttgggttgggttgtngcctggggnntttgatggnatcttgtgggggtttgggtttaantctggtatatnccgactatactggcccaaccttncaaaattctgnanttgctgaagtcaagcctgtcccctggcca

SEQ ID NO: 1460 - DNA, 453 bp, Homo sapiens
  misc_feature (244)..(244): n equals a,t,g, or c
  misc_feature (260)..(261): n equals a,t,g, or c
  misc_feature (267)..(267): n equals a,t,g, or c
  misc_feature (386)..(386): n equals a,t,g, or c
  misc_feature (436)..(436): n equals a,t,g, or c
gctttcacattttccagttcttttcgatatcatgaaaggactcacactggggagaaaccctatcaatgtaagcagtgtgggaaagccttcattccttttacttcttttcaatgtcatgaaaggactcacacgggagagaaaccctatgagtgtattctagttccgtttgatatcatgaaaggacttacactggagtgaaaccctatgaatgtaagcaatgtgggaaagccttcagatgtgcctnggaacctttaaacggnntggaanggttcacacttgggagaaactctatgaatgtaagcagtatgggaaagccttcagatctgccaagattctttgaatacagataattaatgtaaacaattatcataagtatactaacatgntattctttttaaataaagaaggtataataaaatatcccatgggtttatgnattagaaaaaaaaaaaa

SEQ ID NO: 1461 - DNA, 571 bp, Homo sapiens
  misc_feature (445)..(445): n equals a,t,g, or c
  misc_feature (485)..(485): n equals a,t,g, or c
  misc_feature (539)..(539): n equals a,t,g, or c
  misc_feature (552)..(552): n equals a,t,g, or c
gggtgagtgagagagttggttggtgttgggccggaggaaagcgggaagactcatcggagcgtgtggatttgagccgccgcattttttaaccctagatctcgaaatgcatcgtgattcctgtccattggactgtaaggtttatgtaggcaatcttggaaacaatggcaacaagacggaattggaactgtcgaatggtgaaaaaagaagtagaaatcgtggcccacctccctcttggggtcgtcgccctcgagatgattatcgtaggaggagtcctccacctcgtcgcagatctccaagaaggagaagcttctctcgcagccggagcaggtccctttctagagataggagaagagagagatcgctgtctcgggagagaaatcacaagccgtcccgatccttctctaggtctcgtagtcgatctaggtcaaatgaaaggaaatagaanacagtttgcaagaaaagtggtggacaggaaaatacttcanttgacaggagtatgacagaaaattcaaggtttgttgagacttcataaacttggngcaattttaaaangtttactgtcaaactgttg

SEQ ID NO: 1462 - DNA, 677 bp, Homo sapiens
  misc_feature (603)..(603): n equals a,t,g, or c
  misc_feature (607)..(607): n equals a,t,g, or c
  misc_feature (627)..(627): n equals a,t,g, or c
  misc_feature (649)..(649): n equals a,t,g, or c
  misc_feature (675)..(675): n equals a,t,g, or c
gacaccttgtgttctgcagtaaagcccaatctgcaggtgttgcgagcccgattctctgagatcacaccccatgccgtcaggacagcttgtgaaaacctgaccgagcctgatcagagggtgagcgatgctgtggatgtgaggcaggagctggacctgaggattggagctgcctttactaggttccagaccctgcggcttcagaggatttttcctgaggtgctggcagagcagctcatcagttacggcagctgccagttccccacactgggctttgtggtggagcggttcaaagccattcaggcttttgtaccagaaatcttccacagaattaaagtaactcatgaccacaaagatggtatcgtagaattcaactggaaaaggcatcgactctttaaccacactgagaaagatcacctttgtcatttccttaaaaagcaatgtaattttaaccctgagtccccatgccaccagatggtaagaaatttcatttcattattagggacccttcactcccaggattaaatgagaatccaggggtcaagtggtctcagaaaccagaccagcctctgacgtccagtgtggctgggttgggccctggcaccnttantggcaaaagcctgcagtcgncactaaaagtccagccactctntgggggttccatgctatacaatgggnat

SEQ ID NO: 1463 - DNA, 690 bp, Homo sapiens
  misc_feature (584)..(584): n equals a,t,g, or c
  misc_feature (608)..(608): n equals a,t,g, or c
  misc_feature (616)..(616): n equals a,t,g, or c
  misc_feature (660)..(660): n equals a,t,g, or c
  misc_feature (683)..(683): n equals a,t,g, or c
  misc_feature (690)..(690): n equals a,t,g, or c
gcatgaacatcataaagaaacagaatataaagataagattcctttactacagcagccaaaacgagaagaagaagaagtgttagaccaggatttccacatggaagaggcactggattggcctggagtatacttgttaccaggccaggtttctggggtggctctagaccctaagaataacctggtgattttccacagaggtgaccatgtctgggatggaaactcgtttgacagcaagtttgtttaccagcaaataggactcggaccaattgaagaagacactattcttgtcatagatccaaataatgctgcagtactccagtccagtggaaaaaatctgttttacttgccacatggcttgagtatagataaagatgggaattattgggtcacagacgtggctctccatcaggtgttcaaactggatccaaacaataaagaaggccctgtattaatcctgggaaggagcatgcaaccaggcagtgaccagaatcacttctgctccatatttgtcaagtggttctcatctgaagatttatgagggcattagttataccatagggacctggttggtttcaagtggtagntctttgaagctactagcttcagangacaatgnccatattttaatttaagtaatatgaaaggctggctttagctccntattcaagttttgggtaaacttnctgattn

SEQ ID NO: 1464 - DNA, 514 bp, Homo sapiens
  misc_feature (123)..(123): n equals a,t,g, or c
  misc_feature (301)..(301): n equals a,t,g, or c
  misc_feature (371)..(371): n equals a,t,g, or c
  misc_feature (377)..(377): n equals a,t,g, or c
  misc_feature (382)..(382): n equals a,t,g, or c
  misc_feature (479)..(479): n equals a,t,g, or c
  misc_feature (482)..(482): n equals a,t,g, or c
gtcccagcagtcagaacttgctagcgccaccattgcctggcaaagtgctctagcatcctcaataatcttgaaaggcagtctaagccatcaggactgcaataattgagcaagtcctggtgctgngctgggcttggagccagtggacttggggtgcatgccacctagtgagacatgagctggggcagccaagggagtgcttgcatcaatccccatcccccaatttcagggagcacatctctcagctctggcagacactccttctgcttgaggaaaagagagaagagagtaaagaggactttgncttgcaacttggataccagctcaaccacagtaaaataaaagcaccaagaagaagtccaaaggcctcattncaaggncttancttctggacaacattattaagacccaacccttggggccaaaaagggaacctggttgcttttgaaaagggaaaagatccaaggccttggcgggggttnatnaacctgggtggaataaaagaagccctttgggg

SEQ ID NO: 1465 - DNA, 697 bp, Homo sapiens
  misc_feature (8)..(8): n equals a,t,g, or c
  misc_feature (40)..(40): n equals a,t,g, or c
  misc_feature (56)..(56): n equals a,t,g, or c
  misc_feature (81)..(81): n equals a,t,g, or c
  misc_feature (114)..(114): n equals a,t,g, or c
  misc_feature (267)..(267): n equals a,t,g, or c
  misc_feature (280)..(280): n equals a,t,g, or c
  misc_feature (333)..(333): n equals a,t,g, or c
  misc_feature (418)..(418): n equals a,t,g, or c
  misc_feature (430)..(430): n equals a,t,g, or c
  misc_feature (461)..(461): n equals a,t,g, or c
  misc_feature (548)..(548): n equals a,t,g, or c
  misc_feature (550)..(551): n equals a,t,g, or c
  misc_feature (581)..(581): n equals a,t,g, or c
  misc_feature (589)..(589): n equals a,t,g, or c
  misc_feature (602)..(602): n equals a,t,g, or c
  misc_feature (623)..(623): n equals a,t,g, or c
  misc_feature (627)..(627): n equals a,t,g, or c
  misc_feature (635)..(635): n equals a,t,g, or c
  misc_feature (643)..(643): n equals a,t,g, or c
aaaacccnccgagctgcaccgcggtggcggccgctctagnactagtggattttttngggctgcaggaattcggcacgaggngccgcgagctgccatcacgcctacatcgtgctntgcattgagaacagcttcatgactgcctccaagtagccaccgcctggatgcagatggccggagaggaccggcggctcggaggaagcccccaccgtgggcagggagcagccggccagcccctggccccaggacctggctgccatactttcctgnataggtcacgttncatgtaatcctcaagaaataaaaggaagccaaagagtgtatttttttaaaagnttaaaacagatgcagggcaagtcattggctgctcctaggaaacccatatccttaccctccttgggactgaaggggaaccccgggntgcccacaggcncgccttgcgggtgaacaaagcagccacgaangtgcaacaaggtcctctgtcagtcacaaggcaccccttgaaaatcccggcaacaatcaaccccccagaagtccatttccggttcctngnnggaaaggggaccaaaagtggggaccttcanagggccanacggccccaaggnccttggaacccaccaagctantcanggcccaancaacgggnaacccttggccctttcaaagggaaccttgggcggaaacctaaaaaacccccggg

SEQ ID NO: 1466 - DNA, 130 bp, Homo sapiens
  misc_feature (70)..(71): n equals a,t,g, or c
  misc_feature (91)..(91): n equals a,t,g, or c
  misc_feature (95)..(95): n equals a,t,g, or c
  misc_feature (126)..(126): n equals a,t,g, or c
gagcaattctcctcagcctcctctcctgggcttctgtgatcctcccatcttagcccagaggctgcagtannatgaactgagctcactgcancctntgcctttggtgagcacttgtggaccaagatntttg

SEQ ID NO: 1467 - DNA, 611 bp, Homo sapiens
  misc_feature (25)..(25): n equals a,t,g, or c
  misc_feature (29)..(29): n equals a,t,g, or c
  misc_feature (31)..(31): n equals a,t,g, or c
  misc_feature (34)..(34): n equals a,t,g, or c
  misc_feature (50)..(50): n equals a,t,g, or c
  misc_feature (243)..(243): n equals a,t,g, or c
  misc_feature (246)..(246): n equals a,t,g, or c
  misc_feature (248)..(248): n equals a,t,g, or c
  misc_feature (326)..(326): n equals a,t,g, or c
  misc_feature (356)..(356): n equals a,t,g, or c
  misc_feature (367)..(367): n equals a,t,g, or c
  misc_feature (400)..(400): n equals a,t,g, or c
  misc_feature (432)..(432): n equals a,t,g, or c
  misc_feature (442)..(442): n equals a,t,g, or c
  misc_feature (522)..(522): n equals a,t,g, or c
  misc_feature (529)..(529): n equals a,t,g, or c
  misc_feature (553)..(553): n equals a,t,g, or c
  misc_feature (583)..(583): n equals a,t,g, or c
  misc_feature (590)..(590): n equals a,t,g, or c
gcagaactcttccacatagcagtantgtntngcnaaccagtgtggtccanaaaggtggtgttcactgatttaatgtttaagttgatagattcagggaaagtgagcagtgaaacaatttctgcttttcaccaagagcagaggttttctaaataagtcgaaggggaaaacccttggatgcttcatagtcctacttctaggcagttctgcatgaatttctggtaatccaggaggatattgccgtanaanangttgatggtagcttgaaccagggtggacacaaaggtatttgacctgtccaaagacgacttgatacctctataatgtancagaaaaggtcagaaaatattaagcaagtngaagtgtggancatattaagcaagatgaacatctcgggaagcanctgtggaaccctaactctgcagatacatctantgactttaangaccttggacaaactaaaaaatgtctgatagaaaattcaaggttacaattaaaattaccaagctaaacaggacaatcttnatgcccnagatagaaaatcctccccaaatcncactgaaggaacacaaaaatcctctgaaancattaanttttaaaaattggttaaaaaa

SEQ ID NO: 1468 - DNA, 729 bp, Homo sapiens
  misc_feature (7)..(7): n equals a,t,g, or c
  misc_feature (15)..(15): n equals a,t,g, or c
  misc_feature (21)..(21): n equals a,t,g, or c
  misc_feature (60)..(60): n equals a,t,g, or c
  misc_feature (66)..(66): n equals a,t,g, or c
  misc_feature (70)..(70): n equals a,t,g, or c
  misc_feature (82)..(82): n equals a,t,g, or c
  misc_feature (94)..(94): n equals a,t,g, or c
  misc_feature (219)..(219): n equals a,t,g, or c
  misc_feature (224)..(224): n equals a,t,g, or c
  misc_feature (244)..(244): n equals a,t,g, or c
  misc_feature (248)..(248): n equals a,t,g, or c
  misc_feature (251)..(251): n equals a,t,g, or c
  misc_feature (280)..(280): n equals a,t,g, or c
  misc_feature (381)..(381): n equals a,t,g, or c
  misc_feature (405)..(405): n equals a,t,g, or c
  misc_feature (417)..(417): n equals a,t,g, or c
  misc_feature (447)..(447): n equals a,t,g, or c
  misc_feature (469)..(469): n equals a,t,g, or c
  misc_feature (500)..(500): n equals a,t,g, or c
  misc_feature (535)..(535): n equals a,t,g, or c
  misc_feature (591)..(591): n equals a,t,g, or c
  misc_feature (624)..(624): n equals a,t,g, or c
  misc_feature (633)..(633): n equals a,t,g, or c
  misc_feature (664)..(664): n equals a,t,g, or c
  misc_feature (667)..(667): n equals a,t,g, or c
  misc_feature (673)..(674): n equals a,t,g, or c
  misc_feature (688)..(688): n equals a,t,g, or c
  misc_feature (694)..(695): n equals a,t,g, or c
  misc_feature (702)..(702): n equals a,t,g, or c
  misc_feature (707)..(707): n equals a,t,g, or c
  misc_feature (713)..(713): n equals a,t,g, or c
  misc_feature (723)..(723): n equals a,t,g, or c
ggttaanttaaagancctatngcctattgttacaatgagataaaattgataaaacgtganataaantatnaggacatattanaagaaaaatgcnaagaacattcgtatcacattttcagtgtgctatggaatctgctcacatctttactaataatctcttccaaaacataggctatctcatatattctgaatatgatttagatttaatgtaaaatgtanagaantacttctatcacctaagtanattnttntgtttcataaaagtaatttcctccaaaancaattttaatttgctaagagaaaaataagaacaaaaaccattcttactgccacacctaccatcttaaaaaacaataccaaaaatgcaaataataacctatntccatgtgttacttaaatggagtnatctgtgttaantattcttgtctaagaaaaggcactggcaancaaaaccaaagccaaaacacanaatttttgctatgaattttaaattttttatntctgttctggaaattttatgtttacttaaaacctngtatataatagaaacataatccattgagcctttgggataaacaataattttcgganttttactcattaatattttccttccaaattatncccactacnaaactgctttagaaaaaaatgtgtttaactnatnctgganngaatttaaaaaacnaagccnnaaccacntttangaaaancttccccctnttttcc

SEQ ID NO: 1469 - DNA, 231 bp, Homo sapiens
  misc_feature (81)..(81): n equals a,t,g, or c
  misc_feature (97)..(97): n equals a,t,g, or c
  misc_feature (152)..(152): n equals a,t,g, or c
  misc_feature (166)..(166): n equals a,t,g, or c
  misc_feature (191)..(191): n equals a,t,g, or c
  misc_feature (196)..(196): n equals a,t,g, or c
  misc_feature (214)..(214): n equals a,t,g, or c
ggagaaaatgatatttaagccaagaactcttagaagttagctaagaaagagatgggaaaatgagacgacattgctggagtngataaaactgcatgtnaaaggcaggaagatggggaaaaaaagttcagtaaagctggaatggggaaatgtantccgggactgaatnttaaagggctttatcaacctcagtnaagantttggaccttatgttganggtggctgataacatat

SEQ ID NO: 1470 - DNA, 624 bp, Homo sapiens
  misc_feature (457)..(457): n equals a,t,g, or c
  misc_feature (464)..(464): n equals a,t,g, or c
  misc_feature (488)..(488): n equals a,t,g, or c
  misc_feature (501)..(501): n equals a,t,g, or c
  misc_feature (521)..(521): n equals a,t,g, or c
  misc_feature (565)..(565): n equals a,t,g, or c
  misc_feature (590)..(591): n equals a,t,g, or c
  misc_feature (595)..(595): n equals a,t,g, or c
  misc_feature (606)..(606): n equals a,t,g, or c
ggtcttatcagcaaatctataatctaccttcaaaaaattttcaaaatctcaccttttattaatcatttcccccattaacaccctaatccaagccaccataaacaacccttatcatctgtgtagcctattgttgatctccttcattccatctgttcttgttcctctttagtcaagttctttttccacacagcagccaggctaattttaaagtttaagtgatactaaattaagtcactgttcccttgcttaaaactgtttagtgctttccatttcattgagaataaaattgaagctcttttcatggtctctaatattctacatagacttacccctgtatacctcttgatggtcttttttaatgtctgttgattacagccacactggccctgatattacttgaacaagccagtcattctggtgtttgctattccttctgcctggactgtttttcctccangtgttantacagccagcttcatttcattaangtacttgtcccantgccttctaatcaatctaantattgtctctttgccttttctaatttctttatggtgctcatggntctaattggtataaaattatgtttnnaatnatttgtctccncccccctgcaaaaatatt

SEQ ID NO: 1471 - DNA, 156 bp, Homo sapiens
  misc_feature (19)..(19): n equals a,t,g, or c
  misc_feature (24)..(24): n equals a,t,g, or c
  misc_feature (28)..(28): n equals a,t,g, or c
  misc_feature (54)..(54): n equals a,t,g, or c
  misc_feature (81)..(81): n equals a,t,g, or c
  misc_feature (126)..(126): n equals a,t,g, or c
  misc_feature (128)..(128): n equals a,t,g, or c
  misc_feature (149)..(149): n equals a,t,g, or c
  misc_feature (154)..(154): n equals a,t,g, or c
ggcttgaacctaaatctanctacngatnatgcttctggatcttgaagaacaacncagacttcaaaccaaaggtataagaangttctatcttggagggagtacctcccaatctaaggctgcctttantngttgttttaagcatcttgtancatanct

SEQ ID NO: 1472 - DNA, 720 bp, Homo sapiens
  misc_feature (275)..(275): n equals a,t,g, or c
  misc_feature (354)..(354): n equals a,t,g, or c
  misc_feature (386)..(386): n equals a,t,g, or c
  misc_feature (430)..(430): n equals a,t,g, or c
  misc_feature (439)..(439): n equals a,t,g, or c
  misc_feature (492)..(492): n equals a,t,g, or c
  misc_feature (513)..(513): n equals a,t,g, or c
  misc_feature (591)..(591): n equals a,t,g, or c
  misc_feature (593)..(593): n equals a,t,g, or c
  misc_feature (611)..(611): n equals a,t,g, or c
  misc_feature (619)..(619): n equals a,t,g, or c
  misc_feature (639)..(639): n equals a,t,g, or c
  misc_feature (649)..(649): n equals a,t,g, or c
  misc_feature (660)..(660): n equals a,t,g, or c
  misc_feature (667)..(667): n equals a,t,g, or c
  misc_feature (695)..(695): n equals a,t,g, or c
ggacagattctccattataaagtcccggcaagatgaatacccatcaatgtttcaacttagagcagaagatgagacttgaaagataaaagacctgctttattaaccaggtaaaagaagtctgtgtcaagactaatgtaagaacaaggagctgggagatggaccatggggccaccagtaacaggaggtgaaggaagggaagcaaaaatgaggaacagaaccagaaaaacaggaatgggttaagtataaagtctgatttggaaggaaaaacacacatnacatcccaaaatgatacctaaaaacaagtgagaaaaggaacgatggtggagcattagtttctggagagtttctgggganaaagtgttagtttagaaaatggggactgtgtntgggaaacagcaagtcaagtgcattgcaatgttattgtctgcangaacctcangtgggccaagtgatgggctgaagggatgatgctatggaacaccttaagacaanctcctgctgaatggaaattanaaattaaccactgtttttcttaccatttgtttctaaaggacaattgcattctgaattgaatccactaatttgaagttntnttaaatatgcatgcattntttacatnccctgcatctgtttttgttnttggaagctnaaccctggatnaaataanctctttacaaaacaatgccttgttaaanctttaaggtttccaattttgttcct

SEQ ID NO: 1473 - DNA, 502 bp, Homo sapiens
  misc_feature (498)..(498): n equals a,t,g, or c
  misc_feature (502)..(502): n equals a,t,g, or c
gcacacatttctgccatctaatctgcagatttgtttacattaaaaaacaagactaaatttaagcttcaaagtaaaagctcaacatttagggagacatacgggctgtttgctttgaatgaggggcaggagccagccttctccgaattggcccagagaaaatttttgaaacacagaaatgtaataatagctggcacatgggatgtgtggaatgaaatcagcactttcaaaaagaaaagaatgaagagaataataataataagccaatgcattcagttcttttggttaatgtcaaattttactcaccaatcttaacagatctactagtgattactcttatttgggtatttccactggaaaattatccagtttgtgaaaagtctcagtcatttgttatgaagaacacagctttcattttgtcccaaaattagatgggactgaattacccccaccaagatgattcaagctgcctactcgtgccccagctctgccttgcttttnggcn

SEQ ID NO: 1474 - DNA, 467 bp, Homo sapiens
  misc_feature (420)..(420): n equals a,t,g, or c
  misc_feature (433)..(433): n equals a,t,g, or c
  misc_feature (439)..(439): n equals a,t,g, or c
  misc_feature (456)..(456): n equals a,t,g, or c
  misc_feature (459)..(459): n equals a,t,g, or c
gctatcttaagtaccacttcttaagtactttaagtacttttaagggtactttagatttaatcagagttgagggatctctgcatttatatctcctggatagacaataagcaatgagaagattaaacggaaatataaacagcccctacaaggtaagcttcctgaagtgatggccagtgacagcttaagttaaggagaagaaagaaaggcagagtatcagcaccatacaatgggggcaagcagggtggggacagaaaggtaaaagaatgaaatccttagatcattttatatatttaccattacattttccttaatattggctatgccaacattaccttgagttagaagttcagactggaggagggaagagatggaggagtgatggggagaaattctaagaaaacatgaagctcaagttttagngagtcattaatgngaatgngttaaaaacattacctnggntccttttt

SEQ ID NO: 1475 - DNA, 507 bp, Homo sapiens
  misc_feature (196)..(196): n equals a,t,g, or c
  misc_feature (204)..(204): n equals a,t,g, or c
  misc_feature (233)..(233): n equals a,t,g, or c
  misc_feature (405)..(405): n equals a,t,g, or c
  misc_feature (434)..(434): n equals a,t,g, or c
  misc_feature (440)..(440): n equals a,t,g, or c
  misc_feature (475)..(475): n equals a,t,g, or c
  misc_feature (478)..(478): n equals a,t,g, or c
  misc_feature (491)..(491): n equals a,t,g, or c
gctccttaattataacattcacagccacagaactaatcatattttatatcttcttcgaaaccacacttatccccaccttggctatcatcacccgatgaggcaaccagccagaacgcctgaacgcaggcacatacttcctattctacaccctagtaggctcccttcccctactcatcgcactaatttacactcacancaccctangctcactaaacattctactactcaccctnactgcccaagaactatcaaactcctgagccaacaacttaatatgactagcttacacaatagcttttatagtaaagatacctctttacggactccacttatgactccctaaagcccatgtcgaagcccccatcgctgggtcaatagtacttgccgcagtactcttgaagctangcggctatgggataatacgccttacactnattctnaaccccctgacaaaacacatagcctacccttcctnggnctatccctatgangcataatattaccaag

SEQ ID NO: 1476 - DNA, 520 bp, Homo sapiens
  misc_feature (332)..(332): n equals a,t,g, or c
  misc_feature (418)..(418): n equals a,t,g, or c
  misc_feature (452)..(452): n equals a,t,g, or c
  misc_feature (468)..(468): n equals a,t,g, or c
  misc_feature (477)..(477): n equals a,t,g, or c
  misc_feature (480)..(480): n equals a,t,g, or c
  misc_feature (496)..(496): n equals a,t,g, or c
ggtgactttaagagattttgcttttcaaatgacaagaaatctggagctaggctattcagcccaagacctttagagacaaacttgtagtgaaaaaaagttaagtctgttgacttaattgccctgaaggagacagtataccaggggaaccatggggttaactttatagcaggctttatcagtgccagttattccagcctgataattttttactttttcagtccaaactaaatttcaccaaataaaggaatatatggagttattatataatttggggaagagtgaagtttgagtgggatttaaggggaagcagcattctgattgtctcaatgcanaacaagggtgtgtataaatgggccaacattaggtctggactgtgaagtagaccaaggtcacgttcctttggaaacaaagttaaaangagatgggaaatgtttcttagaagttctctgaanttcagcacccttgggntggataatngangctgcttctctctgcnaagatgacgtgcaccctctagcaa

SEQ ID NO: 1477 - DNA, 537 bp, Homo sapiens
  misc_feature (38)..(38): n equals a,t,g, or c
  misc_feature (58)..(58): n equals a,t,g, or c
  misc_feature (143)..(143): n equals a,t,g, or c
  misc_feature (180)..(180): n equals a,t,g, or c
  misc_feature (214)..(214): n equals a,t,g, or c
  misc_feature (216)..(216): n equals a,t,g, or c
  misc_feature (259)..(259): n equals a,t,g, or c
  misc_feature (264)..(264): n equals a,t,g, or c
  misc_feature (275)..(275): n equals a,t,g, or c
  misc_feature (299)..(299): n equals a,t,g, or c
  misc_feature (314)..(314): n equals a,t,g, or c
  misc_feature (354)..(354): n equals a,t,g, or c
  misc_feature (370)..(370): n equals a,t,g, or c
  misc_feature (376)..(377): n equals a,t,g, or c
  misc_feature (396)..(396): n equals a,t,g, or c
  misc_feature (403)..(403): n equals a,t,g, or c
  misc_feature (415)..(416): n equals a,t,g, or c
  misc_feature (450)..(450): n equals a,t,g, or c
  misc_feature (476)..(476): n equals a,t,g, or c
  misc_feature (492)..(492): n equals a,t,g, or c
  misc_feature (494)..(494): n equals a,t,g, or c
  misc_feature (506)..(506): n equals a,t,g, or c
gcccacccctgggagggatgaggcaccctcttgctcancctgctcagccttctctgancctttgcagggatctgcagactcctgagggctagaggacagagaaagagaatagaatgaaatgactttgattcctgcgccttttngttttgaactctggaattcctctgccccctccccaanatttttttggaatctcaccctattgcaaaactananccatgtcccaagtatctcacaaaggaataactgctctgaacanaaatnagtggtggttngcaggggcaggcaactttggggtnctgctgatgcctgcnaaaaccatttatggcttgtggtggggggcacatagattcnccggtgggttagacangaagtnnctgatatctcttcacccanatatatntccgtgatggtnntctatttaatttcagtttttgttaacgaagcgtntcttactagtgacgctccactttganctcccccaccccctcnangtcctcagaatntggcagatctggggctttcttttagcaagtg

SEQ ID NO: 1478 - DNA, 634 bp, Homo sapiens
  misc_feature (1)..(3): n equals a,t,g, or c
  misc_feature (14)..(14): n equals a,t,g, or c
  misc_feature (19)..(19): n equals a,t,g, or c
  misc_feature (372)..(372): n equals a,t,g, or c
  misc_feature (607)..(607): n equals a,t,g, or c
  misc_feature (609)..(609): n equals a,t,g, or c
  misc_feature (614)..(614): n equals a,t,g, or c
  misc_feature (630)..(630): n equals a,t,g, or c
  misc_feature (632)..(632): n equals a,t,g, or c
nnnggacggttgantcccntatgacccgttgaaatacccctcactaaagggaacaaaagctggagctccaccgcggtggcggccgctctagaactagtggatcccccgggctgcaggaattcggcacgaggttaaattagagtgggaaaaggatcgctgctatttatgacacatttattgaaagtcagtgctggctttaagctgagtttcttataaattcagaaatatatagattgctatatgcaactcttcggttatgtgcctgcatgtaacagagagaagccaattacctttaccatatgcttccctccttttccactgggagtctctcatgttttgcctctgcctcttcttgtgtactgtattgcattntattttaattgccaccttacaatcaaatgaaagggaaatactgctgtagggaagggtggaaattataggattttcaacattccccagatgggctggctgcctgacttagggaccacgttttccagaatgttaagtttgaaggtcatggcccattttctaagatctatggaaaacaacacagcttgtggcttggaaaaagaagatttgagcacaagctgtggagtagaaggaactnangctgnccagtttttggactgngngg

SEQ ID NO: 1479 - DNA, 567 bp, Homo sapiens
  misc_feature (4)..(4): n equals a,t,g, or c
  misc_feature (9)..(9): n equals a,t,g, or c
  misc_feature (17)..(17): n equals a,t,g, or c
  misc_feature (23)..(23): n equals a,t,g, or c
  misc_feature (28)..(28): n equals a,t,g, or c
  misc_feature (312)..(312): n equals a,t,g, or c
  misc_feature (348)..(348): n equals a,t,g, or c
  misc_feature (383)..(383): n equals a,t,g, or c
  misc_feature (455)..(456): n equals a,t,g, or c
  misc_feature (467)..(467): n equals a,t,g, or c
  misc_feature (511)..(511): n equals a,t,g, or c
  misc_feature (530)..(530): n equals a,t,g, or c
  misc_feature (533)..(533): n equals a,t,g, or c
  misc_feature (550)..(550): n equals a,t,g, or c
  misc_feature (556)..(556): n equals a,t,g, or c
ccangagancttccttnggaaanccccnttactaaaggcaacaaaagctggagctccaccgcggtggcggccgctctagaactagtggatcccccgggctgcaggaattcggcacgaggaaaggagcctaggcaaggtggtttataatttaagtatgaatcttctaattacacatttgtttgtatatgttcatgcataatcaaattgaatcaaatggacagcctgaaaaatgagattatagtgttagcatggtagagcaggagttgggggcattcttcttgcatcagccatcaacttgatttatagatgttntatctcattaacctttaagtcatagagctaattagnggctctgggaactgcaaaaacacacttgaagcaancacgtagctctttaacttcgtcatgcaccaaattaaactggacccaaatattccaaatcatagaagacatcnnttgaaagactntgcctccttcatttcaaaaggctcactgggatgaatatcatacntgatgagaacccagatttnctnatctagcatgcatgccntatagngttaaaaccat

SEQ ID NO: 1480 - DNA, 526 bp, Homo sapiens
  misc_feature (12)..(12): n equals a,t,g, or c
  misc_feature (35)..(35): n equals a,t,g, or c
  misc_feature (49)..(49): n equals a,t,g, or c
  misc_feature (395)..(395): n equals a,t,g, or c
  misc_feature (462)..(462): n equals a,t,g, or c
  misc_feature (475)..(475): n equals a,t,g, or c
  misc_feature (477)..(477): n equals a,t,g, or c
  misc_feature (502)..(502): n equals a,t,g, or c
  misc_feature (513)..(513): n equals a,t,g, or c
ggggcgaggttnacctagtagacctcgttgtgatnccccttctaaaggnaacaaaagctggagctccaccgcggtggcggccgctctagaactagtggatcccccgggctgcaggaattcggcacgagagtcaaacaagaattctgattacctcatcagtgatacctaaatgcagatttcttcttgcttcagacaaaatttttcaaagatactcaaagtatctcagctcttgttgtatgtgtgttttgaaagatagggttgaagaaaacaatgaaaagataacagggatatctgtcctccagagttgttcaggggattcatgcatatgagaagttatttgcgaagttttagttcccagtctgggcatcagctcattatcattagtctctgatatnagttgtttaatgattgaactttgtgcaaagcacttgatcctattcagctgtcaggcattcattgttnaaagaacacattnangacaactgttgtatgtcaggaaatngaaggtagggngttgagggcaagt

SEQ ID NO: 1481 - DNA, 669 bp, Homo sapiens
  misc_feature (207)..(207): n equals a,t,g, or c
  misc_feature (278)..(278): n equals a,t,g, or c
  misc_feature (404)..(404): n equals a,t,g, or c
  misc_feature (423)..(423): n equals a,t,g, or c
  misc_feature (434)..(434): n equals a,t,g, or c
  misc_feature (442)..(442): n equals a,t,g, or c
  misc_feature (584)..(584): n equals a,t,g, or c
  misc_feature (599)..(599): n equals a,t,g, or c
  misc_feature (651)..(651): n equals a,t,g, or c
  misc_feature (654)..(654): n equals a,t,g, or c
  misc_feature (666)..(666): n equals a,t,g, or c
gctccattttatatttttgttgtagatctgcagtacttgatttgctaaaaaatgcaattaccagttaagtgagggaaggttgtagtctttgttcagtacgtaaccaagagttttctatcattttaaaaactatcactagtggcaacattgctcatggcatttgagttccaggtcaaaactactgcagtagtctgcatttgtagtggntacattaatggtaatcatatgtacatatgcaagcatctaatgattgtgtcatcaggagttttggccatctncagattgaattacacattaccgtaagttgcttccttttatttctctgttacattacagttagatattaaagatacctttaatcatgatagatgatttaaaaatatgcctcacgtaagttatattgnttgtgttttagaataatanaacatgtttanaaatattnctgataaaaagtggctgtgggcctgaaggggcgaaaaccattagtctacagtcattgatgaacagtcctgcccttaagcccctcttagttggagctgcagagaggatagatccaacttgaactctgaggtctaatattctgngtggttactgaaggnagctgcccatgtgctttggaaaccacatggacattctatgaaatccgcgaanaanagcagtactctnaat

SEQ ID NO: 1482 - DNA, 713 bp, Homo sapiens
  misc_feature (466)..(466): n equals a,t,g, or c
  misc_feature (476)..(476): n equals a,t,g, or c
  misc_feature (497)..(497): n equals a,t,g, or c
  misc_feature (564)..(564): n equals a,t,g, or c
  misc_feature (568)..(568): n equals a,t,g, or c
  misc_feature (577)..(577): n equals a,t,g, or c
  misc_feature (589)..(589): n equals a,t,g, or c
  misc_feature (631)..(631): n equals a,t,g, or c
  misc_feature (664)..(664): n equals a,t,g, or c
  misc_feature (681)..(682): n equals a,t,g, or c
  misc_feature (702)..(702): n equals a,t,g, or c
gaaagatggcaaggggcggacggcgtctcccatcaactccccagccagaggtactccatctcccaagaggatgccctcaggtcgtgggggacgggaccgcttcaccgctgagtcctacacagttctgggggacacgctgatcgacggcggggagcattactgggaggtgcgctacgagccggacagcaaggcgttcggcgtgggcgtggcctaccgcagcctgggccgcttcgagcaactgggcaagacggccgcctcctggtgcctgcacgtcaacaattggctgcaggtcagcttcacggccaagcacgccaacaaggtcaaggtgctggacgcccccgtgcccgactgcctgggtgtgcactgtgacttccaccaaggcctcctgtccttctacaatgcccgcaccaaacaagtgctgcacactttcaagaccaggttcacacagccgctgctgcctgctttnacggtatggnagtggcagcttccaggtgacnacaggcctgcaggtccccagtgctgtgccgctggctgcaaaaagccgaggcaagtgctaccagcagntccnacaaccagnctcacctaggcncccaggcacccacccagctggggtggttttggggggaagtcnccgtcaacccaaggctgcttggaaccaggcacncttctttgcacttgctnnttggaagccttaacttcagntggggggggtc

SEQ ID NO: 1483 - DNA, 768 bp, Homo sapiens
  misc_feature (631)..(631): n equals a,t,g, or c
  misc_feature (658)..(658): n equals a,t,g, or c
  misc_feature (672)..(672): n equals a,t,g, or c
  misc_feature (675)..(675): n equals a,t,g, or c
  misc_feature (692)..(692): n equals a,t,g, or c
  misc_feature (739)..(739): n equals a,t,g, or c
gcagaattcctctatttttgcttgaaaatagtcctttagattggagtagccttttcttagatccctctatgtctaatgagggctctcttgtttgctagagatgagagaaatgtatactaatcattttaatttgtacttaaaatacattttactaatcatattgattttaaatatgacaaattcttctagtagatactaatctttcttgtttatcatattgtcctagagaagcctaggtaaaaatgggttccacctagtctgtttgtataacaccttcccccgtcccctctccatccctgccaattgggctctatgcatattgacaagcaaataagaaaaccttaggtttcttgtatttgaatttccaaaacaataaaaggttttgactcaagatttgcattcaagaagaggcagaaattttgtcttatctttttatcattttgtgaacttgtgtttctctgtatgcttagaaaattttacacacaaggaatgtttgaaaaagtgagaattttagagtgcttgggtggtttttatttggtcagtgctgatgtgttaggtggttagggaaataatgcttcaggacctttttgacaacacagcttcatgaatgactgggggatatttatgttgngctgagaaaagggagggagtggcaggntggagtggggaccnttncattgaagcagtgcagnagctggttcgaaaagcatttttccttatcctggacatgggcttgggncataatggctgaatgcagctcaggatgca

SEQ ID NO: 1484 - DNA, 534 bp, Homo sapiens
  misc_feature (219)..(219): n equals a,t,g, or c
  misc_feature (225)..(225): n equals a,t,g, or c
  misc_feature (229)..(229): n equals a,t,g, or c
  misc_feature (257)..(257): n equals a,t,g, or c
  misc_feature (259)..(259): n equals a,t,g, or c
  misc_feature (272)..(272): n equals a,t,g, or c
  misc_feature (280)..(280): n equals a,t,g, or c
  misc_feature (286)..(286): n equals a,t,g, or c
  misc_feature (305)..(305): n equals a,t,g, or c
  misc_feature (313)..(313): n equals a,t,g, or c
  misc_feature (317)..(317): n equals a,t,g, or c
  misc_feature (336)..(336): n equals a,t,g, or c
  misc_feature (376)..(377): n equals a,t,g, or c
  misc_feature (474)..(474): n equals a,t,g, or c
  misc_feature (477)..(477): n equals a,t,g, or c
  misc_feature (508)..(508): n equals a,t,g, or c
  misc_feature (517)..(517): n equals a,t,g, or c
  misc_feature (533)..(533): n equals a,t,g, or c
gtaacaacttccctacccactaaccttctcagctttcatggtgaaccaagcctcctctgtcgcactaaccttcccagctttcatggtgaaccaagcctcctctgtcccactaaccttctcagctttcatagtaaaccaagccttctctgtctgatgggccctttcttagatggtgttaacacatctgacaaagttaatcctatctcatgctgccagggnccatcntgcntcttgctgggaacttggaattctctaancnatagattggaggntaaagttnaagagngcattctttttctcccttntctaaagngggnaaaccccctatgcctttcngtgagagccctctaaatttcttgggtattcatgcatattnngttttcggtagcaaggctatctagatttttatcagaatttaaggcagtctgacgggattaacctgcaccaaaaaaaaaaaaaaccccaggaaaaccntgntttaaaaaacggcccagtgtttggggcaaantccaaaatnctaaaatacctgggcnt

SEQ ID NO: 1485 - DNA, 241 bp, Homo sapiens
  misc_feature (206)..(206): n equals a,t,g, or c
  misc_feature (221)..(221): n equals a,t,g, or c
  misc_feature (225)..(225): n equals a,t,g, or c
  misc_feature (232)..(232): n equals a,t,g, or c
  misc_feature (239)..(239): n equals a,t,g, or c
ggtaaagcactcctcagccatttatttgtcccgtgggtttttttccagggaaccaatctgcccttttgaagaaaagacaaaggtagaaaggatggtggaggactacctggcaagtggttatcagcatttatcaggtatctgcagtgtgctgaggagtgtgctgcatagacaccaatgggacaggaagagctcctagcctggttgcntgaatcaagcgtaancagngccaggnttatgcntg

SEQ ID NO: 1486 - DNA, 278 bp, Homo sapiens
  misc_feature (37)..(37): n equals a,t,g, or c
  misc_feature (45)..(45): n equals a,t,g, or c
  misc_feature (56)..(56): n equals a,t,g, or c
  misc_feature (69)..(69): n equals a,t,g, or c
  misc_feature (78)..(78): n equals a,t,g, or c
  misc_feature (134)..(135): n equals a,t,g, or c
  misc_feature (154)..(155): n equals a,t,g, or c
  misc_feature (177)..(177): n equals a,t,g, or c
  misc_feature (187)..(187): n equals a,t,g, or c
  misc_feature (261)..(261): n equals a,t,g, or c
  misc_feature (264)..(264): n equals a,t,g, or c
  misc_feature (267)..(267): n equals a,t,g, or c
  misc_feature (271)..(271): n equals a,t,g, or c
tctctttgggggggggaaaaagaactttggggggccnccctttcncaaccccgggnggggggttggggnccgggggcnccgggcttttcttttaaggaaaaacttttaaggttgggggaatttccccccccccnnggggggccttttgccaaannggtaaaattttttccgggggcnaaccggaaangttttaaattttaaattttgggggaaccaaatttccctttttgggtcttattttccctttcaattctttttaanaanttnaaantggtctt

SEQ ID NO: 1487 - DNA, 191 bp, Homo sapiens
  misc_feature (15)..(15): n equals a,t,g, or c
  misc_feature (32)..(32): n equals a,t,g, or c
  misc_feature (35)..(35): n equals a,t,g, or c
  misc_feature (75)..(75): n equals a,t,g, or c
  misc_feature (88)..(88): n equals a,t,g, or c
  misc_feature (148)..(148): n equals a,t,g, or c
  misc_feature (158)..(158): n equals a,t,g, or c
  misc_feature (165)..(165): n equals a,t,g, or c
  misc_feature (177)..(177): n equals a,t,g, or c
  misc_feature (184)..(184): n equals a,t,g, or c
gtcactaaagggaanaaaagctggagctctancgnggtggcggccgctctagaactagtggatcccccgggctgnaggaattcggcangaggaacaaagaacagagacaacaaatagaaaacagtaagaaatagggtagatattaatncaactacatnaataatnactttgaacatnaatgatntaaatgt

SEQ ID NO: 1488 - DNA, 354 bp, Homo sapiens
  misc_feature (91)..(91): n equals a,t,g, or c
  misc_feature (93)..(93): n equals a,t,g, or c
  misc_feature (96)..(96): n equals a,t,g, or c
  misc_feature (164)..(164): n equals a,t,g, or c
  misc_feature (182)..(183): n equals a,t,g, or c
  misc_feature (251)..(251): n equals a,t,g, or c
  misc_feature (274)..(274): n equals a,t,g, or c
  misc_feature (334)..(334): n equals a,t,g, or c
  misc_feature (338)..(338): n equals a,t,g, or c
  misc_feature (350)..(350): n equals a,t,g, or c
  misc_feature (352)..(352): n equals a,t,g, or c
aagggcaacgactgcaggaattcggcacagagaggagatcaaggcagtagtgagctgtgattataccactgccctccaacctgggtgacanancangaccttgtctcataaataaataaataacactaacaatgactgaaacatcatgaaatagatctggttgncactggtatttaagtgtnntcctatatctggttatattaatgtacttcaatagacagttactgccttcactatgcttccagcctcangaggatctactggtatgcaacanatgaagagaagatacctgtctttaaggcagcctctactttatacatatgtgcacctttangaanacaccatttatnanac

SEQ ID NO: 1489 - DNA, 623 bp, Homo sapiens
  misc_feature (491)..(491): n equals a,t,g, or c
  misc_feature (499)..(499): n equals a,t,g, or c
  misc_feature (519)..(519): n equals a,t,g, or c
  misc_feature (554)..(554): n equals a,t,g, or c
  misc_feature (586)..(586): n equals a,t,g, or c
  misc_feature (589)..(589): n equals a,t,g, or c
  misc_feature (596)..(596): n equals a,t,g, or c
  misc_feature (614)..(614): n equals a,t,g, or c
gcaagcacattcttcctgctgtcgaagatgcccttcccctcctcagagtacaggttgaaaatgaagtcagtggtatagttctcattgcacttttcattcctgccaggtggagaccaaaagcctgtgactctgtggttggcttcccatcccccatttctgcctttgttctttcctttcaatttttatctcctccaaggattcaagggataggctggccccctccctttatatctacagattcctcagggtgtcccaacaatggccattctatgggtttgagccaaagcttatttttcttcttcacttaggaacaaaccatggatgaggtaccttaacaccaagccccttttccagttgttttcatcttttgcaccagatgttcaacatttgcctgaaaatgaaagaattaaatcctaagcctaactgggaatggataaggttgggtataaatcatcttccacaccacacctctccaggaaaggaagaaaccntggaaaanaattgtttacaatcctgggnctgaactgtgcctaattcctgttaaaaactcattntggaactgaaattttaaccatgactcccaatnaanacaaaantggaaaaagggaaccctnccaacactt

SEQ ID NO: 1490 - DNA, 552 bp, Homo sapiens
  misc_feature (322)..(322): n equals a,t,g, or c
  misc_feature (443)..(443): n equals a,t,g, or c
  misc_feature (472)..(472): n equals a,t,g, or c
  misc_feature (475)..(475): n equals a,t,g, or c
  misc_feature (522)..(522): n equals a,t,g, or c
  misc_feature (546)..(546): n equals a,t,g, or c
  misc_feature (550)..(550): n equals a,t,g, or c
gccacaaaatacaaaaaaactctctaaacagttgacaagggagtttattaagcaaatagaggtaccaattacaaaccatcagggttagaaaaaaaatccaggctttaagtaaatataaatctaagtaataggctattgactattatcttagaaaaacttggggtattacaccaggttatcacagaatatttagtttagaagtatggaaaatatgatatgctatttatttgaatgatactcggtaggcatgtaatgtgatgattaaatcatcctgaatatgaacacagaaaatatcaattttctttgcattaagaatcatgtntgtagaaaggagaaaacaaagtacttattacatagctgactggacttacagtcacatctaatttaaagcaaattgctccatgcaatggaatatctaaaagtatattgtgcattattgctcngactgataggaaatcatatacttctaaanttntgaaattcgttctccactatttaacaaaattacctgaatgatgcgtnctaaaaattgcactacaatttctnaacnca

SEQ ID NO: 1491 - DNA, 659 bp, Homo sapiens
  misc_feature (286)..(286): n equals a,t,g, or c
  misc_feature (306)..(306): n equals a,t,g, or c
  misc_feature (338)..(338): n equals a,t,g, or c
  misc_feature (393)..(393): n equals a,t,g, or c
  misc_feature (414)..(414): n equals a,t,g, or c
  misc_feature (450)..(450): n equals a,t,g, or c
  misc_feature (464)..(464): n equals a,t,g, or c
  misc_feature (467)..(467): n equals a,t,g, or c
  misc_feature (525)..(525): n equals a,t,g, or c
  misc_feature (537)..(537): n equals a,t,g, or c
  misc_feature (542)..(542): n equals a,t,g, or c
  misc_feature (553)..(553): n equals a,t,g, or c
  misc_feature (563)..(563): n equals a,t,g, or c
  misc_feature (593)..(593): n equals a,t,g, or c
  misc_feature (604)..(604): n equals a,t,g, or c
  misc_feature (635)..(635): n equals a,t,g, or c
  misc_feature (653)..(653): n equals a,t,g, or c
gacaaaaataacctatttcattttgaatctgaattctccagaaatttttttaattcaattttcactgtgcctacaattttgagactgttttgatttatagtcagagcaagagaaagaaattaaataatcgagtggcagattcccaacttgttattgctttcacatgaattactttcaaaatccaattactcaagttgccattttgatatcaatcatagactaaaagcttagcatatatattttttcatttacttattatttatccttctttattaaaacaatgtcngttactctgtccagtttatnaacatttaaagcaaattgccattattagaaantgcctccccttccccagtgggaacagcttgccttggaaaagtttaagttaccccnccaagggggaaatgggggttnccaaaggggggctttttgggaaaaccctccacattnaaaaactttcctgnttnaaaaaaattatttcctttggcacaggtggaatccccattcccccccttcctgtttttnttaagtttttancatgnaaaggcctttnaaaggttttntttgggtattaaattttgtttaaatgtttncctgaattccntttaccaaaatttttctgtggcaaataaaanttttttcctgttttaaanaaatta

SEQ ID NO: 1492 - DNA, 602 bp, Homo sapiens
  misc_feature (267)..(267): n equals a,t,g, or c
  misc_feature (283)..(283): n equals a,t,g, or c
  misc_feature (342)..(342): n equals a,t,g, or c
  misc_feature (345)..(345): n equals a,t,g, or c
  misc_feature (350)..(350): n equals a,t,g, or c
  misc_feature (353)..(353): n equals a,t,g, or c
  misc_feature (356)..(356): n equals a,t,g, or c
  misc_feature (373)..(373): n equals a,t,g, or c
  misc_feature (410)..(410): n equals a,t,g, or c
  misc_feature (443)..(443): n equals a,t,g, or c
  misc_feature (448)..(448): n equals a,t,g, or c
  misc_feature (476)..(476): n equals a,t,g, or c
  misc_feature (490)..(490): n equals a,t,g, or c
  misc_feature (495)..(495): n equals a,t,g, or c
  misc_feature (523)..(523): n equals a,t,g, or c
  misc_feature (567)..(567): n equals a,t,g, or c
  misc_feature (583)..(583): n equals a,t,g, or c
  misc_feature (597)..(597): n equals a,t,g, or c
  misc_feature (602)..(602): n equals a,t,g, or c
gagcatttccggtaatgatgggctcccaagtcataaacttttcattggttgctcatttctctcctcccctttccatgccctatatacttgctggctgcctttgcaaagtctctgtgtcttgcctaaatagataatatagccatcttggtaattttctcttaaaggttctagttgcagggtggtgcttttcttttttaatatttatttttagtttgacaagtcctagctatgtgacctgccatgtcttgtacttgatggtctcagaantcagcccatgtatctnaccccagtcttcctagtgacccttattttgctgcagtttctcctgttcttgttcaatancanaacanatncanagaattctggcaagcangatgatttattattgttattatggactatcccaacancgtgataatacactccaccctgttatccccttnggaanttaacttcttctgggtgaacccaggaantttagaaaaaattnttttnttttccaaccttgaaaaaaaagattcanccttggttccctcattctcggcccccgttttgggcaaagaaatntttttttaactaaaanccctcatttttttncaagn

SEQ ID NO: 1493 - DNA, 543 bp, Homo sapiens
  misc_feature (440)..(440): n equals a,t,g, or c
  misc_feature (475)..(475): n equals a,t,g, or c
  misc_feature (485)..(485): n equals a,t,g, or c
  misc_feature (512)..(512): n equals a,t,g, or c
  misc_feature (518)..(518): n equals a,t,g, or c
  misc_feature (528)..(528): n equals a,t,g, or c
gccggggactgggagaacaggatagcagcaggagtcggggggccgccgaagatggggaacactacctcgtgctgcgtgtcgtccagtcccaagctccggaggaatgcccactcccggctggagtcctaccggccagacacggacctgagccgcgaggacacgggctgcaacctgcagcacatcagcgaccgggagaacatagacgatttgaacatggaattcaatccttcagatcatcctcgggccagcacaatattcctcagtaaatctcagacagacgtgagagaaaaacgcaagagtctcttcattaaccatgtgtaccttgaaagacttttaacatacgcagagatagatatctgtccggccaactggaagcggattgttttaggggcgatcctgctggccttcaaggtgtgggatgaccaggctgtatggaatgnggattactggcagatcctgaagacatacggtggangacatgaacnagctagagcgacaggttcttgaattgntgcagntcaacatcanggttcttcaggggca

SEQ ID NO: 1494 - DNA, 538 bp, Homo sapiens
  misc_feature (370)..(370): n equals a,t,g, or c
  misc_feature (431)..(431): n equals a,t,g, or c
  misc_feature (436)..(436): n equals a,t,g, or c
  misc_feature (456)..(456): n equals a,t,g, or c
  misc_feature (487)..(487): n equals a,t,g, or c
  misc_feature (519)..(519): n equals a,t,g, or c
  misc_feature (532)..(532): n equals a,t,g, or c
gctgaagttaggtaattatacacaggcattttcctgggacaaacttcaagtgccaggtacttgcactcttaatactgtcttaccatccagttataactggacaaaatatacacttgagacacggaaaaggtcttagccttaaacatgatgacattgtaagcttcttacagcagtgtaattgaggcatggagataatgtcttcaaggttccccttctgtgtacatgtcttatgtaggataatattcttaacattttattcacttcaagtcaccccattttgccctgatttcttctgaagaacagaaactttggttataagaagcacttctgggttctgacagacagtgaacctgctggagtcggtggtggngaggaatggtaggtaactgggaggtaaacaaacaacaggaaccataggcaagggtagaaantgaantgggagaaagtataaaaaantatttttccacgaaataatttcacaagctgngtaacatttcttactaaaaccaaatactctancacacaaagatgnacattt

SEQ ID NO: 1495 - DNA, 135 bp, Homo sapiens
  misc_feature (123)..(125): n equals a,t,g, or c
  misc_feature (129)..(129): n equals a,t,g, or c
  misc_feature (135)..(135): n equals a,t,g, or c
gcggcacgagggggggcccggtacccaattcgccctatagtgagtcgtattacaattcactggccgtcgttttacaacgtcgtgactgggaaaacccaggactgggaaaacccaccttaagtnnntctncatttn

SEQ ID NO: 1496 - DNA, 655 bp, Homo sapiens
  misc_feature (297)..(297): n equals a,t,g, or c
  misc_feature (590)..(590): n equals a,t,g, or c
  misc_feature (595)..(595): n equals a,t,g, or c
  misc_feature (608)..(608): n equals a,t,g, or c
  misc_feature (623)..(623): n equals a,t,g, or c
  misc_feature (630)..(630): n equals a,t,g, or c
gaaagtgctgtaaaactgcttggctattcaaattgagctggaagggaaggtgggaagctggttaggatccaccgagatacttgacgcttattttcacggcttctcagtttacaaaaaacggtggtatttctggtgttctcattatgttaactttgcctttgttcccttaagtaggagactttataattatttaatcactcctttttagactagtttaattattaccaggaaaaatggtttattaaatccatctattaaataaatcagtttgggttgtacctacacacacaagttcgncaagggggcaggttttacttaacactcttccttagacagatactctccacatataaccagatagctccgtatatagataattctaagtattacttaaaattactcaataaatggttgagaatgttagacttattaagtgttcaataaatggtattaaaagatgatatcactgctactatgtttaggagaaagctgtttagtaatcaagaattctgtgtgatagactggtagaggtctatctgatatgagtagctgattcgaatggtggcactttgagaaatttttacttaccnaagancctagtttctcanaaattgataaatccnaatgatnaaagtgggaaagatagaattatgcc

SEQ ID NO: 1497 - DNA, 511 bp, Homo sapiens
  misc_feature (176)..(176): n equals a,t,g, or c
  misc_feature (241)..(241): n equals a,t,g, or c
  misc_feature (285)..(285): n equals a,t,g, or c
  misc_feature (301)..(301): n equals a,t,g, or c
  misc_feature (397)..(397): n equals a,t,g, or c
  misc_feature (457)..(457): n equals a,t,g, or c
  misc_feature (484)..(484): n equals a,t,g, or c
  misc_feature (492)..(492): n equals a,t,g, or c
  misc_feature (495)..(495): n equals a,t,g, or c
  misc_feature (506)..(506): n equals a,t,g, or c
gggatgttttaatgcatgtagtttaccaaattgaaccaaaagatacttcttgtatctggcatcgtcaagccattgcaccaaatgctatgggggatactaagaagttcaagacacagtccctgctttcagggagcatgaaatctaatactgggatgagtcttaaacatgggaaaagntaattgacaataaatgatcaaagtgacaattcaagataaaataggtgacatctttcctattttgngtatcagaaaagtctccatctttgtagacataagcagagcttangcctttctaaacttanaaaaggaatttcacattcccatgcatcttgactactcaagggtagaaagatgcatcaggtatatttaaaatgcttattggcctggaatgaatatangtacaagtgtaactgaaaccaaacctttattgacttaaatgcagtcttaatacctacccntaatacctacacctacacctttttggnctaaatcnggnaaaggggttanggaag

SEQ ID NO: 1498 - DNA, 517 bp, Homo sapiens
  misc_feature (455)..(455): n equals a,t,g, or c
  misc_feature (501)..(501): n equals a,t,g, or c
  misc_feature (504)..(504): n equals a,t,g, or c
  misc_feature (514)..(514): n equals a,t,g, or c
gctcgtgccgaattcggcacgagccagaccccaactatgtgcaagcatccacttatgtgcagagagcccacctgtactccctgcgctgtgctgcggaggagaagtgtctggccagcacagcctatgcccctgaggccaccgactacgatgtgcgggtgctactgcgcttcccccagcgcgtgaagaaccagggcacagcagacttcctccccaaccggccacggcacacctgggagtggcacagctgccaccagcattaccacagcatggacgagttcagccactacgacctactggatgcagccacaggcaagaaggtggcgagggccacaaggccagtttctgcctggaggacagcacctgtgacttcggcaacctcaagcgctatgcatgcacctctcatacccaggttgggctggagaagatggggtttggggcatgggaggataaggagnttgggaagcaaaaagcgaggcccgttaagccccggaagtgccaagnttntggcactcanctt

SEQ ID NO: 1499 - DNA, 333 bp, Homo sapiens
  misc_feature (240)..(240): n equals a,t,g, or c
  misc_feature (254)..(254): n equals a,t,g, or c
  misc_feature (278)..(278): n equals a,t,g, or c
  misc_feature (299)..(299): n equals a,t,g, or c
  misc_feature (314)..(314): n equals a,t,g, or c
ggatttatccgagatttattttcttatagcgaatgaatttccctgtttgccaaagcaagtggcttggattctggccacaagcaaggttttcatgtatccagagttacttccagtgtgttccctgaaggcaaagaatccccaggataagatcgtcttcaccaaggcttgaggacaaagtaaagtggttactctgggggatcaaacagcagaacatccaaggagaagatgtagtcctttgangagttaggggaagnagacttgataatagacacggcccnaagacaaaggaaagcaatatngatgagcagagcctntaggcgtgcttgtctacaa

SEQ ID NO: 1500 - DNA, 568 bp, Homo sapiens
  misc_feature (390)..(390): n equals a,t,g, or c
  misc_feature (489)..(489): n equals a,t,g, or c
  misc_feature (512)..(512): n equals a,t,g, or c
  misc_feature (529)..(529): n equals a,t,g, or c
  misc_feature (565)..(565): n equals a,t,g, or c
  misc_feature (568)..(568): n equals a,t,g, or c
gaaattatgacccggcttctgtgtgttatatcctggacatctcttgaagagcatagcagatagttaatatttgttctttaaaacttctttttcttcttcatatttatcagagagtcccaccgaactggctgggtatacagaaatgtccagaggccggagagcgtttcagatcacatgtaccggatggcagttatggctatggtgatcaaagatgaccgtcttaacaaagaccggaagctgagctggactttgatgctcgtgagagattctggtctatgggtgtgcacccgtttttactactgagacccatgtcaaatccttgtaggttaagtttataggtcaagaaaaattatttgaagcaaaccatacaaatttaggatgtgggtatgntgctcagtggtgaaactgcaatctggggtttctgtgcaagtgatagaacctgcctagggtatcaaggggaaacttaagtgtgatattggggccttgaangtgaagtggggtatggctaaaantctaacattggattaanacactgggggctctttcctaagggctttatggatangan

SEQ ID NO: 1501 - DNA, 691 bp, Homo sapiens
  misc_feature (506)..(506): n equals a,t,g, or c
  misc_feature (537)..(537): n equals a,t,g, or c
  misc_feature (614)..(614): n equals a,t,g, or c
  misc_feature (652)..(652): n equals a,t,g, or c
  misc_feature (658)..(658): n equals a,t,g, or c
  misc_feature (683)..(683): n equals a,t,g, or c
ggaaagctttgtttaggagcatgcccttataaattggagaaactcttcttctacccaaatactgtcaatcagtttgactggcacagttgaagtttttacctcaaagaatgggcctcattgaaatgttctatatactcatctacatggctctgaccttctgacagagaatgactgctgctaatggtactaataagagcaaatggaattcccttccaagcttggtatttgaataatatgtcaatttgttcattgccgtcttactaggaattaaatgcgctaatatttttataacctaagggagctagtgcgaggttggcagccagaaaagggaatcaggccagaggctggccaaggcatagtcatgagggggtggaagggtcacaaagtcaaagtcaagcaggtggacccaggcagaacccaaccagactctagaacaaagttaggttcaaagtttggtcttatctcctttccctataatgtggggctggtaggggtgggttgattgncatctctgtcaaaaagaattgtatggaaaantaactggctctgaaatctaactgaaataagaaagcaataaaaagcataattaaagatacttaaacattggagatacnggcaatgaaagaacaatggctctgttggactggaattncagcanggaatgatcttgttggggtaagacncagtaagg

SEQ ID NO: 1502 - DNA, 617 bp, Homo sapiens
  misc_feature (535)..(535): n equals a,t,g, or c
  misc_feature (557)..(557): n equals a,t,g, or c
  misc_feature (579)..(579): n equals a,t,g, or c
  misc_feature (581)..(581): n equals a,t,g, or c
  misc_feature (612)..(612): n equals a,t,g, or c
  misc_feature (617)..(617): n equals a,t,g, or c
gcaacaacaaacagaagaggcttggtccagtaagataagctgtaagtacttggattctggatatttttgaaggttgagccaaataagagaaatcaagataccccaaggtttttgtcctaaaactgcaaggacaaaggatgccatttccagaggagcaggtttggggaagattatcaggagttcagtttggggtagcttgcatttgggatgtctaactttggacttcagaagaacaatctaggagatgtgggcatgttgatgatatttaaagccatgagatgagattacctaggataagcatatatagacaatagacaaggtccgagaactgagccctaagacattccaatgttagatgggagagaaccaaaaagaggggacagagaaaggagaaagcagagacaaccaggagttttaaggaaggggagtgactacagtgttctgtgttttggcacataaatgagaactctgagttgaccattggtgctggcagtgtgtggaccactggtgactgataagagcagttttaatggangtggtgttggaagcctggtcanagtagactcaagagaatatganangacaaaaattgctggttagaaggaatagtancattn

SEQ ID NO: 1503 - DNA, 608 bp, Homo sapiens
  misc_feature (275)..(275): n equals a,t,g, or c
  misc_feature (321)..(321): n equals a,t,g, or c
  misc_feature (466)..(466): n equals a,t,g, or c
  misc_feature (484)..(484): n equals a,t,g, or c
  misc_feature (491)..(491): n equals a,t,g, or c
  misc_feature (523)..(523): n equals a,t,g, or c
  misc_feature (552)..(552): n equals a,t,g, or c
  misc_feature (584)..(584): n equals a,t,g, or c
  misc_feature (592)..(592): n equals a,t,g, or c
  misc_feature (604)..(604): n equals a,t,g, or c
ggaaaaatgggaagatgcacaacagatttatccagggtcaatagagttaatgcaggtgattgaagattttatacacattgttggaatggggatgatggactttcagaattcatacttaatgactggaaatgtagtggctagtattcagaagcttcctgcagcctctgttctaacagacatcaactttccaatgaaaggacggaagggaatggttgactgggcaagaaactcagaagatagggtagtaattccaaaaagcattttcacttccgggncattcaaaagaattagatgaatcatctggatttggtcttggcgcantcctatacaaaaacttagatctaattttgcccactttgagaaattatactgtcattaattccaaaatcatcgtggtcacaataaggcctgacccaaaacaaccgattcgtttctggagatagaactagctcatttggctaatggnactttgaatccctatggngtattgngggatgactccaaaacgaacgagtctttgggnaacgtggtcacccagggttgtaaaactgngcttaccgatgcttccatacaaatgcttatgngatcgctntttaccttgccntttg

SEQ ID NO: 1504 - DNA, 115 bp, Homo sapiens
  misc_feature (5)..(5): n equals a,t,g, or c
  misc_feature (94)..(94): n equals a,t,g, or c
  misc_feature (98)..(98): n equals a,t,g, or c
  misc_feature (100)..(101): n equals a,t,g, or c
  misc_feature (105)..(105): n equals a,t,g, or c
gcggnacgagatagtggcgcccagtcaggacccatgcacgggtgagaccctgccaggccaggatggaggggtgggggtcccttctacactttancttntnntatnttctttatta

SEQ ID NO: 1505 - DNA, 596 bp, Homo sapiens
  misc_feature (441)..(441): n equals a,t,g, or c
  misc_feature (477)..(477): n equals a,t,g, or c
  misc_feature (492)..(492): n equals a,t,g, or c
  misc_feature (508)..(508): n equals a,t,g, or c
  misc_feature (517)..(517): n equals a,t,g, or c
  misc_feature (537)..(537): n equals a,t,g, or c
  misc_feature (552)..(552): n equals a,t,g, or c
  misc_feature (569)..(569): n equals a,t,g, or c
ggcaaagctcagtgaaacaaggtaggcctatagaggaaagttgtaaaattttatgcaaacattcatatgtgaaaagatactctaaaagctagtagcttctgatggttgggatattttagtgaaaatcctaagtagatgcctaaatcagtgcctattagtgatttcacattgaaacatctcgagtgagaagacttggttctgaaattgttctgactaaagattaacacgttttttatttaacaaaccaacacaggattccagtggaatgacactggtgatgcttgccgccgccggagggcaggacgacctcctgcgactcctcatcacaaaaggcgcgaaagtgaacggtcggcagaagaacgggaccacccgcctcattcatgctgcagagaagaactttttaacaacagtggctattcttttggaagcaggagcttttgnaaatgtccagcaaagcaatggtgagactgcctgatnaaggctgtaaaagangaaattccgacatcgnaccactcgnaattgaaggggacttaccgnaatatttggcaaacncccgaatagggccctgnctttcgaacaagctaccatgggcttgg

SEQ ID NO: 1506 - DNA, 745 bp, Homo sapiens
  misc_feature (449)..(449): n equals a,t,g, or c
  misc_feature (528)..(528): n equals a,t,g, or c
  misc_feature (560)..(560): n equals a,t,g, or c
  misc_feature (566)..(566): n equals a,t,g, or c
  misc_feature (593)..(593): n equals a,t,g, or c
  misc_feature (646)..(646): n equals a,t,g, or c
  misc_feature (652)..(652): n equals a,t,g, or c
  misc_feature (660)..(660): n equals a,t,g, or c
  misc_feature (666)..(666): n equals a,t,g, or c
  misc_feature (681)..(681): n equals a,t,g, or c
  misc_feature (686)..(686): n equals a,t,g, or c
  misc_feature (717)..(717): n equals a,t,g, or c
  misc_feature (734)..(734): n equals a,t,g, or c
  misc_feature (740)..(740): n equals a,t,g, or c
gcgcatccatcggagggagccggggactgacagctctcagcacctgcttcctgctcctgcaccatgaaagtcctgctttgtgacctgctgctgctcagtctcttctccagtgtgttcagcagttgtcagagggactgtctcacatgccaggagaagctccacccagccctggacagcttcgacctggaggtgtgcatcctcgagtgtgaagagaaggtcttccccagccccctctggactccatgcaccaaggtcatggccaggagctcttggcagctcagccctgccgccccagagcatgtggcggctgctctctaccagccgagagcttcggagatgcagcatctgcggcgaatgccccgagtccggagcttgttccaggagcaggaagagcccgagcctggcatggaggaggctggtgagatggagcataagcagctgcagaaganatttgggggcttcaccggggcccggaagtcggccaggaagttggccaatcagaagcggttcagtgagtttatgaggcantacttggtcctgagcatgcagtcaagccaagngccggngcaccttggaccaaaaatgggcgtcangtgaatcccccaaacaagcatgtgcttcaagcccagaaccttgccggcttggnaaattnaggaattncctttnttcccccaaggcacnttganccgccttggcaaaaccccccaaggctttcgntttggccttccagaaancctttncccgg

SEQ ID NO: 1507 - DNA, 747 bp, Homo sapiens
  misc_feature (180)..(180): n equals a,t,g, or c
  misc_feature (269)..(269): n equals a,t,g, or c
  misc_feature (411)..(411): n equals a,t,g, or c
  misc_feature (418)..(418): n equals a,t,g, or c
  misc_feature (434)..(434): n equals a,t,g, or c
  misc_feature (465)..(465): n equals a,t,g, or c
  misc_feature (511)..(511): n equals a,t,g, or c
  misc_feature (520)..(520): n equals a,t,g, or c
  misc_feature (531)..(531): n equals a,t,g, or c
  misc_feature (542)..(542): n equals a,t,g, or c
  misc_feature (546)..(547): n equals a,t,g, or c
  misc_feature (574)..(574): n equals a,t,g, or c
  misc_feature (580)..(580): n equals a,t,g, or c
  misc_feature (610)..(610): n equals a,t,g, or c
  misc_feature (614)..(614): n equals a,t,g, or c
  misc_feature (641)..(641): n equals a,t,g, or c
  misc_feature (688)..(688): n equals a,t,g, or c
  misc_feature (705)..(705): n equals a,t,g, or c
  misc_feature (722)..(722): n equals a,t,g, or c
  misc_feature (727)..(727): n equals a,t,g, or c
  misc_feature (730)..(730): n equals a,t,g, or c
  misc_feature (733)..(733): n equals a,t,g, or c
  misc_feature (745)..(745): n equals a,t,g, or c
ggggatgccgtcaatggactccctgccatcatctcctggcagatgatcacttcacctctcacctctcaccatttgtaggacacccagtgcttaaagtttgtcaaccaaaaagccagcaaagaaaaagtagcacctcaaccagtgagctagcagccagagtgtgctagagagtcagagtanaaagaacacatggacagcccatagacctgccaaaggagacaggtggcaactataatagaaaaatcattagggcactcaaggagattcangtatggcatccctagagaggctgacaattgcaggttgggccagctagaacatggctcaagactccacagaatggacaggacacagcaatccctttgtcctattttcagatctttttctaaggacagttttctaaaaaagaanaggaacnaagaaatataaattanaatggaaaggaataaaaccaagtatatcagntataatactaaacattaacatatttatcttgacattaaaagccaangactattangaaactaccanacctaatggcnggtnntaaaagctgttcccccaaaataagggnctttgnaattaattttttaaaaggattgaaaaccanaccnttgggccaattaattttgaaaccaaangggaaaaaaaggaccaccaggcttgggttttttgaaaaatccctatngggatcttttaaaccgntaaaaaaaatttttcgnaaaantgnttngaaaaaatggcnaa

SEQ ID NO: 1508 - DNA, 715 bp, Homo sapiens
  misc_feature (417)..(417): n equals a,t,g, or c
  misc_feature (467)..(467): n equals a,t,g, or c
  misc_feature (529)..(529): n equals a,t,g, or c
  misc_feature (532)..(532): n equals a,t,g, or c
  misc_feature (541)..(541): n equals a,t,g, or c
  misc_feature (557)..(557): n equals a,t,g, or c
  misc_feature (592)..(593): n equals a,t,g, or c
  misc_feature (595)..(595): n equals a,t,g, or c
  misc_feature (600)..(600): n equals a,t,g, or c
  misc_feature (654)..(654): n equals a,t,g, or c
  misc_feature (658)..(658): n equals a,t,g, or c
  misc_feature (666)..(666): n equals a,t,g, or c
  misc_feature (688)..(688): n equals a,t,g, or c
ggttagatgccgatatgaacattaaaatagcagatttcggttttagcaatgaatttactgttggcggtaaactcgacacgttttgtggcagtcctccatacgcagcacctgagctcttccagggcaagaaatatgacgggccagaagtggatgtgtggagtctgggggtcattttatacacactagtcagtggctcacttccctttgatgggcaaaacctaaaggaactgagagagagagtattaagagggaaatacagaattcccttctacatgtctacagactgtgaaaaccttctcaaacgtttcctggtgctaaatccaattaaacgcgggtccgagttgtaggctgaaggctctacgggagggaggcgaggaggcccaaggtgggccgggtgtcaaccttcggcacccgaanatgggtcaagccaacccggcacccgaaaatgggtcaagccaagaagtgtnctggatcaaagtaaggggtcccattccttttggactcttccttgacatgggttggggagtanaangaccaatgnttccttaaaataaganccgagaggatctttcttaacctgacttgaataccnngngaacnttttaataattatgaaggaaaactgcaatgcaaacaaaataaaggacccaacangatnaaacttantgaaaacaaggggttcttaaanaactggtcaaatccctttctactgaaa

SEQ ID NO: 1509 - DNA, 273 bp, Homo sapiens
  misc_feature (32)..(32): n equals a,t,g, or c
  misc_feature (107)..(107): n equals a,t,g, or c
  misc_feature (127)..(127): n equals a,t,g, or c
  misc_feature (206)..(206): n equals a,t,g, or c
  misc_feature (221)..(221): n equals a,t,g, or c
  misc_feature (224)..(225): n equals a,t,g, or c
  misc_feature (270)..(270): n equals a,t,g, or c
gccctattccaggaaaaactgagaagagctgngcagcaaaaagcatccacatgttcaaatagtggattctagctaatgggagagtatgtggcttccagagggcttgngaaggtggggtgggggtcanacacctactgtagagatgctcacatttatttctttcaaatattaagtctctactcaagagggttttttggaagaaaggnttccacagcttaaanaannaattacgaatcactgtgatatgaggtgatatttaagaatctctgngat

SEQ ID NO: 1510 - DNA, 480 bp, Homo sapiens
  misc_feature (354)..(354): n equals a,t,g, or c
  misc_feature (454)..(454): n equals a,t,g, or c
gcttgcatatgcatagaacatttatgggaagatactgaaaaatgtttaacagtatgtctaagaaatagaacagaggtcttcagggaatgggtggtaaggaaaagagactgtactcttcattatatatttgttcttagtgcatgtatatttttaaccatgtaaatagtgttctttatttaaaaacagtattttaaagtttctataatgtaaatttttatttggtaaatctaacaaattacttaattccatatcatgccatctctaaaatcttttggaaattgcctcccctctgtcgtgctcattaataaaacaatattaagagtagtaaccctacttacttcagaaagtagttgnttttattaatggcatatgaaagcaatttgagaaccataaactaatatggaaatataaggcattctaaggacagagatgaaaagggaaggatataggggangataaagggaaagaggaaaagcagaa

SEQ ID NO: 1511 - DNA, 555 bp, Homo sapiens
  misc_feature (14)..(14): n equals a,t,g, or c
  misc_feature (26)..(26): n equals a,t,g, or c
  misc_feature (55)..(56): n equals a,t,g, or c
  misc_feature (128)..(128): n equals a,t,g, or c
  misc_feature (184)..(184): n equals a,t,g, or c
  misc_feature (229)..(229): n equals a,t,g, or c
  misc_feature (242)..(242): n equals a,t,g, or c
  misc_feature (293)..(293): n equals a,t,g, or c
  misc_feature (327)..(327): n equals a,t,g, or c
  misc_feature (334)..(334): n equals a,t,g, or c
  misc_feature (345)..(345): n equals a,t,g, or c
  misc_feature (370)..(370): n equals a,t,g, or c
  misc_feature (388)..(388): n equals a,t,g, or c
  misc_feature (402)..(402): n equals a,t,g, or c
  misc_feature (414)..(414): n equals a,t,g, or c
  misc_feature (471)..(471): n equals a,t,g, or c
  misc_feature (501)..(501): n equals a,t,g, or c
  misc_feature (505)..(505): n equals a,t,g, or c
  misc_feature (537)..(537): n equals a,t,g, or c
  misc_feature (544)..(544): n equals a,t,g, or c
gagtctgacaagangctctacatggnaagtcccagaactgtagatgaaaagctanngggagacaccttttctcagatgcttggatttccaactcctgaacctactcttaatactaattttgtgaattnaaaacattttggctcccctcagtcttcaaaacattaccagactgtttttttaatgngatctaattctacattaaataaacacaatgagaattataaacaanagaaattaggggngcccagttgcaataagctgaaaaacatactggataatggcagcaacattcngctcagtaaaatctgctttctcattctgaagagntcatcanaaaggagcctntatcagataccacgagccagtgcangaaagatggaccaaattntctggattcaaatntacccaaagacnctatggagattaaagaccacctccaaacctgtaaatggatcaagagaatgccctttngataaggtccggtgctagattaaaagggtntggnctggcccaaagaaaatttaggggccctccganaaccccnaaggggatggt

SEQ ID NO: 1512 - DNA, 373 bp, Homo sapiens
  misc_feature (5)..(5): n equals a,t,g, or c
  misc_feature (17)..(17): n equals a,t,g, or c
  misc_feature (20)..(20): n equals a,t,g, or c
  misc_feature (26)..(26): n equals a,t,g, or c
  misc_feature (57)..(57): n equals a,t,g, or c
  misc_feature (102)..(102): n equals a,t,g, or c
  misc_feature (272)..(272): n equals a,t,g, or c
  misc_feature (283)..(283): n equals a,t,g, or c
  misc_feature (300)..(300): n equals a,t,g, or c
  misc_feature (303)..(303): n equals a,t,g, or c
  misc_feature (325)..(325): n equals a,t,g, or c
  misc_feature (332)..(332): n equals a,t,g, or c
gaaanacaagaaagagntgntactgngaatgtggtacccgtttttgagactagagtnagctatgggagcctcagaagtgtgttcttttaaatggaaatgctntcaaatttctgatactagctgagcttgccagcattgcacaaaaaaatcattaaccattgttcaagtaaatatgtctctgccacactgaccttgaagtagattatacagaaatgctcatgggtgcagaggggcaacttgagtgattgaaccctgctttgcatctgctttgngattttcattngaggcatatttgcaganttntacctttggtgtagttgttgtngagctangatgctactacagaccactagctctgaccagggtgactgtt

SEQ ID NO: 1513 - DNA, 614 bp, Homo sapiens
  misc_feature (223)..(223): n equals a,t,g, or c
  misc_feature (232)..(232): n equals a,t,g, or c
  misc_feature (242)..(242): n equals a,t,g, or c
  misc_feature (324)..(324): n equals a,t,g, or c
  misc_feature (382)..(382): n equals a,t,g, or c
  misc_feature (389)..(389): n equals a,t,g, or c
  misc_feature (413)..(413): n equals a,t,g, or c
  misc_feature (417)..(417): n equals a,t,g, or c
  misc_feature (431)..(431): n equals a,t,g, or c
  misc_feature (460)..(460): n equals a,t,g, or c
  misc_feature (487)..(487): n equals a,t,g, or c
  misc_feature (524)..(524): n equals a,t,g, or c
  misc_feature (540)..(540): n equals a,t,g, or c
  misc_feature (547)..(547): n equals a,t,g, or c
  misc_feature (568)..(568): n equals a,t,g, or c
  misc_feature (584)..(584): n equals a,t,g, or c
gttctatttttcagggactatatttactgagaattctattgacaaaaaataatgactgaaatttcatccatgagaatccagtattctaattctcttgctaatcaccttttccaaatagatcacatttttgtcctcagtattcaagctgcaaacagaatttttgcatgtggtaaaatccatattcaggaatatcttgaaaaaaaaaaaccaccgtaaacatagngctttctgnaacaccgtanacataggctttctgttctgaaacttcaggaattttatgcaagggattagtgtgggcttattttttcttttttaaatatttancatatctgcctccctccttccctccttccttccaacaaatattaacattccattagcngtatttntcataagggagttaacctgcaggntggntatggaggaacaanggaagtaaaaaatctgatctgggatgtanatttctccatcagccgactttaagggngggcagggtctttgcagcatctttatctggcctcagnttttcagagcttaacncccttgnaaggggaacaagtttttgaanccctaaataaatcctngatttaggaaggccaaacccgggcaaaact

SEQ ID NO: 1514 - DNA, 596 bp, Homo sapiens
  misc_feature (27)..(27): n equals a,t,g, or c
  misc_feature (321)..(321): n equals a,t,g, or c
  misc_feature (540)..(540): n equals a,t,g, or c
  misc_feature (545)..(545): n equals a,t,g, or c
  misc_feature (559)..(559): n equals a,t,g, or c
  misc_feature (568)..(568): n equals a,t,g, or c
  misc_feature (574)..(574): n equals a,t,g, or c
ggcatccccaagaaatatctgtccagncacagacccagttagacctggaccagaaagcagacgtgttgaacccctgtgatcgcctaggactgtgactcacccatacctaggagtatgagatcaaagtcccaccctgctgttaaccagttgggtcaccataaacaagtctccaagcctagatttcttcatctatacaaggagaggattgaactgatggcattccacttctagttctaacactcagagccaaaaatccatggaggaagaggaacctcacaggcagaaagctggacatggggcttcaaggcattgccaaggcanagatacttacagatgccaggatcactgcaggtgagggtcccatcttcagggaccaggtgggagttgtacctctggttgggcaagcacctctgtcatctcccctgcccgctgcctctctcccatcttggtcttcaggaaaatccaaaaccaacatccgttccatctgacataaactgccacctgcaggggatatcaccaattgagacataattctgctgngtgtnccttttccggggtnctggcccanggcttnttctattccagcccaactatca

SEQ ID NO: 1515 - DNA, 581 bp, Homo sapiens
  misc_feature (570)..(570): n equals a,t,g, or c
  misc_feature (576)..(576): n equals a,t,g, or c
  misc_feature (579)..(581): n equals a,t,g, or c
ggtttttctttatagtcttactacctgtgcatcatctctaaaataaagatagtttttaaggcatcttttaatgaaatggataagctttgaaaagcaggactgtaaattataagtcatttataatgttatcttcaattccctgagacaacctttattaaaaatgcctactttcataagtgaaaataaataactttaaaataatactgatagctttcagcaggcataatagtagaagtgatgttttgtgagctccattttggatcacattttaatttttttatgcttagatactacctcctcagttgaggactaatatccatatatagtatacttttccagaatgtgttttatttctgcaatgtattcatattgtaacaaaatccataatcatggtctccaaacggtttattactaagagctcaaattagcatgttccttctacatccattttgaaatattttaatctggtaaacagcatttattaagataggttaaagtcttgtcattctttattgagaagtgacagatatctattaaatcagtgggactctttttttttttttttttttngaaaangannn

SEQ ID NO: 1516 - DNA, 558 bp, Homo sapiens
  misc_feature (5)..(5): n equals a,t,g, or c
  misc_feature (7)..(7): n equals a,t,g, or c
  misc_feature (10)..(10): n equals a,t,g, or c
  misc_feature (24)..(24): n equals a,t,g, or c
  misc_feature (27)..(27): n equals a,t,g, or c
  misc_feature (115)..(115): n equals a,t,g, or c
  misc_feature (118)..(118): n equals a,t,g, or c
  misc_feature (314)..(315): n equals a,t,g, or c
  misc_feature (444)..(444): n equals a,t,g, or c
  misc_feature (448)..(448): n equals a,t,g, or c
  misc_feature (494)..(494): n equals a,t,g, or c
  misc_feature (499)..(499): n equals a,t,g, or c
  misc_feature (527)..(527): n equals a,t,g, or c
  misc_feature (530)..(530): n equals a,t,g, or c
  misc_feature (549)..(549): n equals a,t,g, or c
agctncnccnccgggctgcaggantanactacgagggtactttctgatttgtgcacttttctgtgtatcaagagttcaataaagagttctaaagccaatcaataattttgaaatntancactgtactttaaaaaaataactttatctaggattggtgggttttatcttttaattttactttcttagaaggatgcctctggagcaggttcataattttgagagataaaatagtataaatcataacttcactgtagactcatatttttttgcattcataaaagatggaaacaggaaagtgctcttacattaggtgnncataacatctcacacacacagcaattattaaagcaggttggagacctgcttctgcttcatttgactcttttgcacagacagccatcatttgtgaagcgcgcttgagatggtaatgcgttctttcttgcnaagnaatggactagaatctagcctacatgatccaacaaaaagtactcatnaggcngttcaaagatggttgaatcttttccaangcngtattacctgaggattgtnccacttaaa

SEQ ID NO: 1517 - DNA, 452 bp, Homo sapiens
  misc_feature (8)..(9): n equals a,t,g, or c
  misc_feature (14)..(14): n equals a,t,g, or c
  misc_feature (56)..(56): n equals a,t,g, or c
  misc_feature (71)..(71): n equals a,t,g, or c
  misc_feature (115)..(115): n equals a,t,g, or c
  misc_feature (165)..(165): n equals a,t,g, or c
  misc_feature (210)..(210): n equals a,t,g, or c
  misc_feature (223)..(223): n equals a,t,g, or c
  misc_feature (273)..(273): n equals a,t,g, or c
  misc_feature (279)..(279): n equals a,t,g, or c
  misc_feature (283)..(283): n equals a,t,g, or c
  misc_feature (331)..(331): n equals a,t,g, or c
  misc_feature (361)..(361): n equals a,t,g, or c
  misc_feature (399)..(399): n equals a,t,g, or c
  misc_feature (415)..(415): n equals a,t,g, or c
  misc_feature (419)..(419): n equals a,t,g, or c
  misc_feature (436)..(436): n equals a,t,g, or c
agcccatnnctacnacgacaaagctgagctcacgcggtggcggcgtctagactagngatccccggctgcangaattcggacgagggagtccgagtgtgtgagcttgagagcccgncgctagagcgacccgcgagggatggcggccaccgggaccgcggccgccgnagtcacgggcaggctcctgcttctgctgctgtggggctcacgganctgcttgcgctgnccggtacatcgaggtcttgaagccaatgcgaacaggattgctgttgtganctcaancgantgtttgcggaagtaaatatgctgtgacattagatggaaatggaacctntccacaggaccaagactgttttaaacaaanaaaagtcttagactgtctggtttattaaagaaaaaagnagatccttttaaaganttangaattctagaatggggngaataggaatgtatgg

SEQ ID NO: 1518 - DNA, 612 bp, Homo sapiens
  misc_feature (5)..(5): n equals a,t,g, or c
  misc_feature (40)..(40): n equals a,t,g, or c
  misc_feature (209)..(209): n equals a,t,g, or c
  misc_feature (213)..(213): n equals a,t,g, or c
  misc_feature (232)..(232): n equals a,t,g, or c
  misc_feature (302)..(302): n equals a,t,g, or c
  misc_feature (374)..(374): n equals a,t,g, or c
  misc_feature (414)..(414): n equals a,t,g, or c
  misc_feature (467)..(467): n equals a,t,g, or c
  misc_feature (477)..(477): n equals a,t,g, or c
  misc_feature (479)..(479): n equals a,t,g, or c
  misc_feature (493)..(493): n equals a,t,g, or c
  misc_feature (510)..(510): n equals a,t,g, or c
  misc_feature (548)..(548): n equals a,t,g, or c
  misc_feature (574)..(574): n equals a,t,g, or c
  misc_feature (605)..(605): n equals a,t,g, or c
  misc_feature (609)..(609): n equals a,t,g, or c
  misc_feature (612)..(612): n equals a,t,g, or c
gtgantatatgctattttccaatagaaaagccagtcattngaattatttagaagttctgcatgcaaagtaacttaattacacattttaaaacaataactagttgttatattcacaagttttcctatatgttatgaggcaggtaatgggatggtgttttacagacttctatgttactggaaaacgctaaacctgggagactaacatcccntctnaggcttcaggtaggatatntacattcatatttctatgtctttagctattctggtataaatcaaacctaaagggatgaagccagagattngctttattttgtgttgcttttttacctttaatgcttccagtcaactgaatcatagatgatgggggctgctgngtaggtgatagacaggcctgcctttcccggaggggaatgngtctatagtactaataggactgagtactggggactaaagacatgacagaagancaaacatagntncttcagtccacacncacacaagggaacttanttggataataccctcaattaatcccttaaagttcaagngccaagggaaaaccccgggaaaattnccacaatttgggaaaggtttctgaggttttntttnatn

SEQ ID NO: 1519 - DNA, 768 bp, Homo sapiens
  misc_feature (447)..(447): n equals a,t,g, or c
  misc_feature (528)..(528): n equals a,t,g, or c
  misc_feature (575)..(575): n equals a,t,g, or c
  misc_feature (591)..(591): n equals a,t,g, or c
  misc_feature (617)..(617): n equals a,t,g, or c
  misc_feature (623)..(623): n equals a,t,g, or c
  misc_feature (660)..(660): n equals a,t,g, or c
  misc_feature (696)..(696): n equals a,t,g, or c
  misc_feature (715)..(715): n equals a,t,g, or c
  misc_feature (717)..(717): n equals a,t,g, or c
  misc_feature (727)..(727): n equals a,t,g, or c
  misc_feature (737)..(737): n equals a,t,g, or c
  misc_feature (739)..(739): n equals a,t,g, or c
gagagagcgagctgagtggttgtgtggtcgcgtctcggaaaccggtagcgcttgcagcatggctgaccaactgactgaagagcagattgcagaattcaaagaagctttttcactatttgacaaagatggtgatggaactataacaacaaaggaattgggaactgtaatgagatctcttgggcagaatcccacagaagcagagttacaggacatgattaatgaagtagatgctgatggtaatggcacaattgacttccctgaatttctgacaatgatggcaagaaaaatgaaagacacagacagtgaagaagaaattagagaagcattccgtgtgtttgataaggatggcaatggctatattagtgctgcagaacttcgccatgtgatgacaaaccttggagagaagttaacagattaagaagtttgatgaaatgatcagggaagcanatattgatggtgatgggtcaagtaaactatgaagagtttgtacaaatgatgacagcaaagtgaagaccttgtacagaatgnggtaaatttcttggaccaaattggttatttgccttttctttggttgnaacttatctgtaaaanggttctcctactgcaaaaaaatatcntggatngtaattaggacttcattcctcctggtttcttccttancttactggcattgcctaaaaccttattttagaaaantgatcagtacatgttgcangnggcttactcnggaatatctnancccttttcacatcttaacttaaatgaatt

SEQ ID NO: 1520 - DNA, 693 bp, Homo sapiens
  misc_feature (584)..(584): n equals a,t,g, or c
  misc_feature (624)..(624): n equals a,t,g, or c
  misc_feature (672)..(672): n equals a,t,g, or c
  misc_feature (691)..(693): n equals a,t,g, or c
gacgctctgggtgaagaatggaagggttatgtggtccgaatcagtggtgggaacgacaaacaaggtttccccatgaagcagggtgtcttgacccatggccgtgtccgcctgctactgagtaaggggcattcctgttacagaccaaggagaactggagaaagaaagagaaaatcagttcgtggttgcattgtggatgcaaatctgagcgttctcaacttggttattgtaaaaaaaggagagaaggatattcctggactgactgatactacagtgcctcgccgcctgggccccaaaagagctagcagaatccgcaaacttttcaatctctctaaagaagatgatgtccgccagtatgttgtaagaaagcccttaaataaagaaggtaagaaacctaggaccaaagcacccaagattcagcgtcttggtactccacgtgtcctgcagcacaaacggcggcgtattgctctgaagaagcagcgtaccaagaaaaataaagaagaggctgcagaatatgctaaacttttggccaagagaatgaaggaggctaaggagaagcgccaggaacaaattgcgaagagacgcanactttcctctctgcgagcttctacttctaagtctgaatcngtcagaaataagaatttttgagtaccaaataaataagaacagactctnaaaaaaaaaaaaaaaaaannn

SEQ ID NO: 1521 - DNA, 777 bp, Homo sapiens
  misc_feature (451)..(451): n equals a,t,g, or c
  misc_feature (507)..(507): n equals a,t,g, or c
  misc_feature (510)..(510): n equals a,t,g, or c
  misc_feature (539)..(539): n equals a,t,g, or c
  misc_feature (579)..(579): n equals a,t,g, or c
  misc_feature (606)..(606): n equals a,t,g, or c
  misc_feature (612)..(612): n equals a,t,g, or c
  misc_feature (625)..(625): n equals a,t,g, or c
  misc_feature (652)..(652): n equals a,t,g, or c
  misc_feature (658)..(658): n equals a,t,g, or c
  misc_feature (664)..(664): n equals a,t,g, or c
  misc_feature (703)..(703): n equals a,t,g, or c
  misc_feature (745)..(745): n equals a,t,g, or c
gctttgtgttcaccaaggaggacctcactgagatcagggacatgttgctggccaataaggtgccagctgctgcccgtgctggtgccattgccccatgtgaagtcactgtgccagcccagaacactggtctcgggcccgagaagacctcctttttccaggctttaggtatcaccactaaaatctccaggggcaccattgaaatcctgagtgatgtgcagctgatcaagactggagacaaagtgggagccagcgaagccacgctgctgaacatgctcaacatctcccccttctcctttgggctggtcatccagcaggtgttcgacaatggcaagcatctacaaccctgaagtgcttgatatcacagaggaaactctgcattctcgcttcctggagggtgtccgcaatgttgccagtgtctgtctgcagattggctacccaactgttgcatcantaccccattctatcatcaacgggtacaaacgaagtcctggccttgctgtggagacngantacacctttccacttgctgaaaaggcaanggccttcttggcttgaaccatcttcctttggggcttctgncctggggctgctggcaccacaagctgnttccgnttgctgctgcaanccccagcttaaggtgaagcccaggaanaagtcngaggantcggaccaagaaattgggaattgggctctttgactaatncccaaaaagcaacccacttaagccggtttaattgccaaacanggaaataaaggcttacttcttttaaaaaaaaa

SEQ ID NO: 1522 - DNA, 738 bp, Homo sapiens
  misc_feature (9)..(9): n equals a,t,g, or c
  misc_feature (485)..(485): n equals a,t,g, or c
  misc_feature (667)..(667): n equals a,t,g, or c
  misc_feature (696)..(696): n equals a,t,g, or c
  misc_feature (706)..(706): n equals a,t,g, or c
  misc_feature (724)..(724): n equals a,t,g, or c
  misc_feature (731)..(731): n equals a,t,g, or c
ggtgtatangcataaactagtctttgagggcacaatgatgattcaaacattgatcctactttcaacagtcttctgatccagcagggtaaatggtgataataagaaggcaattattctaagacgtggcaagggtgagagaaagatgcatacatagtagaggagaggcagtggggagtcgggagttaaggggaggttttccaaaagtgaaatcttgagttaggaatggtgagaagttatctaggtaaagcagtaggtagagaaatggaggtaggcagtgaaggtagtaatgcaaagcaagaatgaaaccagaggtaacctagaacacagtaggtactgggaagcaaccagtaatgggatgttgctaggccatcagatggacagaaggggaatggtggaatatgaagccaagagccagattatgaaggcccttatgtgacattcaagtgagattaggatttttagcccaatggctattggaagcttgntgaaattttaactaggaaagtgaaaatggctagatttttatttcatatagataatcttaaggcctgaatggaggaggaattgaagagaatatatccaaagtagagagttatagttgggccatgagtaaagcctagtagtaaagagttagaggcttgtgaagaatattatggagaaaatgcanccttgatggtaagtgaccggggtgggaanaggaaggaanggcttggttctaggtggnggctttnttgctgg

SEQ ID NO: 1523 - DNA, 579 bp, Homo sapiens
  misc_feature (71)..(71): n equals a,t,g, or c
  misc_feature (85)..(85): n equals a,t,g, or c
  misc_feature (98)..(98): n equals a,t,g, or c
  misc_feature (177)..(177): n equals a,t,g, or c
  misc_feature (230)..(230): n equals a,t,g, or c
  misc_feature (267)..(267): n equals a,t,g, or c
  misc_feature (283)..(283): n equals a,t,g, or c
  misc_feature (339)..(339): n equals a,t,g, or c
  misc_feature (353)..(353): n equals a,t,g, or c
  misc_feature (386)..(386): n equals a,t,g, or c
  misc_feature (402)..(402): n equals a,t,g, or c
  misc_feature (429)..(429): n equals a,t,g, or c
  misc_feature (454)..(454): n equals a,t,g, or c
  misc_feature (473)..(473): n equals a,t,g, or c
  misc_feature (500)..(501): n equals a,t,g, or c
  misc_feature (518)..(518): n equals a,t,g, or c
  misc_feature (541)..(541): n equals a,t,g, or c
  misc_feature (561)..(561): n equals a,t,g, or c
gtagttgggatgacaaaaaggaaactcacatttattgagcacctattatatgttgaggtcagtaatccagngagtgcaactggcngatagttggaggntgtattacattgccatggcagttgcatagatggcactgcaggttagttagtgctaattgttgcctaccgctttgagttntcttcacattcagcttctcttgtatttgggtcaactaatattattcatctttncttaacagttggttacagagagacacatttcccttantgatttgaagattaangtcgagaaaacattcaggcttcgaaatcattgtcattaaaagcgaatgcctaacanaatatgctctgtgncattttaaaattgctattacacattgatataanatctaagagaaaaaanatcagttaactttcctaaacatccaanaagacttaaccagaacccattgganccaaaggccttggcaatcntaattttaaaccatgcctgaaaatatnntttgaagggaccatganccctggggaaagaacaaaatggnccgggaaagggttgcaaaanggacaggaagttatttac

SEQ ID NO: 1524 - DNA, 151 bp, Homo sapiens
  misc_feature (48)..(48): n equals a,t,g, or c
  misc_feature (60)..(60): n equals a,t,g, or c
  misc_feature (108)..(108): n equals a,t,g, or c
  misc_feature (134)..(134): n equals a,t,g, or c
  misc_feature (142)..(142): n equals a,t,g, or c
  misc_feature (145)..(145): n equals a,t,g, or c
gatgaattctatatatataaaatatacatatatagctctatatttggngaggggcactgnctcttttttctctcatttttaaaatgaagtgttgttgcctttgtatgnggttcaaccatccagctcccacctgnctaaactntgnctccag

SEQ ID NO: 1525 - DNA, 298 bp, Homo sapiens
  misc_feature (22)..(22): n equals a,t,g, or c
  misc_feature (24)..(24): n equals a,t,g, or c
  misc_feature (34)..(34): n equals a,t,g, or c
  misc_feature (60)..(60): n equals a,t,g, or c
  misc_feature (67)..(67): n equals a,t,g, or c
  misc_feature (117)..(117): n equals a,t,g, or c
  misc_feature (139)..(139): n equals a,t,g, or c
  misc_feature (150)..(150): n equals a,t,g, or c
  misc_feature (153)..(153): n equals a,t,g, or c
  misc_feature (161)..(161): n equals a,t,g, or c
  misc_feature (172)..(172): n equals a,t,g, or c
  misc_feature (221)..(221): n equals a,t,g, or c
  misc_feature (256)..(256): n equals a,t,g, or c
gagtggaaaattgatgagatanangttctagcangagaacaactatgcaacctctcaaancttctgnaacaatacaagaccctagcgtatccattccagagtcttctgtacttgctnttggctctaaatacaatttcancttttgacagnatngactttgntaaatatcagnagcaaaccgaaattttttggccctggatcctacagatttaacatctttnttggactttactgctcttatactatctctgaactnagcatatgacaagggacagaatccacctttcacaccttcttt

SEQ ID NO: 1526 - DNA, 545 bp, Homo sapiens
  misc_feature (14)..(14): n equals a,t,g, or c
  misc_feature (21)..(21): n equals a,t,g, or c
  misc_feature (24)..(24): n equals a,t,g, or c
  misc_feature (136)..(136): n equals a,t,g, or c
  misc_feature (454)..(454): n equals a,t,g, or c
  misc_feature (497)..(497): n equals a,t,g, or c
  misc_feature (513)..(513): n equals a,t,g, or c
  misc_feature (532)..(532): n equals a,t,g, or c
  misc_feature (540)..(540): n equals a,t,g, or c
gccggctgtcttgngcgaagnganactgtgtgagaagatggcccagtttgatgctaaaaagtttgcagagacccaacctaaaaaggacacaccacggaaagagaagggttcacgggaagagaagcagaagccccangctgagcggaaggaggagaaaaaggcggctgcccctgctcctgaggaggagatggatgaatgtgagcaggcgctggctgctgagcccaaggccaaggaccccttcgctcacctgcccaagagtacctttgtgttggatgaatttaagcgcaagtactccaatgaggacacactctctgtggcactgccatatttctgggagcactttgataaggacggctggtccctgtggtactcagagtatcgcttcctgaagaactcactcagaccttcatgagctgcaatctcatcacttggaatgttcaacgactggcaactnaagaagaatgccttcgcagtgcatccttttggaccacatacanttctttctgagctggncttccaggcaagacttgcnttccctantcaat

SEQ ID NO: 1527 - DNA, 425 bp, Homo sapiens
  misc_feature (74)..(74): n equals a,t,g, or c
  misc_feature (77)..(77): n equals a,t,g, or c
  misc_feature (249)..(249): n equals a,t,g, or c
  misc_feature (300)..(300): n equals a,t,g, or c
  misc_feature (303)..(303): n equals a,t,g, or c
  misc_feature (316)..(317): n equals a,t,g, or c
  misc_feature (320)..(320): n equals a,t,g, or c
  misc_feature (337)..(337): n equals a,t,g, or c
  misc_feature (360)..(360): n equals a,t,g, or c
  misc_feature (363)..(363): n equals a,t,g, or c
  misc_feature (405)..(405): n equals a,t,g, or c
  misc_feature (414)..(414): n equals a,t,g, or c
ggcacgaggtcgcgcctaggcctttccctcaggttttcctcttccccactgcggctccccagtcggcgcttgcnggnagaactcagcgctgagattgtctaaagccccaggaaaaatggtggaaaattcaccgtcgccattgccagaaagagcgatttatggctttgttcttttcttaagctcccaatttggcttcatactttacctcgtgtgggcctttattcctgaatcttggctaaaactctttangtttaacctattggcctccaaaaatattggggcattggcattacctgtctnacntccttattgctanngtnatttgggctaacgtgcncctggtttggggattaacaaganggngtaactcttccaatcggactccatccatacaatcaccagatnaccatggcnaaaaaatcaac

SEQ ID NO: 1528 - DNA, 518 bp, Homo sapiens
  misc_feature (430)..(430): n equals a,t,g, or c
  misc_feature (442)..(442): n equals a,t,g, or c
  misc_feature (481)..(481): n equals a,t,g, or c
  misc_feature (513)..(513): n equals a,t,g, or c
  misc_feature (517)..(517): n equals a,t,g, or c
cccacgcgtccgggcatggcgatggcggagggcgagcggactgagtgtgctgagcccccccgagacgagcccccagctgatggcgctctgaagcgggcggaggagctcaagacgcaggccaacgactacttcaaagccaaggactacgagaacgccatcaagttctatagccaggccatcgagctgaaccccagcaatgccatctactacggcaaccgcagcctggcctacctgcgcaccgagtgctatggctacgcgctggctgatgccacacgggccatcgagatcgacaagaagtacattaagggctactaccgccgggcggccagcaacatggcgctgggcaagttccgggcagccctgcgggacttacgagacggtggtgaaagtgaagccccatgacaaggatgccaaaatgaattaccaggantgcaacagattntgaagcagaaagcttcgagcggggcattggccggcgatnagcacaagggtccgtggtcgattcgttggaantcgng

SEQ ID NO: 1529 - DNA, 330 bp, Homo sapiens
  misc_feature (14)..(14): n equals a,t,g, or c
  misc_feature (36)..(36): n equals a,t,g, or c
  misc_feature (44)..(44): n equals a,t,g, or c
  misc_feature (80)..(80): n equals a,t,g, or c
  misc_feature (95)..(95): n equals a,t,g, or c
  misc_feature (115)..(116): n equals a,t,g, or c
  misc_feature (125)..(125): n equals a,t,g, or c
  misc_feature (132)..(132): n equals a,t,g, or c
  misc_feature (163)..(163): n equals a,t,g, or c
  misc_feature (173)..(173): n equals a,t,g, or c
  misc_feature (177)..(177): n equals a,t,g, or c
  misc_feature (203)..(203): n equals a,t,g, or c
  misc_feature (207)..(207): n equals a,t,g, or c
  misc_feature (219)..(219): n equals a,t,g, or c
  misc_feature (243)..(243): n equals a,t,g, or c
  misc_feature (259)..(259): n equals a,t,g, or c
  misc_feature (273)..(273): n equals a,t,g, or c
  misc_feature (326)..(326): n equals a,t,g, or c
  misc_feature (329)..(329): n equals a,t,g, or c
ccccccccctctantcaatataacgcagccgccgcngggtcggnattccgggtcgaggagcgtcggcattttcgtagtgntaaattaagaatganttgttatagtgatgatttgnnagagtgtcnttaagtntgatgcctggactggcgatgttctcgtcgcngcgctgttanagtngccattggtgctagtgagaaaattgntagntgagagaagganaagggtgcgaggagggtgttacgngtattgtggaataatngatggtttaaagantgtataaatggattttattttaaataaaaggaaaatgttttatttaaaaaaanaana

SEQ ID NO: 1530 - DNA, 437 bp, Homo sapiens
  misc_feature (11)..(11): n equals a,t,g, or c
  misc_feature (59)..(59): n equals a,t,g, or c
  misc_feature (311)..(311): n equals a,t,g, or c
  misc_feature (365)..(365): n equals a,t,g, or c
  misc_feature (395)..(395): n equals a,t,g, or c
  misc_feature (424)..(424): n equals a,t,g, or c
  misc_feature (431)..(431): n equals a,t,g, or c
  misc_feature (433)..(433): n equals a,t,g, or c
tcgacccacgngtccgcattaaccaaaattatcaacaactcattcattgatctacctgntccatcaaacatctcagcatgatgaaacttcgggtccctactcggaatctgcctaattcttcaaattcttacaggcttattcttagccatacactacacatcagacacagctacagccttttcatcagtcactcatatttgccgagacgttaattatggttgaatcattcgatatatacacgcaaatggagcttccatattctttgtttgcttgttcctacatgtaggacgaggcttatattatgggatctnatatatttcctgaaacatgaaatattggtattcatcttactattcacagtaatngcaacagcattcctaggttaggatttaccngaggacaaatattcatttgggggggcacncaaattnanccat

SEQ ID NO: 1531 - DNA, 399 bp, Homo sapiens
  misc_feature (123)..(123): n equals a,t,g, or c
  misc_feature (148)..(148): n equals a,t,g, or c
  misc_feature (180)..(180): n equals a,t,g, or c
  misc_feature (205)..(205): n equals a,t,g, or c
  misc_feature (224)..(224): n equals a,t,g, or c
  misc_feature (350)..(350): n equals a,t,g, or c
  misc_feature (375)..(375): n equals a,t,g, or c
  misc_feature (377)..(377): n equals a,t,g, or c
  misc_feature (391)..(391): n equals a,t,g, or c
  misc_feature (396)..(396): n equals a,t,g, or c
tcgacccacgcgtccgcccacgcgtccgcccacgcgtccgggcaaattcaaccccatctgcaaagcgtctggctggccactacctgccaatgaagaaatgacacttgtgaagccggatggganagtgctccaccccaaagacttcaancttacgagtcatctgtcagtggccacattcancatccaccggatcctcccccctgantcaggagtctgggtctgcngtgtgaacaccgtggcttggatggtggaaaagcctttcaacatttctgttaaagttcttccagagccgctgaatgccccaaacgtgaatgacactggacttaattttgctggtcatcaacatcagnctgagccttactttggggaatggancnatccaaatcccaanaaggntct

SEQ ID NO: 1532 - DNA, 338 bp, Homo sapiens
  misc_feature (317)..(317): n equals a,t,g, or c
tcgacccacggcgtccgacaaaggtggaaagaaaaggaaaaaacagaaacaaaagctcctgttcagcacttcagtcgtccacaccaagtgacactactggcccggttaccttctccatctggtttaccttcttctgtgcttctgttttgctgctgtaatttttaagtatttgagtttgaacagattagctcttggggggagggggtttccacagcgtgagggggaaccaagaaaattttaaatacagtgtattttccagcttcccgtctttacaccaaaataaagtattgacactctcaaaaaaaaaaaaaaagggnggccgctcgcgatctagaaca

SEQ ID NO: 1533 - DNA, 329 bp, Homo sapiens
  misc_feature (90)..(90): n equals a,t,g, or c
  misc_feature (95)..(95): n equals a,t,g, or c
  misc_feature (117)..(117): n equals a,t,g, or c
  misc_feature (153)..(153): n equals a,t,g, or c
  misc_feature (159)..(159): n equals a,t,g, or c
  misc_feature (222)..(222): n equals a,t,g, or c
  misc_feature (269)..(269): n equals a,t,g, or c
  misc_feature (280)..(280): n equals a,t,g, or c
  misc_feature (296)..(296): n equals a,t,g, or c
  misc_feature (299)..(299): n equals a,t,g, or c
  misc_feature (324)..(324): n equals a,t,g, or c
gggatcgacccacgcgtccgctcgtccgttgactggagacaggcggacgctggcgcccggggttcggtggcctctagtgagatccggagnctaancaattctgtagctacaatgttntcaagacttttccgaatgcacggcctttttgtggcntcccanccctgggaagtcatagtggggacagtgcacactgtaccatctgtatgacgtccatgcaacatntttactggtaacgataagatctgtggttgggaattatgagtgtccanaatttgcagcngctgtgttaagcagtntanattataattctggacaataacacgntggca

SEQ ID NO: 1534 - DNA, 355 bp, Homo sapiens
  misc_feature (63)..(63): n equals a,t,g, or c
  misc_feature (138)..(138): n equals a,t,g, or c
  misc_feature (308)..(308): n equals a,t,g, or c
  misc_feature (311)..(311): n equals a,t,g, or c
  misc_feature (336)..(336): n equals a,t,g, or c
  misc_feature (342)..(343): n equals a,t,g, or c
gggtcgacccacgcgtccggtgacggtgggtgggtttgttttggtgggcggcttgcgcatganagtgaaacacctcagggacgatggcggagggagataatcgcagcaccaatctgctggctgcagagactgcaagtngggaagaacagctgcagggatggggagaagtgatgctgatggctgataaagtcctccgatgggaaaaagcctggtttccacctggccatcatgggtgtggtttctttggtgtttctgactatctactatctagatccatctgttctgtccggtgtttcctgttttgttangtntttgtgcttggctgactgaccttgntcccannctagctgcctag

SEQ ID NO: 1535 - DNA, 435 bp, Homo sapiens
  misc_feature (61)..(61): n equals a,t,g, or c
  misc_feature (258)..(258): n equals a,t,g, or c
  misc_feature (263)..(263): n equals a,t,g, or c
  misc_feature (268)..(268): n equals a,t,g, or c
  misc_feature (279)..(279): n equals a,t,g, or c
  misc_feature (284)..(284): n equals a,t,g, or c
  misc_feature (295)..(295): n equals a,t,g, or c
  misc_feature (351)..(351): n equals a,t,g, or c
  misc_feature (362)..(362): n equals a,t,g, or c
  misc_feature (368)..(368): n equals a,t,g, or c
  misc_feature (390)..(390): n equals a,t,g, or c
  misc_feature (419)..(419): n equals a,t,g, or c
gggtcgacccacgcgtccggtgaaggacaagcgccaacaaggcaagcggccctgggcgcangcttatcaatttccactccttgcaccactgtgaacaaagtgtgtgcctcaggcatgaaagccatcatgatggcctcgcagaatctcatgtgtggacaccaggatgtgatggtggcaggcgggatggagagcatgtccaatgttccctacgtcatgagcagaggagccacgccgtacggtggtgtcaagctggaaganttgantgtgnaaaattggctnaccgntttctaccatnaattcctattgggggactgtgctgagaatactgcgaagaagatgaacattgcacgngaggaacaggnccatangcgattaactcctacaccaggngtaaagcagcgtgggaagcagggaatttnggaatgaagttatccc

SEQ ID NO: 1536 - DNA, 581 bp, Homo sapiens
  misc_feature (27)..(27): n equals a,t,g, or c
  misc_feature (30)..(30): n equals a,t,g, or c
  misc_feature (303)..(304): n equals a,t,g, or c
  misc_feature (315)..(316): n equals a,t,g, or c
  misc_feature (322)..(322): n equals a,t,g, or c
  misc_feature (351)..(351): n equals a,t,g, or c
  misc_feature (358)..(358): n equals a,t,g, or c
  misc_feature (394)..(394): n equals a,t,g, or c
  misc_feature (399)..(399): n equals a,t,g, or c
  misc_feature (410)..(410): n equals a,t,g, or c
  misc_feature (416)..(416): n equals a,t,g, or c
  misc_feature (436)..(436): n equals a,t,g, or c
  misc_feature (440)..(440): n equals a,t,g, or c
  misc_feature (448)..(448): n equals a,t,g, or c
  misc_feature (469)..(469): n equals a,t,g, or c
  misc_feature (481)..(481): n equals a,t,g, or c
  misc_feature (496)..(496): n equals a,t,g, or c
  misc_feature (507)..(507): n equals a,t,g, or c
  misc_feature (533)..(533): n equals a,t,g, or c
  misc_feature (550)..(551): n equals a,t,g, or c
  misc_feature (553)..(553): n equals a,t,g, or c
  misc_feature (558)..(558): n equals a,t,g, or c
  misc_feature (566)..(566): n equals a,t,g, or c
tcgacccacgcgtccgggccgtagaancgnccgtgtgagggagaagtgagaggaggaattgatttggcctctgagctcccctccgcgaggattcgttttctccagaagagctggatattcttactttcttagaattatggcggataaattaacaagaattgctattgtcaaccatgacaaatgtaagcctaagaaatgtcggcaggagtgcaaaaagagttgccctgtggttcgaatgggaaaattatgcatagaggttacaccccagagcaaaatagcatgggatttctgaaaccctttgtnntggttgtggtnnttgtgnttaagaaatgccccttggcgccttatcantgtgcantttaccaaggcaactggggaaaaagaaacaaccacntcggngatgtggccanggcctncaaacttcaccaggttggcncatncccgcgtnccagagaatttttggggattngttgggaaccantgggaatgggaagtncaccggctttnaaaaattttggccgggaagccaaagncccaacctggggaagtnngntggtncccccggntgggcaggaattttg

SEQ ID NO: 1537 - DNA, 404 bp, Homo sapiens
  misc_feature (17)..(17): n equals a,t,g, or c
  misc_feature (165)..(165): n equals a,t,g, or c
  misc_feature (279)..(279): n equals a,t,g, or c
  misc_feature (283)..(283): n equals a,t,g, or c
  misc_feature (326)..(326): n equals a,t,g, or c
  misc_feature (333)..(333): n equals a,t,g, or c
  misc_feature (341)..(341): n equals a,t,g, or c
  misc_feature (347)..(347): n equals a,t,g, or c
  misc_feature (377)..(377): n equals a,t,g, or c
tcgacccacgcgtccgncggaggaaaatggcggcaggggtcgaagcggcggccgaggtggcgacgacggagaccaaaatggaggaggagagcggcgccccggcgtgcaaagcgtcaacggggctccggcccgaagtgtataggagagcgacctactcagaatganaagaggaaggagaaaaacataaaaagaggaggcaatcgctttgagccatatgccaatccaactaaaagatacagagccttcattgacaaacataccttttgatgtggaaatggncatncactttaaagacctggttaaagaaaaagttggttgaggtaacntactggnagctcttnaatggnacgctggaaggaaaattcaaggggatgtgnccttgttggaattgccaggttgggaag

SEQ ID NO: 1538 - DNA, 506 bp, Homo sapiens
  misc_feature (29)..(29): n equals a,t,g, or c
  misc_feature (32)..(32): n equals a,t,g, or c
  misc_feature (394)..(394): n equals a,t,g, or c
  misc_feature (403)..(403): n equals a,t,g, or c
  misc_feature (416)..(416): n equals a,t,g, or c
  misc_feature (441)..(441): n equals a,t,g, or c
  misc_feature (470)..(470): n equals a,t,g, or c
  misc_feature (499)..(499): n equals a,t,g, or c
  misc_feature (505)..(505): n equals a,t,g, or c
tcgacccacgcgtccggggagctggcggnggntggactgaccgtgttcctgcagctttcctctgtctttgggaaaagaagcggcgccggaggaatttgtttttctccttcaagattcgggaggatgaaagtcattacttgcgaaatagcctggcacaacaaggagccggtgtacagcctggacttccagcccggcgcggcggcagggatccacagactggcgtcggcgggcgtggacaccgcggtccaggatctggaagtggcgaaaggacccgatggaaaggccattgttgaatttttgtccaacctcactcgccataccaaagcggtccaatgtcgtgcggtttttctcccaaattgggggaaattttaagcatcaagaaggagaacgatgncggttcatncctggctgttggnaaagttggaacgaccaaccaaggancccggaaacagcttcgccttttcaggttnaaggaccaaggctcaactggaattaaggngaactng

SEQ ID NO: 1539 - DNA, 403 bp, Homo sapiens
  misc_feature (188)..(188): n equals a,t,g, or c
  misc_feature (206)..(206): n equals a,t,g, or c
  misc_feature (221)..(221): n equals a,t,g, or c
  misc_feature (260)..(260): n equals a,t,g, or c
  misc_feature (292)..(292): n equals a,t,g, or c
  misc_feature (336)..(336): n equals a,t,g, or c
  misc_feature (352)..(353): n equals a,t,g, or c
  misc_feature (381)..(381): n equals a,t,g, or c
  misc_feature (387)..(387): n equals a,t,g, or c
tcgacccacgcgtccgcaatgatgacccccttccctcctctgtggaggcgagccggcccctgccaccagggggctgctgggcccagcaacagggcttcggggccatgctgggaaggccatcgggggcttctcccaacattcttggggaccaaatatatttaatggttaagggacttgtccaggcctgnacagccagagcattgcanagggccagcggcgcnctcacacgaccttgtatctactccaggactggggtccgnggggtacgtaatctgcaccgttgggctcagtnatggtaaagatctgccatctgcatgggatgtgtttgaaaggaanaaaaaaagaggtttgnntctccccttggcctgagaataaatgatnaaattnccaagtctttaagcaa

SEQ ID NO: 1540 - DNA, 483 bp, Homo sapiens
  misc_feature (341)..(341): n equals a,t,g, or c
  misc_feature (347)..(347): n equals a,t,g, or c
  misc_feature (366)..(366): n equals a,t,g, or c
  misc_feature (371)..(371): n equals a,t,g, or c
  misc_feature (411)..(411): n equals a,t,g, or c
  misc_feature (423)..(423): n equals a,t,g, or c
  misc_feature (443)..(443): n equals a,t,g, or c
  misc_feature (459)..(459): n equals a,t,g, or c
  misc_feature (479)..(479): n equals a,t,g, or c
tcgacccacgcgtccgcccacgcgtccggcgctgtgcctcttcgacgtggacgggacgctgacggccccgcgacagaaaattaccaaagaaatggatggctttctacaaaacttgaggcagaagatcaaaattggtgtggtaggcgggtcagacttcgagaaagtgcaggagcagctgggaaaggatgtggttgagaaatacgattatgtgtttcctgaaaacggcctggttgcatacaaagatgggaaactcttgtgtaaacagagtattcaaggtcacctgggggaggccctaatccaagatctaatcaacttactgtctggagctacattggcaaganttaaantcccgaagaaaaggggtanttccnttggagtttccgaaacgggatgttggaacgtgttccccanttggggagaagntgcattcaagaagaacgccnttgattttccacgaantccgattaaaaaagaaaacntcag

SEQ ID NO: 1541 - DNA, 422 bp, Homo sapiens
  misc_feature (358)..(358): n equals a,t,g, or c
  misc_feature (373)..(373): n equals a,t,g, or c
  misc_feature (391)..(391): n equals a,t,g, or c
  misc_feature (406)..(406): n equals a,t,g, or c
  misc_feature (412)..(412): n equals a,t,g, or c
tcgacccacgcgtccggcggaaacgctgctgtccagtctgttgtggctgctgcttctggggatcctattacccgcaagtctgactggcggtgtcggcagcctgaatctagaggagctgagtgagatgcgttatgggatcgagatcctgccattgcctgtcatgggagggcagagccaagcttccgacgtggtgattgtctcctctaagtacaaacagcgctatgaatgtcgcctgccagctggagctattcacttccagcgtgaaagggaggaggaggcacctgcttaccgagggcctgggatccctgagttgttgagcccaatgaaagatgctccttgcctgctgaagaccaaggantggtggacgtatgantctgttatggacgccacnttcagcattaccacnggaagnttcagagatt

SEQ ID NO: 1542 - DNA, 448 bp, Homo sapiens
  misc_feature (376)..(376): n equals a,t,g, or c
  misc_feature (378)..(378): n equals a,t,g, or c
  misc_feature (380)..(380): n equals a,t,g, or c
  misc_feature (421)..(422): n equals a,t,g, or c
tcgacccacgcgtccgggaagtgacggccggttcgcagccaccggagcagctgcgagggtgaagcagagtggactgcctttctggagcagttactcattctcaggtgtcaccgagagctcagaaccaaggctgagctataccatttagaagaatgggaagctaatgcatctgttgacatgttttcaaaagtcctggaaaatcagttgcttcagactacgaaactagtagaagaacatttggattctgaaattcagaaactggatcagatggatgaagatgaattggaacgcctcaaagaaaagagacttgaggcactaaggaaagctcaacagcagaaacaagagtggctttccaaaaggactgggggaatacagngnantccccagtgagagagacttttttcaagagtccaagggggtnnaaaatggtttgccattctaccgagga

SEQ ID NO: 1543 - DNA, 583 bp, Homo sapiens
  misc_feature (341)..(341): n equals a,t,g, or c
  misc_feature (371)..(372): n equals a,t,g, or c
  misc_feature (374)..(374): n equals a,t,g, or c
  misc_feature (376)..(376): n equals a,t,g, or c
  misc_feature (379)..(379): n equals a,t,g, or c
  misc_feature (384)..(384): n equals a,t,g, or c
  misc_feature (388)..(388): n equals a,t,g, or c
  misc_feature (392)..(392): n equals a,t,g, or c
  misc_feature (394)..(394): n equals a,t,g, or c
  misc_feature (399)..(401): n equals a,t,g, or c
  misc_feature (415)..(415): n equals a,t,g, or c
  misc_feature (421)..(421): n equals a,t,g, or c
  misc_feature (426)..(426): n equals a,t,g, or c
  misc_feature (428)..(429): n equals a,t,g, or c
  misc_feature (447)..(447): n equals a,t,g, or c
  misc_feature (451)..(451): n equals a,t,g, or c
  misc_feature (463)..(463): n equals a,t,g, or c
  misc_feature (484)..(484): n equals a,t,g, or c
  misc_feature (487)..(487): n equals a,t,g, or c
  misc_feature (523)..(523): n equals a,t,g, or c
  misc_feature (544)..(544): n equals a,t,g, or c
gggtcgacccacgcgtccgcccacaccgagctggccccactgcgtgcgcccctcatccccatggagcactgcaccacccgcttctttgagacctgtgacctggaccatgacaagtacatcgccctggatgagtgggccggctgcttcggcatcaaggagaaggatattgacaaggatctggtgatctaaatccatgcctccttctgcagtaccggatcctccctctttgatcttccccttcctgtttcccctaatgtttaaaatgtttggatggtttgttgttctgcctggggacaaggtgctaatatagatttaaacgaatacattaacggtgctaaaangggaaatcgtaacccaagttcaggacattnntnantcntaacnggantatngnggccnnntggcttcacccatnaaggtnccccntnntgctccttaaccattggngtgnggccccgtggtnctaatgggcgtagggtggggnaanttggattggcccaagtctggactttcaacaaaatcnggcaattttcagaatttcccnccatttccccgggttggaaatagtaatcaccaagttaag

SEQ ID NO: 1544 - DNA, 472 bp, Homo sapiens
  misc_feature (426)..(426): n equals a,t,g, or c
  misc_feature (436)..(436): n equals a,t,g, or c
  misc_feature (447)..(447): n equals a,t,g, or c
  misc_feature (451)..(451): n equals a,t,g, or c
  misc_feature (469)..(469): n equals a,t,g, or c
tcgacccacgcgtccgggttttggaagcaaagttacaacacacccacttgctaaagacaaaatgatgaaaggaagtcattacagctactccgagaaccgcgtggagagggacggcctgatcctcacgagccgcgggcccggaaccagcttcgagttcgcgctcgccatcgtcgaggcgctgaacggcaaggacgtggctgaccaagtgaaggccccactcgttcttaaagattagagcagaaatctttgatcgcgaagtagggaaacgggccattggtaatcgttgtcagcgtgttcactcgaagcaaaatgggcaattcctgcgcaggcggcctggtcgctgcccctgagcggaccttccccgcctgcgcccggtccccacggtcctgaactcgatgacggagtacatggcatttagcaaactancgatagtgancttgtctctgntttnccctcggttgtgtgtttnaaa

SEQ ID NO: 1545 - DNA, 604 bp, Homo sapiens
  misc_feature (48)..(48): n equals a,t,g, or c
  misc_feature (433)..(433): n equals a,t,g, or c
  misc_feature (492)..(492): n equals a,t,g, or c
  misc_feature (508)..(508): n equals a,t,g, or c
  misc_feature (534)..(534): n equals a,t,g, or c
  misc_feature (561)..(561): n equals a,t,g, or c
  misc_feature (604)..(604): n equals a,t,g, or c
tcgacccacgcgtccgctttggcctgtaagtataacggaaaggatgangtctgtctgactttatatggcgacggtgctgctaatcagggtcagatatttgaagcttacaacatggcagctttgtggaaactgccgtgtattttcatctgtgagaacaaccgctatggaatgggaacatctgttgagagagcagcggccagcacggactactacaagagaggcgacttcatccctgggctgagggtagatggaatggacgtcttgtgtgtccgggaggcaacaaggtttgcagctgcctactgtagatctggaaaggggcccatactgatggagctacagacctaccgttaccacggacacagcatgagcgaccctggcgtcagttaccgtacccgagaagagatttcaggaagtaaagaattaagagtgaccntattcatgctgctccaaggataggatggtgaacagcatctgggccagcgttgaagattnaaaggaaatttgatgntggaagtgaagcaggaaattgaaggngctggcccagttttgccaatggcgggntcccgaaacggccttttggaaaaagcttggggctaccaccccn

SEQ ID NO: 1546 - DNA, 683 bp, Homo sapiens
  misc_feature (382)..(382): n equals a,t,g, or c
  misc_feature (391)..(392): n equals a,t,g, or c
  misc_feature (398)..(398): n equals a,t,g, or c
  misc_feature (402)..(402): n equals a,t,g, or c
  misc_feature (406)..(408): n equals a,t,g, or c
  misc_feature (412)..(412): n equals a,t,g, or c
  misc_feature (416)..(417): n equals a,t,g, or c
  misc_feature (419)..(419): n equals a,t,g, or c
  misc_feature (426)..(426): n equals a,t,g, or c
  misc_feature (431)..(434): n equals a,t,g, or c
  misc_feature (438)..(440): n equals a,t,g, or c
  misc_feature (442)..(443): n equals a,t,g, or c
  misc_feature (456)..(456): n equals a,t,g, or c
  misc_feature (473)..(473): n equals a,t,g, or c
  misc_feature (475)..(476): n equals a,t,g, or c
  misc_feature (479)..(479): n equals a,t,g, or c
  misc_feature (483)..(484): n equals a,t,g, or c
  misc_feature (492)..(492): n equals a,t,g, or c
  misc_feature (496)..(496): n equals a,t,g, or c
  misc_feature (507)..(507): n equals a,t,g, or c
  misc_feature (511)..(511): n equals a,t,g, or c
  misc_feature (517)..(517): n equals a,t,g, or c
  misc_feature (538)..(538): n equals a,t,g, or c
  misc_feature (569)..(569): n equals a,t,g, or c
  misc_feature (608)..(608): n equals a,t,g, or c
  misc_feature (611)..(611): n equals a,t,g, or c
  misc_feature (616)..(616): n equals a,t,g, or c
  misc_feature (649)..(649): n equals a,t,g, or c
  misc_feature (668)..(668): n equals a,t,g, or c
gagcttctcggccccttgtagaacctctgtcaggttcagcctactcgcctctactccagcctccactccggcctccaccatgtccgtcagggtgacccagaagtcctacaaggtgtccacctccggcccccgggccttcagcagccgctcctacaccagcgggcctggctcccgcatcagctcgtccgccttctcccgggtgggcggcagcttccgggggggcctgaacagcagcatgagtgtggtcgggggctacggcggcggggccgggggtatggggggcatcacggccgtctcagtgaaccagagcctgctgagcccccttaagctggaagtggatcccaacatccaagctgtgcgcacccaggagaaggagcagatnaagaacctnnaaaacnaaantggnnngggnaaanngnaaggggnggggnnnngggnnnannaaaaaaaagtttnggaaacaaaggggagcntnnaanggannaaaaaacngggnggagaacatanacanaaggtngagaggtacataagaaccttngggggagtgggcacctggcagaaaagtgaanctgaggggagttggaaaagagggtggggaggattagaanaantaggngagataaaaggggaactggaaagattgctatanagaggcagtatgaaggaantggccccgagtgcga

SEQ ID NO: 1547 - DNA, 400 bp, Homo sapiens
  misc_feature (17)..(17): n equals a,t,g, or c
  misc_feature (20)..(20): n equals a,t,g, or c
  misc_feature (326)..(326): n equals a,t,g, or c
  misc_feature (328)..(328): n equals a,t,g, or c
  misc_feature (349)..(349): n equals a,t,g, or c
  misc_feature (381)..(381): n equals a,t,g, or c
  misc_feature (391)..(391): n equals a,t,g, or c
tcgacccacgcgtccgngantcattcatgcacatcaggaagcggctctggtctccctttcttggtacaaagaacagtggctcgtcagatcacgctgttggagtgtgtcgggaaaggcaggtatggtgaggtgtggaggggcagctggcaaggggagaacgtcgccgtgaagatcttctcctcccgggatgagaagtcatggttcagggaaacagaattgtacaacactgtgatgctgaggcatgaaaatattttgggttttattgcttcagacatgacatcaagacactccagtacccagttgtggttaatcacacattatcatgnantgggatcgttgtatgactgancttcagctcactactctgggatactgttcaantgccgcgaanggtgtttgt

SEQ ID NO: 1548 - DNA, 469 bp, Homo sapiens
  misc_feature (367)..(367): n equals a,t,g, or c
  misc_feature (387)..(387): n equals a,t,g, or c
  misc_feature (429)..(429): n equals a,t,g, or c
  misc_feature (463)..(464): n equals a,t,g, or c
  misc_feature (466)..(466): n equals a,t,g, or c
tcgacccacgcgtccgagaaaatctcatggatgcgcaagttaaagcaatagctgatactggagcaaatgtcatcgtaacaggtggcaaagtggcagacatggctcttcattatgcaaacaagtacaatatcatgttggtgaggttgaattccaaatgggatctcagaaggctatgtaaaacagtcggtgctacagctcttcctagattgactcctcctgtccttgaagaaatgggacattgtggacagtgtttacctctcagaagttgggagacacacaggtggtggtttttaagcatgaaaaggaagatggtgccatttctaccatagtgcttcgaggctccacagacaatctgatggatggattntagaaagggcattagatganggtgtttaatacctttccaaatttccccccaagggttaaacnccttgtttcccgggaggtgggagcaaccgaaatnngnttt

SEQ ID NO: 1549 - DNA, 353 bp, Homo sapiens
  misc_feature (80)..(80): n equals a,t,g, or c
  misc_feature (252)..(252): n equals a,t,g, or c
  misc_feature (295)..(295): n equals a,t,g, or c
  misc_feature (315)..(316): n equals a,t,g, or c
  misc_feature (329)..(329): n equals a,t,g, or c
  misc_feature (346)..(346): n equals a,t,g, or c
tcgacccacgcgtccggccgcgcccgctgccgacatgctgcgccgcgctctgctctgcctggccctggccgcgctgacgncggggcgccgccgcccggaggaggaggaccacgtctggtgctcaacaagggcaacttcgaggaggcgctggcggcccacaagtacctgctggtggagttctatgccccttggtgtggccactgcaagctctggcccccgagtacgccaaactgctgggaactgaaacagaangttcggagatcagctggccaaagtcgatgccacggaagatctnatctggcccagcatatggcnncgtggctacctancatcaattcttcaaganggggaca

SEQ ID NO: 1550 - DNA, 377 bp, Homo sapiens
  misc_feature (317)..(317): n equals a,t,g, or c
  misc_feature (343)..(343): n equals a,t,g, or c
  misc_feature (363)..(363): n equals a,t,g, or c
  misc_feature (366)..(366): n equals a,t,g, or c
tcgacccacgcgtccggctcactacaaattgtgagctgattccccaaaatatattacaactcaagttgacttatcttgttacattcaaaaacctacttctgtccaaagtagtccagagagtacatatagtgctccaactgtacctacgtacaaactaaagctaccgctcattcatctgctgtccaggaaagcttaggagacattcctgcctttctacatggaaaaaaaaatagtacaagttttggaatgtaacaagataagtcaacttgagttgtaatatattttggggaatcagctcactacaaattgtgactgtnaacattgtactgtaaatgtttgtagntttcccccaataaaattttnggnaaaaaaaaaaa

SEQ ID NO: 1551 - DNA, 286 bp, Homo sapiens
  misc_feature (5)..(5): n equals a,t,g, or c
  misc_feature (22)..(22): n equals a,t,g, or c
  misc_feature (27)..(27): n equals a,t,g, or c
  misc_feature (29)..(29): n equals a,t,g, or c
  misc_feature (90)..(90): n equals a,t,g, or c
  misc_feature (95)..(95): n equals a,t,g, or c
  misc_feature (270)..(270): n equals a,t,g, or c
  misc_feature (273)..(274): n equals a,t,g, or c
  misc_feature (278)..(278): n equals a,t,g, or c
  misc_feature (285)..(285): n equals a,t,g, or c
tcganccacgcgtccgcggacntggantngaatttcaaatgtggcgctctgtgccctttttcaaaagaattctaatttcttctctctgcnctgtntcccccttttgtaggtgactttttcacagactgctacggctatcatgattttgggtcttcctagagcgtctaaaagtattgcacacaaaatcaactttttactccaatttcctccaactccaaaacccaaagtgtccgtgctgtgtccctgtgcttcactggggttctcaaccgnggnntttnaacggang

SEQ ID NO: 1552 - DNA, 591 bp, Homo sapiens
  misc_feature (202)..(202): n equals a,t,g, or c
  misc_feature (418)..(418): n equals a,t,g, or c
  misc_feature (425)..(425): n equals a,t,g, or c
  misc_feature (460)..(460): n equals a,t,g, or c
  misc_feature (502)..(502): n equals a,t,g, or c
  misc_feature (564)..(564): n equals a,t,g, or c
  misc_feature (570)..(570): n equals a,t,g, or c
  misc_feature (576)..(576): n equals a,t,g, or c
tcgacccacgcgtccgaaaagccagtgattttaagaaaaagagtggttctggaatcaatgttttccagtcccatcccagaacatcagttgtaagataagtacaattggttgtccttgatttcataagtagaacaaacactaaatgtgcctctgagatggccaccccgggcagggacctgtgccttccgccgatgctcagggntccctctggctcccgggtcactcttgtggccccagtgggtggtccctgcagtcatggcctgagtgcgcaggggccaccgcgtggctgctgctgtcctcctccgggacccacggggaccaaggtcacacgttccgtgctgtgaactgtccagatgtgcctctttggctgggggttctggtggacgtttcaagtggcatttgtacaagcaggttagantcagganttcaatatgtgcccggtctgtcaagtcccattgcnttttgaagggccccccaaaggaaggggatgagcatcaaaagntttttgaccatttcccaaaaatttttttaaaaattttttcccccgttccaatgaaagttctnattaanaaaacnggagttcaccgcaaa

SEQ ID NO: 1553 - DNA, 596 bp, Homo sapiens
  misc_feature (234)..(234): n equals a,t,g, or c
  misc_feature (237)..(237): n equals a,t,g, or c
  misc_feature (242)..(242): n equals a,t,g, or c
  misc_feature (423)..(423): n equals a,t,g, or c
  misc_feature (531)..(531): n equals a,t,g, or c
  misc_feature (534)..(534): n equals a,t,g, or c
  misc_feature (558)..(558): n equals a,t,g, or c
  misc_feature (577)..(577): n equals a,t,g, or c
  misc_feature (594)..(594): n equals a,t,g, or c
gtggctagctatccagacagagcagctaccctcagctctagctgatactacagacagtacaacagatcaagaagtatggcagtgacaactcgtttggcatggttgcacgaaaagatcctgcaaaatcattttggagggaagcggcttagccttctctataagggtagtgtccatggattccgtaatggagttttgcttgacagatgttgtaatcaagggcctactctaacagtnatntatangtgaagatcatattattggagcatatgcagaagagagttaccaggaaggaaagtatgcttccatcatcctttttgcacttcaagatactaaaatttcagaatggaaactaggactatgtacaccagaaacactgttttgttgtgatgttacaaaatataactccccaaccgaatttccatntagatggaagaaatagaaaagtgattctggacttaaagacaatggaaaatcttggacttgctcaaaattgtactatctctattcaggattatgaagtttttcgatgcncgngattcactggatgaaagaaagatnaaaggggtcatttgagctnaagaagaacttactggntg

SEQ ID NO: 1554 - DNA, 501 bp, Homo sapiens
  misc_feature (11)..(11): n equals a,t,g, or c
  misc_feature (16)..(16): n equals a,t,g, or c
  misc_feature (57)..(57): n equals a,t,g, or c
  misc_feature (243)..(243): n equals a,t,g, or c
  misc_feature (425)..(425): n equals a,t,g, or c
  misc_feature (448)..(448): n equals a,t,g, or c
  misc_feature (465)..(465): n equals a,t,g, or c
  misc_feature (476)..(476): n equals a,t,g, or c
  misc_feature (487)..(487): n equals a,t,g, or c
gtgctgcagancagantcgccaaaacagccgcctcccagacatctttgagcccagantgctggccttcgggtcagcttgagcactgcaagtggatgggggccgcctggagcggagctgcggagcatgcaggatgtggtggaggacttcaagaataagtacgaagatgaaattaaccaccgcacagctgctgagaatgagtttgtggtgctgaagaaggatgtggatgctgcctacatgagcanggtggagctggaggccaaggtggatgccctgaatgatgagatcaacttcctcaggaccctcaatgaagacggagttgacagagctgcagtcccagatctccgacacatctgtggtgctgtccatggacaacagttcgctccctggaacctggaacggcatcatcgctgaggtcaaggcgcantatgaggagaaggccaaatgcanccgggctgaggctgaancctggtaccanaccaagttganaccttcaggcccag

SEQ ID NO: 1555 - DNA, 477 bp, Homo sapiens
  misc_feature (325)..(325): n equals a,t,g, or c
  misc_feature (400)..(400): n equals a,t,g, or c
  misc_feature (452)..(453): n equals a,t,g, or c
  misc_feature (458)..(458): n equals a,t,g, or c
  misc_feature (477)..(477): n equals a,t,g, or c
gaaacttagtttgtgaattgattttgaggagtggtttttcttttcttggacgcttaattctgttctgatattaatttatcagattgcttttgtgcattggataacaccaccattcacaagttaagattcttggtatttggatatctgttagatgctactaagaaaatagagatgagctttctttttaaagcttttgatgtggtgtcatagaatagcatgttgtagatacaatcagctgctttgttaccttaaaactaggcatttgtaaatattaaaccttaagatggcaggtgatgtcctgtaaacactcagctgttcagattgnacataactgacttagttcttcccttctctctctctcaaaattataggagacttgtagtttactgtggatttctgnttctaatttgctgctgataatgtatatgaacttaacatgctgtgtaagctgnncctanttcttgaacagtttatgcn

SEQ ID NO: 1556 - DNA, 338 bp, Homo sapiens
  misc_feature (49)..(49): n equals a,t,g, or c
  misc_feature (74)..(74): n equals a,t,g, or c
  misc_feature (125)..(126): n equals a,t,g, or c
  misc_feature (212)..(212): n equals a,t,g, or c
  misc_feature (214)..(214): n equals a,t,g, or c
  misc_feature (226)..(226): n equals a,t,g, or c
  misc_feature (276)..(276): n equals a,t,g, or c
  misc_feature (281)..(281): n equals a,t,g, or c
  misc_feature (292)..(292): n equals a,t,g, or c
  misc_feature (310)..(310): n equals a,t,g, or c
  misc_feature (319)..(319): n equals a,t,g, or c
ggtcttgggacattccggaactcgtcaacatgggccagtggaagatccnagcctactatgaaaactcaccacancaggtcttctccactgagtttgaggtgaaggagtacgtgctgcccagtttnnaggtcatagtggagcctacagagaaattctactacatctataacgagaagggctggaggtcaccatcaccggcaggttcctctacngnaagaaagtgganggaactggctttgtcatcttcaggatccaagatggcgaacagaggatttncctgnctgaatccctnaagcgcattccgattgangatggctcnggggaagttgtgctgagcc

SEQ ID NO: 1557 - DNA, 482 bp, Homo sapiens
  misc_feature (2)..(3): n equals a,t,g, or c
  misc_feature (13)..(13): n equals a,t,g, or c
  misc_feature (16)..(16): n equals a,t,g, or c
  misc_feature (25)..(25): n equals a,t,g, or c
  misc_feature (475)..(476): n equals a,t,g, or c
  misc_feature (479)..(481): n equals a,t,g, or c
anncaataaaacnctnggaaacccncttggtatatacctgacactatagaaggtacgcctgcaggtaccggtccggaattcccgggtcgacccacgcgtccggaatatggccgcaaccaagatttcatgaacgtctactaccagatacgctccagccagctggaccgctccatcaaaggactgaaggagcatttccataagagcagttcttcctctggggttccctactcccctgctatccccaacaagaggaaagacacacctaccaagaagccagtcaagcggccagggagagatgacatgctggacgtggagaccgatgcctacatccactgcgtcagtgccttcgtcaagctggcgcagagcgagtaccagctgctggccgacatcatccccgagcaccaccagaagaagaccttcgactccctgatacaggatgccctggaagggctgatgcttgaaagggaaaacaatnnggnnng

SEQ ID NO: 1558 - DNA, 256 bp, Homo sapiens
  misc_feature (69)..(69): n equals a,t,g, or c
  misc_feature (94)..(94): n equals a,t,g, or c
  misc_feature (125)..(125): n equals a,t,g, or c
  misc_feature (128)..(128): n equals a,t,g, or c
  misc_feature (144)..(144): n equals a,t,g, or c
  misc_feature (189)..(189): n equals a,t,g, or c
  misc_feature (219)..(219): n equals a,t,g, or c
  misc_feature (233)..(233): n equals a,t,g, or c
  misc_feature (238)..(238): n equals a,t,g, or c
  misc_feature (244)..(244): n equals a,t,g, or c
tacgcctgcaggtaccggtccggaattcccgggcccgctgcctcctccggtcgtcgtgcggaagctgcnacgcaggcagaccatggcagagttntcccagaaacgggggaagcggcgtagcgacnaanggctgggcagcatggnggacttcctcctggccaatgcccgcctggtgctgggcgtgggctnagctgcttgtgctgggcattgcaaactggnccgtgaaacggttnattgncagggncactagccccag

SEQ ID NO: 1559 - DNA, 508 bp, Homo sapiens
  misc_feature (252)..(252): n equals a,t,g, or c
  misc_feature (321)..(321): n equals a,t,g, or c
  misc_feature (385)..(385): n equals a,t,g, or c
  misc_feature (442)..(442): n equals a,t,g, or c
  misc_feature (462)..(462): n equals a,t,g, or c
  misc_feature (464)..(464): n equals a,t,g, or c
  misc_feature (473)..(473): n equals a,t,g, or c
  misc_feature (506)..(506): n equals a,t,g, or c
gcctgaggcctcatagaaagaacaatagaagaccacgaactggtgattgaagtgctatccaactgggggatagaagaagaaaacaaactatactttagaaaaaattatgccaaatatgagttctttaaaaacccaatgtatttttttccagagcatatggtatcttttgcaactgaaaccaatggtgaaatatcccccacacagattttgcagatgtttctgagttcaagcacatatcctgaaattcatggnttcttacatgcgaaagaacagggaaagaagtcttggaaaaaaatttacttttttctaagaagatctggnttatatttttctactaaaggaacatcaaaggaaccgcggcatttgcagtttttcagcgaatttngcaatagtgatatttatgtgtcacttggcaggcaaaaaaaacatggagcaccgactnactatggattctgctttaangngttaccttnaagatatgccttaccgataaacaatgggcctgngg

SEQ ID NO: 1560 - DNA, 485 bp, Homo sapiens
  misc_feature (22)..(22): n equals a,t,g, or c
  misc_feature (182)..(182): n equals a,t,g, or c
  misc_feature (307)..(307): n equals a,t,g, or c
  misc_feature (386)..(386): n equals a,t,g, or c
  misc_feature (393)..(393): n equals a,t,g, or c
  misc_feature (398)..(398): n equals a,t,g, or c
  misc_feature (414)..(414): n equals a,t,g, or c
  misc_feature (457)..(457): n equals a,t,g, or c
  misc_feature (476)..(476): n equals a,t,g, or c
  misc_feature (478)..(478): n equals a,t,g, or c
  misc_feature (485)..(485): n equals a,t,g, or c
gggtcgacccacgcgtccgggnatgtgtgtgggtgtggatgtttatgaagtcagacttagtcttgtttataaacatccacacccacacacatgctgaatggagagcaaaatgcaagactaagtctgacttcataagggctttctaaaaccatttctgtccaagagaaaatgactttttgctntgatattaaaaattcaatgagtaaaacaaaagctagtcaaatgtgttagcagcatgcagaacaaaaactttaaactttctctctcactatacagtatattgtcatgtggaaagtgtggaatgggnagaaatgtcgatcctgttggtaactgatgtggaacactttttatgagcttttaaaataaagtttcatcctatggggaanaaaaagnaaaanaggggccggccgcccncagaggattcccccgaggggggccccaagccttacgcgtggcntgcgacgtccaaaggctcncntccccan

SEQ ID NO: 1561 - DNA, 486 bp, Homo sapiens
tcgacccacgcgtccggcggggcagccttgcgcgaagggcgttttcgtggagccacctgccgcgccacgctccagtcccgtcacttgtgctcgcgagcgccggtgcgcgcaggtgcgggcggggttgtggggacgccgggagggcggcgcggtactttccagaaggttccgcaccggaagcgcctgccgaggccggagctgggtgcaggggcggagacgcggagaacttgggatcctggtttaagggagctgggaagctgccgcagtttgtttaaacgatatttttttggtggcggaacacgaataaagttttccgtcggcgcattcctgcgtgtgctgttcaagcggcctgaagtgcgttcaagttcggccgggctgtccctcctcctggtcccgacccctcaaaacccgggccgaacaacgccctctcctgcgggacagtctttctatggccggcgcgtttcgcctagcaaggtcctcagaagg

SEQ ID NO: 1562 - DNA, 324 bp, Homo sapiens
  misc_feature (258)..(258): n equals a,t,g, or c
  misc_feature (268)..(268): n equals a,t,g, or c
  misc_feature (275)..(275): n equals a,t,g, or c
  misc_feature (280)..(280): n equals a,t,g, or c
  misc_feature (317)..(317): n equals a,t,g, or c
tcgacccacgcgtccgcccacgcgtccgggaccctgaaccatcaatatgactacacatttgattggacaatgttaaagcagaaagcagcacagcaggcagcctcttccagtgggcagggtcagcaggcccaaacccccacaggcaagcaaactgacaaaaccaagagtaacatgaaaggtttctaagcatgaatggagaaacaaatgctgctccgatcatcggctccagctttggctctggcgcggggcttgtgaggnccccataggncgagacncagancagctgcatagccgatggtggttctttgtatgaatantcattgt

SEQ ID NO: 1563 - DNA, 552 bp, Homo sapiens
  misc_feature (252)..(252): n equals a,t,g, or c
  misc_feature (275)..(275): n equals a,t,g, or c
  misc_feature (320)..(320): n equals a,t,g, or c
  misc_feature (404)..(404): n equals a,t,g, or c
  misc_feature (413)..(413): n equals a,t,g, or c
  misc_feature (483)..(483): n equals a,t,g, or c
  misc_feature (501)..(501): n equals a,t,g, or c
  misc_feature (512)..(512): n equals a,t,g, or c
  misc_feature (527)..(527): n equals a,t,g, or c
  misc_feature (542)..(542): n equals a,t,g, or c
gctgtagccttaccctgctcttcttcctcctactggctgctcaggtgctcctggtggaggggaaaaaaaaagtgaagaatggacttcacagcaaagtggtctcagaacaaaaggacactctgggcaacacccagattaagcagaaaagcaggcccgggaacaaaggcaagtttgtcaccaaagaccaagccaactgcagatgggctgctactgagcaggaggagggcatctctctcaaggttgagtgcactnaattggaccatgaatttttctgngtctttgctggcaatccaacctcatgcctaaagctcaaggatganagagtctattggaaacaagttgcccggaatctgcgctcacagaaagacatttgtagatattccaagacagcttgtgaaaaccanaatgtgcangaaaggatttttcagaatccagtcttaagctagtcagctccactctatttgggaacacaaagcccatganggagaaaacagagatgtnccccaaggagnacattaagggcaaanagaccacccttttanctaacatgac

SEQ ID NO: 1564 - DNA, 531 bp, Homo sapiens
  misc_feature (354)..(354): n equals a,t,g, or c
  misc_feature (368)..(368): n equals a,t,g, or c
  misc_feature (373)..(374): n equals a,t,g, or c
  misc_feature (380)..(380): n equals a,t,g, or c
  misc_feature (382)..(382): n equals a,t,g, or c
  misc_feature (389)..(389): n equals a,t,g, or c
  misc_feature (396)..(396): n equals a,t,g, or c
  misc_feature (398)..(398): n equals a,t,g, or c
  misc_feature (408)..(409): n equals a,t,g, or c
  misc_feature (415)..(415): n equals a,t,g, or c
  misc_feature (423)..(423): n equals a,t,g, or c
  misc_feature (442)..(442): n equals a,t,g, or c
  misc_feature (460)..(460): n equals a,t,g, or c
  misc_feature (478)..(478): n equals a,t,g, or c
  misc_feature (528)..(529): n equals a,t,g, or c
gccagaacacaggtgtcgtgaaaactacccctaaaagccaaaatgggaaaggaaaagactcatatcaacattgtcgtcattggacacgtagattcgggcaagtccaccactactggccatctgatctataaatgcggtggcatcgacaaaagaaccattgaaaaatttgagaaggaggctgctgagatgggaaagggctccttcaagtatgcctgggtcttggataaactgaaagctgagcgtgaacgtggtatcaccattgatatctccttgtggaaatttgagaccagcaagtactatgtgactatcattgatgccccaggacacagagactttatcaaaaacatgattacngggacatttaagcntactnngctggncntgaatgnttgttgntngttgttgggnnaatttnaacttggnatttccaaaaatggggcanaccctaaacattcccttntggttaccactgggtgtnaaacaactaattgcggtgttaacaaatggtttccctgaccacctacagcnnaa

SEQ ID NO: 1565 - DNA, 589 bp, Homo sapiens
  misc_feature (287)..(287): n equals a,t,g, or c
  misc_feature (331)..(331): n equals a,t,g, or c
  misc_feature (373)..(373): n equals a,t,g, or c
  misc_feature (429)..(429): n equals a,t,g, or c
  misc_feature (433)..(433): n equals a,t,g, or c
  misc_feature (449)..(449): n equals a,t,g, or c
  misc_feature (472)..(472): n equals a,t,g, or c
  misc_feature (535)..(535): n equals a,t,g, or c
  misc_feature (550)..(550): n equals a,t,g, or c
  misc_feature (573)..(573): n equals a,t,g, or c
  misc_feature (578)..(578): n equals a,t,g, or c
  misc_feature (588)..(588): n equals a,t,g, or c
ggccaaaatgggaaaggaaaagactcatatcaacattgtcgtcattggacacgtagattcgggcaagtccaccactactggccatctgatctataaatgcggtggcatcgacaaaagaaccattgaaaaatttgagaaggaggctgctgagatgggaaagggctccttcaagtatgcctgggtcttggataaactgaaagctgagcgtgaacgtggtatcaccattgatatctcctagtggaaatttgagaccagcaagtactatgtgactatcattgatgccccangacacagagactttatcaaaaacatgattacagggacatctcangctgactgtaacaaaatggattccactgaccccctacagccnagaagagatatgaagaaattgttaaaggaagtcagccttacattaagaaaattggnttcnacccccgacacagtancatttgtgcccaatttctgggtnggaatggggacaacattgcttggagcccaagtgctaacatgcccttggtttaaaggggatggnaaagtcacccgtaanggatgggaatggccagtgggaanccccnctgctttgang

SEQ ID NO: 1566 - DNA, 532 bp, Homo sapiens
  misc_feature (345)..(345): n equals a,t,g, or c
  misc_feature (355)..(355): n equals a,t,g, or c
  misc_feature (363)..(363): n equals a,t,g, or c
  misc_feature (449)..(449): n equals a,t,g, or c
  misc_feature (478)..(478): n equals a,t,g, or c
  misc_feature (490)..(490): n equals a,t,g, or c
  misc_feature (496)..(496): n equals a,t,g, or c
  misc_feature (521)..(521): n equals a,t,g, or c
gcaacattttgaccaaccgcagcaatgcacagagacaggatattgccttcgcctaccagagaaggaccaaaaaggaacttgcatcagcactgaagtcagccttatctggccacctggagacggtgattttgggcctattgaagacacctgctcagtatgacgcttctgagctaaaagcttccatgaaggggctgggaaccgacgaggactctctcattgagatcatctgctccagaaccaaccaggagctgcaggaaattaacagaagtctacaaggaaatgtcaagactgatctggagaaggacattatttcggacacatctggtgactccgcaagctgatggntgccctggcnaagggtanaagagcagaggatggctctgtcattgattatgaactgattgaccaagatgctcgggatctctatgaccctggagtgaaaaagaaangaactgatgttccccagtgggatcaacanttattacccganccgggngcggggcccaccctccagaaaaggnttttgattggg

SEQ ID NO: 1567 - DNA, 571 bp, Homo sapiens
  misc_feature (368)..(368): n equals a,t,g, or c
  misc_feature (445)..(445): n equals a,t,g, or c
  misc_feature (469)..(469): n equals a,t,g, or c
  misc_feature (526)..(526): n equals a,t,g, or c
  misc_feature (543)..(543): n equals a,t,g, or c
  misc_feature (560)..(560): n equals a,t,g, or c
  misc_feature (565)..(565): n equals a,t,g, or c
  misc_feature (569)..(569): n equals a,t,g, or c
gccgggacttcgagaagaactataacatgtacatcttccctgtacactggcagttcggccagctggaccagcaccccattgacgggtacctctcccacaccgagctggctccactgcgtgctcccctcatccccatggagcattgcaccacccgctttttcgagacctgtgacctggacaatgacaagtacatcgccctggatgagtgggccggctgcttcggcatcaagcagaaggatatcgacaaggatcttgtgatctaaatccactccttccacagtaccggattctgtctttaaccctccccttcgtgtttccccaatgtttaaaatgtttggatggtttgttgttctgcctggagacaaggngctaacatagatttaagtgaatacattaacggggctaaaaaatgaaaattctaacccaagaacatgacatttcttanctgtaaactttaactattaaaggnctttttccacaccgccatttaataagtccccattttttctttttggccattttggangcttttggcccatttgntcttaattgggcacatnggggngggnca

SEQ ID NO: 1568 - DNA, 154 bp, Homo sapiens
  misc_feature (15)..(15): n equals a,t,g, or c
  misc_feature (41)..(41): n equals a,t,g, or c
  misc_feature (48)..(48): n equals a,t,g, or c
  misc_feature (59)..(59): n equals a,t,g, or c
  misc_feature (89)..(89): n equals a,t,g, or c
  misc_feature (119)..(119): n equals a,t,g, or c
  misc_feature (142)..(143): n equals a,t,g, or c
gatcggcctctgcgngcagctgtgatgtaccctcgcccttnaaccatngaccaggcagncacctggacagccaccggaggatggcgccnactcccatccccacgcggagcccgtctgantccagcaccgcctccacccctgnngctgagcaaat

SEQ ID NO: 1569 - DNA, 264 bp, Homo sapiens
  misc_feature (42)..(42): n equals a,t,g, or c
  misc_feature (64)..(64): n equals a,t,g, or c
  misc_feature (159)..(159): n equals a,t,g, or c
  misc_feature (172)..(172): n equals a,t,g, or c
  misc_feature (205)..(205): n equals a,t,g, or c
  misc_feature (246)..(246): n equals a,t,g, or c
  misc_feature (257)..(257): n equals a,t,g, or c
  misc_feature (259)..(259): n equals a,t,g, or c
gcccacttagatgtacatagccacttcaaaatgggccctctncccaaatctaagaagcttgttntcagtaattgatcacatttagttcttttaagtcaagaacctgagtgattctgtacacttctttttacatctaatgaacttaagttctgctgattnctaccatttaagnatttttcccccttagtccttaacgactaggttncctgcctccagaataagctgaagtcctccaagatgtactgnggttatctctngnaaact

SEQ ID NO: 1570 - DNA, 492 bp, Homo sapiens
  misc_feature (172)..(172): n equals a,t,g, or c
  misc_feature (225)..(225): n equals a,t,g, or c
  misc_feature (323)..(323): n equals a,t,g, or c
  misc_feature (385)..(385): n equals a,t,g, or c
  misc_feature (391)..(391): n equals a,t,g, or c
  misc_feature (435)..(435): n equals a,t,g, or c
  misc_feature (450)..(450): n equals a,t,g, or c
  misc_feature (452)..(452): n equals a,t,g, or c
  misc_feature (457)..(457): n equals a,t,g, or c
  misc_feature (483)..(483): n equals a,t,g, or c
gcaagcccagactttcgtcacagggacagaccaacgtgttaacacaaagggagaacacgggagcatcctgcaccgtgcatttcagccacagatcacatggcccctccgcgggcccagcccacgccctgaccgcccggcctggccaggtctccgtatctctctgccccgccgncccttcccaactgcggacatgctgggtggatccggatcgcatggaagacgcancctggccgcgctctcccaaatcgcctaccagaggaatgacgatgatgaagaggaggcagcccgggaacggcgccgtcgagcccgacaggaacggctgnggcagaagcaggaggaagaatccttgggacaggtgaccgaccaggtggaggtgaatgcccanaacagntgtgcctgacgaggaggccaagacaaccaccacaaacactcaantggaaggggatgatnangccgnattcctggagcgcctggctcggcgtnaggaaagac

SEQ ID NO: 1571 - DNA, 530 bp, Homo sapiens
  misc_feature (389)..(389): n equals a,t,g, or c
  misc_feature (443)..(443): n equals a,t,g, or c
  misc_feature (456)..(456): n equals a,t,g, or c
  misc_feature (469)..(469): n equals a,t,g, or c
  misc_feature (488)..(488): n equals a,t,g, or c
  misc_feature (525)..(525): n equals a,t,g, or c
gcggacgcgtgggcacggagagtgttctgcagggtctgctcaagcccttgttcaagagcaccagtgttggccctctgtattctggctgcagactgaccttgctcaggcctgagaaggacggagtagccaccagagtggacgccatctgcacccaccgccctgatcccaaaatccctgggctagacagacagcagctatactgggagctgagccagctgacccacagcatcactgagctgggaccctacaccctggatagggacagtctctatgtcaatggtttcacccagcggagctctgtgcccaccaccagcactcctgggactttcacagtacagccggaaacctctgagactccatcatccctccctggccccacagccactggncctgtcctgctgccattcaccctcaattttaccatcactaacctgcagtatgangaggacatgcatngccctggctccangaagttcaacaccacgganagggtcctttaagggtctgcttatgcccttgttcaanaacac

SEQ ID NO: 1572 - DNA, 493 bp, Homo sapiens
  misc_feature (287)..(287): n equals a,t,g, or c
  misc_feature (415)..(415): n equals a,t,g, or c
  misc_feature (463)..(463): n equals a,t,g, or c
  misc_feature (475)..(475): n equals a,t,g, or c
  misc_feature (477)..(477): n equals a,t,g, or c
  misc_feature (479)..(479): n equals a,t,g, or c
gcccctgccaggcccagcattcaccacagcgcctgcttcctcggccctgaaatcatgcccctaggtctcctgtggctgggcctagccctgttgggggctctgcatgcccaggcccaggactccacctcagacctgatcccagccccacctctgagcaaggtccctctgcagcagaacttccaggacaaccaagtgagggccgacatctcctgggggtgtgagagtcagactgacgtcacaggcaagggatggccaaagctgagggatcctgtcgttcacctcgctgntctgcccggaattcatctgtgttcatccttcctctgttccttagagcaacgtttatagcacatttccatgcagacacacagacagtggtggggatggacatgcacagtcgttagaaaacaagacgganagaggaggggtgcctgggagcgggaggaggggacactggatccagccntggaaccccaancngngccttaatggaagg

SEQ ID NO: 1573 - DNA, 386 bp, Homo sapiens
  misc_feature (27)..(27): n equals a,t,g, or c
  misc_feature (195)..(195): n equals a,t,g, or c
  misc_feature (243)..(243): n equals a,t,g, or c
  misc_feature (248)..(248): n equals a,t,g, or c
  misc_feature (295)..(295): n equals a,t,g, or c
  misc_feature (322)..(322): n equals a,t,g, or c
  misc_feature (366)..(367): n equals a,t,g, or c
  misc_feature (377)..(377): n equals a,t,g, or c
gggaaggttcacagggcactcaggctntccacaagattgtagatttctaccctgaggacaacaactcgcttcaggctcacactttccccataccagctgctgaagtggaccggctgaaggtgacgtttgaggatgccactgacttttttggccgtgtggtcatctaccacctgcgggtgcttggggagaaggtgngagacctctaggggctgtctcctccaggaagccctacgggaagcacancaaantccctcattctgcacagaaggtttattggttcctcttgggaagggtnccctcccaccacctgtccaaaagctgnctttgaagtcagatctgggtttccccagctctggctgaccattnngttccctgantgtctgaat

SEQ ID NO: 1574 - DNA, 324 bp, Homo sapiens
  misc_feature (43)..(43): n equals a,t,g, or c
  misc_feature (209)..(209): n equals a,t,g, or c
  misc_feature (257)..(258): n equals a,t,g, or c
  misc_feature (279)..(279): n equals a,t,g, or c
  misc_feature (294)..(294): n equals a,t,g, or c
  misc_feature (306)..(306): n equals a,t,g, or c
gggagacttctcggtgtgcaggaactgtaaaagacatgtagtntctgccaacttcaccctccatgaggcttactgcctgcggttcctggtcctgtgtccggagtgtgaggagcctgtccccaaggaaaccatggaggagcactgcaagcttgagcaccagcaggcttatggatctggcataggcaagaggttctggtttcaagaaaaantggctgttctcttgagatctgtaaagagaggatgtgaaaaaggaaggnnctggaaggcagtcagatggancctgtttccgctttncatgtcattctnctggggccctgatctgct

SEQ ID NO: 1575 - DNA, 469 bp, Homo sapiens
  misc_feature (279)..(279): n equals a,t,g, or c
  misc_feature (283)..(283): n equals a,t,g, or c
  misc_feature (364)..(364): n equals a,t,g, or c
  misc_feature (391)..(391): n equals a,t,g, or c
  misc_feature (450)..(450): n equals a,t,g, or c
  misc_feature (455)..(457): n equals a,t,g, or c
gggcgtgaccaggcctgagctccctgtctctcctcagtgacatcgtctttaaaccctgcgtggcaatccctgacgcaccgccgtgatgcccagggaagacagggcgacctggaagtccaactacttccttaagatcatccaactattggatgattatccgaaatgtttcattgtgggagcagacaatgtgggctccaagcagatgcagcagatccgcatgtcccttccgggaaggctgtggtgctgatgggcaagaacaccatgatgcgcaaggccatncganggcacctggaaaacaacccaactctggaaaaaactggtggcttatatccgggggaatgtgggctttgtgttcaccaaggangaacctacttgaaatcaaggacatggntgcttgggcaaataaggggccaactggttgcccgtgcttggtgccattggccccattgngaaannnactggggcccag

SEQ ID NO: 1576 - DNA, 301 bp, Homo sapiens
  misc_feature (23)..(23): n equals a,t,g, or c
  misc_feature (73)..(73): n equals a,t,g, or c
  misc_feature (118)..(118): n equals a,t,g, or c
  misc_feature (140)..(140): n equals a,t,g, or c
  misc_feature (212)..(212): n equals a,t,g, or c
  misc_feature (262)..(262): n equals a,t,g, or c
  misc_feature (271)..(271): n equals a,t,g, or c
  misc_feature (275)..(275): n equals a,t,g, or c
  misc_feature (278)..(278): n equals a,t,g, or c
ggcacggggagaccctgcgccgnaccaaggaggagatcaacgagctgaaccgcatgatccagaggctgacggncgaggtggagaatgccaagtgccagaactccaagctggaggccgnggtggcccagtctgagcagcanggtgaggcggccctcagtgatgcccgctgcaagctggccgagctggagggcgccctgcataaggccaagcangacatggcctgcctgatcagggagtaccatgaggtgatgaactccaagcntggcctggncatnganatcgccactacaggcccctgctt

SEQ ID NO: 1577 - DNA, 337 bp, Homo sapiens
  misc_feature (7)..(7): n equals a,t,g, or c
  misc_feature (24)..(24): n equals a,t,g, or c
  misc_feature (29)..(29): n equals a,t,g, or c
  misc_feature (44)..(44): n equals a,t,g, or c
  misc_feature (49)..(49): n equals a,t,g, or c
  misc_feature (207)..(207): n equals a,t,g, or c
  misc_feature (262)..(262): n equals a,t,g, or c
  misc_feature (268)..(268): n equals a,t,g, or c
  misc_feature (309)..(309): n equals a,t,g, or c
  misc_feature (325)..(325): n equals a,t,g, or c
  misc_feature (331)..(331): n equals a,t,g, or c
agagagnagggaccagattggaancccangtgaactcctttggnattcntgacactatagaaggtacgcctgcaggtaccggtccggaattcccgggtcgacccacgcgtccggtcgcggctcgagagcgagagtcacgtcccggcgctagcccagcccgacccagaatgaaaaaggcaggcattgacctccctctgaggcagtttncaggcccaccgtggtgcacgcaaaccacttcctggccatgcgctccctcctgctnctcagngccttctgcctcctggaggcggccctggccgcgaggtgaanaaacctgcagccgcancagctnctggca

SEQ ID NO: 1578 - DNA, 494 bp, Homo sapiens
  misc_feature (2)..(2): n equals a,t,g, or c
  misc_feature (10)..(10): n equals a,t,g, or c
  misc_feature (14)..(15): n equals a,t,g, or c
  misc_feature (86)..(86): n equals a,t,g, or c
  misc_feature (329)..(329): n equals a,t,g, or c
  misc_feature (357)..(357): n equals a,t,g, or c
  misc_feature (398)..(398): n equals a,t,g, or c
  misc_feature (410)..(410): n equals a,t,g, or c
  misc_feature (430)..(430): n equals a,t,g, or c
  misc_feature (432)..(432): n equals a,t,g, or c
  misc_feature (476)..(476): n equals a,t,g, or c
cnctttgccngtgnnctatagaaggtacgcctgcaggtaccggtccggaattcccgggtcgacccacgcgtccgagagattatccnagaaaaagaccaagctgactttcggggtgtacgcggcgatttcaactctcgaatgggaggaggcagtatagaggtatctgtgcctaggtttgctgtggggattgtaataggaagaaacggggaaatgatcaaaaagatccagaatgatgctggtgtgaggattcagtttaaaccagatgatgggattagtccagaaagagctgcccaggtcatgggccctccggatcggtgtcagcatgcagngcatatcatcagcgagctgattcttacngcccaggaaagagacggctttggaggcctggcagcagccanaggaagaggtcnttggcccgtggcgactggancntgggagcccctggtggcgtccaggagatacatacacggtgccanccgattagtgtggcctcg

SEQ ID NO: 1579 - DNA, 578 bp, Homo sapiens
  misc_feature (1)..(2): n equals a,t,g, or c
  misc_feature (5)..(5): n equals a,t,g, or c
  misc_feature (15)..(15): n equals a,t,g, or c
  misc_feature (33)..(33): n equals a,t,g, or c
  misc_feature (526)..(526): n equals a,t,g, or c
  misc_feature (547)..(547): n equals a,t,g, or c
  misc_feature (553)..(554): n equals a,t,g, or c
  misc_feature (563)..(563): n equals a,t,g, or c
nnccncctttgattncattcccctttggctttnccgtgacactatagaaggtacgcctgcaggtaccggtccggaattcccgggtcgacccacgcgtccggcgggccaatatcacagccatccgcagagtccggaagacagacaataatcgcattgctagagcctgtggggcccggatagtcagccgaccagaggaactgagagaagatgatgttggaacaggagcaggcctgttggaaatcaagaaaattggagatgaatactttactttcatcactgactgcaaagaccccaaggcctgcaccattctcctccggggggctagcaaagagattctctcggaagtagaacgcaacctccaggatgccatgcaagtgtgtcgcaatgttctcctggaccctcagctggtgccagggggtggggccttcgagatggctgtggcccatgccttgacagaaaaatcaatgccatgactggtgtggaacaatgggcatacaagggctgttgccccaggccctaaaaggtnattccttgtaccctgatccanaacttnnggggccagnaccattcgtctactt

SEQ ID NO: 1580 - DNA, 453 bp, Homo sapiens
  misc_feature (298)..(298): n equals a,t,g, or c
  misc_feature (407)..(407): n equals a,t,g, or c
  misc_feature (417)..(417): n equals a,t,g, or c
  misc_feature (429)..(429): n equals a,t,g, or c
  misc_feature (437)..(437): n equals a,t,g, or c
  misc_feature (445)..(445): n equals a,t,g, or c
ggtgatggccgcggggctctccagaacatcatccctgcctctactggcgctgccaaggctgtgggcaaggtcatccctgagctgaacgggaagctcactggcatggccttccgtgtccccactgccaacgtgtcagtggtggacctgacctgccgtctagaaaaacctgccaaatatgatgacatcaagaaggtggtgaagcaggcgtcggagggccccctcaagggcatcctgggctacactgagcaccaggtggtctcctctgacttcaacagcgacacccactcctccaccttcnacgctggggctggcattgccctcaacgaccactttgtcaagctcatttcctggtatgacaacgaatttggctacagcaacagggtggtggacctcatggcccacatggnctccaaggantaagacccctgnaccaccanccccagcnagagcaca

SEQ ID NO: 1581 - DNA, 241 bp, Homo sapiens
  misc_feature (34)..(34): n equals a,t,g, or c
  misc_feature (40)..(42): n equals a,t,g, or c
  misc_feature (63)..(64): n equals a,t,g, or c
  misc_feature (91)..(91): n equals a,t,g, or c
  misc_feature (105)..(105): n equals a,t,g, or c
  misc_feature (123)..(123): n equals a,t,g, or c
  misc_feature (133)..(133): n equals a,t,g, or c
  misc_feature (176)..(176): n equals a,t,g, or c
  misc_feature (211)..(211): n equals a,t,g, or c
  misc_feature (214)..(214): n equals a,t,g, or c
  misc_feature (222)..(222): n equals a,t,g, or c
  misc_feature (227)..(227): n equals a,t,g, or c
gagcttctcgagcttctcccgagtgggcagcagnggcttnnncggtggcctgggcggcggctnnggtgcggccagcggcatgggaggcatnaccgcagttacggncaaccagagcctgctgancccccttgtnctggaggtggaccccaacatccaagccagtgcgcacccagganaaggagcagatcaagaccctcaacaacaagtttgnctncttcatanacaangtacggttcctgga

SEQ ID NO: 1582 - DNA, 493 bp, Homo sapiens
  misc_feature (301)..(301): n equals a,t,g, or c
  misc_feature (332)..(332): n equals a,t,g, or c
  misc_feature (370)..(370): n equals a,t,g, or c
  misc_feature (378)..(378): n equals a,t,g, or c
  misc_feature (384)..(384): n equals a,t,g, or c
  misc_feature (442)..(442): n equals a,t,g, or c
  misc_feature (463)..(463): n equals a,t,g, or c
  misc_feature (484)..(484): n equals a,t,g, or c
  misc_feature (486)..(486): n equals a,t,g, or c
  misc_feature (491)..(491): n equals a,t,g, or c
gagcttctgctgacttatcaccatatgttaggaagaatgcagcccatgcaatacaaaaattatacagccttgatccagagcagaaggaaatgttaattgaagtaattgaaaaacttctgaaagataaaagcacattggtagctggcagtgttgtgatggcttttgaagaagtatgcccggacagaatagatctgattcataaaaattaccgcaagctatgtaacttactagtggatgttgaagagtgggggcaggttgtcataatccacatgctaactcgatatgctcggacacagtttgncaacccttggaagaaggtgatgaattagaanacaatgggaaagaattttacgaatctgatgatgatcanaaggaaangactgncaaaaagaagaagccgtatactatggatccagatcatagactcttaattagaaatacnaaagcctttgcttcatagcangaatgctgcggtggttatggnantgctnag

SEQ ID NO: 1583 - DNA, 327 bp, Homo sapiens
  misc_feature (2)..(3): n equals a,t,g, or c
  misc_feature (11)..(11): n equals a,t,g, or c
  misc_feature (20)..(20): n equals a,t,g, or c
  misc_feature (28)..(28): n equals a,t,g, or c
  misc_feature (283)..(283): n equals a,t,g, or c
  misc_feature (294)..(294): n equals a,t,g, or c
  misc_feature (302)..(302): n equals a,t,g, or c
  misc_feature (312)..(312): n equals a,t,g, or c
  misc_feature (325)..(325): n equals a,t,g, or c
gnncgcctggngacaccttnaaggtacncctgcaggtaccggtccggaattcccggggttgagagcctacctggagggcacgtgcgtggagtggctccgcagatacctggagaacgggaaggagacgctgcagcgcacggacgcccccaaaacgcatatgactcaccacgctgtctctgaccatgaagccaccctgaggtgctgggccctgagcttctaccctgcggagatcacactgacctggcagcgggatggggaggaccagacccaggacacggagctngtggagaccangcctgcangggatggaancttccataattgngc

SEQ ID NO: 1584 - DNA, 326 bp, Homo sapiens
  misc_feature (60)..(60): n equals a,t,g, or c
  misc_feature (82)..(82): n equals a,t,g, or c
  misc_feature (111)..(111): n equals a,t,g, or c
  misc_feature (162)..(163): n equals a,t,g, or c
  misc_feature (193)..(193): n equals a,t,g, or c
  misc_feature (199)..(199): n equals a,t,g, or c
  misc_feature (217)..(217): n equals a,t,g, or c
  misc_feature (252)..(252): n equals a,t,g, or c
  misc_feature (261)..(261): n equals a,t,g, or c
  misc_feature (301)..(301): n equals a,t,g, or c
  misc_feature (308)..(308): n equals a,t,g, or c
  misc_feature (324)..(324): n equals a,t,g, or c
ggggaggttggatggagagtggggtggacagaggagcggagggactagagggaagcgcangatagctgcccggagagagagngaagagcaggaggaggaacaaaggcgacncaagacacccagagagggacagagaaccatggagtctggcagtaccggcgnnagtgaggaggcacgcagccttcgagaatgngagctntacgtccagaagcataanattcaagcactgctcaaagattctattgtgcagtngagcactgntcgacctgagagacccatggcattcctcagggaatacttngagaggntggagaatgaggaggnaa

SEQ ID NO: 1585 - DNA, 226 bp, Homo sapiens
  misc_feature (15)..(15): n equals a,t,g, or c
  misc_feature (20)..(20): n equals a,t,g, or c
  misc_feature (71)..(71): n equals a,t,g, or c
  misc_feature (73)..(73): n equals a,t,g, or c
  misc_feature (77)..(77): n equals a,t,g, or c
  misc_feature (111)..(111): n equals a,t,g, or c
  misc_feature (113)..(113): n equals a,t,g, or c
  misc_feature (136)..(136): n equals a,t,g, or c
  misc_feature (170)..(170): n equals a,t,g, or c
  misc_feature (179)..(179): n equals a,t,g, or c
  misc_feature (185)..(185): n equals a,t,g, or c
  misc_feature (196)..(196): n equals a,t,g, or c
tataaaaggtatgcntgcangtaccggtccggaattcccgggtcgacccacgcgtccggtgccatggactnantttnccggtgatattgacaataggagagagaaaggggnantgactgggacccaccgcgggtancgaaaggtggctctggcagcggtggcttcagctnctgcggctnctcctncttattctgtncccttctcttgctgccgctgcagatccagt

SEQ ID NO: 1586 - DNA, 344 bp, Homo sapiens
  misc_feature (252)..(252): n equals a,t,g, or c
  misc_feature (269)..(269): n equals a,t,g, or c
  misc_feature (337)..(337): n equals a,t,g, or c
  misc_feature (340)..(341): n equals a,t,g, or c
gcaccttgcataatcacctgctatattggggcctctttctagttttgccaggcagtgaggaaagggatgaagagagtgggaactggcctttcttctcttccctcctctctgtccaacactcagccagactcttcagcaccttctctggacccagcactgggcaaggcctaggggacagagctcatggtcagatgggggaagaagtgagcagctaggctccttgagaaagtgacctgtggattaagacctcanagataagtgggacagancttggtagaagcaccagtgtgggcaaaggtcctgagtctgaacagaacatggcatgtgaggaatgaancannctg

SEQ ID NO: 1587 - DNA, 302 bp, Homo sapiens
  misc_feature (1)..(1): n equals a,t,g, or c
  misc_feature (32)..(32): n equals a,t,g, or c
  misc_feature (79)..(79): n equals a,t,g, or c
  misc_feature (88)..(88): n equals a,t,g, or c
  misc_feature (111)..(111): n equals a,t,g, or c
  misc_feature (127)..(127): n equals a,t,g, or c
  misc_feature (130)..(130): n equals a,t,g, or c
  misc_feature (133)..(133): n equals a,t,g, or c
  misc_feature (153)..(153): n equals a,t,g, or c
  misc_feature (202)..(202): n equals a,t,g, or c
  misc_feature (206)..(206): n equals a,t,g, or c
  misc_feature (214)..(214): n equals a,t,g, or c
  misc_feature (217)..(217): n equals a,t,g, or c
  misc_feature (223)..(223): n equals a,t,g, or c
  misc_feature (268)..(268): n equals a,t,g, or c
ntgtagatttcctggaaactccttaaggttcncctgcgggtaccggtccggaattcccgggtcgacccacgcgtccggngggaccgantcaaggctgctggtcagcgcctnccaggatgggaagctnatnatntgggacagctacaccaccancaaggtccacaccatcccgctgcgctcctactgggtaatgacctgtgcntacncgctgctnagngaactntgaggcctgtggagggttggacaacatctgctgcattgtacagcnttgagaccatgcgagggcaacgttagggtcagcc

SEQ ID NO: 1588 - DNA, 437 bp, Homo sapiens
  misc_feature (9)..(9): n equals a,t,g, or c
  misc_feature (23)..(23): n equals a,t,g, or c
  misc_feature (232)..(232): n equals a,t,g, or c
  misc_feature (265)..(265): n equals a,t,g, or c
  misc_feature (276)..(276): n equals a,t,g, or c
  misc_feature (324)..(324): n equals a,t,g, or c
  misc_feature (369)..(369): n equals a,t,g, or c
  misc_feature (402)..(402): n equals a,t,g, or c
  misc_feature (424)..(424): n equals a,t,g, or c
  misc_feature (427)..(427): n equals a,t,g, or c
  misc_feature (430)..(430): n equals a,t,g, or c
gcccacgcnttcgcccacgcgtncgcggacgcgtgggccagagtccggagcagccgccgcccgaccacgccgagctcagttcgctgtccgcgccggctcccaccccggcccgaccccgacccggcccggtcaggccccatactcagtagccacgatggaggtgatgaacctgatggagcagcctatcaaggtgactgagtggcagcagacatacacctacgactcgggtatncactcgggcgccaacacctgcgtgcccttcgtnaagcaagcaangggcatcatggaggaggatgaaggcctgcgggcgccagtacacgcttnagaaaaacaccacttacacccaagggggtgccccccaagccaaangggatcttgagtaccaaaatgttcacaaaaagncaaggggccaaaacgggttgcnggnaangggcatt

SEQ ID NO: 1589 - DNA, 424 bp, Homo sapiens
  misc_feature (248)..(248): n equals a,t,g, or c
  misc_feature (362)..(362): n equals a,t,g, or c
  misc_feature (407)..(407): n equals a,t,g, or c
  misc_feature (412)..(412): n equals a,t,g, or c
  misc_feature (414)..(414): n equals a,t,g, or c
  misc_feature (420)..(420): n equals a,t,g, or c
gtcgggctctggactgcgggacgcctgagccgcgcactgaggcgaaaaggacaagggcacgcagcccccgccccgcgaagccgggctccggcacctcgcggaacctcccctcctgcgctcgcagccgcaggccccactccccgccagggagggagcggcgatgcctcgctctgtgcctgcgggtgtcggcgggtgcttctagggcgctcccagagccgcctccccctgttgctggcatcccgagcttnctcccttgccagccaggacgctgccgacttgtctttgcccgctgctccgcagacggggctgcaaagctgcaactaatggtgttggcctccctgcccacctgtggaagcaactgngctgattgatgcgccacagacttttttcccctcgaccttgccggngtccntnttccanagat

SEQ ID NO: 1590 - DNA, 417 bp, Homo sapiens
  misc_feature (169)..(169): n equals a,t,g, or c
  misc_feature (330)..(330): n equals a,t,g, or c
  misc_feature (338)..(338): n equals a,t,g, or c
  misc_feature (384)..(384): n equals a,t,g, or c
  misc_feature (404)..(404): n equals a,t,g, or c
  misc_feature (408)..(408): n equals a,t,g, or c
ggaaaactgatccaacaaacatttagacaatttgccaaccttaatagagaagaaagtattctgaaattctttgagatcctgtctccagtctacagatttgataaggaatgcttcaagtgtgctcttggttcaagctggattatttcagtggaactggcaatcggcccanaagaaggaatcagttacctaacggacaagggctgcaatcccacacatcttgctgactttactcaagtgcaaaccattcagtattcaaacagtgaagacaaggacagaaaaggaatgctacaactaaaaatagcaggtgcacccgagcctctgacagtgacngcaccatncctaaccattgcggagaatatggctgacctaatagatgggtactgncggctggtgaatggaacctngcantcattttat

SEQ ID NO: 1591 - DNA, 334 bp, Homo sapiens
  misc_feature (198)..(198): n equals a,t,g, or c
  misc_feature (200)..(200): n equals a,t,g, or c
  misc_feature (271)..(271): n equals a,t,g, or c
  misc_feature (281)..(281): n equals a,t,g, or c
  misc_feature (291)..(291): n equals a,t,g, or c
  misc_feature (293)..(293): n equals a,t,g, or c
  misc_feature (306)..(306): n equals a,t,g, or c
gctgtagatgtcaaaatctagttactgaagtttaatttccttaatctgaatttcagatttttattttctgcactaagtagaaattgttgaccacaatacaagatttctaaaattaatgtcctagatatgaaagagaaattgaatttggttttttgtattaaataagcacatactttaagggttagcttctaataagangngctggaattaatcgtcattcatctgtaattctaaagcacctagttcataccttgaattggtaacacttttnactatttganttggtgctgngnttatcttccttgnatagataggaaatttcttgaaggtgggg

SEQ ID NO: 1592 - DNA, 145 bp, Homo sapiens
  misc_feature (1)..(1): n equals a,t,g, or c
  misc_feature (6)..(6): n equals a,t,g, or c
  misc_feature (34)..(34): n equals a,t,g, or c
  misc_feature (68)..(68): n equals a,t,g, or c
  misc_feature (78)..(78): n equals a,t,g, or c
  misc_feature (105)..(105): n equals a,t,g, or c
  misc_feature (112)..(112): n equals a,t,g, or c
  misc_feature (124)..(124): n equals a,t,g, or c
ntgctngttagaacattcccccagatcacgacgntgtggcaatggcactgaaagctacaggatgcatntgagttccgntatgccaagatgccagatgaaccactngaaccanggcctttaccantctctactgccatgccccctg

SEQ ID NO: 1593 - DNA, 388 bp, Homo sapiens
  misc_feature (7)..(7): n equals a,t,g, or c
  misc_feature (13)..(13): n equals a,t,g, or c
  misc_feature (19)..(19): n equals a,t,g, or c
  misc_feature (325)..(325): n equals a,t,g, or c
  misc_feature (327)..(327): n equals a,t,g, or c
  misc_feature (348)..(348): n equals a,t,g, or c
  misc_feature (369)..(369): n equals a,t,g, or c
  misc_feature (387)..(387): n equals a,t,g, or c
agccggnagactngcctgnaggtaccggtccggaattcccgggtcgacccacgcgtccggccattcctcataccaatataggatcagctccttgacctctgaggggcaggagtgcttcctggtgtgtgtattagaatcccttcctgccttgtttcatggcagtgaaatgcctcttggtcctgtccaagtgtatctttcactgatttctgaatcatgttctagttgcttgaccctgccacatgggtccagtgttcatctgagcataactgtactaaatcctttttccatatcaagtataataaaggagtgatgtgcaataaaaaananaaaacaaaaaaaaaaagggcngccgctctaaaggatccctcngaggggcccaagcttacnc

SEQ ID NO: 1594 - DNA, 171 bp, Homo sapiens
  misc_feature (11)..(11): n equals a,t,g, or c
  misc_feature (107)..(107): n equals a,t,g, or c
  misc_feature (117)..(117): n equals a,t,g, or c
  misc_feature (149)..(149): n equals a,t,g, or c
  misc_feature (159)..(160): n equals a,t,g, or c
tatatgtttgntctaaaatatttaggtcacactatataatgtacgcctgcaggtaccggtccggattcgcggccgcgtcgacccccccccccttttttttttttttntttttttttntttttttttttttttttttttttttttttttnttattttttnnttttttttttt

SEQ ID NO: 1595 - DNA, 495 bp, Homo sapiens
  misc_feature (302)..(302): n equals a,t,g, or c
  misc_feature (322)..(322): n equals a,t,g, or c
gtcacaaatgcctttgaattatttccctgacttcctgattttttttcttttctcaagtgttacctactaagagatgcctggagtaagccacccagctacctaattcctcagtaacctccatctataatctccatggaagcaacaaattccctttatgagatatatgtcaaatttttccatctttcatccagggctgactgaaaccgtggctaagaattgggagactctcttgtttcaagccaatttaacatcatttaccagatcatttgtcatgtccagtaacacagaagcaacccactccngattagccggataacatgtngattcttagctgacgttaatattctttcttccttgggtcccacccttggcattgccacccacccctcaattaaggcaacaatgaagttaatggataccctctgcctttggctcaaaaatgttatagcaaaaattttaaaataaaaaagtaagtctgtattaatttcaaaaaaa

SEQ ID NO: 1596 - DNA, 261 bp, Homo sapiens
  misc_feature (79)..(79): n equals a,t,g, or c
  misc_feature (178)..(178): n equals a,t,g, or c
  misc_feature (184)..(184): n equals a,t,g, or c
  misc_feature (213)..(213): n equals a,t,g, or c
  misc_feature (218)..(218): n equals a,t,g, or c
  misc_feature (221)..(221): n equals a,t,g, or c
ggttctagatcgcgagcggccgctctagaggatccaagcttacgtacgcgtgcatgcgacgtcatagctcttctatagngtcacctaaattcaattcactggccgacgttttacaacgtcgtgactgggaaaacccatttaattaccttattttcttttatgctttcctctgtcttgnaatctnttctcttcgttaatatccttccctataanttcanttntttggattaattttagaataaacctatttatttctaaaaa

SEQ ID NO: 1597 - DNA, 260 bp, Homo sapiens
  misc_feature (58)..(58): n equals a,t,g, or c
  misc_feature (70)..(70): n equals a,t,g, or c
  misc_feature (120)..(120): n equals a,t,g, or c
  misc_feature (141)..(141): n equals a,t,g, or c
  misc_feature (159)..(159): n equals a,t,g, or c
  misc_feature (211)..(211): n equals a,t,g, or c
  misc_feature (230)..(230): n equals a,t,g, or c
  misc_feature (234)..(234): n equals a,t,g, or c
  misc_feature (237)..(237): n equals a,t,g, or c
  misc_feature (251)..(251): n equals a,t,g, or c
ggttctagatcgcgagcggccgctctagaggatccaagcttacgtacgcgtgcatgcnacgtcatagctnttctatagtgtcacctaaattcaattcactggccgtcgttttacaacgtngtgactgggaaaaccctggcngttacccaacttaatcgncttgcagcacattcccctttcgtcagctggcgtaatagcgaagaggccctgnaccgatcgccctttccaancagntgngcatcctgaatggngaatgggac

SEQ ID NO: 1598 - DNA, 338 bp, Homo sapiens
  misc_feature (48)..(48): n equals a,t,g, or c
  misc_feature (76)..(76): n equals a,t,g, or c
  misc_feature (117)..(117): n equals a,t,g, or c
  misc_feature (126)..(126): n equals a,t,g, or c
  misc_feature (131)..(133): n equals a,t,g, or c
  misc_feature (144)..(144): n equals a,t,g, or c
  misc_feature (148)..(148): n equals a,t,g, or c
  misc_feature (154)..(154): n equals a,t,g, or c
  misc_feature (158)..(158): n equals a,t,g, or c
  misc_feature (161)..(161): n equals a,t,g, or c
  misc_feature (164)..(164): n equals a,t,g, or c
  misc_feature (183)..(184): n equals a,t,g, or c
  misc_feature (192)..(193): n equals a,t,g, or c
  misc_feature (199)..(199): n equals a,t,g, or c
  misc_feature (205)..(205): n equals a,t,g, or c
  misc_feature (226)..(226): n equals a,t,g, or c
  misc_feature (234)..(234): n equals a,t,g, or c
  misc_feature (276)..(276): n equals a,t,g, or c
  misc_feature (296)..(296): n equals a,t,g, or c
  misc_feature (298)..(298): n equals a,t,g, or c
  misc_feature (306)..(307): n equals a,t,g, or c
ggcaagactggtctgcagctcccactgctcaggccactgaatgggtangagcaaccactgactggtcttaagctgntcttgcataggctcttaagcagcatggaaaaatggatgatngaaaataancatcnnnttctaaaaaanaaanaaaggncggncgntcnagaggatccaagcttacgnncgcgtgcnngcgacntcatanctcttctatagtgtcacctanattcaatncactggccgtcgttgtacaacagtcatagactgggaaaaccntggcgttacccaacttaatnanccttgctnnacatccccctttcgccagctggcgtaatatc

SEQ ID NO: 1599 - DNA, 385 bp, Homo sapiens
  misc_feature (14)..(14): n equals a,t,g, or c
  misc_feature (18)..(18): n equals a,t,g, or c
  misc_feature (101)..(101): n equals a,t,g, or c
  misc_feature (139)..(139): n equals a,t,g, or c
  misc_feature (163)..(163): n equals a,t,g, or c
  misc_feature (179)..(179): n equals a,t,g, or c
  misc_feature (189)..(189): n equals a,t,g, or c
  misc_feature (197)..(197): n equals a,t,g, or c
  misc_feature (216)..(217): n equals a,t,g, or c
  misc_feature (254)..(254): n equals a,t,g, or c
  misc_feature (258)..(258): n equals a,t,g, or c
  misc_feature (276)..(276): n equals a,t,g, or c
  misc_feature (308)..(308): n equals a,t,g, or c
  misc_feature (321)..(321): n equals a,t,g, or c
  misc_feature (353)..(353): n equals a,t,g, or c
  misc_feature (356)..(356): n equals a,t,g, or c
  misc_feature (373)..(373): n equals a,t,g, or c
gcttttggacttcngcantctgtccaaccttcaggtcactcagcctacagttgggatgaatttcaaaacgcctcggggacctgtttgaattttttctgtantgctgtattattttcaataaatctgggacaacaaaaanaaaaaaaaagggcggccgttctanaggatccaagcttacntacgcgtgcntgcgacgncatagctcttctatagtgnnacctaaattcaattcactggccgtctgttttacaacngtcnagactgggaaaaccctgncgttacccaacttaatcgccttgcagcacatncccctttcgccanctggctgtaatagcgaaaaggcccgcaccgancgnccttcccaacagttgcncagcctgaatgg

SEQ ID NO: 1600 - DNA, 381 bp, Homo sapiens
  misc_feature (365)..(365): n equals a,t,g, or c
  misc_feature (376)..(376): n equals a,t,g, or c
ggtttctgtgtgagtccaggatatctcctcaatacaaagtagcacactgtgtactttgcaaccaggtagttgcaaccaggagtcagtacaggctttattcacctcaaagttgcaactgttcaatgtagtcacaatgcccctcactagtgctcatgcactgcctgtttttaggaagtatccactgctaagtgttgtgtatattttataggaacacttagtaatttttaaacctgattaacattaaaaaattagtttttaggcagacccacatgaggtattaaaggccaactgccaaggacaccctgctaggctctgtagatggatgtattaaaatccataaaacaatgtatttaaacctaaaaaanaaaaaaaaaanaaaaa

SEQ ID NO: 1601 - DNA, 572 bp, Homo sapiens
  misc_feature (10)..(10): n equals a,t,g, or c
  misc_feature (64)..(64): n equals a,t,g, or c
  misc_feature (112)..(112): n equals a,t,g, or c
  misc_feature (156)..(156): n equals a,t,g, or c
  misc_feature (189)..(189): n equals a,t,g, or c
  misc_feature (200)..(200): n equals a,t,g, or c
  misc_feature (291)..(291): n equals a,t,g, or c
  misc_feature (293)..(293): n equals a,t,g, or c
  misc_feature (296)..(296): n equals a,t,g, or c
  misc_feature (302)..(302): n equals a,t,g, or c
  misc_feature (428)..(429): n equals a,t,g, or c
  misc_feature (538)..(538): n equals a,t,g, or c
  misc_feature (547)..(547): n equals a,t,g, or c
  misc_feature (550)..(550): n equals a,t,g, or c
  misc_feature (563)..(563): n equals a,t,g, or c
  misc_feature (571)..(571): n equals a,t,g, or c
gatctgggantacaccaggcagcagctgctctcgcacggagataccaagccatgatgtgccttncttagtgaactgctgctgctgttcagacttttttaaaaaaaactattnaggactaaagaaacagattctgaaatttattgtgataatttgtntttcttttttcttgcaatttaatgccaaaagtntgccatgtgcnttaaacatattactatatattttcccctttaataaacactttatgttaaattgtattcttcctttaataaaatattttaagcaaaaaaaananaanaaaaangggcggccgttctagaggatccaagcttacgtacgcgtgcatgcgacgtcatagctcttctatagtgtcacctaaatgcaattcactggccgtcgttttacaacgtcgtgactgggaaaaccctgnngttacccaacttaatcgccttgcagcacatccccctttcgccagctggcgtaatagcgaagaggcccgcaccgatcgcccttcccaacagttgcgcagcctgaatggcnaatgggacncgncctgtaaccggcncattaaanc

SEQ ID NO: 1602 - DNA, 294 bp, Homo sapiens
  misc_feature (14)..(14): n equals a,t,g, or c
  misc_feature (57)..(57): n equals a,t,g, or c
  misc_feature (62)..(62): n equals a,t,g, or c
  misc_feature (69)..(69): n equals a,t,g, or c
  misc_feature (73)..(73): n equals a,t,g, or c
  misc_feature (99)..(100): n equals a,t,g, or c
  misc_feature (102)..(102): n equals a,t,g, or c
  misc_feature (116)..(116): n equals a,t,g, or c
  misc_feature (118)..(118): n equals a,t,g, or c
  misc_feature (129)..(129): n equals a,t,g, or c
  misc_feature (138)..(138): n equals a,t,g, or c
  misc_feature (158)..(158): n equals a,t,g, or c
  misc_feature (162)..(162): n equals a,t,g, or c
  misc_feature (165)..(166): n equals a,t,g, or c
  misc_feature (175)..(176): n equals a,t,g, or c
  misc_feature (184)..(184): n equals a,t,g, or c
  misc_feature (222)..(222): n equals a,t,g, or c
  misc_feature (264)..(264): n equals a,t,g, or c
  misc_feature (267)..(267): n equals a,t,g, or c
  misc_feature (270)..(270): n equals a,t,g, or c
  misc_feature (274)..(274): n equals a,t,g, or c
tttgatgccatatntaagacctacagctacctgacccccgacctctggaaggaaacngtatncaccaantctncctatcaggagttcactgaccacctnntnaagacccacaccanantctccgtgcancggactcangctccagctgtggctacaanatanggnnattatacannaaaaatanagtgaattaagcgtgtaaaaaaaaaaaaaaagggcggncgcctctataggatccaagcttacgtacacgtgcatgctacntcntanctcntctatagagtcacctaaatt

SEQ ID NO: 1603 - DNA, 452 bp, Homo sapiens
  misc_feature (267)..(267): n equals a,t,g, or c
  misc_feature (282)..(282): n equals a,t,g, or c
  misc_feature (329)..(329): n equals a,t,g, or c
  misc_feature (398)..(398): n equals a,t,g, or c
  misc_feature (405)..(405): n equals a,t,g, or c
  misc_feature (425)..(425): n equals a,t,g, or c
  misc_feature (433)..(433): n equals a,t,g, or c
  misc_feature (443)..(443): n equals a,t,g, or c
gatcaatgacctgatctgtccttcctcctccttcccgcttcccccaaaatcacattccagtttttattgtctttgtgtccaaagtaaactaggtgacttatttgtataaaatgttattttgccacatgagacagtaataaaagaaagattttcacagtaaaaaaaaaaaaaaaagggcggccgctctagaggatccaagcttacgtacgcgtgcatgcgacgtcatagctcttctatagtgtcacctaaattcaattcactggccgncgttttacaacgtcntgactgggaaaaccctggctgttacccaacttaatcgccttgcatgnacatccccctttctccagctggcgtaatagcgaataggcccgcaccgatcgcccttcccaacagttgcncagcctnaatggcgaatgggacttcgncctgtaancggcgcattnaaccgcggc

SEQ ID NO: 1604 - DNA, 491 bp, Homo sapiens
  misc_feature (11)..(11): n equals a,t,g, or c
  misc_feature (462)..(463): n equals a,t,g, or c
  misc_feature (466)..(466): n equals a,t,g, or c
  misc_feature (483)..(483): n equals a,t,g, or c
  misc_feature (490)..(490): n equals a,t,g, or c
gatcagagcancccaatcttgccgggatcaaccctaaagggaccgggctacggggccaggaattgaagtgatgggttcaaagaggttaacgtccctaaaacccgccggactttctgtaagaagtgtggcaagcaccaaccccataaagtgacacagtacaagaagggcaaggattctctgtacgcccagggaaagcggcgttatgacaggaagcagagtggctatggtgggcaaactaagccgattttccggaaaaaggctaaaactacaaagaagattgtgctaaggcttgagtgcgttgagcccaactgcagatctaagagaatgctggctattaaaagatgcaagcattttgaactgggaggagataagaagagaaagggccaagtgatccagttctaagtgtcatcttttattatgaagacaataaaatcttgagtttatgttcaaaaaaaatatttnnaanttaaaaaaaaaaaaggncggccgnt

SEQ ID NO: 1605 - DNA, 507 bp, Homo sapiens
  misc_feature (11)..(11): n equals a,t,g, or c
  misc_feature (339)..(339): n equals a,t,g, or c
  misc_feature (399)..(399): n equals a,t,g, or c
  misc_feature (422)..(422): n equals a,t,g, or c
  misc_feature (432)..(432): n equals a,t,g, or c
  misc_feature (454)..(454): n equals a,t,g, or c
  misc_feature (460)..(460): n equals a,t,g, or c
  misc_feature (469)..(469): n equals a,t,g, or c
gggaagaagtncccagagacacagactgaaaaccaggaagttggatgggacttagagcccttgatcaacccagaacgccatgaccgcaggctgaatcacttcagggtctgcagtgacatcactctgtacaaggctaaaacgtggggcttaggagatgatcaccacaagtagcatcccagcggatgagcccatctgtggatctaatgccttaagtgtgcacagcccagagaaataaaatactactttaaaacgaaaaagaaaaaaaaaaaagggcggccgctctagaggatccaagcttacgtacgcgtgcatgcgacgtcatagctcttctatagtgtnacctaaattcaattcactggcccgtcgttttacaacgtcgtgactgggaaaaccctggcngttcccaacttaatcgccttgcngcacatcccnctttcgccagttggcgtaatancgaaanagggccctnatcgatcgcccttcccaacagttgcgcatcctgaatgg

SEQ ID NO: 1606 - DNA, 282 bp, Homo sapiens
  misc_feature (2)..(2): n equals a,t,g, or c
  misc_feature (13)..(13): n equals a,t,g, or c
  misc_feature (41)..(41): n equals a,t,g, or c
  misc_feature (53)..(53): n equals a,t,g, or c
  misc_feature (71)..(71): n equals a,t,g, or c
  misc_feature (102)..(102): n equals a,t,g, or c
  misc_feature (111)..(111): n equals a,t,g, or c
  misc_feature (122)..(122): n equals a,t,g, or c
  misc_feature (133)..(133): n equals a,t,g, or c
  misc_feature (148)..(148): n equals a,t,g, or c
  misc_feature (182)..(182): n equals a,t,g, or c
  misc_feature (199)..(199): n equals a,t,g, or c
  misc_feature (246)..(246): n equals a,t,g, or c
  misc_feature (248)..(248): n equals a,t,g, or c
  misc_feature (265)..(265): n equals a,t,g, or c
  misc_feature (272)..(272): n equals a,t,g, or c
angaccggtccgnaattcccgggtcgaccccgcgtccgatnggattcaaattnaggttccttttttgatanagaggaaatttgttttccatgcttgtgattntgtgtttgnaaacatttcangaggaatttangagtgtaactatagnttatacttctataatgttgtcttacatttacatntttaagtgcctaattgntaaaactgatttatgtttctcttctaatgaggatatgtgtacttggntnctaatctgtatggtttngctttcnaaaaaatgca

SEQ ID NO: 1607 - DNA, 216 bp, Homo sapiens
  misc_feature (36)..(36): n equals a,t,g, or c
  misc_feature (54)..(54): n equals a,t,g, or c
  misc_feature (77)..(77): n equals a,t,g, or c
  misc_feature (85)..(85): n equals a,t,g, or c
  misc_feature (133)..(133): n equals a,t,g, or c
  misc_feature (156)..(156): n equals a,t,g, or c
  misc_feature (174)..(174): n equals a,t,g, or c
  misc_feature (207)..(207): n equals a,t,g, or c
  misc_feature (209)..(209): n equals a,t,g, or c
gattttaattatatacttaattcttagaacaagtanaatgggaaaggagtgacngataaatctaagattcaaaatantcccgtcnaaacttaaaggccatattattgctttggagctttctataggtactaanccattccgtcgttaaatgttttnatggatatttgaaaagangaccatgtacctttaataactgttcttttctcnanattctgc

SEQ ID NO: 1608 - DNA, 284 bp, Homo sapiens
  misc_feature (55)..(55): n equals a,t,g, or c
  misc_feature (169)..(169): n equals a,t,g, or c
  misc_feature (190)..(190): n equals a,t,g, or c
  misc_feature (249)..(249): n equals a,t,g, or c
  misc_feature (265)..(265): n equals a,t,g, or c
  misc_feature (272)..(272): n equals a,t,g, or c
  misc_feature (278)..(278): n equals a,t,g, or c
gagaaaacatggaacagatagagaaatttcaggaaaaggcttatgtggaattccnagattatataaccaaaacatatccagatgacacctacaggttatccagactactactcagattgccagctttaagactgatgaatgctaccatcactgaagaattgtttttcanaggtctcattggcaatatacngaattgacagtgttatcccacatattttgaaaatggagcctgcagattataactctcanataattggtcacagcnttttganaactgngactgc

SEQ ID NO: 1609 - DNA, 165 bp, Homo sapiens
  misc_feature (25)..(25): n equals a,t,g, or c
  misc_feature (46)..(47): n equals a,t,g, or c
  misc_feature (61)..(61): n equals a,t,g, or c
  misc_feature (81)..(81): n equals a,t,g, or c
  misc_feature (134)..(134): n equals a,t,g, or c
  misc_feature (153)..(153): n equals a,t,g, or c
  misc_feature (164)..(165): n equals a,t,g, or c
ggtgtcctgtacatagattaggttntatattcctaataaagtatannggaagagaaaaaanaaaaaaaagggcggccgctntagaggatccaagcttacttacgcgtgcatgcgacgtcatagctcttctatantgtcacctaaattcaattnactggccgtcnn

SEQ ID NO: 1610 - DNA, 381 bp, Homo sapiens
  misc_feature (301)..(301): n equals a,t,g, or c
  misc_feature (342)..(342): n equals a,t,g, or c
  misc_feature (350)..(350): n equals a,t,g, or c
  misc_feature (361)..(362): n equals a,t,g, or c
gtgaaactgtaaccaaaggaggcattatgcttccagaaaaatctcaaggaaaagtattgcaagcaacagtagtcgctgttggatcgggttctaaaggaaagggtggagagattcaaccagttagcgtgaaagttggagataaagttcttctcccagaatatggaggcaccaaagtagttctagatgacaaggattatttcctatttagagatggtgacattcttggaaagtacgtagactgaaataagtcactattgaaatggcatcaacatgatgctgcccattccactgaagttctganatctttcgtcatgtaaataatttccatatttctctttcatnataaactnatgataactannataaattaataaatatggt

SEQ ID NO: 1611 - DNA, 361 bp, Homo sapiens
  misc_feature (278)..(278): n equals a,t,g, or c
  misc_feature (295)..(295): n equals a,t,g, or c
  misc_feature (320)..(320): n equals a,t,g, or c
  misc_feature (347)..(347): n equals a,t,g, or c
  misc_feature (352)..(352): n equals a,t,g, or c
ggttgtaggagtgtacctaagcagtaagcgtatttaggttaatgcagtttcacttatgttaaatgttgctcttataccacaaatacattgaaaacttcggatgcatgttgagaaacatgcctttctgtaaaactcaaatataggagctgtgtctacgattcaaagtgaaaacatttggcatgtttgttaattctagctttttggtttaatatcctgtaaggcacgtgagttgtacactttttttttttaaggatacgggacaattttaagatgtaatnccaatactttagaagtntggtcgtgtcgtttgatgaaaatcngaagctttggtttaaatctttccttgnattgngaattccat

SEQ ID NO: 1612 - DNA, 179 bp, Homo sapiens
  misc_feature (126)..(126): n equals a,t,g, or c
  misc_feature (132)..(132): n equals a,t,g, or c
  misc_feature (139)..(139): n equals a,t,g, or c
  misc_feature (159)..(159): n equals a,t,g, or c
  misc_feature (178)..(178): n equals a,t,g, or c
gggctgaacgcgtgtgtacacgggactgacgcaacccacgtgtaactgtcagcccgggccctgagtaatccgcttaaagatgttcctacgggcttgttgctgatgatgttttgttttgttttgggntttggnctttttntgtattataaaaaataatcnatttctatgagataaaaana

SEQ ID NO: 1613 - DNA, 199 bp, Homo sapiens
  misc_feature (4)..(5): n equals a,t,g, or c
  misc_feature (14)..(14): n equals a,t,g, or c
  misc_feature (42)..(42): n equals a,t,g, or c
  misc_feature (110)..(110): n equals a,t,g, or c
  misc_feature (132)..(132): n equals a,t,g, or c
  misc_feature (174)..(174): n equals a,t,g, or c
  misc_feature (190)..(190): n equals a,t,g, or c
  misc_feature (196)..(196): n equals a,t,g, or c
gggnnccaacgaancagcaattgcatttgccaactcctatanggaaagctggtacgcctgcaggtaccggtccggaattcccgggtcgacccacgcgtccgagaagctgnatgacattgatgtggccaaggncaacaccctgattcggcctgatggagagaagaaggcatatgntcgactggctcctgantacgangct

SEQ ID NO: 1614 - DNA, 389 bp, Homo sapiens
  misc_feature (6)..(6): n equals a,t,g, or c
  misc_feature (243)..(243): n equals a,t,g, or c
  misc_feature (252)..(252): n equals a,t,g, or c
  misc_feature (258)..(258): n equals a,t,g, or c
  misc_feature (261)..(261): n equals a,t,g, or c
  misc_feature (282)..(282): n equals a,t,g, or c
  misc_feature (337)..(337): n equals a,t,g, or c
  misc_feature (351)..(351): n equals a,t,g, or c
  misc_feature (355)..(355): n equals a,t,g, or c
  misc_feature (365)..(365): n equals a,t,g, or c
  misc_feature (386)..(386): n equals a,t,g, or c
ggtcanggagagggaaggcaggggtggaccgccatgagcatgaaaagacccgaagcaagttgactcttgcaatgtgcaactgttatgttctgcaaaatgagcaacgatgtatcaaattgatgcaaatttatatgttgatacttacaataaagtttttaatgtgttttactcttcagtatttttctatcagacttgtacaaataaagccttgttccaggctatacatatttaccagtcaaccanaaaattatnaaaaangcnggcccgctctaaaaggattcnagcttacgtacgcgtgcatgcgacgtcatagctcttctatagtgtcacctaaatncaattcactggccngtcnttttacaacntccagactgggaaaaccctgncgt

SEQ ID NO: 1615 - DNA, 525 bp, Homo sapiens
  misc_feature (10)..(10): n equals a,t,g, or c
  misc_feature (232)..(232): n equals a,t,g, or c
  misc_feature (255)..(255): n equals a,t,g, or c
  misc_feature (263)..(263): n equals a,t,g, or c
  misc_feature (312)..(312): n equals a,t,g, or c
  misc_feature (319)..(319): n equals a,t,g, or c
  misc_feature (339)..(339): n equals a,t,g, or c
  misc_feature (356)..(356): n equals a,t,g, or c
  misc_feature (377)..(377): n equals a,t,g, or c
  misc_feature (447)..(447): n equals a,t,g, or c
  misc_feature (455)..(455): n equals a,t,g, or c
  misc_feature (473)..(473): n equals a,t,g, or c
  misc_feature (481)..(482): n equals a,t,g, or c
gattgaccgntacccccgcaaagtgacagctgccatgggcaagaagaagatcgccaagagatcaaagataaaatcttttgtgaaagtgtataactacaatcacctaatgcccacaaggtactctgtggatatccccttggacaaaactgtcgtcaataaggatgtcttcagagatcctgctcttaaacgcaaggcccgacgggaggccaaggtcaagtttgaagagagatanaagacaggcaagaacaaagtggntcttccangaaaacttgcgggtttaagatgctttgtttttgatcattaataattatnaagaatnaacataaaaaaagggcggcngctctagaggatccaancttactgtacgcgtgcatgcnacgtcatagctcttctatagtgtacctaaattcaattcacttggccgtcgctttacaacgtcgtgactgngaaaaccntggcgttacccaacttantcgccttnnagcacatcccctttcgcagctggcgtaataccgaagaggcccg

SEQ ID NO: 1616 - DNA, 707 bp, Homo sapiens
  misc_feature (369)..(369): n equals a,t,g, or c
  misc_feature (410)..(410): n equals a,t,g, or c
  misc_feature (488)..(488): n equals a,t,g, or c
  misc_feature (575)..(575): n equals a,t,g, or c
  misc_feature (673)..(673): n equals a,t,g, or c
  misc_feature (686)..(686): n equals a,t,g, or c
  misc_feature (692)..(692): n equals a,t,g, or c
  misc_feature (696)..(696): n equals a,t,g, or c
  misc_feature (705)..(705): n equals a,t,g, or c
gaaagcttcaaaaactttgggaaagggtgggattaagtacaagcacatttggcttacagtaaatgaactgatttttattaactgcttttgcccatataaaatgctgatatttactggaaacctagccagcttcacgattatgactaaagtaccagattataatgccagaatataatgtgcaggcaatcgtggatgtctctgacaaagtgtgtctcaaaaataatatacttttacattaaagaaatttaatgtttctctggagttggggctcttggctttcagagtttggttaatcagtgttgattctagatgatcaacataatggaccactcctgatgagacttaattttggctttcaaaatttactgncttaaatcagtttattaaatctgaattttaaaacatgctgnttatgacacaatgacacatttgttgcaccaattaagtgttgaaaaatatctttgcatcatagaacagaaatatataanaatatatgttgaatggtaacaggtattttcacaggtttggttcttgataggtactcagacactagggaaaggtaaatacagtgaccnaataagcactaaatgagacctaaaattggcttcgattttaatattggtctataacctggcattaaaataactaatcctggggtttaaaaaaaaaaaanaaaaaagggcccnttaaanaccnatttccccngc

SEQ ID NO: 1617 - DNA, 367 bp, Homo sapiens
  misc_feature (312)..(312): n equals a,t,g, or c
  misc_feature (320)..(320): n equals a,t,g, or c
  misc_feature (363)..(363): n equals a,t,g, or c
  misc_feature (365)..(365): n equals a,t,g, or c
  misc_feature (367)..(367): n equals a,t,g, or c
ggtaaggcaggaaaagttgatggtattcattaggttttaactgaatggagcagttccttatataataacaattgtatagtagggataaaacactaacaatgtgtattcattttaaattgttctgtatttttaaattgccaagaaaaacaactttgtaaatttggagatattttccaacagcttttcgtcttcagtgtcttaatgtggaagttaacccttaccaaaaaaggaagttggcaaaaacagccttctagcacacttttttaaatgaataatgggtagcctaaacttaatatttttataaagtattgnaatattgntttgtggataattgaaataaaaagttctcattgaatgccaaananan

SEQ ID NO: 1618 - DNA, 594 bp, Homo sapiens
  misc_feature (29)..(29): n equals a,t,g, or c
  misc_feature (42)..(42): n equals a,t,g, or c
  misc_feature (57)..(57): n equals a,t,g, or c
  misc_feature (94)..(95): n equals a,t,g, or c
  misc_feature (174)..(174): n equals a,t,g, or c
  misc_feature (183)..(183): n equals a,t,g, or c
  misc_feature (236)..(236): n equals a,t,g, or c
  misc_feature (238)..(238): n equals a,t,g, or c
  misc_feature (240)..(240): n equals a,t,g, or c
  misc_feature (263)..(263): n equals a,t,g, or c
  misc_feature (266)..(266): n equals a,t,g, or c
  misc_feature (312)..(312): n equals a,t,g, or c
  misc_feature (370)..(370): n equals a,t,g, or c
  misc_feature (390)..(391): n equals a,t,g, or c
  misc_feature (422)..(422): n equals a,t,g, or c
  misc_feature (513)..(513): n equals a,t,g, or c
  misc_feature (529)..(529): n equals a,t,g, or c
  misc_feature (555)..(555): n equals a,t,g, or c
  misc_feature (565)..(565): n equals a,t,g, or c
  misc_feature (582)..(582): n equals a,t,g, or c
acttgaagggggggattacaacgggaaangttggtacgcctnttggtaccggtcccnaattcccgggtcgacccacgcgtccgaaaaaaaaaanntttctcttcttcctgttattggtagttctgaacgttagatattttttttccatggggtcaaaaggtacctaagtatatnattgcgagnggaaaaataggggacagaaatcaggtattggcagtttttccattttcatttgngngngaatttttaatataaatgcgganacntaaagcattaatgcaagttaaaatgtttcagggaacaagtttcagnggttcaactttataataattataaataaacctgttaaatttttctggacaatgccagnatttggatttttttaaaacnnggaaaattcttattgatggcaactaaatggngtttgtagcatttttatcatacagtagattccatccattcactatacttttctaactgagttgcctacatgcaagtacatgtttttaatgntgctgcttctggctgntcctgtaagtttgctattaaaatacnttaaactaanaaaaaaaaaaaaggggngccgttttaaag

SEQ ID NO: 1619 - DNA, 110 bp, Homo sapiens
  misc_feature (8)..(8): n equals a,t,g, or c
  misc_feature (38)..(38): n equals a,t,g, or c
  misc_feature (49)..(49): n equals a,t,g, or c
  misc_feature (55)..(55): n equals a,t,g, or c
  misc_feature (95)..(95): n equals a,t,g, or c
  misc_feature (108)..(108): n equals a,t,g, or c
ttccaggnaatttgaatgattgtattttgtgtccatgnaacgtttatanacatgnaggcaggcaataaattcctccaataatttttttatctcanaaaaaaaaaaaangg

SEQ ID NO: 1620 - DNA, 512 bp, Homo sapiens
  misc_feature (478)..(478): n equals a,t,g, or c
  misc_feature (480)..(480): n equals a,t,g, or c
  misc_feature (494)..(494): n equals a,t,g, or c
  misc_feature (498)..(498): n equals a,t,g, or c
  misc_feature (507)..(507): n equals a,t,g, or c
ggacagagttcaggttgtaggatcatctgaattttcttagtgaaatacaagccagtagaaaccaaagctcgtgtttttctactgtatgactatgggagctctcagtatagagaaacttgatcatacctgtgatagatataaagatgtaaattaaagtctagttagtgagttatttgagggtaaagccagaataggaaaacattttgtttctcttttcctgggcttcacaatctttggagaataactaattttattttaactctagtgttagaggcatgtatgtcttctggtaatcagtaatagtaattcattttacctgtttgtttctcactgttttattctacttagaagaagacatgataggattgtgagtttttctctaactttggatgcagtgagatgaccagtgtgttccagttaaagaagaagagtgttttaaaatcataaaccaaataaagaatcctaccttaaaaaaaananaaaaaaaaaggggngccnttttaaagnatcca

SEQ ID NO: 1621 - DNA, 316 bp, Homo sapiens
  misc_feature (145)..(145): n equals a,t,g, or c
  misc_feature (174)..(174): n equals a,t,g, or c
  misc_feature (184)..(184): n equals a,t,g, or c
  misc_feature (278)..(278): n equals a,t,g, or c
  misc_feature (311)..(311): n equals a,t,g, or c
  misc_feature (314)..(316): n equals a,t,g, or c
gtccagctcttggcccctgtgtgagttgagtctcctctctgagactgctaagtaggggcagtgatggttgccaggacgaattgagataatatctgtgaggtgctgatgagtgattgacacacagcactctctaaatcttccttgngaggattatgggtcctgcaattctacagnttcttactgntttgtatcaaaatcactatctttctgataacagaattgccaaggcagcgggatctcgtatctttaaaaagcaagcctcttaattctaaaggtantcctaataaaaacacagttttacaacttcaaanaannn

SEQ ID NO: 1622 - DNA, 280 bp, Homo sapiens
  misc_feature (53)..(53): n equals a,t,g, or c
  misc_feature (57)..(57): n equals a,t,g, or c
  misc_feature (61)..(61): n equals a,t,g, or c
  misc_feature (81)..(81): n equals a,t,g, or c
  misc_feature (98)..(98): n equals a,t,g, or c
  misc_feature (105)..(105): n equals a,t,g, or c
  misc_feature (107)..(108): n equals a,t,g, or c
  misc_feature (114)..(114): n equals a,t,g, or c
  misc_feature (117)..(117): n equals a,t,g, or c
  misc_feature (120)..(120): n equals a,t,g, or c
  misc_feature (176)..(176): n equals a,t,g, or c
  misc_feature (178)..(178): n equals a,t,g, or c
  misc_feature (256)..(256): n equals a,t,g, or c
  misc_feature (261)..(261): n equals a,t,g, or c
  misc_feature (274)..(275): n equals a,t,g, or c
  misc_feature (278)..(278): n equals a,t,g, or c
gaaggaatattattggttattattttaatacatataaaaagggattaatctgntaanatgnaatctaaatcagaattttgntaaattttttttgtaanctaattntnnttattnaanacnttgaaactactttgcacatatgaatattaatgtaacttgtaatttaaaagtaaagngnttccatgctatttcatgttttggccaaaaatttttaaaaaataaattacaattgttctctattaaaaaaaaaaaaaangggcngccgttttaaagnntcnaa

SEQ ID NO: 1623 - DNA, 211 bp, Homo sapiens
  misc_feature (13)..(13): n equals a,t,g, or c
  misc_feature (23)..(23): n equals a,t,g, or c
  misc_feature (180)..(180): n equals a,t,g, or c
  misc_feature (188)..(188): n equals a,t,g, or c
  misc_feature (193)..(193): n equals a,t,g, or c
ggttctagatcgngggcggccgntctagaggatccaagcttacgtacgcgtgcatgctgacgtcatagctcttctatagtgtcacctaaattcaattcactggccgtcgttttacaacgtcgtgactgggaaacccatacttggaatggctcttcccaacctcatatgttttaataatanaataaatnatgtngatgacaaaaaaaaaaaa

SEQ ID NO: 1624 - DNA, 574 bp, Homo sapiens
  misc_feature (212)..(212): n equals a,t,g, or c
  misc_feature (348)..(348): n equals a,t,g, or c
  misc_feature (431)..(431): n equals a,t,g, or c
  misc_feature (493)..(493): n equals a,t,g, or c
  misc_feature (526)..(526): n equals a,t,g, or c
  misc_feature (554)..(554): n equals a,t,g, or c
  misc_feature (573)..(574): n equals a,t,g, or c
gcagaactcctgtttattcatggaggacacactgctaagatttcagattttagctggaaccccaatgagccttgggtcatttgctcagtgtctgaggataacatcatgcagatatggcaaatggctgaaaatatttacaatgatgaagagtcagatgtcacgacatccgaactggagggacaaggatcttaaacccaaagtacgagaaatgnttctgttgaatgtaatgctacatgaatgcttgatttatcaagcgccaaaaaggcattgtatagtaggaaatgtaagtggggtggcttatggcttctttatcctctgattctagcactttcaagtgagctgttgcgnctgtatcatattgtagctattagggaagagaagaatgttgcttaagaaagaacatcaccattgattttaaatacaagtagcanggtattgcctttgattcaactggtttaaggcctcattttctcaaactaagtgcttgctggtnccaaatatgccagaataacttttacactttttnctttcaacactttttgaatgggtttgcngaaataaaggtttaaaatnn

SEQ ID NO: 1625 - DNA, 279 bp, Homo sapiens
  misc_feature (14)..(14): n equals a,t,g, or c
  misc_feature (25)..(25): n equals a,t,g, or c
  misc_feature (56)..(57): n equals a,t,g, or c
  misc_feature (87)..(87): n equals a,t,g, or c
  misc_feature (126)..(126): n equals a,t,g, or c
  misc_feature (151)..(151): n equals a,t,g, or c
  misc_feature (184)..(184): n equals a,t,g, or c
  misc_feature (228)..(228): n equals a,t,g, or c
  misc_feature (258)..(258): n equals a,t,g, or c
  misc_feature (276)..(277): n equals a,t,g, or c
ttcaagactctttnggaaatttggncgcctgccggtaccggtccggaattcccggnncgacccacgcgtccgcaaatgtccgttgtnaatgaaccttaaatattacattcctcctttgcacaatantatttctttataacacttatgattntttcccccaggacaacaaactgcccttaagagncatttccttggtatcacaggtgtcaatatttttctgtattttgnttataattttattttttaaataaaaagtgnataaaaataacaaaagannag

SEQ ID NO: 1626 - DNA, 373 bp, Homo sapiens
  misc_feature (7)..(7): n equals a,t,g, or c
  misc_feature (67)..(67): n equals a,t,g, or c
  misc_feature (317)..(317): n equals a,t,g, or c
  misc_feature (322)..(322): n equals a,t,g, or c
  misc_feature (335)..(335): n equals a,t,g, or c
  misc_feature (359)..(359): n equals a,t,g, or c
  misc_feature (371)..(371): n equals a,t,g, or c
gccaacntcacgggtctctgaagtgatggaaatttttaaggatatatttaataagcataaacttacnaataattacttccaaaaataaaaacaggaatattacttttacccagtgtggcttatagcatacatttgtactgaagcatatagggatgttaatgtgatcttttcctgacagattatgaaagcattatgacttgtaacaagtttccttgtatatcactaacaggtttagaagacataaatattagtgcgttttgcctacatggtgtatttaaatctattaatattttcctgctgcttttttaaaaaaatanatacncataatgtataanaactactcacagcaaagggggggnccgtttgaaagngc

SEQ ID NO: 1627 - DNA, 364 bp, Homo sapiens
  misc_feature (11)..(11): n equals a,t,g, or c
  misc_feature (14)..(14): n equals a,t,g, or c
  misc_feature (18)..(18): n equals a,t,g, or c
  misc_feature (21)..(21): n equals a,t,g, or c
  misc_feature (29)..(29): n equals a,t,g, or c
  misc_feature (72)..(73): n equals a,t,g, or c
  misc_feature (107)..(107): n equals a,t,g, or c
  misc_feature (115)..(115): n equals a,t,g, or c
  misc_feature (143)..(143): n equals a,t,g, or c
  misc_feature (161)..(161): n equals a,t,g, or c
  misc_feature (236)..(236): n equals a,t,g, or c
  misc_feature (282)..(282): n equals a,t,g, or c
  misc_feature (288)..(288): n equals a,t,g, or c
  misc_feature (298)..(298): n equals a,t,g, or c
  misc_feature (359)..(359): n equals a,t,g, or c
ggtcagtaaangtncccngcntgttcatntatacagctgacaccacaaataattttaagaaaagccaggccnntaaaacatagtagcaacattaaggggtcatctcnacttcacnagtaatctgataaaacatcagagatggnatcaaaaaagaatactanagtattatattggcttaaaaagacactttctgaaaataaactttcgaaactggttactattaacctccacccctngtgacgaaacatccatctccttgaaccgctagacgatgaacacganagctgncatcctgggngaatgctgtgagtcaaccattaccggcaattaaaaaataaatgtgcagaaacacaaaaaanaaaaa

SEQ ID NO: 1628 - DNA, 392 bp, Homo sapiens
  misc_feature (10)..(10): n equals a,t,g, or c
  misc_feature (14)..(14): n equals a,t,g, or c
  misc_feature (33)..(33): n equals a,t,g, or c
  misc_feature (95)..(95): n equals a,t,g, or c
  misc_feature (195)..(195): n equals a,t,g, or c
gcagccctgncagnctttcctcattcccttggncctcaccctgactcctcagccttccagctgcactgctattgtaggctgctctttctcgacantctcctcttattttctgtgatgtctcaggatgtttcttcttctcaggggttttccaagcttcttccacactcaggtgctcagacgtttttatggtctggnttctgaaggagatcaaaattcatatggacaggcatttgtgtattagccaagagttgctaatgcatttcttgatcataagtctcagagaaatgggatgaaagatcttagatttttatacactctgcttcaatgatttctcagcttttctgatctgaaaagaataaaggacaccttttagctaaaaaaaaaaaaaaaaa

SEQ ID NO: 1629 - DNA, 239 bp, Homo sapiens
  misc_feature (49)..(49): n equals a,t,g, or c
  misc_feature (52)..(53): n equals a,t,g, or c
  misc_feature (64)..(65): n equals a,t,g, or c
  misc_feature (107)..(107): n equals a,t,g, or c
  misc_feature (155)..(155): n equals a,t,g, or c
  misc_feature (170)..(170): n equals a,t,g, or c
  misc_feature (207)..(207): n equals a,t,g, or c
  misc_feature (216)..(216): n equals a,t,g, or c
  misc_feature (227)..(227): n equals a,t,g, or c
tttgggaaagctcccacgcctgcaggtaccggtccggaattcccgggtnttnnccacgcgtttnngagaaacaagcttgaccactatgctatcatcaagtttccgcngaccactgcccctgccatgaagaagatagaagacaacaacacacttgngttcattgtggatgntaaagccaacaagcaccagattaaacaggctgtgaanaagctgtangacattgatgnggccaaggtcaa

SEQ ID NO: 1630 - DNA, 341 bp, Homo sapiens
  misc_feature (7)..(7): n equals a,t,g, or c
  misc_feature (48)..(48): n equals a,t,g, or c
  misc_feature (54)..(54): n equals a,t,g, or c
  misc_feature (67)..(67): n equals a,t,g, or c
  misc_feature (96)..(96): n equals a,t,g, or c
  misc_feature (106)..(108): n equals a,t,g, or c
  misc_feature (124)..(124): n equals a,t,g, or c
  misc_feature (140)..(140): n equals a,t,g, or c
  misc_feature (143)..(143): n equals a,t,g, or c
  misc_feature (162)..(162): n equals a,t,g, or c
  misc_feature (193)..(193): n equals a,t,g, or c
  misc_feature (208)..(208): n equals a,t,g, or c
  misc_feature (239)..(239): n equals a,t,g, or c
  misc_feature (278)..(278): n equals a,t,g, or c
  misc_feature (296)..(296): n equals a,t,g, or c
  misc_feature (306)..(307): n equals a,t,g, or c
  misc_feature (329)..(329): n equals a,t,g, or c
gcaggcnccggtccggaattcccgggtcgacccacgcgtttttgccgncctttnagcaagacagtgngcttcaacgtgctcaaggtcaccaaggcngccggcaccnnnaagcagttccagaagntctgaggctggacatnggnccgctccccacaatgaaanaaagttattttctcattcccaaaataaaaanataaaaaagggcggncgatctagaggatccaagcttacgtacgcgngcatgcgacgtcatagctcttctatagggtcacctaaantcaattcactggcgacgntttacaacgnngtgactgggaaaaccctggcgntacccaacttaa

SEQ ID NO: 1631 - DNA, 569 bp, Homo sapiens
  misc_feature (240)..(240): n equals a,t,g, or c
  misc_feature (256)..(256): n equals a,t,g, or c
  misc_feature (294)..(294): n equals a,t,g, or c
  misc_feature (351)..(351): n equals a,t,g, or c
  misc_feature (359)..(359): n equals a,t,g, or c
  misc_feature (367)..(367): n equals a,t,g, or c
  misc_feature (377)..(377): n equals a,t,g, or c
  misc_feature (382)..(382): n equals a,t,g, or c
  misc_feature (385)..(385): n equals a,t,g, or c
  misc_feature (430)..(430): n equals a,t,g, or c
  misc_feature (467)..(467): n equals a,t,g, or c
  misc_feature (496)..(496): n equals a,t,g, or c
  misc_feature (505)..(505): n equals a,t,g, or c
  misc_feature (534)..(534): n equals a,t,g, or c
  misc_feature (549)..(549): n equals a,t,g, or c
  misc_feature (558)..(559): n equals a,t,g, or c
  misc_feature (566)..(566): n equals a,t,g, or c
gtagatacatactctgtactcaaagagcagaaaatctactaggagtgaaagacttggaaataatatatgcaccaactttaaaaataatcaagagtaagatagaattttttagatttaattggtacctttaaaaacttaaaattgacttacggttcataaatgtgggcaatttaattgaatttattttcttttctagacaatggccaagaacaaattaagagggccgaagtccaggaatgnatttcacatagccagncaaaaaaactttaaggctaaaaacaaagcaaaaccagntaccactaatcttaagaaggtgagtattagttaagcactctgactttattggttacnagcaaagnggcattgnaagctactgnacagntgnatactattactttttaaaaagggtcttcatttttcctaaaaaggnaaggatgggttcaagcatttggctaaaaaaatattanaaaaaagggagaaaaataacctccctttnttggaaacnaatggtggaaaggaataacattttaactncccaaaaaaaaaaangggggccgnnttaaggnccc

SEQ ID NO: 1632 - DNA, 669 bp, Homo sapiens
  misc_feature (311)..(311): n equals a,t,g, or c
  misc_feature (313)..(313): n equals a,t,g, or c
  misc_feature (368)..(368): n equals a,t,g, or c
  misc_feature (376)..(376): n equals a,t,g, or c
  misc_feature (505)..(505): n equals a,t,g, or c
  misc_feature (586)..(586): n equals a,t,g, or c
  misc_feature (596)..(596): n equals a,t,g, or c
  misc_feature (622)..(622): n equals a,t,g, or c
  misc_feature (645)..(645): n equals a,t,g, or c
  misc_feature (653)..(653): n equals a,t,g, or c
gcaaaatcctggaagattttggtaatgatgttgataatttcagggaaattaatcaagtacctatattgatttaaaagtgtattttattcagtagtttgaggatcttgccatggaagatactagcccagcctagcagaaaagtgcaatatgtatagcatactttgacattttaaacatgatagtccataaccattttgaaatgctgggcaaactacatgaagttatttataattaattcacagctaatcaggcattttgaaagcttaattggattcaaaaaccataatgttggaatttggtaaaattttaangntgattttactgtgaaaaggtttttataagatatacacaccctagtttaatgttgngccttggngtggatttacagattactacaggtattctgaaccaggaacacaatcaggtttcaggccagtttgatactgctgccttaattctaatatgagagtaggacatcatactaaatgttatgcagtgggactgnactgctgggaacttagcaaattaacattttcttcagacttgaaggaagggtaaataaaattggagcataggaaattgagcncaattaaggntaaacattttaaacaatggggataangcttaataaaggtgcttctaganaaactgcngaataaagactttttc

SEQ ID NO: 1633 - DNA, 283 bp, Homo sapiens
  misc_feature (279)..(283): n equals a,t,g, or c
ggtctgcgcggataaatgtcgtggagccctttttgtatggaaacgttttaagctatttaaagcctttggaaaatacaggaagctccagggctggagcacctctgagatggaattgataacatggtcttaactcaccgaaataaacaagcacgtggtgagaggagcaggcctacttgtttgttctcaggaaacttaatgaatagattactgattttcctagtcaaagttaattcttacccttggagtaaaacgaaggtgtttatcctgtgaaaaaaaaannnnn

SEQ ID NO: 1634 - DNA, 678 bp, Homo sapiens
  misc_feature (478)..(478): n equals a,t,g, or c
  misc_feature (542)..(542): n equals a,t,g, or c
  misc_feature (544)..(544): n equals a,t,g, or c
  misc_feature (614)..(614): n equals a,t,g, or c
  misc_feature (617)..(617): n equals a,t,g, or c
  misc_feature (619)..(619): n equals a,t,g, or c
  misc_feature (641)..(641): n equals a,t,g, or c
  misc_feature (659)..(659): n equals a,t,g, or c
ggattactggcctttttcatttatctataatttacctaagattacaaatcagaagtcatcttgctaccagtatttagaagccaactatgattattaacgatgtccaacccgtctggcccaccagggtccttttgacactgctctaacagccctcctctgcactcccacctgacacaccaggcgctaattcaaggaatttcttaacttcttgcttctttctagaaagagaaacagttggtaacttttgtgaattaggctgtaactactttataactaacatgtcctgctattatctgcagctgcaaggtactctggtgagtcaccacttcagggctttactccgtaacagattttgttggcatagctctggggtgggcagttttttgaaaatgggctcaaccagaaaagcccaagttcatgcagctgtgggcagagttacagttctgtggtttcatgttagttaccttatagttactgngtaattagtgccacttaatgtatgttaccaaaaataaatatatctaccccagactagatgtagnantttttggataaatggatttcctaatactggcatcctcaaagaaaggggaatgggtttttaaaaaaggaanggnanttgggaaataaggcaggatggnaaaatcattttttaaatnccggttggcccttttttgg

SEQ ID NO: 1635 - DNA, 668 bp, Homo sapiens
  misc_feature (165)..(165): n equals a,t,g, or c
  misc_feature (216)..(216): n equals a,t,g, or c
  misc_feature (276)..(276): n equals a,t,g, or c
  misc_feature (290)..(290): n equals a,t,g, or c
  misc_feature (326)..(326): n equals a,t,g, or c
  misc_feature (437)..(437): n equals a,t,g, or c
  misc_feature (460)..(460): n equals a,t,g, or c
  misc_feature (498)..(498): n equals a,t,g, or c
  misc_feature (500)..(500): n equals a,t,g, or c
  misc_feature (552)..(552): n equals a,t,g, or c
  misc_feature (556)..(556): n equals a,t,g, or c
  misc_feature (583)..(583): n equals a,t,g, or c
  misc_feature (603)..(603): n equals a,t,g, or c
  misc_feature (629)..(629): n equals a,t,g, or c
  misc_feature (647)..(648): n equals a,t,g, or c
gcttaacattttttttttgagctaaagtcagggaatcaagccatgcttaatatttaacaatcacttatatgtgtgtcgaagagtttgttttgtttgtcatgtattggtacaagcagatacagtataaactcacaaacacagatttgaaaataatgcacatatggngttcaaatttgaacctttctcatggatttttgtggtgtgggccaatatggngtttacattatataattcctgctgtggcaagtaaagcacactttttttttctcctaaaangtttttccctgggnatcctattatggatactggttttgttaattatgatnctttattttctctcctttttttaggatatagcagtaatgctattactgaaatgaatttcctttttctgaaatgtaatcattgatgcttgaatgatagaattttagtactgnaaacaggctttagtcattaatgngagagacttagaaaaaagcttaaaggggactattaaangngcctaaatgaattttgcagaactggaattcttgggttttcctacttaatacncagnaattcaaacttggattctattatgagnttaacagccttttggagggnccagcaacctttgaggttgccctaanaattttattggaaagccnnaaaggttgaaaggggatcag

SEQ ID NO: 1636 - DNA, 569 bp, Homo sapiens
  misc_feature (565)..(569): n equals a,t,g, or c
gcaggacaggccgctaaagtgtgacgagcccatcctcagcaaccgatctggagaccaccgtggcaaattcaaggtggcgtccttccgtaaaaagtatgagctcagggccccggtggctggcacgtgttaccaggccgagtgggatgactatgtgcccaaactgtacgagcagctgtctgggaagtagggggttagcttggggacctgaactgtcctggaggccccaagccatgttccccagttcaagtgttgcatgtataatagatttctcctcttcctgccccccttggcatgggtgagacctgaccaagtcagatggtagttgagggtgacttttcctgctgcctggcctttataattttactcactcactctgatttatgttttgatcaaatttgaacttcattttggggggtattttggtactgtgatggggtcatcaaattattaatctgaaaatagcaacccagaatgtaaaaaagaaaaaattggggggaaaaagaccaggtctacagtgatagagcaaagcatcaaagaatctttaaaggaggttaaaaaaaaaaannnnn

SEQ ID NO: 1637 - DNA, 715 bp, Homo sapiens
  misc_feature (457)..(457): n equals a,t,g, or c
  misc_feature (489)..(489): n equals a,t,g, or c
  misc_feature (608)..(609): n equals a,t,g, or c
  misc_feature (647)..(647): n equals a,t,g, or c
  misc_feature (677)..(677): n equals a,t,g, or c
  misc_feature (699)..(699): n equals a,t,g, or c
  misc_feature (713)..(713): n equals a,t,g, or c
gcgcgctctgctccacccgacggggctgtgtgtgctgggcctggctcgcggcgaaccgagatggcagagcagtcggacgaggccgtgaagtactacaccctagaggagattcagaagcacaaccacagcaagagcacctggctgatcctgcaccacaaggtgtacgatttgaccaaatttctggaagagcatcctggtggggaagaagttttaagggaacaagctggaggtgacgctactgagaactttgaggatgtcgggcactctacagatgccagggaaatgtccaaaacattcatcattggggagctccatccagatgacagaccaaagttaaacaagcctccggaaactcttatcactactattgattctagttccagttggtggaccaactgggtgatccctgccatctctgcagtgcccgtcgccttgatgtatcgcctatacatggcanaggactgaacacctcctcagaagtcagcgcangaagagcctgctttggacacgggagaaaagaaccattgctaactacttcaactgacagaaaccttcacttgaaacaatgattttaatatatctcttctttttcttccacattagaaacnnacaaaaagaactggccttctgcgctcaaatttttgagngggcctttatcactacttaattgagttccntaaggggaattactatatagcngactttaaaaaaantg

SEQ ID NO: 1638 - DNA, 717 bp, Homo sapiens
  misc_feature (8)..(8): n equals a,t,g, or c
  misc_feature (565)..(565): n equals a,t,g, or c
  misc_feature (603)..(603): n equals a,t,g, or c
  misc_feature (607)..(607): n equals a,t,g, or c
  misc_feature (653)..(653): n equals a,t,g, or c
  misc_feature (666)..(666): n equals a,t,g, or c
  misc_feature (694)..(694): n equals a,t,g, or c
  misc_feature (709)..(709): n equals a,t,g, or c
  misc_feature (713)..(713): n equals a,t,g, or c
ggacgatntgtctcgccgagcgcacgccttgctgccgccccgcagaaatgcttcggttacccacagtctttcgccagatgagaccggtgtccagggtactggctcctcatctcacccgggcttatgccaaagatgtaaaatttggtgcagatgcccgagccttaatgcttcaaggtgtagaccttttagccgatgctgtggccgttacaatggggccaaagggaagaacagtgattattgagcagagttggggaagtcccaaagtaacaaaagatggtgtgactgttgcaaagtcaattgacttaaaagataaatacaagaacattggagctaaacttgtcaagatgttgccaataacacaaatgaagaagctggggatggcactaccactgctactgtactgcacgctctatagccaaggaaggcttcgagaagattagcaaaggtgctaatccagtggaaatcaggagaggtgtgatggtagctgttgatgctgtaattgcttgaattaaaagcagtctaaacctgtgaccacccttgaagaaattgcacaggttgctacganttctgcaaacggagacaaagaaattggaatatcatctntgancaatggaaaaagttgaaagaagggtggcatcacaggaaaggttggnaaaacccttgaangatgaatagaaatattgaaggcttgaantttgacggggtttanttcncaac

SEQ ID NO: 1639 - DNA, 750 bp, Homo sapiens
  misc_feature (497)..(497): n equals a,t,g, or c
  misc_feature (590)..(590): n equals a,t,g, or c
  misc_feature (597)..(597): n equals a,t,g, or c
  misc_feature (647)..(647): n equals a,t,g, or c
  misc_feature (722)..(722): n equals a,t,g, or c
  misc_feature (725)..(725): n equals a,t,g, or c
  misc_feature (736)..(736): n equals a,t,g, or c
  misc_feature (738)..(738): n equals a,t,g, or c
  misc_feature (750)..(750): n equals a,t,g, or c
gattttaatgcttgcttttcccatttatagacgttgtagcagtaattgcaagaagttcttgagctgaattcctgttgtgacaacttcctataattacagtagataactttttcttttagtcgtatataacttttctataacttgtgatggacaagagatatgcttatccaataaaataagcttaaatattagatgctcttgggtcaaaatgtccttttaccaaattgacctttttatgagttctttgggtaaatactttaaagctttttatattttaaagaatacttgtaaaagcatatcacatcttaaaccagtggtgcacatgtggatttacagctcatggactctactgttcagctttaatttataaaacatatcacacatttaatgttatacagtatttacatatagtggaacatagggataactcagttttatgtaaatttttgttaagtgttgtagcctgcccagagtgacttctattttttcttctttgnctccaggtggtgaagcagtattttccaatttgaagattcatttgaaggtggctcctgccacctgctaatagcagttcaaactaaattttttgnatcaagnccctgaatggaaagtatgacgttgggtccctctgaaggttaattctgagntctcattaaaagaaatttgctttcattggttaattcttaaatgctatgcttcagaatcaatttgggtttatgccnttnccccataatgnanagcaggcttggn

SEQ ID NO: 1640 - DNA, 821 bp, Homo sapiens
  misc_feature (75)..(75): n equals a,t,g, or c
  misc_feature (274)..(274): n equals a,t,g, or c
  misc_feature (346)..(346): n equals a,t,g, or c
  misc_feature (354)..(354): n equals a,t,g, or c
  misc_feature (489)..(489): n equals a,t,g, or c
  misc_feature (548)..(548): n equals a,t,g, or c
  misc_feature (563)..(563): n equals a,t,g, or c
  misc_feature (571)..(571): n equals a,t,g, or c
  misc_feature (585)..(585): n equals a,t,g, or c
  misc_feature (588)..(588): n equals a,t,g, or c
  misc_feature (598)..(598): n equals a,t,g, or c
  misc_feature (605)..(605): n equals a,t,g, or c
  misc_feature (642)..(643): n equals a,t,g, or c
  misc_feature (661)..(661): n equals a,t,g, or c
  misc_feature (707)..(707): n equals a,t,g, or c
  misc_feature (711)..(711): n equals a,t,g, or c
  misc_feature (723)..(723): n equals a,t,g, or c
  misc_feature (737)..(737): n equals a,t,g, or c
  misc_feature (742)..(742): n equals a,t,g, or c
  misc_feature (768)..(768): n equals a,t,g, or c
  misc_feature (772)..(772): n equals a,t,g, or c
tgttccaccggtccgcattcccgggtcgcccacgcgtccggttttaagttattagtttttaaaatcagtactttntaatggaaacaacttgaccaaaaatttgtcacagaattttgagacccattaaaaaagttaaatgagaaaaaaaaaaaaaaaaagggcggccgctctagaggatccaagcttacgtacgcgtgcatgcgacgtcatagctcttctatagtgacacctaaattcaattcactggccgtcgttttacaacgtcgtgactggnaaaaccctggcgttacccaacttaatcgccttgcagcacatccccctttcgccagctggcgtaatagcgaanaggcccgnaccgatcgcccttcccaacagttgcgcagcctgaatggcgaatggacgcgccctgtacggtgcattaagcgcggcggatgtggtgggttacgcgcagcgtgaccgctacacttgccagcgccctaacgcccgctnctttcgctttcttccttcctttctcggcacggttggccggcttttccccgtcaagcttntaaattggggggctncctttaanggttccgaattaangcntttacggcancttggancccaaaaaacttggataagggtgaagggttcacggannggggccattggcctgganaaacgggtttttggcctttgacgttggaggccccggttcttaaaangggnctcttggttccnaactgggacaacanttaancctaacttggctaatcctttggattnaaanggaatttgccgaattcggctatgggttaaaaagggccggtttaacaaaa

SEQ ID NO: 1641 - DNA, 679 bp, Homo sapiens
  misc_feature (224)..(224): n equals a,t,g, or c
  misc_feature (257)..(257): n equals a,t,g, or c
  misc_feature (472)..(472): n equals a,t,g, or c
  misc_feature (545)..(545): n equals a,t,g, or c
  misc_feature (560)..(560): n equals a,t,g, or c
  misc_feature (572)..(572): n equals a,t,g, or c
  misc_feature (593)..(593): n equals a,t,g, or c
  misc_feature (617)..(617): n equals a,t,g, or c
  misc_feature (643)..(643): n equals a,t,g, or c
  misc_feature (657)..(657): n equals a,t,g, or c
  misc_feature (676)..(676): n equals a,t,g, or c
ggttattaatacatcctgttttcttcattccctgatagctatctcatttcactctactgtctcaaaattttgttttaaaataatagaaatgttttgccattattaagtaccactttattcctaacaaaaataagtactcaggacttttttttcaaaatgaaatatttatgtactgttttatggtatgtggtagagtaagtaaaatgtaatgttctcagttttgntccatatttgcattcctcttatgctttacctgnattttatcatttgtaagcagaactctagctatatggggtagaaataaaatctctgagatgaaacaaaggaatcaacatgataaaatttaggcgaagtagttaagaaatggcccttttgaatgttgaagataggaaagaaagccatatattcaaatatgtaattttcctcatttagttataatgacatctttaccaattgggcttcataaatgtgnttctttcttaatagtatcctagttccagcatatattcaacatgaattttatcattctcctcctaatggaatgncttccttatagaaangtcacgacaaantcaattggggtttttacatgncaataatggatgctaaattaaaanggtttccaggtattctggatagaagncattatggcatccntaaattttcttctccttcngga

SEQ ID NO: 1642 - DNA, 287 bp, Homo sapiens
  misc_feature (234)..(234): n equals a,t,g, or c
  misc_feature (261)..(261): n equals a,t,g, or c
  misc_feature (265)..(265): n equals a,t,g, or c
  misc_feature (273)..(273): n equals a,t,g, or c
  misc_feature (275)..(275): n equals a,t,g, or c
gggcagcacctgagggacacaaggacttgggtgcatcaggacgccttggagaagcgtggcttcctgccaccctgcaacccaccctcccagccaaggaggctgctgtggtggggatccccaggggggctttgacacagtcctctgctgtccctccactgggctaattctacacccctgtgcccctcctaggggcccatgagtcagagaggcttgccccaagtcacagccactcanatgttcgacgccccctaaggtccattncagncccacctnantttccaagaaga

SEQ ID NO: 1643 - DNA, 620 bp, Homo sapiens
  misc_feature (6)..(6): n equals a,t,g, or c
  misc_feature (113)..(113): n equals a,t,g, or c
  misc_feature (199)..(199): n equals a,t,g, or c
  misc_feature (428)..(428): n equals a,t,g, or c
  misc_feature (460)..(460): n equals a,t,g, or c
  misc_feature (475)..(475): n equals a,t,g, or c
  misc_feature (505)..(505): n equals a,t,g, or c
  misc_feature (525)..(525): n equals a,t,g, or c
  misc_feature (571)..(571): n equals a,t,g, or c
  misc_feature (593)..(593): n equals a,t,g, or c
  misc_feature (618)..(618): n equals a,t,g, or c
gcgtgnagccacggcgtgggagtagggggctgaaggcaggcagcagcggccagggccgccctctgctagccgcttgggtctcgggataccccgtttcttcctgtaggtgtggnacgtgcgtgcggcgagatggacactcccccgctctcggattcggagtcggaatccgatgaatcccttgtcacagacagagagttgnaggatgccgttttcccgagggcttctgaagccaggcctcaatgtcgtgctagaggggccgaagaaggccgtgaacgacgtgaatggcctgaagcaatgtttggcagaattcaagcgggatctggaatgggttgaaaggctcgatgtgacactgggtccggtaccggagatcggtggatctgaggcgccagcacctcataacaaggaccagaaagctgttgatccagaanacgacttccagcgagagatgagtttctatcgncaagcccagccgcantgcttgcagtcttacccgcttcatcagctnaaagtcctacaagcgacccntgatattttgcggaatggcaaattgactgagatcaaaatcgcagantgagctaacagctcatgaagtngaaagttacactgacctagaaacgnat

SEQ ID NO: 1644 - DNA, 589 bp, Homo sapiens
  misc_feature (1)..(1): n equals a,t,g, or c
  misc_feature (5)..(5): n equals a,t,g, or c
  misc_feature (14)..(14): n equals a,t,g, or c
  misc_feature (25)..(25): n equals a,t,g, or c
  misc_feature (85)..(85): n equals a,t,g, or c
  misc_feature (534)..(534): n equals a,t,g, or c
  misc_feature (544)..(544): n equals a,t,g, or c
  misc_feature (546)..(546): n equals a,t,g, or c
  misc_feature (578)..(578): n equals a,t,g, or c
  misc_feature (586)..(586): n equals a,t,g, or c
ntctntggaactcnctaggtgacantatagaaggtacgcctgcaggtaccggtccggaattcccgggtcgacccacgcgtccggnacaatggcggccttagggtccccgtcgcacacttttcgaggacttctgcgggagttgcgctacctgagcgcggccaccggccgaccctatcgcgacaccgcggcctatcggtaccttgtgaaggctttccgtgcacatcgggtcaccagtgaaaagttgtgcagagcccaacatgagcttcatttccaagctgccacctatctctgcctcctgcgtagcatccggaaacatgtggccctacatcaggaatttcatggcaagggtgagcgctcggtggaggagtctgctggcttggtgggtctcaagttgccccatcagcctggagggaagggctgggagccatgaacatggagaatatccttggatgctgcattcataggagaattgaataatttctatcaatatgtatttatcattaaattttttttaaggttaaaaaaaaaaaaaangggcggccgntntagaggatccctcggggggcccaaagtttacncgggcttncaa

SEQ ID NO: 1645 - DNA, 286 bp, Homo sapiens
  misc_feature (254)..(255): n equals a,t,g, or c
  misc_feature (262)..(262): n equals a,t,g, or c
  misc_feature (277)..(277): n equals a,t,g, or c
  misc_feature (285)..(285): n equals a,t,g, or c
gctctcctcccctacaccaacaaagaggaatggctgcaagagcccagatcacccattccgggttcactccccgcctccccaagtcagcagtcctagccccaaaccagcccagagcagggtctctctaaaggggacttgagggcctgagcaggaaagactggccctctagcttctaccctttgtccctgtagcctatacagtttagaatatttatttgttaattttattaaaatgctttaaaaaaataaaaaaannaaaaaangggcggccgttttanaggatccnt

SEQ ID NO: 1646 - DNA, 598 bp, Homo sapiens
  misc_feature (400)..(400): n equals a,t,g, or c
gccgtggttccagcgccggttttgaccgccacattaccattttttcacccgagggtcggctctaccaagtagaatatgcttttaaggctattaaccagggtggccttacatcagtagctgtcagagggaaagactgtgcagtaattgtcacacagaagaaagtacctgacaaattattggattccagcacagtgactcacttattcaagataactgaaaacattggttgtgtgatgaccggaatgacagctgacagcagatcccaggtacagagggcacgctatgaggcagctaactggaaatacaagtatggctatgagattcctgtggacatgctgtgtaaaagaattgccgatatttctcaggtctacacacagaatgctgaaatgaggcctcttgnttgttgtatgattttaattggtatagatgaagagcaaggccctcaggtatataagtgtgatcctgcaggttactactgtgggtttaaagccactgcagcgggagttaaacaaactgagtcaaccagtttcttgaaaaaaaagtgaaaagaaatttgattggacatttgacagacagtggaactgcattacatgctggt

SEQ ID NO: 1647 - DNA, 598 bp, Homo sapiens
  misc_feature (415)..(415): n equals a,t,g, or c
  misc_feature (467)..(467): n equals a,t,g, or c
  misc_feature (527)..(529): n equals a,t,g, or c
  misc_feature (573)..(573): n equals a,t,g, or c
  misc_feature (579)..(579): n equals a,t,g, or c
gctctgtggcctccatggtacccccacagggctggcctcccctagagggtgggcctcaaccacctgctcccgccacgcaccggttagtgagacagggctgccacggcaaccgtcaagcccccctcaaggtgggacagtaccccggacccatccactcactcctgagagggctccggcccagaatgggaacctcagagaagagctctaaggagaagaaaccccatagcgtcagagaggatatgtctggcttccaagagaaaggaggctccgttttgcaaagtggaggagggacgagggacaggggtttcaccagccagcaacctgggccttgtactgtctgtgtttttaaaaccactaaagtgcaagaattacattgcactgtttctccactttttattttctcttaggcttttgnttctatttcaaacatactttcttggttttctaatggagtatataaggttagncatttcacagactctggcctcctctcctgaaatccttttggatggggaaaggggaaggtnnnaaggtcccgaggggaaagggacccccagcttccctgggcccgtnacccantcaccagtcccggcgcagg

SEQ ID NO: 1648 - DNA, 585 bp, Homo sapiens
  misc_feature (84)..(84): n equals a,t,g, or c
  misc_feature (167)..(167): n equals a,t,g, or c
  misc_feature (178)..(178): n equals a,t,g, or c
  misc_feature (235)..(235): n equals a,t,g, or c
  misc_feature (388)..(388): n equals a,t,g, or c
  misc_feature (580)..(580): n equals a,t,g, or c
ggcatctttgtggacgtctttttcacaagcctccaaggctccttagattgggtcgttactaaaagtacattaaaacactcttgnttatcgaagtatattgatgtattctaaagctagtaaacttccctaacgtttaattgccctacagatgcttctcttgctgtggnttttcttttgntagtggtctgaaataattattttcctgttctattaatacatagtgtattttgcacanaaaaaattaacctggtcaatagtgattaccaaaatatatattaataatcttggcaatttttgacattaattatgaaacattttagcccacgttagttctacattattcttcacttaaactcagctactgcaaattttgtctttctgtaaatgntattaaaatatccagtgagctctttagaaggactcagtattatttcaagactatttttgaggtaattctagccttttaaaatattctacagacctacggggcttaaaagaaccccagtacccgactaaagcaaataggcaaaagacatgttggaaatgtagtatagtacttgaaacagtcactatcataggnataac

SEQ ID NO: 1649 - DNA, 325 bp, Homo sapiens
  misc_feature (4)..(5): n equals a,t,g, or c
  misc_feature (8)..(8): n equals a,t,g, or c
  misc_feature (11)..(11): n equals a,t,g, or c
  misc_feature (15)..(15): n equals a,t,g, or c
  misc_feature (325)..(325): n equals a,t,g, or c
tttnnacnaanattntatgagaactcaactttccagcatcctcctctgttctaaccacttcagaaatatatgcagctgtgatacttgtagatttatatttagcaaaatgttagcatgtatgacaagacaatgagagtaattgcttgacaacaacctatgcaccaggtatttaacattaactttggaaacaaaaatgtacaattaagtaaagtcaacatatgcaaaatactgtacattgtgaacagaagtttaattcatagtaatttcactctctgcattgacttatgagataattaatgattaaactattaatgataaaaataan

SEQ ID NO: 1650 - DNA, 571 bp, Homo sapiens
  misc_feature (83)..(83): n equals a,t,g, or c
  misc_feature (95)..(95): n equals a,t,g, or c
  misc_feature (122)..(122): n equals a,t,g, or c
  misc_feature (150)..(150): n equals a,t,g, or c
  misc_feature (160)..(160): n equals a,t,g, or c
  misc_feature (201)..(201): n equals a,t,g, or c
  misc_feature (220)..(220): n equals a,t,g, or c
  misc_feature (274)..(274): n equals a,t,g, or c
  misc_feature (291)..(291): n equals a,t,g, or c
  misc_feature (317)..(317): n equals a,t,g, or c
  misc_feature (334)..(334): n equals a,t,g, or c
  misc_feature (349)..(349): n equals a,t,g, or c
  misc_feature (352)..(352): n equals a,t,g, or c
  misc_feature (375)..(375): n equals a,t,g, or c
  misc_feature (381)..(381): n equals a,t,g, or c
  misc_feature (389)..(389): n equals a,t,g, or c
  misc_feature (402)..(402): n equals a,t,g, or c
  misc_feature (407)..(407): n equals a,t,g, or c
  misc_feature (415)..(415): n equals a,t,g, or c
  misc_feature (457)..(457): n equals a,t,g, or c
  misc_feature (489)..(489): n equals a,t,g, or c
  misc_feature (508)..(508): n equals a,t,g, or c
  misc_feature (512)..(512): n equals a,t,g, or c
  misc_feature (515)..(515): n equals a,t,g, or c
  misc_feature (562)..(562): n equals a,t,g, or c
ggtgagccacgaagaccccgaggtccagttcaagtggtacgtggacggtagtggaggtgcataatgccaagacaaagccgtgngaggagcagttnaacagcacgttccgtgtggtcagcgtnctcaccgtcctgcaccaggactggcttnacggcaggangtacaagtgcaagggtttcaaaaaaagcctccagccccatngagaaaaccatttccaaancaaggacagcccgagaaccacaggtgtacaccctgccccatccgggaggagatnaccaagaaccaggtcanccttgaactggctggtcaaaggcttntaccccagcgacattgncctggagtgggagancanccgggcagccccgagaacaactnccacancacgcctnccatgctggactnccacngcttcttntttctctacagcaagcttaccgtggacaaagaacaagttggnaacaaggggaacaatctttttcatgctttccnggatgccatgaaaggcttntttnacnaaacccctttttcgcccaaaaaaaactttttccttgtgttccccggnaaaataaat

SEQ ID NO: 1651 - DNA, 270 bp, Homo sapiens
  misc_feature (211)..(211): n equals a,t,g, or c
atttaccttgcaaaacaggactgtgcatggtgagagctgcttgcaatgtccacactcaggactctatggaaagagttcgcagctggtggtgaggctttgaggtggggctgcccttatttcactagctcctgaggggcagagctcactcagctttttaccaaatcaaaggaaggaagctttaggtgcttcgaagttcagaaaccagggtggnttgttttgcttccttttggaatggaataaaatgctcatttaattaaaaaaaaaaaaaaa

SEQ ID NO: 1652 - DNA, 369 bp, Homo sapiens
  misc_feature (339)..(340): n equals a,t,g, or c
  misc_feature (354)..(354): n equals a,t,g, or c
  misc_feature (356)..(356): n equals a,t,g, or c
  misc_feature (369)..(369): n equals a,t,g, or c
gggcgtctgttctttaccaaaaccatccatccctagaagagcacagagccctgaggggctgggctgggctgggctgagcccctggtcttctctacagttcacagaggtctttcagctcatttaatcccaggaaagaggcatcaaagctagaatgtgaatataacttttgtggaccaatactaagaataacaagaagcccagtggtgaggaaagtgcgttctcccagcactgcctcctgttttctccctctcatgtccctccagggaaaatgactttattgcttaatttctgcctttcccccctcacacatgcacttttgggcctttttttataagctgnnaaaaacaaaatacnancctacaaacctgn

SEQ ID NO: 1653 - DNA, 390 bp, Homo sapiens
  misc_feature (254)..(254): n equals a,t,g, or c
  misc_feature (306)..(306): n equals a,t,g, or c
  misc_feature (345)..(345): n equals a,t,g, or c
  misc_feature (350)..(350): n equals a,t,g, or c
  misc_feature (366)..(366): n equals a,t,g, or c
  misc_feature (386)..(386): n equals a,t,g, or c
gctgtccacgctcgcccggctcgtccgacgcgccctccgccagccgacagacacagccgcacgcactgccgtgttctccctgcggctcggacacatagtatgaccattaggtgtttcgtctcccacccattttctatggaaaaccaaggggatcgggccatgatagccactggcagctttgaagaacgggacacctttagagaagcttgatcttggaggcctcaccgtgagaccttacaaagccggattccggnagagttcctctatctcgtcttgttgctgattaaaggtgcccctgtctccagnttttctccatctcctgggacgtatcaggaaatcagcatnatggnttgggttcaaggccanaagatgtgccccctactggncact

SEQ ID NO: 1654 - DNA, 519 bp, Homo sapiens
  misc_feature (333)..(333): n equals a,t,g, or c
  misc_feature (463)..(463): n equals a,t,g, or c
  misc_feature (477)..(477): n equals a,t,g, or c
  misc_feature (487)..(487): n equals a,t,g, or c
  misc_feature (491)..(491): n equals a,t,g, or c
  misc_feature (505)..(505): n equals a,t,g, or c
gcgcaaatgcttctaaacggactcagcagatgcgtagcatttgctgcatgggttaattgagaatagaaatttgcccctggcaaatgcacacacctcatgctagcctcacgaaactggaataagccttcgaaaagaaattgtccttgaagcttgtatctgatatcagcactggattgtagaacttgttgctgattttgaccttgtattgaagttaactgttccccttggtatttgtttaataccctgtacatatctttgagttcaacctttagtacgtgtggcttggtcacttcgtggctaaggtaagaacgtgcttgtggaagacaagtctgnggcttggtgagtctgtgtggccagcagcctctgatctgtgcagggtattaacgtgtcagggctgagtgttctgggatttctctagaggctggcaagaaccagttgctttgtcttgcagggtctgtcaggnttggaaagtccaancccgtagganccangttcctttcttagntgatgtctttggcc

SEQ ID NO: 1655 - DNA, 164 bp, Homo sapiens
  misc_feature (146)..(146): n equals a,t,g, or c
  misc_feature (150)..(150): n equals a,t,g, or c
  misc_feature (152)..(152): n equals a,t,g, or c
  misc_feature (159)..(159): n equals a,t,g, or c
  misc_feature (162)..(162): n equals a,t,g, or c
cgcaaagcccgtggctgctggggaagctgccccagtccagcgcgggggcttcctggcttctgggggtgggctggcctccgaggcaaggctgcacgctggatggcctggtgcgcgctccagctcgcggtggtggtggtggtgtaggnggcngnggcaggngangg

SEQ ID NO: 1656 - DNA, 677 bp, Homo sapiens
  misc_feature (546)..(546): n equals a,t,g, or c
  misc_feature (567)..(567): n equals a,t,g, or c
  misc_feature (610)..(610): n equals a,t,g, or c
  misc_feature (647)..(647): n equals a,t,g, or c
  misc_feature (662)..(662): n equals a,t,g, or c
  misc_feature (669)..(669): n equals a,t,g, or c
  misc_feature (672)..(672): n equals a,t,g, or c
gaacagctctcctgctgctaatacttttttagtagattccttgatcagtgcctgcaggagtgacagtttttattccagcagcgccagcatgtacatgccaccacctagcgcagacatggggacctatggaatgcaaacctgtggactgctcccgtctctggccaaaagagaagtgaaccaccaaaatatgggtatgaatgtgcatccttatatacctcaagtagacagttggacagatccgaacagatcttgtcgaatagagcaacctgttacacagcaagtccccacttgctccttcaccaccaacattaaggaagaatccaattgctgcatgtattctgataagcgcaacaaactcatttcggccgaggtcccttcgtaccagaggctggtccctgagtcttgtcccgttgagaaccctgaggttcccgtccctggatattttagactgagtcagacctacgccaccgggaaaacccaagagtacaataatagccccgaaggcagctccactgtcatgctccagctcaaccctcgtggcgcggncaagccgcaactctccgctgnccagctgcagatggaaaagaagatgaacgagcccgtgagcggncaggagcccacaaagtctcccaggtggagagcccccnaggccaaaaggcggncttcccnaanagagg

SEQ ID NO: 1657 - DNA, 308 bp, Homo sapiens
aatgaaggcttctagttgcttttgagtggcgccatcttcagtgctttatgttgtattgctcgagtttgcacgtacagacgcgcggatgtgtgtccttaatcatctcttggaaacgtctactctgaaagtgtcgaccagactcaggagcctgaagaaaaaaaataattcagtcgggtctggtcgttcattcatgcgagcactcaaacatcttatgagcgttcactgtgtcaggtaggagaaacaggactagtattcactaacaagcacaaaagccttatcgtcaagaagctttatagactagcgggaga

SEQ ID NO: 1658 - DNA, 312 bp, Homo sapiens
gcccctttcacatcaaagaactactgacaacgaaggccgcgcctgcctttcccatctgtctatctatctggctggcagggaaggaaagaacttgcatgttggtgaaggaagaagtggggtggaagaagtggggtgggacgacagtgaaatctagagtaaaaccaagctggcccaaggtgtcctgcaggctgtaatgcagtttaatcagagtgccattttttttttttgttcaaatgattttaattattggaatgcacaatttttttaatatgcaaataaaaagtttaaaaacttaaaaaaaaaaaaaaaaag

SEQ ID NO: 1659 - DNA, 523 bp, Homo sapiens
  misc_feature (294)..(294): n equals a,t,g, or c
  misc_feature (364)..(364): n equals a,t,g, or c
  misc_feature (410)..(410): n equals a,t,g, or c
  misc_feature (476)..(476): n equals a,t,g, or c
  misc_feature (495)..(495): n equals a,t,g, or c
  misc_feature (499)..(499): n equals a,t,g, or c
  misc_feature (511)..(512): n equals a,t,g, or c
gaggccaagtacaagttgtgcaaagtgagaaagatctttgtgggcacaaaaggaatccctcatctggtgactcatgatgcccgcaccatccgctaccccgatcccctcatcaaggtgaatgataccattcagattgatttagagactggcaagattactgatttcatcaagttcgacactggtaacctgtgtatggtgactggaggtgctaacctaggaagaattggtgtgatcaccaacagagagaggcaccctggatcttttgacgtggttcacgtgaaagatgccaatggnaacagctttgccactcgactttccaacatttttgttattggcaagggcaacaaaccatggatttctcttncccgaggaaagggtattcgcctcaccattgctgaagagagagacanaagactggcggccaaacagagcatttgggtgaaatgggtccctgggtgacatgtcagatctttgtncgtaattaaaaatattggnggcnggattaatagcnnaaaaaaaaaat

SEQ ID NO: 1660 - DNA, 591 bp, Homo sapiens
  misc_feature (333)..(333): n equals a,t,g, or c
  misc_feature (477)..(478): n equals a,t,g, or c
  misc_feature (515)..(515): n equals a,t,g, or c
  misc_feature (522)..(522): n equals a,t,g, or c
  misc_feature (538)..(538): n equals a,t,g, or c
  misc_feature (554)..(554): n equals a,t,g, or c
  misc_feature (570)..(570): n equals a,t,g, or c
ggcgccttctccgcaccagggaagccccacccaccagaagccaagatgtccagcaagcgggccaaagccaagaccaccaagaagcggccacagcgggccacatccaatgtcttcgcaatgtttgaccagtcccagatccaggagtttaaggaggctttcaacatgattgaccagaaccgtgatggcttcattgacaaggaggacctgcacgacatgctggcctcgctggggaagaaccccacagacgaatacctggagggcatgatgagcgaggccccggggcccatcaacttcaccatgttcctcaccatgtttggggagaagctgaacggnacggaccccgaggatgtgattcgcaacgcctttgcctgcttcgacgaggaagcctcaggtttcatccatgaggaccacctccgggagctgctcaccaccatgggtgaccgcttcacagatgaggaagtggacgagatgtaccgnnaggcacccattgataagaaaggcaacttcaactacgnggagttncccgcatcctcaaacntggcgccaaggataangacgactaggtcaccncagcccccttgacaccccagc

SEQ ID NO: 1661 - DNA, 741 bp, Homo sapiens
  misc_feature (611)..(611): n equals a,t,g, or c
  misc_feature (660)..(660): n equals a,t,g, or c
  misc_feature (680)..(680): n equals a,t,g, or c
  misc_feature (690)..(690): n equals a,t,g, or c
  misc_feature (700)..(700): n equals a,t,g, or c
  misc_feature (739)..(739): n equals a,t,g, or c
gctgctccccagctctcggatacagccgacaccatgggtttcggagacctgaaaagccctgccggcctccaggtgctcaacgattacctggcggacaagagctacatcgaggggtatgtgccatcacaagcagatgtggcagtatttgaagccgtgtccagcccaccgcctgccgacttgtgtcatgccctacgttggtataatcacatcaagtcttacgaaaaggaaaaggccagcctgccaggagtgaagaaagctttgggcaaatatggtcctgccgatgtggaagacactacaggaagtggagctacagatagtaaagatgatgatgacattgacctctttggatctgatgatgaggaggaaagtgaagaagcaaagaggctaagggaagaacgtcttgcacaatatgaatcaaagaaagccaaaaaacctgcacttgttgccaagtcttccatcttactagatgtgaaaccttgggatgatgagacagatatggcgaaattagaggagtgcgtcagaagcattcaagcagacggcttaatctggggctcatctaaactagttccagtgggatacggaattaagaaactttcaaatacagtgtgtantttgaagatgataaagttggaacagatatgctggaggacagatcactgnttttgaggactatgtgcagnccatggatgnggctgctttnaacaagattaaaatccatcctggatcatggcattaaatnaa

SEQ ID NO: 1662 - DNA, 455 bp, Homo sapiens
  misc_feature (1)..(1): n equals a,t,g, or c
  misc_feature (186)..(186): n equals a,t,g, or c
  misc_feature (258)..(258): n equals a,t,g, or c
  misc_feature (266)..(266): n equals a,t,g, or c
  misc_feature (293)..(293): n equals a,t,g, or c
  misc_feature (297)..(297): n equals a,t,g, or c
  misc_feature (299)..(299): n equals a,t,g, or c
  misc_feature (308)..(308): n equals a,t,g, or c
  misc_feature (326)..(326): n equals a,t,g, or c
  misc_feature (330)..(330): n equals a,t,g, or c
  misc_feature (333)..(333): n equals a,t,g, or c
  misc_feature (350)..(350): n equals a,t,g, or c
  misc_feature (370)..(370): n equals a,t,g, or c
  misc_feature (418)..(418): n equals a,t,g, or c
  misc_feature (428)..(428): n equals a,t,g, or c
  misc_feature (434)..(434): n equals a,t,g, or c
  misc_feature (451)..(451): n equals a,t,g, or c
ntttcgcgatgcctctacacaagtatcccgtgtggctctggaagcggttgcagctgcggcagggcatctgttcccgcctgcccggctactacctgcgctccctggaggaggagcggacgcccactcccgtgcactataggcctcatggggccaagttcaagatcaaccccaagaacgggcagtgtnagcgtgtggaggacgtgcccattcccatctactttccccccgaatcccagcggtggttgtggtcaggtgagngctggatnctgggccaaatatatgccaacaacganaagntntccaagagnctgaagaaagtgtggaanccanagntgtttgagcgagagttntacagtgagatcttggacangaaggtcacaagtgactgtgaccatgcggaccctggacctcatcgatnaggcttacgnctcganttttacatcctcaaggnaagc

SEQ ID NO: 1663 - DNA, 674 bp, Homo sapiens
  misc_feature (654)..(654): n equals a,t,g, or c
  misc_feature (672)..(674): n equals a,t,g, or c
ggctgtctacaaggctctgagtgaccaccacatctacctggaaggcaccttgctgaagcccaacatggtcaccccaggccatgcttgcactcagaagttttctcatgaggagattgccatggcgaccgtcacagcgctgcgccgcacagtgccccccgctgtcactgggatcaccttcctgtctggaggccagagtgaggaggaggcgtccatcaacctcaatgccattaacaagtgccccctgctgaagccctgggccctgaccttctcctacggccgagccctgcaggcctctgccctgaaggcctggggcgggaagaaggagaacctgaaggctgcgcaggaggagtatgtcaagcgagccctggccaacagccttgcctgtcaaggaaagtacactccgagcggtcaggctggggctgctgccagcgagtccctcttcgtctctaaccacgcctattaagcggaggtgttcccaggctgcccccaacactccaggccctgccccctcccactcttgaagaggaggccgcctcctcggggctccaggctggcttgcccgcgctctttcttccctcgtgacagtggtgtgtggtgtcgtctgtgaatgctaagtccatcaccctttccggcacactggccaataaacagctntttaagggggaaaaaaannn

SEQ ID NO: 1664 - DNA, 702 bp, Homo sapiens
  misc_feature (11)..(12): n equals a,t,g, or c
  misc_feature (22)..(22): n equals a,t,g, or c
  misc_feature (27)..(27): n equals a,t,g, or c
  misc_feature (59)..(59): n equals a,t,g, or c
  misc_feature (64)..(64): n equals a,t,g, or c
  misc_feature (72)..(72): n equals a,t,g, or c
  misc_feature (74)..(74): n equals a,t,g, or c
  misc_feature (81)..(82): n equals a,t,g, or c
  misc_feature (539)..(539): n equals a,t,g, or c
  misc_feature (599)..(599): n equals a,t,g, or c
  misc_feature (650)..(650): n equals a,t,g, or c
  misc_feature (664)..(664): n equals a,t,g, or c
  misc_feature (679)..(679): n equals a,t,g, or c
  misc_feature (685)..(685): n equals a,t,g, or c
  misc_feature (689)..(689): n equals a,t,g, or c
gaaatggtccnngagagctgancaggnaagatgtgggacttcaccgaaaaccagaccgnagagntcaaggangncttccanntgtttgaccgaacaggtgatggcaagatcctgtacagccagtgtggggatgtgatgagggccctgggccagaaccctaccaacgccgaggtgctcaaggtcctggggaaccccaagagtgatgagatgaatgtgaaggtgctggactttgagcactttctgcccatgctgcagacagtggccaagaacaaggaccagggcacctatgaggattatgtcgaaggacttcgggtgtttgacaaggaaggaaatggcaccgtcatgggtgctgaaatccggcatgttcttgtcacactgggtgagaagatgacagaggaagaagtagagatgctggtggcagggcatgaggacagcaatggttgtatcaactatgaagcgtttgtgaggcatatcctgtcggggtgacgggcccatggggcggagctcgtccgcatggtgctgaatggctgaggaccttnccagtctccccagagtccgtgcctttccctgggtgaattttggatctagcctaaagtttncctaggctttcttgctcaacaactttcccatcttgctctcttggatgatgnttgccgcagcattnaccaaataaacttgnttcttntggnccttcaaaaaaaa

SEQ ID NO: 1665 - DNA, 321 bp, Homo sapiens
  misc_feature (4)..(4): n equals a,t,g, or c
  misc_feature (195)..(195): n equals a,t,g, or c
  misc_feature (204)..(204): n equals a,t,g, or c
  misc_feature (262)..(262): n equals a,t,g, or c
  misc_feature (297)..(297): n equals a,t,g, or c
  misc_feature (303)..(303): n equals a,t,g, or c
  misc_feature (315)..(315): n equals a,t,g, or c
  misc_feature (318)..(318): n equals a,t,g, or c
tcangaagtcgacaagatggtagaagacgaagtgggaatagaaatcgatcaagaagtgggggccacaaacggagttttgactgagtatttgatagttaatctaccagtgtgagcttgcctatttctgcctaatcatgtacattatccaccaaaaattaggtcatcatagttgaggtatgtgtctgctatttgcanagaagttgntcgtatttttttaaaaagtatttcacaagaatggaacaaatctacttatccagttatncctttgaataaaaaaacctccttttattgtcaaanaaaaanaaaaaagggcgnccnttt

SEQ ID NO: 1666 - DNA, 710 bp, Homo sapiens
  misc_feature (574)..(574): n equals a,t,g, or c
  misc_feature (627)..(627): n equals a,t,g, or c
  misc_feature (681)..(681): n equals a,t,g, or c
  misc_feature (688)..(688): n equals a,t,g, or c
  misc_feature (691)..(691): n equals a,t,g, or c
  misc_feature (705)..(705): n equals a,t,g, or c
ggccctgctctcccagaggctcacgccctaggcaccctttctgcacagcagccaccccccgccgctgccaccacctccagcaccagcctgcccttctcccctgactcccctggcctcctgcccaacttcccggcgcccccaccagaggggctgatgttgtcacccgcggccgtgcctgtctggtcagcagggctggaactaagcgcaggaacagaggggctgctggaagcggaaaaggggctggggacacaggccccccacaccgtgctgaggctgccagaccccgaccctgaggggctgctcctgggggccaccgcagggggtgaggttgacgaggggttggaagctgaggccaaggttctgacccagctccagtcggtgcctgtggaggagcccttggaactgtgacccagtgtggccccgtggcctctcccgacattggtgctgaagacgcagggacaggaatgggaggggggagccccagaaatgcggttgctgaagaccccagtcaccacatccttctgcctgggtggcctctccaagccctggtggtgctgggggttggatccccggncactctgtccaggtctccatccccctttggatgggaggcctctctgttacagnccttcccatgctgggccctggcatatacgtgggggactcaaggtcctgactcangggcccntgnccccttcacttggnactag

SEQ ID NO: 1667 - DNA, 611 bp, Homo sapiens
  misc_feature (14)..(14): n equals a,t,g, or c
  misc_feature (28)..(28): n equals a,t,g, or c
  misc_feature (36)..(36): n equals a,t,g, or c
  misc_feature (75)..(75): n equals a,t,g, or c
  misc_feature (87)..(87): n equals a,t,g, or c
  misc_feature (215)..(215): n equals a,t,g, or c
  misc_feature (273)..(273): n equals a,t,g, or c
  misc_feature (275)..(275): n equals a,t,g, or c
  misc_feature (278)..(278): n equals a,t,g, or c
  misc_feature (340)..(340): n equals a,t,g, or c
  misc_feature (554)..(554): n equals a,t,g, or c
  misc_feature (568)..(568): n equals a,t,g, or c
  misc_feature (610)..(610): n equals a,t,g, or c
ggaagttggagagncaccgggcccaggncaccctcncgggcggacccaagcagtgagggcctgcagccggccggncagggcagcggnaggcgcggcccggacctacgggaggaagccccgagccctcggcgggctgcgagcgactccccggcgatgcctcacaactccatcagatctggccatggagggctgaaccagctgggaggggcctttgngaatggcagacctctgccggaagtggtccgtcagcgcatcgtagacctggcccaccangntgntaggcctgcgacatctctcgccagctccgcgtcagccatggctgcgtcagcaagatccttgncaggtactacgagactggcagcatccggcctggagtgatagggggctccaagcccaaggtggccacccccaaggtggtggagaagattggggactacaaacgccagaaccctaccatgtttgcctgggagatccgagaccggcttctggctgaggcgtctgtgacaatgacacttgtgcccagtgtcaagcttcattaatagaatcatccggancaaagtgcagcaancattcaactcctatggacaagtgcgtgggcacaagtccttgng

SEQ ID NO: 1668 - DNA, 539 bp, Homo sapiens
  misc_feature (3)..(3): n equals a,t,g, or c
  misc_feature (397)..(397): n equals a,t,g, or c
  misc_feature (428)..(428): n equals a,t,g, or c
  misc_feature (530)..(531): n equals a,t,g, or c
  misc_feature (533)..(533): n equals a,t,g, or c
  misc_feature (535)..(536): n equals a,t,g, or c
  misc_feature (539)..(539): n equals a,t,g, or c
ggnaagacgcggtcgtaagggctgaggatttttggtccgcacgctcctgctcctgactcaccgctgccgctctcgccgaggaacagtcggtcaggaagcccgcgcgcaacagccatggcttttaaggataccggaaaaacacccgtggagccggaggtggcaattcaccgaattcgaatcaccctaacaagccgcaacgtaaaatccttggaaaaggtgtgtgctgacttgataagaggcgcaaaagaaaagaatctcaaagtaaaaggaccagttcgaatgcctaccaagactttgagaatcactacaagaaaaactccttgtggggaaggtctaagacgtgggaatcggttccagatgagaattcacaagccgaactcaatggactttgcacagnccttctgagattggttaaagcagattacttncatcagtaattgagccaggaattgaagtgggaagtcaccattgcagaatgcttaaagtcaacctatttttaaataaaattgatgacccagttggttaaaaannanannctn

SEQ ID NO: 1669 - DNA, 614 bp, Homo sapiens
  misc_feature (8)..(8): n equals a,t,g, or c
  misc_feature (17)..(17): n equals a,t,g, or c
  misc_feature (23)..(23): n equals a,t,g, or c
  misc_feature (35)..(35): n equals a,t,g, or c
  misc_feature (48)..(48): n equals a,t,g, or c
  misc_feature (129)..(129): n equals a,t,g, or c
  misc_feature (180)..(180): n equals a,t,g, or c
  misc_feature (186)..(186): n equals a,t,g, or c
  misc_feature (201)..(202): n equals a,t,g, or c
  misc_feature (204)..(204): n equals a,t,g, or c
  misc_feature (209)..(209): n equals a,t,g, or c
  misc_feature (231)..(231): n equals a,t,g, or c
  misc_feature (234)..(234): n equals a,t,g, or c
  misc_feature (350)..(350): n equals a,t,g, or c
  misc_feature (354)..(354): n equals a,t,g, or c
  misc_feature (384)..(384): n equals a,t,g, or c
  misc_feature (386)..(386): n equals a,t,g, or c
  misc_feature (422)..(422): n equals a,t,g, or c
  misc_feature (482)..(482): n equals a,t,g, or c
  misc_feature (509)..(509): n equals a,t,g, or c
  misc_feature (551)..(551): n equals a,t,g, or c
  misc_feature (553)..(553): n equals a,t,g, or c
  misc_feature (577)..(577): n equals a,t,g, or c
  misc_feature (579)..(579): n equals a,t,g, or c
  misc_feature (593)..(593): n equals a,t,g, or c
gttttgtntttccgtgnagctgncgccatgaaggncgagctgtgcagntttagcgggtacaagatctaccccggacacggtaggcgctacgccaggaccgacgggaaggttttccagtttcttaatgcnaaatgcgagtcggctttcctttccaagaggaatccttgtcagataaactgnactgtnctctacagaaggaannanaaaangggacagtcggaagaaattcanaanaaaagaacccgccgagcagtcaaattccagagggccattactggtgcatctcttgctgatataatggccaagaggaatcataaacctgaagttagaaaggctcaacgagaacaagntatnagggctgctaaagaagcaaaaaaggctaancnagcatctaaaaagactgcaatggctgctgctaaggnacctaccaaggcagcacctaagcaaaagattgtgaagcctgtgaaagtttcagctccccnagttgatggaaaacgcttaactggcanattagatttttaaataaagattggattataactcttaaacananaaaaaaaggccggcctctctaaanancccttgaggggccnaaatttacccgggcttgccac

SEQ ID NO: 1670 - DNA, 553 bp, Homo sapiens
  misc_feature (3)..(3): n equals a,t,g, or c
  misc_feature (506)..(506): n equals a,t,g, or c
  misc_feature (526)..(526): n equals a,t,g, or c
  misc_feature (535)..(535): n equals a,t,g, or c
  misc_feature (543)..(543): n equals a,t,g, or c
  misc_feature (545)..(545): n equals a,t,g, or c
ggncaatgctggtggctttgattgagttctgttacaagtcaagggccgaggcgaaacgaatgaaggtggcaaagaatgcacagaatattaacccatcttcctcgcagaattcacagaattttgcaacttataaggaaggttacaacgtatatggcatcgaaagtgttaaaatttaggggatgaccttgaatgatgccatgaggaacaaggcaaggctgtcaattacaggaagtactggagaaaatggacgtgttatgactccagaatttcccaaagcagtgcatgctgtcccttacgtgagtcctggcatgggaatgaatgtcagtgtgactgatctctcgtgattgataagaaccttttgagtgccttacacaatggttttcttggtgtttattgtcaaagtggtgagaaggcattccagtatcttgaagacttttctttcagcccaagaattcttaaatatggggagttcatcttgaattgtaaggaatggattaattaaaacncaacatctttttctacttgngtacggccnaaacgcgngnggacatgc

SEQ ID NO: 1671 - DNA, 516 bp, Homo sapiens
  misc_feature (9)..(9): n equals a,t,g, or c
  misc_feature (13)..(13): n equals a,t,g, or c
  misc_feature (84)..(85): n equals a,t,g, or c
  misc_feature (288)..(288): n equals a,t,g, or c
  misc_feature (305)..(305): n equals a,t,g, or c
  misc_feature (368)..(368): n equals a,t,g, or c
  misc_feature (379)..(379): n equals a,t,g, or c
  misc_feature (385)..(385): n equals a,t,g, or c
  misc_feature (450)..(450): n equals a,t,g, or c
  misc_feature (474)..(474): n equals a,t,g, or c
  misc_feature (480)..(480): n equals a,t,g, or c
  misc_feature (498)..(498): n equals a,t,g, or c
  misc_feature (511)..(511): n equals a,t,g, or c
gatcatggngcangatcaaggtgaaaaggagaaccccatgcgggaacttcgcatccgcaaactctgtctcaacatctgtgttgnngagagtggagacagactgacgcgagcagccaaggtgttggagcagctcacagggcagacccctgtgttttccaaagctagatacactgtcagatcctttggcatccggagaaatgaaaagattgctgtccactgcacagttcgaggggccaaggcagaagaaatcttggagaagggtctaaaggtgcggtagtatgagttaanaaaaaacaacttctcanatactggaaactttggttttgggatccaggaacacatcgatctgggtatcaaatatgacccangcattggtatntacggnctggacttctatgtggtgctggtaatgccaggtttcagcatcgcagacaagaagcgcatgacaangcttgcattgggggccaatcacanaatcancatgtaggaggtcatgcnctggtttcagcanaagtt

SEQ ID NO: 1672 - DNA, 385 bp, Homo sapiens
  misc_feature (123)..(123): n equals a,t,g, or c
  misc_feature (274)..(274): n equals a,t,g, or c
  misc_feature (306)..(306): n equals a,t,g, or c
  misc_feature (342)..(342): n equals a,t,g, or c
  misc_feature (363)..(363): n equals a,t,g, or c
  misc_feature (368)..(368): n equals a,t,g, or c
  misc_feature (376)..(376): n equals a,t,g, or c
gggtcgacccacgcgtccggttaagcattgtttaaaaatactagtaagtcataattatgcagaattttcacaaagtttaatgcacagagaaagcatatcatttcagttactgatacatcttancactactttcttttaaaacagacatttaacatacacaagttatagtagcagtatgggcttctcctcccattggcaattaaatgcttttattttcttctggaaaagatgatgtggaccaacaggtatcagacttgccaacaaggtcggtagntcttcccagcatgacatctgagcactggaggnaagaagaaagtttaaattgttttaaaggactatganttatcacaccaaattttattnagganaaaaaagnaatgggttc

SEQ ID NO: 1673 - DNA, 558 bp, Homo sapiens
  misc_feature (336)..(336): n equals a,t,g, or c
  misc_feature (358)..(358): n equals a,t,g, or c
  misc_feature (396)..(396): n equals a,t,g, or c
  misc_feature (414)..(414): n equals a,t,g, or c
  misc_feature (418)..(418): n equals a,t,g, or c
  misc_feature (434)..(434): n equals a,t,g, or c
  misc_feature (453)..(453): n equals a,t,g, or c
  misc_feature (470)..(470): n equals a,t,g, or c
  misc_feature (504)..(504): n equals a,t,g, or c
  misc_feature (517)..(517): n equals a,t,g, or c
  misc_feature (523)..(523): n equals a,t,g, or c
  misc_feature (531)..(531): n equals a,t,g, or c
gggtcgacccacgcgtccgtgcctggtatactaaaagctgtacatatgtaatgaacacaattttctgagattggaaataagtatggacacattaaatcatcaccgcgcctggccccttctttgaatgggcctccttgcgtttccgtttcaatgccccgtgctacttttttgggagccccaaggctgtactgtttgattgactcctttttttcccctttctttttaacctaaattaaagctgccactgcagagccccgccatggaagacacgccgttggtggatatcgaagcagaagacggaggtggtgtgcggggtccccacccaggtggtgtgtnacggccttcagcagtcacatcnggtggtggtgacccatttgggaaagagggcaccggttntcccgggagcccagcagntggnccatgaagttcacaanctgtgctcaacacaaaatncttctgggggcagagancccctcatccaagtctttggcaaaaaaccggtancgtttgtgtttcnaaaagntggaaacnagcatcctcccgccgtggcgtgaagac

SEQ ID NO: 1674 - DNA, 409 bp, Homo sapiens
  misc_feature (156)..(156): n equals a,t,g, or c
  misc_feature (221)..(221): n equals a,t,g, or c
  misc_feature (257)..(257): n equals a,t,g, or c
  misc_feature (306)..(306): n equals a,t,g, or c
  misc_feature (356)..(356): n equals a,t,g, or c
  misc_feature (378)..(378): n equals a,t,g, or c
  misc_feature (393)..(393): n equals a,t,g, or c
  misc_feature (396)..(396): n equals a,t,g, or c
  misc_feature (404)..(404): n equals a,t,g, or c
gggtcgacccacgcgtccgtcacactggagagaaaccctatgagtgtaagcaatgtggaaaagccttcagatctacctcacacctttgaaaacatggtaggactcacactggagagaaaccctatgaatgtaagcaatgtgggaaagccttcaganctgtcaaaaattgttgtaattcatgaaaggacacacactggagagaaaccctgtgaatgtaaganatgtgggaaagcgttccatgaatttctcttctttgncaaatacatgaaaggatgcacagaggagagaagctctgtgaatgtaagncattgtgggaaagcattccatgacctgccaagatcccttggaatacatgncaagtaacacacaatggagagnaaccccatgtatgtnaanaatgccgnaaaag

SEQ ID NO: 1675 - DNA, 438 bp, Homo sapiens
  misc_feature (110)..(110): n equals a,t,g, or c
  misc_feature (283)..(283): n equals a,t,g, or c
  misc_feature (377)..(377): n equals a,t,g, or c
  misc_feature (382)..(382): n equals a,t,g, or c
  misc_feature (400)..(400): n equals a,t,g, or c
  misc_feature (423)..(423): n equals a,t,g, or c
  misc_feature (436)..(436): n equals a,t,g, or c
gggtcgacccacgcgtccgcccacgcgtccgataaattcacttgcagctgatggaaaactacttaaactcaactctcgatctacactggccatggattgggacagtgaantcggagactttactatgatgagcaagaatctgaggcctacgagaagcatgtgagcatgttgcagcctcagaagaagaagaagaccacagtggccctggagagactgcatcgagctcttcaccaccatggagacccttggggaagcatgacccctggtactgtcccaactgtangaagcatcaacaggccacaaaaaatttggacctatggtccttgcccaagatcctggtggttccacttcaaacgtttcttcctaacaaacagtgnccggnagggataagctcgacacntggttagaatttcccatccaganggttggaacttgntt

SEQ ID NO: 1676 - DNA, 416 bp, Homo sapiens
  misc_feature (154)..(154): n equals a,t,g, or c
  misc_feature (160)..(163): n equals a,t,g, or c
  misc_feature (217)..(217): n equals a,t,g, or c
  misc_feature (338)..(338): n equals a,t,g, or c
  misc_feature (363)..(363): n equals a,t,g, or c
  misc_feature (374)..(374): n equals a,t,g, or c
  misc_feature (400)..(400): n equals a,t,g, or c
  misc_feature (414)..(414): n equals a,t,g, or c
gggttcgacccacgcgtccgggaaaggtatacagagataaatattggtacttgagtcattagctttcaaagaagcctggggtaatggaggaaaggtaagaattgattctgacagaatcttgagatgggcagaattaacatctggaataggtcanagtgtnnnnatttaccttacctgtgtccaggatggccaggccatgttatgggatctcaacgangtcaaacacctttacacgctagatggtggggacatcatcaacgccctgtgcttcagccctaaccgctactggctgtgtgctgccacaggccccagcattcaagatctggggtttagagggnaaagatcattgtagatgaactgaancaagaattatncagtaccagcagcaagtcagaaccancccatgcactgccngg

SEQ ID NO: 1677 - DNA, 580 bp, Homo sapiens
  misc_feature (297)..(298): n equals a,t,g, or c
  misc_feature (329)..(329): n equals a,t,g, or c
  misc_feature (348)..(348): n equals a,t,g, or c
  misc_feature (361)..(361): n equals a,t,g, or c
  misc_feature (386)..(386): n equals a,t,g, or c
  misc_feature (390)..(390): n equals a,t,g, or c
  misc_feature (393)..(393): n equals a,t,g, or c
  misc_feature (397)..(398): n equals a,t,g, or c
  misc_feature (434)..(434): n equals a,t,g, or c
  misc_feature (446)..(446): n equals a,t,g, or c
  misc_feature (448)..(448): n equals a,t,g, or c
  misc_feature (453)..(453): n equals a,t,g, or c
  misc_feature (457)..(457): n equals a,t,g, or c
  misc_feature (491)..(491): n equals a,t,g, or c
  misc_feature (516)..(516): n equals a,t,g, or c
  misc_feature (550)..(550): n equals a,t,g, or c
  misc_feature (558)..(558): n equals a,t,g, or c
  misc_feature (574)..(574): n equals a,t,g, or c
  misc_feature (579)..(579): n equals a,t,g, or c
gggtcgacccacgcgtccgcccacgcgtccggaaaccttgcctgtgactttagaaagggcttttgattattgttttttcttcttgctcttgaaagtaatctggtcccagggaattactggtttaactgaacatctccagaattatttaaggtgtcaaaatatataaccttcacattgaaagataattttaatttatgggcataataaaaatttgaatcattcaggtaattttcaaaaaatggagaccatttgtctttaactggaagtatatgtttaagatcatagtctaccctagtnnggtgctttgccacaaatgatttccggaaganggttccttttaagataaangacttcagaggancatgtttccagttactggccacaangacnttnattnngggcccccccgggaccggttggttccccaaatagcnacttcccccatnangggcncagnacccatagttaaaggcaccaggggccaccttggncccggttggtttaaattggggtggncccaggattaaggatttattaacccggtgggagncagtaaanggggggcctttgttgnccagna

SEQ ID NO: 1678 - DNA, 547 bp, Homo sapiens
  misc_feature (111)..(111): n equals a,t,g, or c
  misc_feature (157)..(157): n equals a,t,g, or c
  misc_feature (275)..(275): n equals a,t,g, or c
  misc_feature (325)..(325): n equals a,t,g, or c
  misc_feature (365)..(365): n equals a,t,g, or c
  misc_feature (379)..(379): n equals a,t,g, or c
  misc_feature (383)..(383): n equals a,t,g, or c
  misc_feature (387)..(387): n equals a,t,g, or c
  misc_feature (391)..(391): n equals a,t,g, or c
  misc_feature (393)..(393): n equals a,t,g, or c
  misc_feature (407)..(407): n equals a,t,g, or c
  misc_feature (417)..(417): n equals a,t,g, or c
  misc_feature (421)..(421): n equals a,t,g, or c
  misc_feature (427)..(427): n equals a,t,g, or c
  misc_feature (438)..(438): n equals a,t,g, or c
  misc_feature (487)..(487): n equals a,t,g, or c
  misc_feature (527)..(527): n equals a,t,g, or c
  misc_feature (533)..(533): n equals a,t,g, or c
  misc_feature (542)..(542): n equals a,t,g, or c
  misc_feature (545)..(545): n equals a,t,g, or c
gggtcgacccacgcgtccggagcccgcagcaggtctcctggagctgctccaccgaagcggaattctccatgcccgagcggtctgtggggaagacgacagcagtgaggcggnactccccgagctcctctgaggagaaccggagtctgcgaggactggncaggcaatgcagcctctccctgaagccccccagaaggccgatggggaaggagaaggagtgccataccttctcccaggcctctgccccaagagcaggaggtgcctgaaagctgggagcntgggctcagcagggctggttcaccttcccatcccgtaagaccactttggntttccttcagcaggccaaacatgggccagaattccctggntttttgctgttgtnattncctntggncntggggatgcctttncccctttctntggnctgggnaaaattttaantgttcctttggaagggccccaaattcaagtgttaaattgctttccccangtttcccccagggcagaaaaaattgttttgtggtttcctngggttnaaggttttnaangt

SEQ ID NO: 1679 - DNA, 581 bp, Homo sapiens
  misc_feature (8)..(9): n equals a,t,g, or c
  misc_feature (39)..(39): n equals a,t,g, or c
  misc_feature (60)..(60): n equals a,t,g, or c
  misc_feature (89)..(89): n equals a,t,g, or c
  misc_feature (108)..(108): n equals a,t,g, or c
  misc_feature (133)..(133): n equals a,t,g, or c
  misc_feature (143)..(143): n equals a,t,g, or c
  misc_feature (149)..(149): n equals a,t,g, or c
  misc_feature (159)..(159): n equals a,t,g, or c
  misc_feature (164)..(164): n equals a,t,g, or c
  misc_feature (190)..(190): n equals a,t,g, or c
  misc_feature (223)..(223): n equals a,t,g, or c
  misc_feature (232)..(232): n equals a,t,g, or c
  misc_feature (244)..(244): n equals a,t,g, or c
  misc_feature (276)..(276): n equals a,t,g, or c
  misc_feature (288)..(288): n equals a,t,g, or c
  misc_feature (325)..(325): n equals a,t,g, or c
  misc_feature (344)..(344): n equals a,t,g, or c
  misc_feature (361)..(361): n equals a,t,g, or c
  misc_feature (364)..(364): n equals a,t,g, or c
  misc_feature (367)..(367): n equals a,t,g, or c
  misc_feature (374)..(374): n equals a,t,g, or c
  misc_feature (387)..(387): n equals a,t,g, or c
  misc_feature (401)..(402): n equals a,t,g, or c
  misc_feature (406)..(407): n equals a,t,g, or c
  misc_feature (435)..(435): n equals a,t,g, or c
  misc_feature (437)..(437): n equals a,t,g, or c
  misc_feature (444)..(445): n equals a,t,g, or c
  misc_feature (449)..(449): n equals a,t,g, or c
  misc_feature (451)..(451): n equals a,t,g, or c
  misc_feature (459)..(459): n equals a,t,g, or c
  misc_feature (461)..(462): n equals a,t,g, or c
  misc_feature (464)..(464): n equals a,t,g, or c
  misc_feature (475)..(476): n equals a,t,g, or c
  misc_feature (480)..(480): n equals a,t,g, or c
  misc_feature (484)..(484): n equals a,t,g, or c
  misc_feature (504)..(504): n equals a,t,g, or c
  misc_feature (506)..(506): n equals a,t,g, or c
  misc_feature (510)..(510): n equals a,t,g, or c
  misc_feature (521)..(521): n equals a,t,g, or c
  misc_feature (581)..(581): n equals a,t,g, or c
ggagtcgnnccacgcgtccggggggaccttgatagaganctttataaacttctttctctntaataaagacttgtcttacaccgtgctgncattaaaggcgtgttctcnagagtttcagtcacctaagtacacncacaaaacantatgantatggagatnttccnttacccctcaactttaatttgcccanttatacctcagtgttgtagcagtactgtgatanctggtcacntgctttgagctnacgatgccctctgtactgacctgaagagaccnaagagtccttcncgttttgagattgaatcatagcctgcagtggtccctnggtttatgtcctgtgcctnatgtaaaagtgactaanggntcntgggtgnatggggtagcatngggataagctttanngggnnttcttgaatgccttggaccaaaaaccanangagatcnngggngngaaagaananntnacaatggggtnnattncagncagggggtcttagaacaacnangggntgaagggggcncaggattgggggttccgaactccaaggaccattgggggaaaaccttcccaaaagggcctn

SEQ ID NO: 1680 - DNA, 603 bp, Homo sapiens
  misc_feature (345)..(345): n equals a,t,g, or c
  misc_feature (410)..(410): n equals a,t,g, or c
  misc_feature (425)..(425): n equals a,t,g, or c
  misc_feature (434)..(434): n equals a,t,g, or c
  misc_feature (458)..(458): n equals a,t,g, or c
  misc_feature (468)..(468): n equals a,t,g, or c
  misc_feature (485)..(486): n equals a,t,g, or c
  misc_feature (495)..(495): n equals a,t,g, or c
  misc_feature (539)..(539): n equals a,t,g, or c
  misc_feature (556)..(557): n equals a,t,g, or c
  misc_feature (586)..(586): n equals a,t,g, or c
  misc_feature (598)..(598): n equals a,t,g, or c
gcggacgcgtgggcggcgaacgcggagagcacgccatgaaggcctcgggcacgctacgagagtacaaggtagtgggtcgctgcctgcccacccccaaatgccacacgccgcccctctaccgcatgcgaatctttgcgcctaatcatgtcgtcgccaagtcccgcttctggtactttgtatctcagttaaagaagatgaagaagtcttcaggggagattgtctactgtgggcaggtgtttgagaagtcccccctgcgggtgaagaacttcgggatctggctgcgctatgactcccggagcggcacccacaacatgtaccgggaataccgggacctgaccaccgcangcgctgtcacccagtgctacccgagacatgggtgcccggcaccgcgcccgacccactccattcanatcatgaaagtggangaagatcgnggccagcaagtgcccgtcggcggntgtcaagcangtttcacgaacttcaannatcaagttncccgttgccccaccggggtccttgcgcccgtcagcacaaagccncgctttaaccacccaannaaggccctaacaccttttttttaaggtgnatgggccccttntttcc

SEQ ID NO: 1681 - DNA, 471 bp, Homo sapiens
  misc_feature (118)..(118): n equals a,t,g, or c
  misc_feature (212)..(212): n equals a,t,g, or c
  misc_feature (285)..(285): n equals a,t,g, or c
  misc_feature (297)..(297): n equals a,t,g, or c
  misc_feature (336)..(336): n equals a,t,g, or c
  misc_feature (368)..(368): n equals a,t,g, or c
  misc_feature (371)..(371): n equals a,t,g, or c
  misc_feature (391)..(391): n equals a,t,g, or c
  misc_feature (410)..(410): n equals a,t,g, or c
  misc_feature (414)..(414): n equals a,t,g, or c
  misc_feature (441)..(441): n equals a,t,g, or c
  misc_feature (454)..(454): n equals a,t,g, or c
gctctggactttgaaaatgagatggccactgccgcatcctcatcctcccttgagaagagttacgagttgcctgatgggcaagtgatcaccatcggaaatgaacgtttccgctgcccanagaccctgttccagccatccttcatcgggatggagtctgctggcatccatgaaaccacctacaacagcatcatgaagtgtgatattgacatcangaaggacctctatgctaacaatgtcctatcagggggcaccactatgtaccctggcattgccgaccgaatgcanaaaggagatccnggcctagcacccaacaccatgaaagatcaagaacattgncccttcggagcgcaaatactctgtctggatcnggngggttcatcctgggcctctnttgtccaccctttcagcanatgngggatcagccaaacaggaataccgatnaaacccggggccnttcctttggtccacccc

SEQ ID NO: 1682 - DNA, 527 bp, Homo sapiens
  misc_feature (21)..(21): n equals a,t,g, or c
  misc_feature (30)..(30): n equals a,t,g, or c
  misc_feature (303)..(303): n equals a,t,g, or c
  misc_feature (356)..(356): n equals a,t,g, or c
  misc_feature (452)..(452): n equals a,t,g, or c
  misc_feature (480)..(480): n equals a,t,g, or c
  misc_feature (504)..(505): n equals a,t,g, or c
  misc_feature (515)..(515): n equals a,t,g, or c
gaaagaagaagccatcaggantctgcagcnaaaaatttgtgagctgcaagctaggctgcaggcccaggaagaacagcatcaggaagtccagaaggcaaaagaagcagacatagagaagctgaaccaggccttgtgcttgcgctacaagaatgaaaaggagctccaggaagtgatacagcagcagaatgagaagatcctagaacagatagacaagagtggtagctcatagtatgttcaccatcatgcccaggcctttgccttctgtgttactggtcagccaggatcccaagtatgagaaatggnttgcttttgttcaccacatgttgtctatccttatgtcctattggacacctctncattctcattcccagagccttagagaggaggtgacccaccttacccgctcacttcggcgtgcggagacagagaccaaagtgctccaggaggccctngcaggccagcttggactccaactgccancctatggccaccaattggatccannagaaagtgtngctctctcacga

SEQ ID NO: 1683 - DNA, 588 bp, Homo sapiens
  misc_feature (5)..(5): n equals a,t,g, or c
  misc_feature (31)..(31): n equals a,t,g, or c
  misc_feature (34)..(34): n equals a,t,g, or c
  misc_feature (96)..(96): n equals a,t,g, or c
  misc_feature (393)..(393): n equals a,t,g, or c
  misc_feature (417)..(417): n equals a,t,g, or c
  misc_feature (457)..(457): n equals a,t,g, or c
  misc_feature (485)..(485): n equals a,t,g, or c
  misc_feature (487)..(487): n equals a,t,g, or c
  misc_feature (519)..(519): n equals a,t,g, or c
  misc_feature (545)..(545): n equals a,t,g, or c
  misc_feature (547)..(547): n equals a,t,g, or c
  misc_feature (562)..(562): n equals a,t,g, or c
  misc_feature (576)..(576): n equals a,t,g, or c
gaacntcttagggaaatcttcgactataggnttnagctggtacgcctgcaggtaccggtccggaattcccgggtcgacccacgcgtccgcggacgnttgggctttttaaaaaatgaattatctttcaatggtgtagaatgattccaaagtgtctccattagcatatactgagcaggaattaaataaagcatcagatactgatctgagctgtaagctggtagaatctgagccaaagtagactgcttaaattgataagctttgctaaagagttgtatgcacaaaggatgattaattctgggactatactcacaccaaggtctgctgtcttatagccaagaattacagctttatttatagagagtgaattatgggtattttttcagaaaatattgncatctgatatacacataaaacaantcacattgttggagttaactaattatccccatttcatggntttcaagtggcaacttactgacccttgntnttggcctgtgcttggatgcatgcattttcaancaagtaataaagcagcctcattaaantntggataatgctgggntttacatatagacngaaatgctataa

SEQ ID NO: 1684 - DNA, 521 bp, Homo sapiens
  misc_feature (368)..(368): n equals a,t,g, or c
  misc_feature (388)..(388): n equals a,t,g, or c
  misc_feature (391)..(391): n equals a,t,g, or c
  misc_feature (401)..(401): n equals a,t,g, or c
  misc_feature (415)..(416): n equals a,t,g, or c
  misc_feature (419)..(419): n equals a,t,g, or c
  misc_feature (454)..(454): n equals a,t,g, or c
  misc_feature (503)..(503): n equals a,t,g, or c
  misc_feature (509)..(510): n equals a,t,g, or c
  misc_feature (514)..(514): n equals a,t,g, or c
ggtcaggaaactaaaatacctcttagttcaaatagacactttcactgaataagtaaaggcctttcctacagggtctgagaaggccaccgcagtcatttcttcccttctgtcagacataattcctcagtttagccttcccacctctatacagtctgataatagaccagcctttattagtcaaatcagccaagcagtttttcaggctcttagtaggtttcagtgaaacctttatatcccttacggtcctccgtcttcaagaaaagtagaacggactaaaggtcttttaaaaacacagctcaccaagctcagtcaccaacttaaaaaggactgggacaatactttaccactttcgcttctacaaggtcagnccatttaagctcctgtgtanaangttccttttntattaggccccagnnttnatttgaccaccagaccaactgagactggggccccnaaaaaaacttgtaatcccctactatcttttgtctagtcatactccctanttaccnntctnaactact

SEQ ID NO: 1685 - DNA, 364 bp, Homo sapiens
  misc_feature (1)..(1): n equals a,t,g, or c
  misc_feature (6)..(6): n equals a,t,g, or c
  misc_feature (10)..(10): n equals a,t,g, or c
  misc_feature (23)..(23): n equals a,t,g, or c
  misc_feature (58)..(58): n equals a,t,g, or c
  misc_feature (129)..(129): n equals a,t,g, or c
  misc_feature (141)..(141): n equals a,t,g, or c
  misc_feature (150)..(150): n equals a,t,g, or c
  misc_feature (187)..(187): n equals a,t,g, or c
  misc_feature (212)..(212): n equals a,t,g, or c
  misc_feature (229)..(229): n equals a,t,g, or c
  misc_feature (232)..(232): n equals a,t,g, or c
  misc_feature (236)..(236): n equals a,t,g, or c
  misc_feature (244)..(244): n equals a,t,g, or c
  misc_feature (261)..(261): n equals a,t,g, or c
  misc_feature (270)..(270): n equals a,t,g, or c
  misc_feature (284)..(284): n equals a,t,g, or c
  misc_feature (310)..(310): n equals a,t,g, or c
  misc_feature (327)..(327): n equals a,t,g, or c
  misc_feature (342)..(342): n equals a,t,g, or c
nggatntgangctttgaaaaatntaatcagtgacttaagagagattttcttgtatacngggagagtgagataacttattgagaagggttagctttactgtacaggatagcagggaactggacatctcanggtaaaagtcantacggattntaatagcctggggaggaaaacacattctttgccacanacaggcaaagcaacacatgctcatnctcctgcctatgctganatncgcnctcagctncatgtcttgtacacacngaaacattnctggtttcaagaantgaggtgatcctattatcaaattcantctgatgtcaaatagcnctaagaagttattgngccttatgaaaaataatgatct

SEQ ID NO: 1686 - DNA, 547 bp, Homo sapiens
  misc_feature (14)..(14): n equals a,t,g, or c
  misc_feature (23)..(23): n equals a,t,g, or c
  misc_feature (491)..(491): n equals a,t,g, or c
  misc_feature (517)..(517): n equals a,t,g, or c
  misc_feature (537)..(537): n equals a,t,g, or c
  misc_feature (541)..(542): n equals a,t,g, or c
ggataggcaaaaantgggatctnagcattttagcctgcatctctgagtactaacgaggctgaacacgaaatgagcttattttcttttcagaagcccctgaatgtgacagtgatccgcagggggggaaaacaccagcttagacttgttccaacacgctgggcaggaaaaggactgctgggctgcaacattattcctctgcaaagatgattgtccctggggaacagtaacaggaaagcatcttcccttgccctggacttgggtctagggatttccaacttgtcttctctccctgaagcataaggatctggaagaggcttgtaacctgaacttctgtgtggtggcagtactgtggcccaccagtgtaatctccctggattaaggcattcttaaaaacttaggcttggcctctttcacaaattaggccacggccctaaataggaattccctggattgtgggcaagtgggcggaagttattctggcaggtactggngtgattattattattatttttaatanagagttttacagtgctgatntganncaaaa

SEQ ID NO: 1687 - DNA, 549 bp, Homo sapiens
  misc_feature (5)..(5): n equals a,t,g, or c
  misc_feature (14)..(14): n equals a,t,g, or c
  misc_feature (35)..(35): n equals a,t,g, or c
  misc_feature (383)..(383): n equals a,t,g, or c
  misc_feature (424)..(424): n equals a,t,g, or c
  misc_feature (488)..(489): n equals a,t,g, or c
  misc_feature (511)..(511): n equals a,t,g, or c
  misc_feature (535)..(535): n equals a,t,g, or c
  misc_feature (542)..(542): n equals a,t,g, or c
ggatnggcttttgntgcactgttgccaaggaaggntttttctgattttttgacaaatgaatttttgcacactttcattggtgtctttcggcaacttacacacattgaaaatgagctattgtacatatttttatattctctttataaatgcatgtctgattgtacttgtaacaatattgtaatgaacggctgtgcagtaggcccagcgctgctgtgtctcgtcagaggaatagcttaccacgaacccctcagcatactgggaatctcttcctgaacaacgaatgtaaatttggtcaagtctactcttccgttcattcaattattttaagcatttgaattatttattgtatatcctaaatatatttctcctttggcagtgactanatttccactaatgtgtcttaatctatccctccagctggcangttactgtttttttaatcccctgaaagttgtccttgtaggagacagaaattcttttgctgcctnnaatcccttggagtaagaaggtngtggcattggtggagtgcgtgttnctttttnccaaatc

SEQ ID NO: 1688 - DNA, 601 bp, Homo sapiens
  misc_feature (53)..(53): n equals a,t,g, or c
  misc_feature (480)..(481): n equals a,t,g, or c
  misc_feature (542)..(542): n equals a,t,g, or c
  misc_feature (567)..(567): n equals a,t,g, or c
  misc_feature (580)..(580): n equals a,t,g, or c
  misc_feature (591)..(592): n equals a,t,g, or c
cggtaccggtccggaattcccgggactaagttctagatcgcgagcggccgctntagaggatccaagcttacgtacgcgtgcatgcgacgtcatagctcttctatagtgtcacctaaattcaattcactggccgtcgttttacaacgtcgtgactgggaaaaccctggcgttacccaacttaatcgccttgcagcacatccccctttcgccagctggcgtaatagcgaagaggcccgcaccgatcgcccttcccaacagttgcgcagcctgaatggcgaatgggacgcgccctgtagcggcgcattaagcgcggcgggtgtggtggttacgcgcagcgtgaccgctacacttgccagcgccctagcgcccgctcctttcgctttcttcccttcctttctcgccacgttcgccggctttccccgtcaagctctaaatcgggggctccctttagggttccgatttagtgctttacggcacctnnaccccaaaaaacttgattagggtgatggttcacgtagtgggccatcgtcctgatagacggnttttcgcccttgacgttggagtcangttcttaatattnggactcttgtnncaaactggg

SEQ ID NO: 1689 - DNA, 259 bp, Homo sapiens
  misc_feature (5)..(5): n equals a,t,g, or c
  misc_feature (19)..(19): n equals a,t,g, or c
  misc_feature (32)..(32): n equals a,t,g, or c
  misc_feature (46)..(47): n equals a,t,g, or c
  misc_feature (103)..(103): n equals a,t,g, or c
  misc_feature (137)..(137): n equals a,t,g, or c
  misc_feature (183)..(183): n equals a,t,g, or c
  misc_feature (212)..(213): n equals a,t,g, or c
  misc_feature (218)..(218): n equals a,t,g, or c
  misc_feature (223)..(223): n equals a,t,g, or c
gaatnccaacgggaatccnctagggaaagctngtacgcctgcaggnnccggtccggaattcccgggtcgacccacgcgtccgcccacgcgttcgggcctcatnagcgcgaggtgctgcggcgctgcgtagaagtatnaatcagccggttgcttttgtgagaagaattccttggactgcggcgncgagtcagctgaaagaacactttgcacanntcggncatgncagaaggggcattttaccttttgacaaggagactgg

SEQ ID NO: 1690 - DNA, 414 bp, Homo sapiens
  misc_feature (3)..(3): n equals a,t,g, or c
  misc_feature (100)..(100): n equals a,t,g, or c
  misc_feature (152)..(152): n equals a,t,g, or c
  misc_feature (170)..(170): n equals a,t,g, or c
  misc_feature (248)..(248): n equals a,t,g, or c
  misc_feature (293)..(293): n equals a,t,g, or c
  misc_feature (301)..(301): n equals a,t,g, or c
  misc_feature (307)..(307): n equals a,t,g, or c
  misc_feature (360)..(360): n equals a,t,g, or c
  misc_feature (366)..(367): n equals a,t,g, or c
  misc_feature (384)..(384): n equals a,t,g, or c
  misc_feature (412)..(412): n equals a,t,g, or c
ganagcattattgaattggatgatagatcagaagaagatataaactgaagcatggacaggcagaaagatggataataacagaataaagagaaacgcatanaggatgaaatgagaaggtctaagagtcatgaaatcacagccacagaagtaanggagagagaatgaggcanaaaagttaatagctgagaactttctaaaattaattaaagacatcaagccacagattcaagaagtcctgtgaatcccangtaagacaataaatttgaaaaatccacatctatttccatcacagnaaaaattncagaanacaaagacagaatgttgaaagcagatagagaaaaaaggcattactatcaaaanagctgnngttatctgacagctaanttttcaatataaacagtggaagccaganga

SEQ ID NO: 1691 - DNA, 241 bp, Homo sapiens
  misc_feature (51)..(51): n equals a,t,g, or c
  misc_feature (104)..(104): n equals a,t,g, or c
  misc_feature (116)..(116): n equals a,t,g, or c
  misc_feature (169)..(169): n equals a,t,g, or c
  misc_feature (190)..(191): n equals a,t,g, or c
  misc_feature (206)..(206): n equals a,t,g, or c
  misc_feature (237)..(237): n equals a,t,g, or c
gttctgcccatttttcacttggattttttgtcttacggatatttaagcctnttaaaatatatattctggagagatgctaatctttgattaattatatgcattgnaaatgtctgggnacattgtggcttgcctctcttccctgcctttaggagtgttttgctggacccangtaatttttaaatgttaatgnnattaaatctatcagnccttttgctagtatggcttatgccattgaancttg

SEQ ID NO: 1692 - DNA, 231 bp, Homo sapiens
  misc_feature (13)..(13): n equals a,t,g, or c
  misc_feature (26)..(26): n equals a,t,g, or c
  misc_feature (43)..(43): n equals a,t,g, or c
  misc_feature (61)..(61): n equals a,t,g, or c
  misc_feature (84)..(84): n equals a,t,g, or c
  misc_feature (88)..(88): n equals a,t,g, or c
  misc_feature (92)..(92): n equals a,t,g, or c
  misc_feature (105)..(106): n equals a,t,g, or c
  misc_feature (160)..(160): n equals a,t,g, or c
  misc_feature (201)..(201): n equals a,t,g, or c
  misc_feature (206)..(206): n equals a,t,g, or c
  misc_feature (222)..(222): n equals a,t,g, or c
  misc_feature (227)..(227): n equals a,t,g, or c
gggcggaggtttnagtcctgttgctngatggtcgaggccatcncctgggccgcctggcggncatcgtggctaaacaggtactgntggnccgnaaggtggcaggtnntacgctgtgaaggcattcaacattactggcaatttctacagaaacaagtagaantacctggctttcctccgcaagcggatgaacaccaacccttnccgangcccctaccacttccnggccnccat

SEQ ID NO: 1693 - DNA, 505 bp, Homo sapiens
  misc_feature (369)..(369): n equals a,t,g, or c
  misc_feature (374)..(374): n equals a,t,g, or c
  misc_feature (429)..(429): n equals a,t,g, or c
  misc_feature (436)..(436): n equals a,t,g, or c
  misc_feature (470)..(470): n equals a,t,g, or c
  misc_feature (487)..(487): n equals a,t,g, or c
  misc_feature (504)..(504): n equals a,t,g, or c
gcccacgcgtccgtgcagatgattatgagcatgctcgcttccagaaggctaaggagcagctggagattcggcaccgcaaccgaatggacagggtaaagaaggaatgggaagaggcagagcttcaagctaagaacctccccaaagcagagaggcagactctgattcagcacttccaagccatggttaaagctttagagaaggaagcagccagtgagaagcagcagctggtggagacccacctggcccgagtggaagctatgctgaatgaccgccgtcggatggctctggagaactacctgctgccttgcagtctgacccgcacgggctcatcgcattctccaggccttacggcgttatgtccgtgctganaacanagatcgctttacataccatccgtcattaccaagcatgtgttggctgttgacccanaaaaggngggccagatgaaatcccaggtgatgacacatctncccgtgattgaagaaanggatgaaccaaagtctnt

SEQ ID NO: 1694 - DNA, 368 bp, Homo sapiens
  misc_feature (24)..(24): n equals a,t,g, or c
  misc_feature (37)..(37): n equals a,t,g, or c
  misc_feature (60)..(60): n equals a,t,g, or c
  misc_feature (65)..(65): n equals a,t,g, or c
  misc_feature (304)..(304): n equals a,t,g, or c
  misc_feature (306)..(306): n equals a,t,g, or c
  misc_feature (320)..(320): n equals a,t,g, or c
  misc_feature (345)..(345): n equals a,t,g, or c
  misc_feature (364)..(364): n equals a,t,g, or c
gcggacgcgtgggaaaaaaaaaantttaaaaaaaaantttaaaaaaaaaagggcggccgntctanaggatccaagcttacgtacgcgtgcatgcgacgtcatagctcttctatagtgtcacctaaattcaattcactggccgtcgttttacaacgtcgtgactgggaaaaccctggcgttacccaacttaatcgccttgcagcacatccccctttcgccagctggcgtaatagcgaaaaggcccgcaccgatcgcccttcccaacaagttgcgcagcctgaatggcgaatgggacgcgccctgnancggcgcattaagcncggtgggtgtggtggttacccccangtgtgaccgctacacttgncagc

SEQ ID NO: 1695 - DNA, 719 bp, Homo sapiens
  misc_feature (5)..(5): n equals a,t,g, or c
  misc_feature (559)..(559): n equals a,t,g, or c
  misc_feature (571)..(572): n equals a,t,g, or c
  misc_feature (633)..(633): n equals a,t,g, or c
  misc_feature (675)..(675): n equals a,t,g, or c
  misc_feature (677)..(677): n equals a,t,g, or c
  misc_feature (683)..(683): n equals a,t,g, or c
  misc_feature (716)..(716): n equals a,t,g, or c
gcgancactgctgtgtattaaaatcatgcagagtaagggtgctgccctgtgtcttctgttctcacagagatctgctccacaaagagagggacttacatctaggtttgatcagggattgccgtaattttttctgtaaaggaccagatagtaaatatttacagctttatgggcctcatttgatctgcttctgtagtgaaaaagcagccacggacaatattcatagcaatagggagtaggctggatttggcccctgagccaaactacaggggtagtttgttgacccctggtctatatgcagagtgagggagagagatggatttaaacccatcttccttaggccacttcatgtgccctttcatacacattagctcttggattagcagtacctgagataagggtggtatggaaaatagagtctaaaccagagagctgagggcaaacttggcattccttcccttaaaattttatgttagtaatactgtgttggttgatcatgaaggaaataggcatgctttccccttccactgtggtatgcatttatttattcactttatactgntgattgttctanntctataatggcctctgcctctcatgcctgtgacttttaatcaataattgcagatgtataancattccaataataaggccatgactaccggggcaattgctgcnantgctgnctacaatcctgtaattcaggcgcttcttttccntac

SEQ ID NO: 1696 - DNA, 353 bp, Homo sapiens
  misc_feature (4)..(4): n equals a,t,g, or c
  misc_feature (56)..(56): n equals a,t,g, or c
  misc_feature (183)..(183): n equals a,t,g, or c
  misc_feature (194)..(194): n equals a,t,g, or c
  misc_feature (197)..(197): n equals a,t,g, or c
  misc_feature (216)..(216): n equals a,t,g, or c
  misc_feature (230)..(230): n equals a,t,g, or c
  misc_feature (249)..(250): n equals a,t,g, or c
  misc_feature (270)..(270): n equals a,t,g, or c
  misc_feature (289)..(289): n equals a,t,g, or c
  misc_feature (330)..(330): n equals a,t,g, or c
  misc_feature (339)..(339): n equals a,t,g, or c
  misc_feature (351)..(351): n equals a,t,g, or c
gcanttcataagtcagtagaatgaacaaagttttttctttatgagttgaggttcantaggaagcttggtggcacttcagcttcatacccagcataaaagaggagtcgcaggcaaatctttggggtctgggctccaccaccagcttttcccttccaggtatccagatggttcccatcagctggngtgagatgcantgncctaagacccacactaaanaattccggaaagtngcccgagtacaaccccganntcttgcagacctaagaagcnactttttaccctatggaanggggtaagctgtcctgagtataacaccatagatgctgctgnctttaattnaaacaccttggntg

SEQ ID NO: 1697 - DNA, 286 bp, Homo sapiens
  misc_feature (216)..(216): n equals a,t,g, or c
  misc_feature (244)..(244): n equals a,t,g, or c
  misc_feature (254)..(254): n equals a,t,g, or c
  misc_feature (258)..(258): n equals a,t,g, or c
  misc_feature (268)..(268): n equals a,t,g, or c
gggttggggaatctctggagagctggccaagcctctgggccctgcttgctcttcaggccctgaagttccagccactgccatctcccacctctttccaggaaaaggctggttgtcctaaccccgctgtaccctgagccacattctgccaccaagctgctccaggaatgttacgaggcatgcaggatttgggatgcctgctcggtcctctttcccagngtggggggctgttatgtggctgtgtggnaaatggcctnaagngttacctganagagattccccttgtatt

SEQ ID NO: 1698 - DNA, 257 bp, Homo sapiens
  misc_feature (1)..(1): n equals a,t,g, or c
  misc_feature (13)..(13): n equals a,t,g, or c
  misc_feature (60)..(61): n equals a,t,g, or c
  misc_feature (91)..(91): n equals a,t,g, or c
  misc_feature (227)..(227): n equals a,t,g, or c
  misc_feature (248)..(249): n equals a,t,g, or c
  misc_feature (254)..(255): n equals a,t,g, or c
naaagctggtacncctgcaggtaccggtccggaattcccgggtcgacccacgcgtccgcnnagttggaagagcctcagaggatctttcagncatctgattcatgattctttctaactctgtcactgacagtttccaattctggattctgttcctggagcaactactgctatattcactccactccatacaaatacacctgagttgctacgagaggggatttgccggncaccgaggctcacactgtaanncctannaa

SEQ ID NO: 1699 - DNA, 465 bp, Homo sapiens
  misc_feature (321)..(321): n equals a,t,g, or c
  misc_feature (352)..(352): n equals a,t,g, or c
  misc_feature (378)..(378): n equals a,t,g, or c
  misc_feature (385)..(385): n equals a,t,g, or c
  misc_feature (420)..(420): n equals a,t,g, or c
  misc_feature (452)..(452): n equals a,t,g, or c
  misc_feature (455)..(455): n equals a,t,g, or c
gaaaaaagaatacatttcatttataaaatacctgcactagagtaaaataaatttactcaattatgaacaaataaaatccagaactaagttacattttccatttttccttcaagaagaaaatctcattttttgttttatttcaccatctattttatagcactcataaaacaggaatttcatctagtaagcaaacatgttattgattaaaatgattaatagtgttaatatggagctacccactattaaaaatataaatgttttaattctgtctgtaccattcagattaaaaccaatcagttgattagttattgtaaactggancaatttagtattacctatgtgtttgttcagnactctgctgaacactggaaatatagnatagganccttaaagatctaactgggaattaatattcataanatataagtgcaaagtaaaatataattataagntcntatctattgg

SEQ ID NO: 1700 - DNA, 382 bp, Homo sapiens
  misc_feature (318)..(318): n equals a,t,g, or c
  misc_feature (322)..(322): n equals a,t,g, or c
  misc_feature (346)..(346): n equals a,t,g, or c
  misc_feature (369)..(369): n equals a,t,g, or c
  misc_feature (382)..(382): n equals a,t,g, or c
gggaagagaagacttatattatcttgtttcttaggtagatattgtattgggtaagaggtcgtgggttgaattcaatggactacatggaagtcattagtaaaatagcttctgtttattgggtaccactttgcattggacctgttctaactgtggtatgtaaatcactaacaggcgagtatagtccctttcagcagtgagaaacatttaaatgcttttctgaacactgcacaaccacaaagccaggttttgagaactgtcaatgtttccaaaatctgcttgctttctgctatcatgtgcttgaggcttaagactaagttnaaanaatttatagtattatttggtattntctggacctgggatcattagccnggaaagtatctan

SEQ ID NO: 1701 - DNA, 590 bp, Homo sapiens
  misc_feature (570)..(570): n equals a,t,g, or c
gcccccggtccggaattcccgggtcgacccacgcgtccgacttcagttaaatttgctttgagtccctggatgcctggcaggtggagaattcaatcttgtcgttaccagcattccttccacttctccatgggcttatgtaagaattctgggcttacacactgttggaaagccaggtaggaactacatcccccgaactctccgttcttccagctgctcatgatccatcagccttttttgggctatcttgctataacaagaccctcctcacagcatcattccactgacccacaggctcagccccagggacccacactataacaggtctccactatgcctaggaactcacaaaaaccttctcttcatcttggcttcctctgatatccagccactcccccgcttctcaccttaaacacagatggcagctccttcccatcattctaaaccttggggattgccagccaaattctcttcagacaccaaagcttcacccggcctcttcagggagatgatgcaagggcatctgagatctttggaagcccaattttggcctctctttgggggtgggctganattgggaactggggaaacct

SEQ ID NO: 1702 - DNA, 444 bp, Homo sapiens
  misc_feature (15)..(15): n equals a,t,g, or c
  misc_feature (19)..(19): n equals a,t,g, or c
  misc_feature (24)..(24): n equals a,t,g, or c
  misc_feature (26)..(26): n equals a,t,g, or c
  misc_feature (82)..(82): n equals a,t,g, or c
  misc_feature (84)..(84): n equals a,t,g, or c
  misc_feature (277)..(277): n equals a,t,g, or c
  misc_feature (290)..(290): n equals a,t,g, or c
  misc_feature (400)..(400): n equals a,t,g, or c
  misc_feature (411)..(411): n equals a,t,g, or c
  misc_feature (420)..(420): n equals a,t,g, or c
  misc_feature (428)..(428): n equals a,t,g, or c
  misc_feature (440)..(440): n equals a,t,g, or c
aaaacctccgttttnggtntaggngnaacgcccgcaggtaccggtccggaattcccgggtcgacccacgcgtccggtactgntntgttgtccttgccctcacatagacactcagacaccctcacaaacacagtagtctatagttaggattaaaataggatctgaacattcaaaagaaagctttggaaaaaaagagctggctggcctaaaaacctaaatatatgatgaagattgtaggactgtcttcccaagccccatgttcatggtggggcaatggntatttggttattntactcaattggttactctcatttgaaatgagggagggacatacagaataggaacaggtgtttgctctcctaagagccttcatgcacacccctgaaccacgaggaaacagnacagtcgctantcaagtggntttaaagnaaagtatatttnataa

SEQ ID NO: 1703 - DNA, 643 bp, Homo sapiens
  misc_feature (17)..(17): n equals a,t,g, or c
  misc_feature (73)..(73): n equals a,t,g, or c
  misc_feature (133)..(133): n equals a,t,g, or c
  misc_feature (160)..(160): n equals a,t,g, or c
  misc_feature (184)..(184): n equals a,t,g, or c
  misc_feature (299)..(299): n equals a,t,g, or c
  misc_feature (345)..(345): n equals a,t,g, or c
  misc_feature (478)..(478): n equals a,t,g, or c
  misc_feature (508)..(508): n equals a,t,g, or c
  misc_feature (550)..(550): n equals a,t,g, or c
  misc_feature (558)..(558): n equals a,t,g, or c
  misc_feature (571)..(571): n equals a,t,g, or c
  misc_feature (607)..(607): n equals a,t,g, or c
  misc_feature (626)..(626): n equals a,t,g, or c
tggtaaattttcggggnaaggtaccccctgcaggtactcggtccggaattcccgggtcgacccattcgtccgnttcgcgtccgtattatttcttctgttttccctgtcacaattctgatgttacaaaatctancccaaatctctctcaaagccatcccanactctttcatgccactctgatttntccctcttactctatttttatctgtaactgtatgtaacacatagcttattgtctgagtatagacattcagcaaactttggttgattggaaagtcttcgtttaaacttctaatttntctaaggaacgagttgaagcagttaatatggctgaaggaatcattnacgacacagaaaccaagatggaagaattcaaggaccaattacctgctgatgagtgcaacaagctgaaagaagagatttccaaaatgagggagctcctggctagaaaagacagcgaaacaggagaaaatattanacaggcagcatgctctctttagcaggcatnattgaagctgttcgaaatggcatacaaaaagatggcatcttnacgaaaangctttggaagttntggcacttggggaacaaaaggaagatcaaaaggagngaaaaacagtaataatagnagaaatttgaagccaga

SEQ ID NO: 1704 - DNA, 576 bp, Homo sapiens
  misc_feature (3)..(3): n equals a,t,g, or c
  misc_feature (243)..(243): n equals a,t,g, or c
  misc_feature (490)..(490): n equals a,t,g, or c
  misc_feature (506)..(506): n equals a,t,g, or c
  misc_feature (538)..(538): n equals a,t,g, or c
  misc_feature (548)..(548): n equals a,t,g, or c
  misc_feature (575)..(575): n equals a,t,g, or c
gcntttgagcagctgcagcggcagaggcagcatccagcggcggcgccagcagttccagtccgttgctttactttttgcttcaccgacatagtcattatgccgaagagaaagtctccagagaatacagagggcaaagatggatccaaagtaactaaacaggagcccacaagacggtctgccagattgtcagcgaaacctgctccaccaaaacctgaacccaaaccaagaaaaacatctgctaanaaagaacctggagcaaagattagcagaggtgctaaagggaagaaggaggaaaagcaggaagctggaaaggaaggtactgcaccatctgaaaatggtgaaactaaagctgaagaggcacagaaaactgaatctgtagataacgagggagaatgaattgtcatgaaaaattggggttgattttatgtatctcttgggacaacttttaaaagctatttttaccaagtattttgtaaatgctaatttttangactctactagttggnatacgaaaatatataaggatgggacattttantcgcttatantcatgctttttggaaaattacattatnc

SEQ ID NO: 1705 - DNA, 468 bp, Homo sapiens
  misc_feature (151)..(151): n equals a,t,g, or c
  misc_feature (290)..(290): n equals a,t,g, or c
  misc_feature (327)..(327): n equals a,t,g, or c
  misc_feature (338)..(338): n equals a,t,g, or c
  misc_feature (343)..(343): n equals a,t,g, or c
  misc_feature (345)..(345): n equals a,t,g, or c
  misc_feature (382)..(382): n equals a,t,g, or c
  misc_feature (435)..(435): n equals a,t,g, or c
  misc_feature (456)..(456): n equals a,t,g, or c
  misc_feature (458)..(458): n equals a,t,g, or c
  misc_feature (466)..(466): n equals a,t,g, or c
ctccggacgggctttttttctcctcctcttgggggggacccagagggagcggcgccccctcccccctccggcgcggaccccgcgtgcgccttgctcgcccgcagccccgagaccgcaggcgtcacaatgtagcagggaccccaggcgtcgngctcagaaaatggaaaaagagccagggccggaaggagggtgcagaagcgagtccgcgtgcggagccaggaggcagcgtcgcgtgggagtgctggcctgaagcctccatgccccggcagagggacggacacgcggacgtntagcggaggctcccgtgtcctcagtatgcatcaggtntcccgaacctnacagncncgcagggaggaggagaaaggggaggatttgactttgnaagtctcttgtgaacaagaagccaaagatgtttgaccaaggaagaatcaaagntgtgggacatttaaatgcacnanaattaccntg

SEQ ID NO: 1706 - DNA, 469 bp, Homo sapiens
  misc_feature (363)..(363): n equals a,t,g, or c
  misc_feature (419)..(419): n equals a,t,g, or c
  misc_feature (422)..(422): n equals a,t,g, or c
  misc_feature (424)..(424): n equals a,t,g, or c
  misc_feature (464)..(465): n equals a,t,g, or c
gcccacgcgtccgcagactgtggctgcagagaccttgcgaccatgtgtagattgcgtggaccccgacaaagggaaggctgctgtgtagctctgtccactctgaataccaagtgtgttgggaattgcatgccatctccaccctgagcctgacctttctgagtgacatgggtgtgccaggctagactaggaggttccggtgtctggaaaagcactttacagatgagattccctctcctcccccaccttcaagcaccctgttccctctttctttcttttgtgttggatttgtttaaaaaccaaataagcatctgtgtaacctccacagtagcatttcttatttgtttggtcactgctacaccttancagctcttcccctttcctgggggatgtgcacggcagcttgagcctgtcacgtggtnaangnccggccccatcagaggctgggggaggcggcacattggcanngtgt

SEQ ID NO: 1707 - DNA, 296 bp, Homo sapiens
  misc_feature (220)..(220): n equals a,t,g, or c
  misc_feature (226)..(226): n equals a,t,g, or c
  misc_feature (237)..(237): n equals a,t,g, or c
gaccaggtgtgcagctggctggctggctggcagcgggaggttctgggtggagctggtaaggtggaatcttcagctttcctaaccctttccctccctccagcatccggaggggtttccaggtatataagcaggtgtgcgcctcctgccacagcatggacttcgtggcctaccgcacctggtgggcgtgtgctacacggaaggatgaaagctaaggaactgncttgcngaagtgttggngtctggggatccctggggacccaagggcttaagggttcccaattgttaagatggcaggg

SEQ ID NO: 1708 - DNA, 266 bp, Homo sapiens
  misc_feature (11)..(11): n equals a,t,g, or c
  misc_feature (31)..(32): n equals a,t,g, or c
  misc_feature (66)..(66): n equals a,t,g, or c
  misc_feature (99)..(99): n equals a,t,g, or c
  misc_feature (113)..(113): n equals a,t,g, or c
  misc_feature (121)..(121): n equals a,t,g, or c
  misc_feature (125)..(125): n equals a,t,g, or c
  misc_feature (134)..(135): n equals a,t,g, or c
  misc_feature (149)..(149): n equals a,t,g, or c
  misc_feature (157)..(157): n equals a,t,g, or c
  misc_feature (165)..(165): n equals a,t,g, or c
  misc_feature (176)..(176): n equals a,t,g, or c
  misc_feature (198)..(198): n equals a,t,g, or c
  misc_feature (225)..(225): n equals a,t,g, or c
  misc_feature (252)..(252): n equals a,t,g, or c
  misc_feature (255)..(255): n equals a,t,g, or c
ggatacagccngcgaggctaaaaaacggatnncctcttcctagcttaaaatctgatttacactgtnttgttttttaagaaacaaaagtgcatagttcanattttttttttgtngaatatgnttgntcttggacnntatgagataggctnataagaancacgatcntctacacctgncattgatccaagaaaggccagnctatgacacgtatgtactagtgaacancgggctggatcggtacgaaatgtgganggngtatgggaaaa

SEQ ID NO: 1709 - DNA, 169 bp, Homo sapiens
  misc_feature (9)..(9): n equals a,t,g, or c
  misc_feature (16)..(16): n equals a,t,g, or c
  misc_feature (20)..(20): n equals a,t,g, or c
  misc_feature (55)..(56): n equals a,t,g, or c
  misc_feature (66)..(66): n equals a,t,g, or c
  misc_feature (93)..(93): n equals a,t,g, or c
  misc_feature (111)..(111): n equals a,t,g, or c
  misc_feature (127)..(127): n equals a,t,g, or c
  misc_feature (160)..(161): n equals a,t,g, or c
gcttgcatnttggtgntttnaagaagtggggtggaagaagtggggtgggacgacnntgaaatctanagtaaaaccaagctggcccaaggtgtnctgcaggctgtaatgcantttaatcagagtgccntttttttttttgttcaaatgattttaattattnnaatgcaca

SEQ ID NO: 1710 - DNA, 102 bp, Homo sapiens
  misc_feature (12)..(12): n equals a,t,g, or c
  misc_feature (30)..(30): n equals a,t,g, or c
  misc_feature (45)..(45): n equals a,t,g, or c
  misc_feature (73)..(73): n equals a,t,g, or c
  misc_feature (99)..(99): n equals a,t,g, or c
gccctgactcanatgatgacacagaagcancacctccttataggncaattggggatgatgtacagctgcttcnaacacctagtgaccgacccagatatngat

SEQ ID NO: 1711 - DNA, 406 bp, Homo sapiens
  misc_feature (2)..(3): n equals a,t,g, or c
  misc_feature (30)..(30): n equals a,t,g, or c
  misc_feature (83)..(83): n equals a,t,g, or c
  misc_feature (346)..(346): n equals a,t,g, or c
  misc_feature (349)..(349): n equals a,t,g, or c
  misc_feature (365)..(365): n equals a,t,g, or c
  misc_feature (382)..(382): n equals a,t,g, or c
  misc_feature (393)..(393): n equals a,t,g, or c
gnncagcttcactattgggtttggggggancgcccccaggtaccggtccggaattcccgggtcgacccacgcgtccggcaaanctctttggataccatttcatttccattcttgtgtggtctccaaggcccctttggagatatacttggtgttggttgtgttttttggttccttttcagagaactgtaaaccgaggctgacgtgctccactgagaacgtgggcagtgtccaaattcctgtactgtaaagactaaaaggcgtttgctctgagactgacaaggcggaaacttccatgtgtctcctgccaggctctgtccccctacgccatcccgacacgtccccgttnccncgaaacctggctcagngcaatactcccattgcnatggggtcctncaccatggtactg

SEQ ID NO: 1712 - DNA, 405 bp, Homo sapiens
  misc_feature (3)..(3): n equals a,t,g, or c
  misc_feature (9)..(9): n equals a,t,g, or c
  misc_feature (17)..(17): n equals a,t,g, or c
  misc_feature (86)..(86): n equals a,t,g, or c
  misc_feature (96)..(96): n equals a,t,g, or c
  misc_feature (236)..(236): n equals a,t,g, or c
  misc_feature (366)..(366): n equals a,t,g, or c
  misc_feature (372)..(372): n equals a,t,g, or c
  misc_feature (381)..(381): n equals a,t,g, or c
  misc_feature (395)..(395): n equals a,t,g, or c
  misc_feature (405)..(405): n equals a,t,g, or c
tcngggtgnaacgcccngcaggtaccggtccggaattcccgggtcgacccacgctttcgggaaaatttaagtaagtactcaaactnccctcccagnaagcatgaattgcttcagatgtaaagcttacatgtgatgagtaatactataatatcatacattaatatatcctaataaactttaattttcaaacaaaaaaaaaaaaaaaagggcggccgctctagaggatccaagcttangtacgcgtgcatgcgacgtcatagctcttctatagtgtcacctaaattcaattcactggccgtcgttttacaacgtcgtgactgggaaaaccctggcgttacccaacttaatcgccttgcagcacatccncctttnccagctggntgtaataggcgaanaggcccggan

SEQ ID NO: 1713 - DNA, 309 bp, Homo sapiens
  misc_feature (29)..(29): n equals a,t,g, or c
  misc_feature (37)..(37): n equals a,t,g, or c
  misc_feature (66)..(66): n equals a,t,g, or c
  misc_feature (105)..(105): n equals a,t,g, or c
  misc_feature (107)..(107): n equals a,t,g, or c
  misc_feature (112)..(112): n equals a,t,g, or c
  misc_feature (116)..(117): n equals a,t,g, or c
  misc_feature (140)..(140): n equals a,t,g, or c
  misc_feature (251)..(251): n equals a,t,g, or c
  misc_feature (258)..(258): n equals a,t,g, or c
  misc_feature (282)..(282): n equals a,t,g, or c
  misc_feature (308)..(309): n equals a,t,g, or c
ctactgtctattatgattcatcttcagtntttttatnttcaagaagaaagccattgtgtcctctanggggaacggggcttatctctgatatacaaagggatatancnatatncacnnaaatagagaaaaagaggttgatngaattgtgcctttgagtgaacccagtttttaaataccgctgtgtttgtttcgccatggcttcagggatgctacatggctcttgcaccttttactcctctgctttatgaagntcgagtngtatttgtgcatcttaaagtaggntgaggcttgaggctgggctttcgggnn

SEQ ID NO: 1714 - DNA, 131 bp, Homo sapiens
  misc_feature (3)..(3): n equals a,t,g, or c
  misc_feature (41)..(41): n equals a,t,g, or c
  misc_feature (61)..(61): n equals a,t,g, or c
  misc_feature (68)..(68): n equals a,t,g, or c
  misc_feature (92)..(92): n equals a,t,g, or c
  misc_feature (102)..(102): n equals a,t,g, or c
gcnaatttaggttttatgacctcttttgccttgttcatggncatttggatcatcttttacnctgccanccattatgactgatggtgtacagntcccaagtgntccctatccagtccaaaggaccctcttga

SEQ ID NO: 1715 - DNA, 662 bp, Homo sapiens
  misc_feature (3)..(3): n equals a,t,g, or c
  misc_feature (21)..(21): n equals a,t,g, or c
  misc_feature (45)..(45): n equals a,t,g, or c
  misc_feature (89)..(90): n equals a,t,g, or c
  misc_feature (131)..(131): n equals a,t,g, or c
  misc_feature (135)..(135): n equals a,t,g, or c
  misc_feature (139)..(139): n equals a,t,g, or c
  misc_feature (147)..(147): n equals a,t,g, or c
  misc_feature (154)..(155): n equals a,t,g, or c
  misc_feature (169)..(169): n equals a,t,g, or c
  misc_feature (176)..(176): n equals a,t,g, or c
  misc_feature (180)..(180): n equals a,t,g, or c
  misc_feature (196)..(196): n equals a,t,g, or c
  misc_feature (201)..(201): n equals a,t,g, or c
  misc_feature (203)..(203): n equals a,t,g, or c
  misc_feature (208)..(208): n equals a,t,g, or c
  misc_feature (213)..(214): n equals a,t,g, or c
  misc_feature (222)..(222): n equals a,t,g, or c
  misc_feature (226)..(226): n equals a,t,g, or c
  misc_feature (230)..(231): n equals a,t,g, or c
  misc_feature (253)..(253): n equals a,t,g, or c
  misc_feature (271)..(271): n equals a,t,g, or c
  misc_feature (287)..(287): n equals a,t,g, or c
  misc_feature (310)..(310): n equals a,t,g, or c
  misc_feature (319)..(319): n equals a,t,g, or c
  misc_feature (324)..(324): n equals a,t,g, or c
  misc_feature (333)..(333): n equals a,t,g, or c
  misc_feature (337)..(337): n equals a,t,g, or c
  misc_feature (346)..(346): n equals a,t,g, or c
  misc_feature (350)..(350): n equals a,t,g, or c
  misc_feature (354)..(354): n equals a,t,g, or c
  misc_feature (359)..(359): n equals a,t,g, or c
  misc_feature (365)..(365): n equals a,t,g, or c
  misc_feature (393)..(393): n equals a,t,g, or c
  misc_feature (436)..(436): n equals a,t,g, or c
  misc_feature (448)..(448): n equals a,t,g, or c
  misc_feature (454)..(454): n equals a,t,g, or c
  misc_feature (465)..(465): n equals a,t,g, or c
  misc_feature (501)..(501): n equals a,t,g, or c
  misc_feature (538)..(538): n equals a,t,g, or c
  misc_feature (547)..(547): n equals a,t,g, or c
  misc_feature (630)..(630): n equals a,t,g, or c
ggntctgtgcacaaaacccanacctgatagcaagacaggccccgngaggcaatgggagctgaggccacactcagcacaaggccatctgnnctcctccagggtgtgtgctcgccctgcggtagatggaaggnaggntcangtccctgnagctagnnggagccccttctgntcagatntggnccattctccacagaanccccngnctgangcagnntcccaagntcanaggnncactgtgacccccagctccggnctgtcctccaacaccaancacagcaagcctgggnctgcctcccaaatgagccatganatgatacanccaangcagacagntccnccctggtcnagtncaanctganagattnaagggacccatgagttggggtctggcantctcccatccagggcccccatctcatgcccctgactgggacgngtctcaggcagnacttgnccagctgagcngccaggatggaacacggtcacatcaaagaggctgangctggcacatgacatgcggtagtcagtacacaggcantgagggagnctggcatctgtgcactggccatggcaggctggttcagatgcaggcaagcattggctggctctaagaaaccatatcttacctcntgggactgaagggaacccgggtgccacagccg

SEQ ID NO: 1716 - DNA, 821 bp, Homo sapiens
  misc_feature (9)..(9): n equals a,t,g, or c
  misc_feature (72)..(72): n equals a,t,g, or c
  misc_feature (93)..(93): n equals a,t,g, or c
  misc_feature (141)..(141): n equals a,t,g, or c
  misc_feature (146)..(146): n equals a,t,g, or c
  misc_feature (149)..(150): n equals a,t,g, or c
  misc_feature (162)..(162): n equals a,t,g, or c
  misc_feature (164)..(164): n equals a,t,g, or c
  misc_feature (183)..(183): n equals a,t,g, or c
  misc_feature (188)..(188): n equals a,t,g, or c
  misc_feature (194)..(194): n equals a,t,g, or c
  misc_feature (287)..(287): n equals a,t,g, or c
  misc_feature (300)..(300): n equals a,t,g, or c
  misc_feature (359)..(359): n equals a,t,g, or c
  misc_feature (394)..(395): n equals a,t,g, or c
  misc_feature (400)..(400): n equals a,t,g, or c
  misc_feature (430)..(430): n equals a,t,g, or c
  misc_feature (442)..(442): n equals a,t,g, or c
  misc_feature (446)..(446): n equals a,t,g, or c
  misc_feature (461)..(461): n equals a,t,g, or c
  misc_feature (474)..(474): n equals a,t,g, or c
  misc_feature (510)..(510): n equals a,t,g, or c
  misc_feature (567)..(567): n equals a,t,g, or c
  misc_feature (797)..(797): n equals a,t,g, or c
tttcccaancggggcccctttgggcccaagggggttccccccccggggggttccccccgggggaaaaaattnttccccccgggggggggtttnccgggaaaccccctttttggtttgggaaagggggggggggaaacccanccaanaannaggggaaaaaananaaaaaatttttggggattntttanaaaaanccttggggttaaattgggaaatttttttaaaaaaaaaaagggaaattttaaatttccggggggggtaaaggaaaggtttttaaccccctttcnccccgggaattanttaaaaaaaaagggggggaaaaaggggggaatttttttaaccacggaaaaaattgggtnggaaacccctttaaaaagggggttccttgggggcnngtganaaaatagtggggcgacccccgcggagaacncccaggaaaaanaggngcccgcggatatgtngcactagtggacncatataggaatatcaccccgcggaaatatatatagnggcacatattctttaaagccgccctttatcttcaaatgcggcacggaaaccggaggntttgaagaactcaaggaagcgcggcacgataccgccgcaataaacacgccgccaaatgtcccgagattgagcgccagattgccgcaaaacggccataatgacgcaaacagcgaccatgcgcggcggcaatcggtgcacttgcagcagcgccgttcggtatactttggcttgaaattttggcaagcggttgcagttacaattggcgatcaaattaccagcaggccgaaagncgcgttccgccaaacatgccaatt

SEQ ID NO: 1717 - DNA, 775 bp, Homo sapiens
  misc_feature (747)..(747): n equals a,t,g, or c
  misc_feature (772)..(775): n equals a,t,g, or c
gctttcttcccatccccaccacccacaggctcgccagagctaaagacagcggaaatagagcccaaggcagatggcagctggagggaaggagacgaagtcacactcatctgctctgcccgcggccatccagaccccaaactcagctggagccaattggggggcagccccgcagagccaatccccggacggcagggttgggtgagcagctctctgaccctgaaagtgaccagcgccctgagccgcgatggcatctcctgtgaagcctccaacccccacgggaacaagcgccatgtcttccacttcggcgccgtgagcccccagacctcccaggctggagtggccgtcatggccgtggccgtcagcgtgggcctcctgctcctcgtcgttgctgtcttctactgcgtgagacgcaaagggggcccctgctgccgccagcggcgggagaagggggctccgccgccaggggagccagggctgagccactcggggtcggagcaaccagagcagaccggccttctcatgggaggtgcctccggaggagccaggggtggcagcgggggcttcggagacgagtgctgagccaagaacctcctagaggctgtccctggacctggagctgcaggcatcagagaaccagccctgctcacgccatgcccgccccggcttcctcttccctcttccctctcctgccagccctcccttccttctctgccgcaaggcagggacccacagtgcttgcctggcttncgggaagggaaggaaaagggaaagnnnn

SEQ ID NO: 1718 - DNA, 613 bp, Homo sapiens
  misc_feature (308)..(308): n equals a,t,g, or c
  misc_feature (312)..(312): n equals a,t,g, or c
  misc_feature (314)..(321): n equals a,t,g, or c
  misc_feature (323)..(327): n equals a,t,g, or c
  misc_feature (329)..(330): n equals a,t,g, or c
  misc_feature (332)..(332): n equals a,t,g, or c
  misc_feature (349)..(349): n equals a,t,g, or c
  misc_feature (395)..(395): n equals a,t,g, or c
  misc_feature (406)..(406): n equals a,t,g, or c
  misc_feature (420)..(420): n equals a,t,g, or c
  misc_feature (466)..(466): n equals a,t,g, or c
  misc_feature (477)..(477): n equals a,t,g, or c
  misc_feature (483)..(483): n equals a,t,g, or c
  misc_feature (486)..(486): n equals a,t,g, or c
  misc_feature (500)..(500): n equals a,t,g, or c
  misc_feature (510)..(510): n equals a,t,g, or c
  misc_feature (517)..(517): n equals a,t,g, or c
  misc_feature (550)..(550): n equals a,t,g, or c
  misc_feature (566)..(566): n equals a,t,g, or c
  misc_feature (590)..(590): n equals a,t,g, or c
  misc_feature (612)..(612): n equals a,t,g, or c
ggcgagccgtgcgcgctctgcagcctgcacagcatcggcaagatcggcggcgcgcagaaccgctcctacagcaagctgctgtgcggcctgctggccgagcgcctgcgcatcagcccggacagggtctacatcaactattacgacatgaacgcggccaatgtgggctggaacaactccaccttcgcctaagagccgcagggacccacgctgtctgcgctggctccacccgggaacccgccgcacgctgtgttctaggcccgcccaccccaaccttctggtggggagaaataaacggtttagagactaanaaanannnnnnnnannnnnannanaaaaaggggcgggccgntctaaaaggatccctcgaggggcccaagcttacgcgttgcattgcnacgtcataagntctctccctatagngagtcgtattataagctaggcacttggccgtcgttttacaaacgtngtgactggganatctgntancttgggatctttgngaaggaaccnttatttntggggtgtgacataattggacaaactacctacngagatttaaaagcttntaaggtaaatataaaattttaagnggatatggggtaaactaactgna

SEQ ID NO: 1719 - DNA, 686 bp, Homo sapiens
  misc_feature (574)..(574): n equals a,t,g, or c
  misc_feature (610)..(610): n equals a,t,g, or c
  misc_feature (627)..(627): n equals a,t,g, or c
  misc_feature (635)..(635): n equals a,t,g, or c
ggcagaggggtccatacggcgttgttctggattcccgtcgtaacttaaagggaaactttcacaatgtccggagcccttgatgtcctgcaaatgaaggaggaggatgtccttaagttccttgcagcaggaacccacttaggtggcaccaatcttgacttccagatggaacagtacatctataaaaggaaaagtgatggcatctatatcataaatctcaagaggacctgggagaagcttctgctggcagctcgtgcaattgttgccattgaaaaccctgctgatgtcagtgttatatcctccaggaatactggccagagggctgtgctgaagtttgctgctgccactggagccactccaattgctggccgcttcactcctggaaccttcactaaccagatccaggcagccttccgggagccacggcttcttgtggttactgaccccagggctgaccaccagcctctcacggaggcatcttatgttaacctacctaccattgcgctgtgtaacacagattctcctctgcgctatgtggacattgccatcccatgcaacaacaagggagctcactcantgggtttggatgtggtggatgctggctcgggaaagntctgcgcaatgcgtggnaccatttnccgggaacaccccatgggaaggtcatgcctggacctggaccttttacagaa

SEQ ID NO: 1720 - DNA, 592 bp, Homo sapiens
  misc_feature (500)..(500): n equals a,t,g, or c
  misc_feature (564)..(564): n equals a,t,g, or c
  misc_feature (571)..(571): n equals a,t,g, or c
gctttctcattttcaaagctctgaatctcaaggtgtcaattaaagaggttccatttgggataaaaatcactaaacctggcttcctctctcaggagcacggtctgaatctgcacagagcaagatgctgagtggagtcgggggcttcgtgctgggcctgctcttccttggggccgggctgttcatctacttcaggaatcagaaaggtgaggagcctttggtagctggctgtctccatacgcttttctggaggaggaactatggctttgctgaagttggttctcagcatatgaatggccctggataaagcctctctactcccaaatgacctccaatgttctgcaaatccagaaatcatcagtgcatggttgctatgtcaaagcataatagcttgtggcctacagagataacagaaagattaacaggtataggtgctttggttgagatcgtggagcaaattaaggaagagcaactaaagctaatacaattacactggatcctgngacagacacttcacacttcatgggtcacatggtctggttctgctcctctctgccctgctggtgngggttgnggtgcagagaactctcaagtg

SEQ ID NO: 1721 - DNA, 570 bp, Homo sapiens
gcccacgcgtccgggcggaggtgcaggtcctggtgcttgatggtcgaggccatctcctgggccgcctggcggccatcgtggctaaacaggtactgctgggccggaaggtggtggtcgtacgctgtgaaggcatcaacatttctggcaatttctacagaaacaagttgaagtacctggctttcctccgcaagcggatgaacaccaacccttccgaggcccctaccacttccggcccccagccgcatcttctggcggaccgtgcgaggtatgctgccccacaaaaccaagcgaggccaggccgctctggaccgtctcaaggtgtttgacggcatcccaccgccctacgacaagaaaaagcggatggtggttcctgctgccctcaaggtcgtgcgtctgaagcctacaagaaagtttgcctatctggggcgcctggctcacgaggttggctggaagtaccaggcagtgacagccaccctggaggagaagaggaaagagaaagccaagatccactaccggaagaagaaacagctcatgaggctacggaaacaggcccgagaagacgtggagaaa

SEQ ID NO: 1722 - DNA, 458 bp, Homo sapiens
gcccaggaaggagaaaggccaagccaaagtgggccccaccctgcccccgtcgtgctccatccttccctgccggggcctgctggcccctgtaaggtcccgcccccaaagaccctggggccagcggggccgaaagcggagttgggtttgccttattttgctcattggattcaagttcttttgcatagttttcttctaacccctgttggagtccaggggctggagaaaaggacagatttatgcagctattttcatacattccctgttcagagtggggtaggggttctccgccgttacccgatccactccatcccccaccctctgaggggtgagtgtgtctttgcatgtttcctttgctgtggtgggagatagtttgactgaacccccaccttgaccttggtctccaggggtgtggaatggtgggggaatttgtttaaaaagacattttattataataaagt

SEQ ID NO: 1723 - DNA, 502 bp, Homo sapiens
gctcgccttgctgctggtcgtggccctaccgcgggtgtggacagacgccaacctgactgcgagacaacgagatccagaggactcccagcgaacggacgagggtgacaatagagtgtggtgtcatgtttgtgagagagaaaacactttcgagtgccagaacccaaggaggtgcaaatggacagagccgtactgcgttatagcggccgtgaaaatatttccacgttttttcatggttgcgaagcagtgctccgctggttgtgcagcgatggagagacccaagccagaggagaagcggtttctcctggaagagcccatgcccttcttttacctcaagtgttgtaaaattcgctactgcaatttagaggggccacctatcaactcatcagtgttcaaagaatatgctgggagcatgggtgagagctgtggtgggctgtggctggccatcctcctgctgctggcctccattgcagccggcctcagcctgtcttgagccacgggactg

SEQ ID NO: 1724 - DNA, 168 bp, Homo sapiens
cacacatgttctgttcctcctcctcatgcatttccagcctttcaaccctccccgactctgcggctcccctcagcccccttgcaagttcatggcctgtccctccaagacccctgctccactggcccttcgaccagtcctcccttgtgttctctctttccccgtccttcc

SEQ ID NO: 1725 - DNA, 514 bp, Homo sapiens
  misc_feature (506)..(506): n equals a,t,g, or c
cctggttgttcactccttgaaggacctgcccactgtgcttcctcactccttcaccatcggagccatctgcaagcgggaaaaccctcatgatgctgttgtctttcacccaaaatttgttgggaagaccctagaaaccctgccagagaagagtgtggtgggaaccagctccctgcgaagagcagcccagctgcagagaaagttcccgcatctggagttcaggagtattcggggaaacctcaacacccggcttcggaagctggacgagcagcaggagttcagtgccatcatcctggcaacagctggcctgcagcgcatgggctggcacaaccgggtggggcagatcctgcaccctgaggaatgcatgtatgctgtgggccaggtacacttgaccagggaagccacatggtgacatatgccttccctttgttctcaaccaagaagcttgtctcacaaccttctgcatctgcttccccagaatagcattctcagggaggggcagaccttgngatgctac

SEQ ID NO: 1726 - DNA, 629 bp, Homo sapiens
  misc_feature (413)..(413): n equals a,t,g, or c
  misc_feature (441)..(441): n equals a,t,g, or c
  misc_feature (564)..(564): n equals a,t,g, or c
  misc_feature (583)..(583): n equals a,t,g, or c
  misc_feature (587)..(587): n equals a,t,g, or c
  misc_feature (617)..(617): n equals a,t,g, or c
  misc_feature (629)..(629): n equals a,t,g, or c
gggcggcctccttctgagctcctgtcccctgctacacctattatcccagctgcctagattcagggaaagtgggacagcttgtaggggaggggctcctttccataaatccttgatgattgacaacacccatttttccttttgccgaccccaagagttttgggagttgtagttaatcatcaagagaatttggggcttccaagttgttcgggccaaggacctgagacctgaagggttgactttacccatttgggtgggagtgttgagcatctgtccccctttagatctctgaagccacaaataggatgcttgggaagactcctagctgtcctttttcctctccacacagtgctcaaggccagcttatagtcatatatatcacccagacataaaggaaaagacacattttttagganatgtttttaataaaagaaaattacaaanaaaaattttaaagacccctaaccctttgtgtgctctccattctgctccttcccatcggtgcccccatttctgaggtgcactgggaggctccccttctatttgggcttgatgactttcttttgnagcttgggctttgatggtncttncaggggcatttcttatccacataccctganctgggccccttn

SEQ ID NO: 1727 - DNA, 685 bp, Homo sapiens
  misc_feature (15)..(15): n equals a,t,g, or c
  misc_feature (475)..(475): n equals a,t,g, or c
  misc_feature (561)..(561): n equals a,t,g, or c
  misc_feature (627)..(627): n equals a,t,g, or c
  misc_feature (635)..(636): n equals a,t,g, or c
  misc_feature (641)..(641): n equals a,t,g, or c
  misc_feature (647)..(647): n equals a,t,g, or c
gggacgatttaagtntcgtaaagaacgagaagctgaacttggagctagggcaaaagaattcaccaatgtttacatcaagaattttggagaagacatggatgatgagcgccttaaggatctctttggcaagtttgggcctgccttaagtgtgaaagtaatgactgatgaaagtggaaaatccaaaggatttggatttgtaagctttgaaaggcatgaagatgcacagaaagctgtggatgagatgaacggaaaggagctcaatggaaaacaaatttatgttggtcgagctcagaaaaaggtggaacggcagacggaacttaagcgcaaatttgaacagatgaaacaagataggatcaccagataccagggtggtaatctttatgtgaaaaatcttgatgatggtattgatgatgaacgtctccggaaagagttttctccatttggtacaatcactagtgcaaaggttatgatgganggtggtcgcagcaaagggttgggtttggatggttctcctccccagaagaagcctaaagcagttaccgaaatgaacggtagaaatgnggccccaagcccttggatggagctttagcttcacgcaaagaaaacgcagggttaacttacttaccngtatttcnnagaanggaagngaccaagttgtcccaacctggaatcaaaccctacaggc

SEQ ID NO: 1728 - DNA, 699 bp, Homo sapiens
  misc_feature (377)..(377): n equals a,t,g, or c
  misc_feature (560)..(560): n equals a,t,g, or c
  misc_feature (583)..(583): n equals a,t,g, or c
  misc_feature (590)..(590): n equals a,t,g, or c
  misc_feature (601)..(601): n equals a,t,g, or c
  misc_feature (647)..(647): n equals a,t,g, or c
gaaatcactatgtagcttaaagatttctgttaatttgaaagaacaaaaacaagacagaacttctggtactctaatcaggatgattcctaacaagtcagtcatttgtgaacttagtggactttttggttactttaatttgcatatattctccagttacatcggactctatctgtggccttgttcttcatttcagtgttaatcagctaaacagaagttgttgcttatgatgtgtgagtgaacatatgccactgcctggcctttttttcttcagagcttgttgtctttttcgctatattagactttgcagtatgcccagaagctttccttcataaaatagaaagaaaaaaacatttggcttatttttcactgtagctagncttttatacaataatcttgtaagaaaatttcttgaattctaaatattactctttctagatttttgaaatcaaaaaggtttcagtaaaaaggttcttactttaatttaatatattaaggagtaaaaaaatggaaggggtaattaccataacctggtcattaatatccgaaatttaccatagcanttttaggaccatagtaaggaatntaggcanaccgggagtancctaaggggaattggaggagctaatggtggaaataaatgggttttnactgggctccggtttccaatggtggtttaatggccaattggaaccgggcaaa

SEQ ID NO: 1729 - DNA, 787 bp, Homo sapiens
  misc_feature (15)..(15): n equals a,t,g, or c
  misc_feature (200)..(200): n equals a,t,g, or c
  misc_feature (301)..(301): n equals a,t,g, or c
  misc_feature (346)..(346): n equals a,t,g, or c
  misc_feature (386)..(386): n equals a,t,g, or c
  misc_feature (392)..(393): n equals a,t,g, or c
  misc_feature (417)..(417): n equals a,t,g, or c
  misc_feature (436)..(436): n equals a,t,g, or c
  misc_feature (481)..(481): n equals a,t,g, or c
  misc_feature (495)..(495): n equals a,t,g, or c
  misc_feature (540)..(540): n equals a,t,g, or c
  misc_feature (547)..(547): n equals a,t,g, or c
  misc_feature (578)..(578): n equals a,t,g, or c
  misc_feature (607)..(607): n equals a,t,g, or c
  misc_feature (610)..(610): n equals a,t,g, or c
  misc_feature (616)..(616): n equals a,t,g, or c
  misc_feature (618)..(618): n equals a,t,g, or c
  misc_feature (626)..(626): n equals a,t,g, or c
  misc_feature (646)..(646): n equals a,t,g, or c
  misc_feature (661)..(661): n equals a,t,g, or c
  misc_feature (676)..(677): n equals a,t,g, or c
  misc_feature (683)..(683): n equals a,t,g, or c
  misc_feature (740)..(740): n equals a,t,g, or c
  misc_feature (765)..(765): n equals a,t,g, or c
  misc_feature (770)..(770): n equals a,t,g, or c
  misc_feature (782)..(782): n equals a,t,g, or c
  misc_feature (785)..(785): n equals a,t,g, or c
ggcagagtcagccancatgaccgagcgccgcgtccccttctcgctcctgcggggccccagctgggaccccttccgcgactggtacccgcatagccgcctcttcgaccaggccttcgggctgccccggctgccggaggagtggtcgcagtggttaggcggcagcagctggccaggctacgtgcgccccctgcccccgccgncatcgagagccccgcagtggccgcgcccgctacagccgcgcgctcagccggcaactcagcagcggggtctcggagatccggcacactgcggaccgctggcngcgtgtccctggatgtcaaccacttcgccccggacgaagctgacnggtcaaagaccaaggatggcgtggtggaagatcaccggcnagcacnnaggagcgggaaggaacgaagcatnggttacatcttcccggtgnctttaacgccggaaaataccacggctggcccccccggtgtggganccccaacccaaggntttccttcttccctggtcccctggaagggcacaacttgaaccggnggaaggnccccaatgccccaagcttaggccacgcaatnccaacgaggattcccattccaagtaaccnttngaggtncngggcccangtttgggggccccaaaaacntggaaaatcccattnaacttgccgcccaannaaggcntaaacccgaagcccaaccctggttccgcaactggttggcctccccggcacctggggntctttgaaccttaaatccggttttntaaanaagttaaggccnaanta

SEQ ID NO: 1730 - DNA, 336 bp, Homo sapiens
  misc_feature (9)..(9): n equals a,t,g, or c
  misc_feature (13)..(13): n equals a,t,g, or c
  misc_feature (15)..(15): n equals a,t,g, or c
  misc_feature (25)..(25): n equals a,t,g, or c
  misc_feature (84)..(84): n equals a,t,g, or c
  misc_feature (110)..(110): n equals a,t,g, or c
  misc_feature (115)..(115): n equals a,t,g, or c
  misc_feature (134)..(134): n equals a,t,g, or c
  misc_feature (145)..(145): n equals a,t,g, or c
  misc_feature (184)..(184): n equals a,t,g, or c
  misc_feature (188)..(188): n equals a,t,g, or c
  misc_feature (224)..(225): n equals a,t,g, or c
  misc_feature (227)..(227): n equals a,t,g, or c
  misc_feature (251)..(251): n equals a,t,g, or c
  misc_feature (261)..(262): n equals a,t,g, or c
  misc_feature (270)..(270): n equals a,t,g, or c
  misc_feature (324)..(324): n equals a,t,g, or c
ggaggtctngcgncncggctgtggngtttcaccgggaaaggctcgaggagagcgcggctcacgagagataacccagttgtgctncctggaaccttcaatttcaaggcctncctgnctctactaggcgccttagnttactatgggnaaccacttgactgaaatggcgcccactgtctcctccttnttgncccacttccaagccctgcgtgatgtggtcattggtnngnactcttgctggaaagacctccctnctttaccgtnncacgatcnaggagtttgtacagagtgtacccaccaaaggcttcacaccgagaagatccgggngccccttcgggg

SEQ ID NO: 1731 - DNA, 783 bp, Homo sapiens
  misc_feature (10)..(10): n equals a,t,g, or c
  misc_feature (19)..(19): n equals a,t,g, or c
  misc_feature (24)..(24): n equals a,t,g, or c
  misc_feature (32)..(32): n equals a,t,g, or c
  misc_feature (80)..(80): n equals a,t,g, or c
  misc_feature (605)..(605): n equals a,t,g, or c
  misc_feature (706)..(706): n equals a,t,g, or c
  misc_feature (721)..(721): n equals a,t,g, or c
  misc_feature (733)..(733): n equals a,t,g, or c
  misc_feature (744)..(744): n equals a,t,g, or c
  misc_feature (761)..(761): n equals a,t,g, or c
ggtttaacgngaactaacnagggnacgttttncaggtacacgctccggaattcccgggtcgacccacgcgtccggttccntgcacaaaatgcccggcgaagccacagaaaccgtccctgctacagagcaggagttgccgcagccccaggctgagacagggtctggaacagaatctgacagtgatgaatcagtaccagagcttgaagaacaggattccacccaggcaaccacacaacaagcccagctggcggcagcagctgaaatcgatgaagaaccagtcagtaaagcaaaacagagtcggagtgaaaagaaggcacggaaggctatgtccaaactgggtcttcggcaggttacaggagttactagagtcactatccggaaatctaagaatatcctctttgtcatcacaaaaccagatgtctacaagagccctgcttcagatacttacatagtttttggggaagccaagatcgaagatttatcccagcaagcacaactagcagctgctgagaaattcaaagttcaaggtgaagctgtctcaaacattcaagaaaacacacagactccaactgtacaagaggagagtgaagaggaagaggtcgatnaaacaggtgtaggaagtttaaggacatagaaattggtcatggcacaagcaaaagtgtcgagagcaaaggcaggtcccgagcccttgaagaaacaaccggtnaatgggataattggnaaaatgcccaantaattgggaanttaacccaatgggaaancccattattgggaaagccaaac

SEQ ID NO: 1732 - DNA, 808 bp, Homo sapiens
  misc_feature (1)..(1): n equals a,t,g, or c
  misc_feature (3)..(3): n equals a,t,g, or c
  misc_feature (15)..(15): n equals a,t,g, or c
  misc_feature (19)..(19): n equals a,t,g, or c
  misc_feature (69)..(69): n equals a,t,g, or c
  misc_feature (521)..(521): n equals a,t,g, or c
  misc_feature (606)..(606): n equals a,t,g, or c
  misc_feature (632)..(632): n equals a,t,g, or c
  misc_feature (725)..(725): n equals a,t,g, or c
  misc_feature (729)..(729): n equals a,t,g, or c
  misc_feature (732)..(732): n equals a,t,g, or c
  misc_feature (754)..(754): n equals a,t,g, or c
  misc_feature (791)..(791): n equals a,t,g, or c
  misc_feature (807)..(807): n equals a,t,g, or c
ngnacttatcagggnacgntcccaggtaccgctccggaattcccgggtcgacccacgcgtccgggagantatatgggagccacttgtcatgcctgcattggtggaacaaatgttcgaaatgaaatgcaaaaactgcaggctgaagcaccacatattgttgttggtacacccgggagagtgtttgatatgttaaacagaagatacctttctccaaaatggatcaaaatgtttgttttggatgaagcagatgaaatgttgagccgtggttttaaggatcaaatctatgagattttccaaaaactaaacacaagtattcaggttgtgttgctttctgccacaatgccaactgatgtgttggaagtgaccaaaaaattcatgagagatccaattcgaattctggtgaaaaaggaagaattgacccttgaaggaatcaaacagttttatattaatgttgagagagaggaatggaagttggatacactttgtgacttgtacgagacactgaccattacacaggctgntatttttctcaatacgaggcgcaaggtggactggctgactgagaagatgcatgccagagacttcacagtttctgctctgcatggngacatggaccagaaggagagagatgntatcatgagggaattccggcagggtcaagtcgtggtctgatcactactgacttggttggctcgcgggaatgatgtgcaacaagtggctttggntatnaantatgatctaacttaccaatcgngaaactatattcccggaaatgcaaaagggggtccganttggaaggaaaggtgng

SEQ ID NO: 1733 - DNA, 685 bp, Homo sapiens
  misc_feature (9)..(9): n equals a,t,g, or c
  misc_feature (11)..(11): n equals a,t,g, or c
  misc_feature (13)..(13): n equals a,t,g, or c
  misc_feature (79)..(79): n equals a,t,g, or c
  misc_feature (103)..(103): n equals a,t,g, or c
  misc_feature (106)..(106): n equals a,t,g, or c
  misc_feature (400)..(400): n equals a,t,g, or c
  misc_feature (533)..(534): n equals a,t,g, or c
  misc_feature (539)..(539): n equals a,t,g, or c
  misc_feature (541)..(541): n equals a,t,g, or c
  misc_feature (549)..(551): n equals a,t,g, or c
  misc_feature (557)..(557): n equals a,t,g, or c
  misc_feature (641)..(641): n equals a,t,g, or c
  misc_feature (648)..(648): n equals a,t,g, or c
  misc_feature (664)..(664): n equals a,t,g, or c
  misc_feature (672)..(672): n equals a,t,g, or c
  misc_feature (675)..(675): n equals a,t,g, or c
gtattaacngncnttaacgggacacttatcggggaacgcccgcaggtaccggtccggaattcccgggtcgacccacgcntccggctcctgtgaaaaagcttgnggngaaggggggcaaaaaaaagaagcaagttctgaagttcactcttgattgcacccaccctgtagaagatggaatcatggatgctgccaattttgagcagtttttgcaagaaaggatcaaagtgaacggaaaagctgggaaccttggtggaggggtggtgaccatcgaaaggagcaagagcaagatcaccgtgacatccgaggtgcctttctccaaaaggtatttgaaatatctcaccaaaaaatatttgaagaagaataatctacgtgactggttgcgcgtagttgctaacagcanagagagttacgaattacgttacttccagattaaccaggacgaagaagaggaggaagacgaggattaaatttcatttatctggaaaattttgtatgagttcttgaataaaacttgggaaccaaaaaaaaaaagnnctccngngcaaagannnaatctnaaaaaagggcggcccgttctagaggatccctcgaggggcccaagcttacgcgtgcatgcgacgtcatagctctctccctatagngagtccnaattataagctaggcnctggccgncgntttacaacgc

SEQ ID NO: 1734 - DNA, 702 bp, Homo sapiens
  misc_feature (298)..(298): n equals a,t,g, or c
  misc_feature (531)..(531): n equals a,t,g, or c
  misc_feature (555)..(555): n equals a,t,g, or c
  misc_feature (629)..(629): n equals a,t,g, or c
  misc_feature (665)..(665): n equals a,t,g, or c
  misc_feature (671)..(671): n equals a,t,g, or c
  misc_feature (690)..(690): n equals a,t,g, or c
  misc_feature (700)..(700): n equals a,t,g, or c
ggccgaggattcagcagcctcccccttgagccccctcgcttcccgacgttccgttcccccctgcccgccttcttccgccaccgccgccgccgccttccgcaggccgtttccaccgaggaaaaggaatcgtatcgtatgtccgctatccagaacctccactctttcgacccctttgctgatgcaagtaagggtgatgacctgcttcctgctggcactgaggattatatccatataagaattcaacagagaaacggcaggaagacccttactactgtccaagggatcgctgatgattacnataaaaagaaactagtgaaggcgtttaagaaaaagtttgcctgcaatggtactgtaattgagcatccggaatatggagaagtaattcagctacagggtgaccaacgcaagaacatatgccagttcctcgtagagattggactggctaaggacgatcaagctgaaggttcatgggttttaagtgcttgtggctcactgaagcttaagtgaggatttccttgcaatgagtagaanttcccttctctccttggcacaggnttaaaaacctcacagcttggataatggaaccaattggggtccgcttttaacttggactaagtggaacttccttntgcataaactgaaaggagcccaaaaaaaaaaaaaanggcggncggtttagagaatccttgnggggccaagntt

SEQ ID NO: 1735 - DNA, 533 bp, Homo sapiens
  misc_feature (121)..(121): n equals a,t,g, or c
  misc_feature (254)..(254): n equals a,t,g, or c
  misc_feature (261)..(261): n equals a,t,g, or c
  misc_feature (265)..(265): n equals a,t,g, or c
  misc_feature (272)..(272): n equals a,t,g, or c
  misc_feature (298)..(298): n equals a,t,g, or c
  misc_feature (375)..(375): n equals a,t,g, or c
  misc_feature (424)..(424): n equals a,t,g, or c
  misc_feature (511)..(511): n equals a,t,g, or c
  misc_feature (515)..(516): n equals a,t,g, or c
  misc_feature (520)..(520): n equals a,t,g, or c
  misc_feature (524)..(524): n equals a,t,g, or c
ggcgccttctccagtccgcggtgccatggcccccgcccgtctgttcgcgctgctgctgctcttcgtaggcggagtcgccgagtcgatccgagagactgaggtcatcgacccccaggacctnctagaaggccgatacttctccggagccctaccagacgatgaggatgtagtggggcccgggcaggaatctgatgactttgagctgtctggctctggagatctggatgacttggaagacttcatgatcggccttnaagttgncatnccttggngcctctagataaccatatcccttganaggcagggtctgggagccaaagtccccaccgaacccaagaaactagaggagaatgagggtatccccaagagaatctnacccgttgaaaagagtgaggatgtgtccaacaaggtgtcaatgtccaanacttgtgcaagggcaagcaacatcttttgagagaacggaagtcctggcaagttggccctaaaacaattgaaaggactacacctttcnttanngggngggntttttaatg

SEQ ID NO: 1736 - DNA, 531 bp, Homo sapiens
  misc_feature (117)..(117): n equals a,t,g, or c
  misc_feature (220)..(220): n equals a,t,g, or c
  misc_feature (228)..(228): n equals a,t,g, or c
  misc_feature (260)..(260): n equals a,t,g, or c
  misc_feature (279)..(279): n equals a,t,g, or c
  misc_feature (298)..(298): n equals a,t,g, or c
  misc_feature (351)..(351): n equals a,t,g, or c
  misc_feature (358)..(358): n equals a,t,g, or c
  misc_feature (401)..(401): n equals a,t,g, or c
  misc_feature (403)..(403): n equals a,t,g, or c
  misc_feature (417)..(417): n equals a,t,g, or c
  misc_feature (421)..(421): n equals a,t,g, or c
  misc_feature (474)..(474): n equals a,t,g, or c
  misc_feature (492)..(492): n equals a,t,g, or c
  misc_feature (499)..(499): n equals a,t,g, or c
  misc_feature (523)..(523): n equals a,t,g, or c
  misc_feature (528)..(528): n equals a,t,g, or c
ggtctgagaggtctccctgaatttcagtgacacatagtgcagcccggcagtgtcccacttccgtggagagagccgctggaatggtgtggacccatcccgcgggtgaccggtgcctgntctcccctgaccgagcctgtgagcacatcgccccctgctggcgacagcggggaaatgaagggctgaaaatatccttcccacaagggcaatccccgggaactgncgagcaanccaaggccctggcctttcttgaaatggtggcnaactgaatcttggtccggnttcctaacttttaagtggnaaaaagtgcctggcaacttggctgccgtggaggaatcaatcgtggttggaagnttattgncgtgctttcatgcaaaagtggtttgcctttatggtaactttcngntccctccaagctgnaaanttttaactggggcattaagctttttccaatacaagaaggtggcattccccaanaagggggttttcttgccntaacaanccttggcgggcttaacaaaacttnaaggnttg

SEQ ID NO: 1737 - DNA, 798 bp, Homo sapiens
  misc_feature (2)..(2): n equals a,t,g, or c
  misc_feature (4)..(5): n equals a,t,g, or c
  misc_feature (7)..(7): n equals a,t,g, or c
  misc_feature (12)..(12): n equals a,t,g, or c
  misc_feature (15)..(15): n equals a,t,g, or c
  misc_feature (60)..(60): n equals a,t,g, or c
  misc_feature (85)..(85): n equals a,t,g, or c
  misc_feature (92)..(92): n equals a,t,g, or c
  misc_feature (97)..(97): n equals a,t,g, or c
  misc_feature (109)..(109): n equals a,t,g, or c
  misc_feature (112)..(112): n equals a,t,g, or c
  misc_feature (128)..(128): n equals a,t,g, or c
  misc_feature (145)..(145): n equals a,t,g, or c
  misc_feature (215)..(215): n equals a,t,g, or c
  misc_feature (218)..(218): n equals a,t,g, or c
  misc_feature (223)..(223): n equals a,t,g, or c
  misc_feature (226)..(226): n equals a,t,g, or c
  misc_feature (266)..(266): n equals a,t,g, or c
  misc_feature (269)..(270): n equals a,t,g, or c
  misc_feature (284)..(284): n equals a,t,g, or c
  misc_feature (287)..(287): n equals a,t,g, or c
  misc_feature (295)..(295): n equals a,t,g, or c
  misc_feature (304)..(305): n equals a,t,g, or c
  misc_feature (309)..(309): n equals a,t,g, or c
  misc_feature (312)..(313): n equals a,t,g, or c
  misc_feature (329)..(329): n equals a,t,g, or c
  misc_feature (341)..(341): n equals a,t,g, or c
  misc_feature (347)..(347): n equals a,t,g, or c
  misc_feature (364)..(364): n equals a,t,g, or c
  misc_feature (366)..(366): n equals a,t,g, or c
  misc_feature (383)..(383): n equals a,t,g, or c
  misc_feature (386)..(386): n equals a,t,g, or c
  misc_feature (392)..(392): n equals a,t,g, or c
  misc_feature (399)..(399): n equals a,t,g, or c
  misc_feature (410)..(410): n equals a,t,g, or c
  misc_feature (429)..(429): n equals a,t,g, or c
  misc_feature (435)..(435): n equals a,t,g, or c
  misc_feature (446)..(446): n equals a,t,g, or c
  misc_feature (463)..(463): n equals a,t,g, or c
  misc_feature (469)..(470): n equals a,t,g, or c
  misc_feature (491)..(492): n equals a,t,g, or c
  misc_feature (495)..(495): n equals a,t,g, or c
  misc_feature (499)..(499): n equals a,t,g, or c
  misc_feature (522)..(524): n equals a,t,g, or c
  misc_feature (531)..(531): n equals a,t,g, or c
  misc_feature (540)..(540): n equals a,t,g, or c
  misc_feature (555)..(555): n equals a,t,g, or c
  misc_feature (562)..(562): n equals a,t,g, or c
  misc_feature (567)..(567): n equals a,t,g, or c
  misc_feature (572)..(572): n equals a,t,g, or c
  misc_feature (590)..(590): n equals a,t,g, or c
  misc_feature (605)..(605): n equals a,t,g, or c
  misc_feature (648)..(648): n equals a,t,g, or c
  misc_feature (691)..(691): n equals a,t,g, or c
  misc_feature (707)..(707): n equals a,t,g, or c
  misc_feature (712)..(712): n equals a,t,g, or c
  misc_feature (717)..(717): n equals a,t,g, or c
  misc_feature (719)..(719): n equals a,t,g, or c
  misc_feature (754)..(754): n equals a,t,g, or c
  misc_feature (771)..(772): n equals a,t,g, or c
  misc_feature (779)..(779): n equals a,t,g, or c
  misc_feature (789)..(789): n equals a,t,g, or c
  misc_feature (793)..(793): n equals a,t,g, or c
  misc_feature (798)..(798): n equals a,t,g, or c
ancnncnacagnctntaggaaagcctccggtaccggtccggaattcccgggacgacccangttttcgcgcgtccgcttcgtgagnacagagnctggnctttgccgatcnggngcccgtccacacccgncgccagctcaccatggntgatgatatcgccgcgctcgacgacgacaacaggctccggcatgtgcaaggtcaggatttcgacagactnatnccccncgntccgtcttcccctccatcgaggggcagccccaggcaccanggnngtgatggagggcanggntcagaagnattcctatnngggngannaggcccagagcacganaggcattctcancctgangtaccccattaaggacngnataggcacaatctgggnacnacaggncaaaatntggttccatanctttacaaggagctgtacngggttnctgaggagcanccagactgttgaccgangctggnntgaaccccaaggccaatcgcnngangatnacccagatcatgtttgagacctnnncaaagcnaagtcatgnacggtggttatccangctggantattncttgnacggcttttggccgtacnaatggcattgggganggacttccgttacgggggcacccacacttgggcccatttaccnagggggatgccttttcccatggcaatctggggtttggaccagncttgccgggacttgantgganaactnangaagatcttaacgggcggggttacggtttaacacnaagggccgacgggaaannggggggnaatttagggnaaantttgn

SEQ ID NO: 1738 - DNA, 589 bp, Homo sapiens
  misc_feature (11)..(12): n equals a,t,g, or c
  misc_feature (287)..(287): n equals a,t,g, or c
  misc_feature (307)..(307): n equals a,t,g, or c
  misc_feature (324)..(324): n equals a,t,g, or c
  misc_feature (354)..(354): n equals a,t,g, or c
  misc_feature (410)..(410): n equals a,t,g, or c
  misc_feature (443)..(443): n equals a,t,g, or c
  misc_feature (482)..(482): n equals a,t,g, or c
  misc_feature (560)..(560): n equals a,t,g, or c
  misc_feature (567)..(567): n equals a,t,g, or c
  misc_feature (572)..(572): n equals a,t,g, or c
  misc_feature (576)..(576): n equals a,t,g, or c
  misc_feature (587)..(587): n equals a,t,g, or c
gaattggcagnnaacaaccttgaggaaccttgacgagtgtccggagtttagaaaacttagggatggagccccccaagatgaacccagtggtggagccactgtcctggatgctgggcacctggctgtcggacccacctggagccgggacctaccccacactgcagcccttccagtacctggaggaggttcacatctcccacgtgggccagcccatgctgaacttctcgttcaactccttccacccggacacgcgcaagccgatgcacagagagtgtggcttcattcgncttaagcccgacaccaacangtggcctttgcagcgcnagaacacagcctgtggaagtggaggaggcnaggtgaacggcaggagctgtgcatcgcatcccactccatcgccaggatctccttcncaaggagcccacgtagagcagatacccggaagntcaggctgaatctgaaggcaaacttgagcagacggtctncatggcaaccacgacacagcaatgactaacatcttacgcactacaaaaggtgaccggaaactagagtttgagcctcgnaggctgntatgngctnacggcggtctnac

SEQ ID NO: 1739 - DNA, 707 bp, Homo sapiens
  misc_feature (16)..(17): n equals a,t,g, or c
  misc_feature (21)..(21): n equals a,t,g, or c
  misc_feature (32)..(32): n equals a,t,g, or c
  misc_feature (83)..(83): n equals a,t,g, or c
  misc_feature (363)..(363): n equals a,t,g, or c
  misc_feature (412)..(412): n equals a,t,g, or c
  misc_feature (489)..(489): n equals a,t,g, or c
  misc_feature (601)..(601): n equals a,t,g, or c
  misc_feature (617)..(617): n equals a,t,g, or c
  misc_feature (677)..(677): n equals a,t,g, or c
  misc_feature (689)..(689): n equals a,t,g, or c
  misc_feature (703)..(703): n equals a,t,g, or c
  misc_feature (707)..(707): n equals a,t,g, or c
tacttcgacactatanntggnacgcctgcacntaccggtccggaattcccgggtcgacccacgcgtccgcccacgcgtccgcncacgcgtccggcagcctgaggtgatctgtgaaaatggttcgctattcacttgacccggagaaccccacgaaatcatgcaaatcaagaggttccaatcttcgtgttcactttaagaacactcgtgaaactgctcaggccatcaagggtatgcatatacgaaaagccacgaagtatctgaaagatgtcactttacagaaacagtgtgtaccattccgacgttacaatggtggagttggcaggtgtgcgcaggccaagcaatggggctggacacaaggtcggnggcccaaaaaggaagtgctgaatttttgctgacatgcttaaaaacgcanagagtaatgctgaacttaagggtttagatgtagattctctggtcattgagcatatccaagtgaacaaagcacctaanatgcgccgccggacctacagagctcatggtcggattaacccatacatgagctctccctgccacattgagatgatccttacggaaaaggaacagattggtcctaaaccagaanaggaggttgccagaanaaaaagatatccagaagaaactgagaaacaaaaacttatggcacgggagtaaattagcantaaaataaatgnaattaaaaggaaangaan

SEQ ID NO: 1740 - DNA, 701 bp, Homo sapiens
  misc_feature (8)..(10): n equals a,t,g, or c
  misc_feature (16)..(16): n equals a,t,g, or c
  misc_feature (40)..(40): n equals a,t,g, or c
  misc_feature (386)..(386): n equals a,t,g, or c
  misc_feature (393)..(393): n equals a,t,g, or c
  misc_feature (398)..(398): n equals a,t,g, or c
  misc_feature (588)..(588): n equals a,t,g, or c
  misc_feature (651)..(651): n equals a,t,g, or c
  misc_feature (668)..(668): n equals a,t,g, or c
  misc_feature (677)..(677): n equals a,t,g, or c
  misc_feature (685)..(685): n equals a,t,g, or c
  misc_feature (687)..(687): n equals a,t,g, or c
ctgacggnnnctgtcnacgggaattacttcgacactatanttgggacgcctgcacctaccggtccggaattcccgggtcgacccacgcgtccgattttccaatgagagatggtatagatgatgagtcatatgggcagatatttaagcctattatctcaaaggtgatggagatgtatcaacctagtgctgtggtattacagtgtggtgcagactcattatctggtgatagactgggttgtttcaatctaacagtcaaaggtcatgctaaatgtgtagaagttgtaaaaacttttaacttaccattactgatgcttggaggaggtggctacacaatccgtaatgttgctcgatgttggacatatgagactgcagttgcccttgattgngagaatnccaangaggttgccatataatgattactttgagtattttggaccagacttcaaactgcatattagtccttcaaacatgacaaaccagaacactccagaatatatggaaaagataaaacagcgttttgtttgaaaatttgcgcatgttacctcatgcacctggtgtccagatgcaagctattccagaagatgctgntcatgaagacagtggagatgaagatggagaagatcagacagagaatttctattcgagcatcanacaagcggatagcttgngatgaaaantctcagantnttgaggatgaagga

SEQ ID NO: 1741 - DNA, 724 bp, Homo sapiens
  misc_feature (539)..(539): n equals a,t,g, or c
  misc_feature (543)..(543): n equals a,t,g, or c
  misc_feature (565)..(565): n equals a,t,g, or c
  misc_feature (568)..(568): n equals a,t,g, or c
  misc_feature (571)..(571): n equals a,t,g, or c
  misc_feature (595)..(595): n equals a,t,g, or c
  misc_feature (649)..(649): n equals a,t,g, or c
  misc_feature (653)..(653): n equals a,t,g, or c
  misc_feature (674)..(674): n equals a,t,g, or c
  misc_feature (712)..(713): n equals a,t,g, or c
gcgccgagcgatgggcatctctcgggacaactggcacaagcgccgcaaaaccgggggcaagagaaagccctaccacaagaagcggaagtatgagttggggcgcccagctgccaacaccaagattggcccccgccgcatccacacagtccgtgtgcggggaggtaacaagaaataccgtgccctgaggttggacgtggggaatttctcctggggctcagagtgttgtactcgtaaaacaaggatcatcgatgttgtctacaatgcatctaataacgagctggttcgtaccaagaccctggtgaagaattgcatcgtgctcatcgacagcacaccgtaccgacagtggtacgagtcccactatgcgctgcccctgggccgcaagaagggagccaagctgactcctgaggaagaagagattttaaacaaaaaacgatctaaaaaaattcagaagaaatatgatgaaaggaaaaagaatgccaaaatcaagcagtcttctggaggaacaagtttcagcaaggcaagcttcttgcgtgcatcgntttnaaggccgggacagtgtgggccnaancanatggctttcttaaagggcaaaaanagtttgggaagttctatcttaaggaaaaatcaagggcccgcaaaggggcaaatnaaancccttggttttgggctttaancccatgttaaaaaaaaaaaaaaaaaaaaggggggcccnntttttaaaagg

SEQ ID NO: 1742 - DNA, 780 bp, Homo sapiens
  misc_feature (11)..(11): n equals a,t,g, or c
  misc_feature (27)..(27): n equals a,t,g, or c
  misc_feature (388)..(388): n equals a,t,g, or c
  misc_feature (399)..(399): n equals a,t,g, or c
  misc_feature (403)..(403): n equals a,t,g, or c
  misc_feature (431)..(431): n equals a,t,g, or c
  misc_feature (519)..(519): n equals a,t,g, or c
  misc_feature (610)..(610): n equals a,t,g, or c
  misc_feature (649)..(650): n equals a,t,g, or c
  misc_feature (713)..(713): n equals a,t,g, or c
  misc_feature (718)..(718): n equals a,t,g, or c
  misc_feature (736)..(736): n equals a,t,g, or c
  misc_feature (770)..(770): n equals a,t,g, or c
  misc_feature (775)..(775): n equals a,t,g, or c
ccttaacgganagctccacgcctgctnccaccggtccgcaattcccgggtcgacccacgcgtccggcgagaagccggacgagttcgagtccggcatctcccaggctcttctggagctggagatgaactcggacctcaaggctcagctcagggagctgaatattacggcagctaaggaaattgaagttggtggtggtcggaaagctatcataatctttgttcccgttcctcaactgaaatctttccagaaaatccaagtccggctagtacgcgaattggagaaaaagttcagtgggaagcatgtcgtctttatcgctcagaggagaattctgcctaagccaactcgaaaaagccgtacaaaaaataagcaaaagcgtccaggagcccgnactttgacagnttgngcacgatggccatccttgaggacttggncttccaagcgaaattgtgggcaagagaatccgcgtcaaaactagatggcagcggctcataaagggttcatttggacaaagcacagcanaacaatgtggaacacaaggttgaaacttttctggtgctataagaagctacgggcaaggatggtaattttgaattcccagagtttcaattgnaaacaaaaatgactaaataaaaagtatatattcacaaannaaaaaaaaaagggcggcccgttctaaaggatcccttgaggggcccaagcttaagcgtgccatncaagncataagttctcttcctanagggggcggattataagctaggcactggccgcgntttanaaggc

SEQ ID NO: 1743 - DNA, 281 bp, Homo sapiens
cttgaaacttggttcccagaaaacacatttctggtttataatctccttttatgctcacctgacattaattatctgtccttgatgatgtgtttaaactgagtagcagaaaacagaggccacactttctgggaaattttaaaggaagaaaccatttttaatgagatgaaaatatttaacgaatttaaaaagctaatgacaattttgagaaaaggtttgggatgtatattgctatgtaatttaataaactgattttatggatataaaaaaaaaaaaaaaaaaag

SEQ ID NO: 1744 - DNA, 192 bp, Homo sapiens
caagcgaggccaggccgctctggaccgtctcaaggtgtttgacggcatcccaccgccctacgacaagaaaaagcggatggtggttcctgctgccctcaaggtcgtgcgtctgaagcctacaagaaagtttgcctatctggggcgcctggctcacgaggttggctggaagtaccaggcagtgacagccaccct

SEQ ID NO: 1745 - DNA, 509 bp, Homo sapiens
ccttttgaaaaattacagttagctaaaaggcaattgacaccgttattctggttattggtagagctatcagcactggtttttttaaataagttgagctttttagtatcctgatggccttcagaatagctgttttgatgcctacttttagatctagttaaaataatcaggtactctgtagctttgaaaccctcttgtcttacagatgtggttaggtgttgatgtaccaaatcaaggtagtaaacaatccaagatgcagttggaggccatcctgccctgccctatgctctgtgaactgacctagctaggccttgttcctctatctgtgaatgcgtgactcatcgatatgggcgtttgtgttgggcccataccaaccttgtttagtcccacagtgttttgttcgccccacggaggccaagaaagccgcagatgaggccaagatgagatttgcccacatagatggagatcatctgacactgctgaacgtctaccatgcttttaaacaaaatcat

SEQ ID NO: 1746 - DNA, 641 bp, Homo sapiens
  misc_feature (467)..(467): n equals a,t,g, or c
  misc_feature (524)..(524): n equals a,t,g, or c
  misc_feature (579)..(579): n equals a,t,g, or c
  misc_feature (585)..(585): n equals a,t,g, or c
  misc_feature (630)..(630): n equals a,t,g, or c
  misc_feature (640)..(641): n equals a,t,g, or c
ggcggaggtgcaggtcctggtgcttgatggtcgaggccatctcctgggccgcctggcggccatcgtggctaaacaggtactgctgggccggaaggtggtggtcgtacgctgtgaaggcatcaacatttctggcaatttctacagaaacaagttgaagtacctggctttcctccgcaagcggatgaacaccaacccttcccgaggcccctaccacttccgggcccccagccgcatcttctggcggaccgtgcgaggtatgctgccccacaaaaccaagcgaggccaggccgctctggaccgtctcaaggtgtttgacggcatcccaccgccctacgacaagaaaaagcggatggtggttcctgctgccctcaaggtcgtgcgtctgaagcctacaagaaagtttgcctatctggggcgcctggctcacgaggttggctggaagtaccaggcagtgacagccaccctgnaggagaagaggaaagagaaagccagatccactaccggaagaagaaacagctcatgangctacggaaacaggccgagaagaacgtggagaagaaaattgaccaatacacagangtcctnaagacccacggactctggtctgagcccaataaagactggtaattncttaaaaaann

SEQ ID NO: 1747 - DNA, 551 bp, Homo sapiens
  misc_feature (9)..(9): n equals a,t,g, or c
  misc_feature (11)..(12): n equals a,t,g, or c
  misc_feature (14)..(14): n equals a,t,g, or c
  misc_feature (18)..(18): n equals a,t,g, or c
  misc_feature (418)..(418): n equals a,t,g, or c
  misc_feature (489)..(489): n equals a,t,g, or c
  misc_feature (500)..(500): n equals a,t,g, or c
  misc_feature (539)..(539): n equals a,t,g, or c
  misc_feature (542)..(542): n equals a,t,g, or c
  misc_feature (544)..(544): n equals a,t,g, or c
gtaggtggncnncnttgngaggtacgcctgcaggtaccggtccggaattcccgggtcgacccacgcgtccggaggagtgagttttctgccagtgactgtcttcaaataagagtctgggaggtggctgatcggagtatttatcacattgggagaaatggaaccagatgacctgaagttctgagccattctcagagaccatgatgtgagatatttatggaaaaatctgtttcattttatttcaaagcaataatttgctatttatgccttcggattttataatactttttggaatgagacatacgctacaaaccaattcaagtaatacgtgcattttacagatacacagagttttaatagggctcagaaaattatttaaaatgcttttaatcaaatgcaactttattaatggatacaattntgtataactctaatctcgctaattcgacttatattttaaactcttaactaggtaagaaacttaagacttanaaggattttgngggaaaaaacgtcaaattcacccctcccttttttctgcntangnagttcat

SEQ ID NO: 1748 - DNA, 359 bp, Homo sapiens
  misc_feature (224)..(224): n equals a,t,g, or c
  misc_feature (236)..(236): n equals a,t,g, or c
  misc_feature (294)..(294): n equals a,t,g, or c
  misc_feature (335)..(335): n equals a,t,g, or c
gggcgcgaggaggcccgcaaccccaagcggaagccgcgcctcatggaggaggacgagctcccctcgtggatcatcaaggacgacgcggaggtggagcggctgacctgtgaggaggaggaggagaagatgttcggccgtggctcccgccaccgcaaggaggtggactacagcgactcactgacggagaagcagtggctcaaggccatcgaggagggcacgcttgnaggagatcgaanaggaggtccggcagaagaaatcatcacggaagcgcaagcgagacagcgacgccggctnctccaccccgaccaccagcacccgcagccgcgacaaggacnacgagagcaagaagcagaagaagc

SEQ ID NO: 1749 - DNA, 662 bp, Homo sapiens
  misc_feature (467)..(467): n equals a,t,g, or c
  misc_feature (620)..(620): n equals a,t,g, or c
  misc_feature (632)..(632): n equals a,t,g, or c
  misc_feature (636)..(636): n equals a,t,g, or c
  misc_feature (649)..(649): n equals a,t,g, or c
  misc_feature (659)..(659): n equals a,t,g, or c
ggggactggggctcctggctgtgggtgtggtaccgaggcttcagcgggtgccgcccgcctagagggagtggagcgagagcctacgactagatttgcatctttacgtcctgcacggaggctgctacacacatgcagaagtcatgctggtggcctggacagtgaagggagagaagtggatttgggagacatttaggaggtcccacccgaggatgggtcaccatggctttggagcacctggtagtgtggcgtgtccacagtgaagaccagagtttcattgtccttaagactgacctgggagacgtggctgcaggccattgaggaagatggcaccaaaagcgaaggaagctcctgctcatcctaaagccgaagccaaagcgaaggctttaaaggccaagaaggcagtgttgaaaggtgtccgcagccacacgcaaaaaagaagatccgcatgtcactcaccttcaggcggnccaagacactgcgactccggaggcagcccagatatcctcggaagagcacccccaggagaaacaagcttggccactatgctatcatcaagtttccgctgccactgaagtcggccgtgaagaagatagaagaaaacaacacgcttgtgtcactgnggatgttaaagncacnagcaccaggacanacaggctttnaaa

SEQ ID NO: 1750 - DNA, 628 bp, Homo sapiens
  misc_feature (587)..(587): n equals a,t,g, or c
  misc_feature (595)..(595): n equals a,t,g, or c
  misc_feature (612)..(612): n equals a,t,g, or c
  misc_feature (619)..(619): n equals a,t,g, or c
  misc_feature (621)..(621): n equals a,t,g, or c
gcgcctcggctccagcgccatggcgccctccaggaagttcttcgttgggggaaactggaagatgaacgggcggaagcagagtctgggggagctcatcggcactctgaacgcggccaaggtgccggccgacaccgaggtggtttgtgctccccctactgcctatatcgacttcgcccggcagaagctagatcccaagattgctgtggctgcgcagaactgctacaaagtgactaatggggcttttactggggagatcagccctggcatgatcaaagactgcggagccacgtgggtggtcctggggcactcagagagaaggcatgtctttggggagtcagatgagctgattgggcagaaagtggcccatgctctggcagagggactcggagtaatcgcctgcattggggagaagctagatgaaagggaagctggcatcactgagaaggttgttttcgagcagacaaaggtcatcgcagataacgtgaaggactggagcaaggtcgtcctgcctatgagcctgtgtgggccattggtactggcaagactgcaacacccaacaggcccaggaagtacacgagaagcttccnaggatggnttaaattccaacgtctnttatgcngnggttaaa

SEQ ID NO: 1751 - DNA, 623 bp, Homo sapiens
  misc_feature (22)..(22): n equals a,t,g, or c
  misc_feature (98)..(98): n equals a,t,g, or c
  misc_feature (305)..(305): n equals a,t,g, or c
  misc_feature (313)..(313): n equals a,t,g, or c
  misc_feature (417)..(417): n equals a,t,g, or c
  misc_feature (504)..(504): n equals a,t,g, or c
  misc_feature (521)..(521): n equals a,t,g, or c
  misc_feature (586)..(586): n equals a,t,g, or c
  misc_feature (592)..(592): n equals a,t,g, or c
  misc_feature (600)..(600): n equals a,t,g, or c
  misc_feature (602)..(602): n equals a,t,g, or c
  misc_feature (621)..(621): n equals a,t,g, or c
ggtttggaagacattttgaagntacagatattcttgttagtaagatcagccggcagtccattgatgcactcaaagactggttcagagatgaaatgcanaagagtgactggcagcttattgtggagctgaagaaagtatttgaaatcatctaattttttcacatggagcaggaactggagtaaatgcaatactgtgttgtaatatcccaacaaaaatcagacaaaaaatggaacagacgtatttggacactgatggacttaagtatggaaggaagaaaaataggtgtataaaatgttttccatganaaaccaanaaacttacactggtttgacagtggtcagttacatgtccccacagttccaatgtgcctgttcactcacctctcccttccccaacccttctctacttggctgctgntttaaagtttgcccttccccaaatttggatttttattacagatctaaagctctttcgattttatactgattaaatcagtactgcagnatttgattaaccaagcnttctgcagattttgtgattcttggggactttttttgacgtaagaaataccttctctatttatgcntattcntccccccngncgatttttccagcaattcntt

SEQ ID NO: 1752 - DNA, 679 bp, Homo sapiens
  misc_feature (626)..(626): n equals a,t,g, or c
  misc_feature (641)..(641): n equals a,t,g, or c
  misc_feature (648)..(648): n equals a,t,g, or c
  misc_feature (657)..(657): n equals a,t,g, or c
  misc_feature (677)..(677): n equals a,t,g, or c
gcagcaacctagaagaagccaagaagaagaaagaggatgccctaaatgagaccagggaatcagagacaaagctgaaggagctcccaggagtgtgcaatgagaccatgatggccctctgggaagagtgtaagccctgcctgaaacagacctgcatgaagttctacgcacgcgtctgcagaagtggctcaggcctggttggccgccagcttgaggagttcctgaaccagagctcgcccttctacttctggatgaatggtgaccgcatcgactccctgctggagaacgaccggcagcagacgcacatgctggatgtcatgcaggaccacttcagccgcgcgtccagcatcatagacgagctcttccaggacaggttcttcacccgggagccccaggatacctaccactacctgcccttcagcctgccccaccggaggcctcacttcttctttcccaagtcccgcatcgtccgcagcttgatgcccttctctccgtacgagcccctgaacttccacgccatgttccagcccttccttgagatgatacacgaggctcagcaggccatggacatccacttccatagccccggcttccagcacccgcaacagaattcatacgagaaggcgacnatgaccggactgtgngcccggnagatccgcncaactccacgggctgcctgngg

SEQ ID NO: 1753 - DNA, 811 bp, Homo sapiens
  misc_feature (543)..(543): n equals a,t,g, or c
  misc_feature (584)..(584): n equals a,t,g, or c
  misc_feature (648)..(648): n equals a,t,g, or c
  misc_feature (658)..(658): n equals a,t,g, or c
  misc_feature (761)..(761): n equals a,t,g, or c
  misc_feature (774)..(774): n equals a,t,g, or c
  misc_feature (782)..(783): n equals a,t,g, or c
  misc_feature (805)..(805): n equals a,t,g, or c
gtttcacttccacatctaccaagtgggcggagtggccttctgtggacgaatcagattcctctccagcaccgactttaagaggcgagccggggggtcagggtcccagatgcacaggaggagaagcaggagctgtcgggaagatcagaagccagtcatggatgaccagcgcgaccttatctccaacaatgagcaactgcccatgctgggccggcgccctggggccccggagagcaagtgcagccgcggagccctgtacacaggcttttccatcctggtgactctgctcctcgctggccaggccaccaccgcctacttcctgtaccagcagcagggccggctggacaaactgacagtcacctcccagaacctgcagctggagaacctgcgcatgaagcttcccaagcctcccaagcctgtgagcaagatgcgcatggccaccccgctgctgatgcaggcgctgcccatgggagccctgcccaggggcccatgcagaatgccaccaagtatggcaacatgacagaggaccatgtgatgcacctgctncagaatgctgaccccctgaaggtgtaccccggcacttgaangggagcttcccggagaacctggagacaccttaagaacacccatgggagaccattagactggaangtctttgaancttggatggccccatttgggttcctggtttgaaatggagcaggcacttccttggagccaaaaagcccaactggacgcttcaaccggaaagtacttggcccaantgcccagggaaanaaggtccnngcccaattccctggctggcccncccggg

SEQ ID NO: 1754 - DNA, 735 bp, Homo sapiens
  misc_feature (552)..(552): n equals a,t,g, or c
  misc_feature (679)..(679): n equals a,t,g, or c
  misc_feature (702)..(702): n equals a,t,g, or c
  misc_feature (712)..(712): n equals a,t,g, or c
  misc_feature (718)..(718): n equals a,t,g, or c
  misc_feature (724)..(724): n equals a,t,g, or c
gcacaagaaccgactacggctttcaatctctttgttggaaacctaaactttaacaaatctgctcctgaattaaaaactggtatcagcgatgtttttgctaaaaatgatcttgctgttgtggatgtcagaattggtatgactaggaaatttggttatgtggattttgaatctgctgaagacctggagaaagcgttggaactcactggtttgaaagtctttggcaatgaaattaaactagagaaaccaaaaggaaaagacagtaagaaagagcgagatgcgagaacacttttggctaaaaatctcccttacaaagtcactcaggatgaattgaaagaagtgtttgaagatgctgcggagatcagattagtcagcaaggatgggaaaagtaaagggattgcttatattgaatttaagacagaagctgatgcagagaaaacctttgaagaaaagcagggaacagagatcgatgggcgatctatttccctgtactatactggagagaaaggtcaaaatcaagactatagaggtggaaagaatagcacttggagtggngaatcaaaaactctgggtttaagcaacctctcctacagtgcaaccaggaagaaactcttcagggaagtatttggagaaagcaacttttatcaaagtacccccagaacccaaaatggcaaatctaaangggtttgcctttatagagttggncttcatttgnaaaccncttaangaagctttaaa

SEQ ID NO: 1755 - DNA, 804 bp, Homo sapiens
  misc_feature (696)..(696): n equals a,t,g, or c
  misc_feature (709)..(709): n equals a,t,g, or c
  misc_feature (714)..(714): n equals a,t,g, or c
  misc_feature (739)..(739): n equals a,t,g, or c
  misc_feature (749)..(749): n equals a,t,g, or c
  misc_feature (781)..(781): n equals a,t,g, or c
  misc_feature (783)..(783): n equals a,t,g, or c
gcgcatggccaccccgctgctgatgcaggcgctgcccatgggagccctgccccaggggcccatgcagaatgccaccaagtatggcaacatgacagaggaccatgtgatgcacctgctccagaatgctgaccccctgaaggtgtacccgccactgaaggggagcttcccggagaacctgagacaccttaagaacaccatggagaccatagactggaaggtctttgagagctggatgcaccattggctcctgtttgaaatgagcaggcactccttggagcaaaagcccactgacgctccaccgaaagagtcactggaactggaggacccgtcttctgggctgggtgtgaccaagcaggatctgggcccagtccccatgtgagagcagcagaggcggtcttcaacatcctgccagccccacacagctacagctttcttgctcccttcagcccccagcccctcccccatctcccaccctgtacctcatcccatgagaccctggtgcctggctctttcgtcacccttggacaagacaaaccaagtcggaacagcagataacaatgcagcaaggccctgctgccaatcttcatctgtcaacaggggcgtgaggtcccaggaagtggccaaaaagctagacagatccccgttctgacatacagcaaccttcacacaaggctccaagaactaagcttatggacnagatgggaaggcncaggnaagaagggttaaccttacacccaanaccccaagcntggacatgcttaactgggcttttcccttcagncnttgggccttgggtttttctaa

SEQ ID NO: 1756 - DNA, 731 bp, Homo sapiens
  misc_feature (36)..(36): n equals a,t,g, or c
  misc_feature (172)..(172): n equals a,t,g, or c
  misc_feature (228)..(228): n equals a,t,g, or c
  misc_feature (256)..(256): n equals a,t,g, or c
  misc_feature (259)..(260): n equals a,t,g, or c
  misc_feature (277)..(277): n equals a,t,g, or c
  misc_feature (330)..(330): n equals a,t,g, or c
  misc_feature (359)..(359): n equals a,t,g, or c
  misc_feature (363)..(363): n equals a,t,g, or c
  misc_feature (370)..(370): n equals a,t,g, or c
  misc_feature (372)..(372): n equals a,t,g, or c
  misc_feature (381)..(382): n equals a,t,g, or c
  misc_feature (384)..(384): n equals a,t,g, or c
  misc_feature (390)..(391): n equals a,t,g, or c
  misc_feature (408)..(408): n equals a,t,g, or c
  misc_feature (413)..(413): n equals a,t,g, or c
  misc_feature (445)..(445): n equals a,t,g, or c
  misc_feature (597)..(597): n equals a,t,g, or c
  misc_feature (602)..(602): n equals a,t,g, or c
  misc_feature (647)..(647): n equals a,t,g, or c
  misc_feature (649)..(649): n equals a,t,g, or c
  misc_feature (699)..(700): n equals a,t,g, or c
  misc_feature (707)..(707): n equals a,t,g, or c
gctctcattgtctccttcccatcttagtaccattgnagttataaacatctgcattttttagaagcattttacccatttatttttttaaacattcaagaactgctgacgtactgtggatgtagagtataaaacttgaaaaatgcagatgttgaaggaataataggtatcttgngctttaatactttatggcaggattgtactataagcaaatggattaaaccagtatgnaatcataaggaaaactaaaaatggaccnaannggaagggatactttcanggcaggaaccttctattggaaccctggtaattaagggaaatactagggattcntctaaataggaaggaaaactttcttcaantaanccttctnangcccggctnncnagaacnncaggggaacctgggatnaaatnaccctttcccaaggtatattgcaggtatgtgngtaatctcagaatacacaggtgacatagatatgatatgacactggtaatggtgggattcatttacattggttaccttctatgaccaggccttaaggggaaagggcaggttttttaaaaaacccagtaggggcttcctacctatctccagatncatgncaaaaaaaggaaagggggttgggctttccgtttgggtcctgctcncnaatatagccaagcaggtttggttccaagggacccctttggcctggggaannccttttngggttaattcaaaaaaaaactccc

SEQ ID NO: 1757 - DNA, 570 bp, Homo sapiens
  misc_feature (2)..(2): n equals a,t,g, or c
  misc_feature (19)..(19): n equals a,t,g, or c
  misc_feature (24)..(24): n equals a,t,g, or c
  misc_feature (30)..(30): n equals a,t,g, or c
  misc_feature (57)..(57): n equals a,t,g, or c
  misc_feature (206)..(206): n equals a,t,g, or c
  misc_feature (210)..(210): n equals a,t,g, or c
  misc_feature (217)..(217): n equals a,t,g, or c
  misc_feature (238)..(239): n equals a,t,g, or c
  misc_feature (241)..(241): n equals a,t,g, or c
  misc_feature (244)..(244): n equals a,t,g, or c
  misc_feature (247)..(247): n equals a,t,g, or c
  misc_feature (263)..(263): n equals a,t,g, or c
  misc_feature (266)..(266): n equals a,t,g, or c
  misc_feature (272)..(272): n equals a,t,g, or c
  misc_feature (276)..(276): n equals a,t,g, or c
  misc_feature (292)..(292): n equals a,t,g, or c
  misc_feature (295)..(295): n equals a,t,g, or c
  misc_feature (297)..(297): n equals a,t,g, or c
  misc_feature (309)..(309): n equals a,t,g, or c
  misc_feature (320)..(320): n equals a,t,g, or c
  misc_feature (327)..(327): n equals a,t,g, or c
  misc_feature (333)..(333): n equals a,t,g, or c
  misc_feature (346)..(346): n equals a,t,g, or c
  misc_feature (379)..(380): n equals a,t,g, or c
  misc_feature (382)..(382): n equals a,t,g, or c
  misc_feature (418)..(418): n equals a,t,g, or c
  misc_feature (423)..(423): n equals a,t,g, or c
  misc_feature (440)..(440): n equals a,t,g, or c
  misc_feature (458)..(458): n equals a,t,g, or c
  misc_feature (462)..(462): n equals a,t,g, or c
  misc_feature (528)..(528): n equals a,t,g, or c
  misc_feature (531)..(531): n equals a,t,g, or c
  misc_feature (536)..(536): n equals a,t,g, or c
  misc_feature (543)..(543): n equals a,t,g, or c
gntctgctctgagtatcgnccaanaatcanaggagaacatcctggcctgtccattgntgatgttgcgaagaaactgggagagatgtggaataacactgctgcagatgacaagcagccttatgaaaagaaggctgcgaagctgaaggaaaaatacgaaaaggatattgctgcatatcgagctaaaggaaagcctgatgcagcaaaanaggnagttgtnaaggctgaaaaaagcaagaannanaangantgaggatgaagatgangancatganagangatgaggagtaggganggncnatgattaggatnacgatgacgantaggatnatgatnatgaataagttgntttctaagcgcaggtttttttttcttgtctatnntncatttaacccccctgtacacaactcactccttttanagaantataattgaaacgtaancctgagtaagatttgctnttanactgtacagtgtctttttttgaatagttaacacactaccgaatgtgctttagatagccctgcctgntgntattntcaatantcactaaccttgcctggtacagtatgg

SEQ ID NO: 1758 - DNA, 538 bp, Homo sapiens
  misc_feature (2)..(2): n equals a,t,g, or c
  misc_feature (17)..(17): n equals a,t,g, or c
  misc_feature (30)..(30): n equals a,t,g, or c
  misc_feature (38)..(38): n equals a,t,g, or c
  misc_feature (60)..(60): n equals a,t,g, or c
  misc_feature (144)..(144): n equals a,t,g, or c
  misc_feature (212)..(212): n equals a,t,g, or c
  misc_feature (237)..(237): n equals a,t,g, or c
  misc_feature (247)..(247): n equals a,t,g, or c
  misc_feature (285)..(285): n equals a,t,g, or c
  misc_feature (291)..(291): n equals a,t,g, or c
  misc_feature (302)..(303): n equals a,t,g, or c
  misc_feature (335)..(335): n equals a,t,g, or c
  misc_feature (337)..(338): n equals a,t,g, or c
  misc_feature (352)..(354): n equals a,t,g, or c
  misc_feature (363)..(363): n equals a,t,g, or c
  misc_feature (372)..(372): n equals a,t,g, or c
  misc_feature (389)..(389): n equals a,t,g, or c
  misc_feature (392)..(392): n equals a,t,g, or c
  misc_feature (406)..(406): n equals a,t,g, or c
  misc_feature (424)..(424): n equals a,t,g, or c
  misc_feature (461)..(461): n equals a,t,g, or c
  misc_feature (466)..(466): n equals a,t,g, or c
  misc_feature (494)..(494): n equals a,t,g, or c
  misc_feature (496)..(496): n equals a,t,g, or c
  misc_feature (502)..(502): n equals a,t,g, or c
gnccagactgatttaanaatgtgcagagtntgaacatntaggacaggttctttcacttgnaattactaaagatcggagttttgcaagaggttgattaaagcaaccatacccaagaaatagctagcatcaagaatgagatttatncaatgttgggtcaagaacattgcttcgacatggaaattaacatggaacattgcttttcgtgatactgntaatttcatactatgttgaaactangttgaagtangacatagttaagagatacacataattcttcaccgatanttaggntttcctatttnnaaaaaaaatggtccttgcttgggccaccagcngnnattggaacccttgnnngcttcagcnttatgttgncaaaagaatccaccttngangcccaggaagtttncaagggcttattaggtgngcttaatggatccatgccctggtgaaataggcccatntggcnacttttgaagcccttcttggggaaaacnantaatcnataggacccccatcttggcaaaatttaactaacaaa

SEQ ID NO: 1759 - DNA, 499 bp, Homo sapiens
  misc_feature (45)..(45): n equals a,t,g, or c
  misc_feature (178)..(178): n equals a,t,g, or c
  misc_feature (429)..(429): n equals a,t,g, or c
  misc_feature (475)..(476): n equals a,t,g, or c
  misc_feature (480)..(480): n equals a,t,g, or c
  misc_feature (483)..(483): n equals a,t,g, or c
  misc_feature (487)..(487): n equals a,t,g, or c
ggccaacatgggccgcgttcgcaccaaaaccgtgaagaaggcggnccgggtcatcatagaaaagtactacacgcgcctgggcaacgacttccacacgaacaagcgcgtgtgcgaggagatcgccattatccccagcaaaaagctccgcaacaagatagcaggttatgtcacgcatctnatgaagcgaattcagagaggcccagtaagaggtatctccatcaagctgcaggaggaggagagagaaaggagagacaattatgttcctgaggtctcagccttggatcaggagattattgaagtagatcctgacactaaggaaatgctgaagcttttggacttcggcagtctgtccaaccttcaggtcactcagcctacagttgggatgaatttcaaaacgcctcggggacctgtttgaattttttctgtagngctgtattattttcaataaatctgggacaacagaagaaaaaagagnnaaantanctgnataaaaaaaaaa

SEQ ID NO: 1760 - DNA, 668 bp, Homo sapiens
  misc_feature (573)..(573): n equals a,t,g, or c
  misc_feature (583)..(583): n equals a,t,g, or c
  misc_feature (645)..(645): n equals a,t,g, or c
  misc_feature (650)..(650): n equals a,t,g, or c
  misc_feature (667)..(668): n equals a,t,g, or c
gggctgccgaagatggcggaggtgcaggtcctggtgcttgatggtcgaggccatctcctgggccgcctggcggccatcgtggctaaacaggtactgctgggccggaaggtggtggtcgtacgctgtgaaggcatcaacatttctggcaatttctacagaaacaagttgaagtacctggctttcctccgcaagcggatgaacaccaacccttcccgaggcccctaccacttccgggcccccagccgcatcttctggcggaccgtgcgaggtatgctgccccacaaaaccaagcgaggccaggccgctctggaccgtctcaaggtgtttgacggcatcccaccgccctacgacaagaaaaagcggatggtggttcctgctgccctcaaggtcgtgcgtctgaagcctacaagaaagtttgcctatctggggcgcctggctcacgaggttggctggaagtaccaggcagtgacagccaccctggaggagaagaggaaagagaaagccaagatccactaccggaagaagaaacagctcatgaggctaccgaaacaggcccagaagaacgtggagaanaaaattgacnaatacccagaggtcctcaagaacccacggacttctgggctgaggcccaataaagaactggtnaattncttcaaaaaaaaaaaann

SEQ ID NO: 1761 - DNA, 712 bp, Homo sapiens
  misc_feature (10)..(10): n equals a,t,g, or c
  misc_feature (18)..(18): n equals a,t,g, or c
  misc_feature (23)..(23): n equals a,t,g, or c
  misc_feature (58)..(59): n equals a,t,g, or c
  misc_feature (61)..(61): n equals a,t,g, or c
  misc_feature (63)..(63): n equals a,t,g, or c
  misc_feature (66)..(66): n equals a,t,g, or c
  misc_feature (84)..(84): n equals a,t,g, or c
  misc_feature (87)..(87): n equals a,t,g, or c
  misc_feature (91)..(91): n equals a,t,g, or c
  misc_feature (93)..(93): n equals a,t,g, or c
  misc_feature (99)..(104): n equals a,t,g, or c
  misc_feature (112)..(112): n equals a,t,g, or c
  misc_feature (128)..(129): n equals a,t,g, or c
  misc_feature (144)..(144): n equals a,t,g, or c
  misc_feature (213)..(213): n equals a,t,g, or c
  misc_feature (263)..(263): n equals a,t,g, or c
  misc_feature (265)..(265): n equals a,t,g, or c
  misc_feature (297)..(297): n equals a,t,g, or c
  misc_feature (315)..(315): n equals a,t,g, or c
  misc_feature (429)..(429): n equals a,t,g, or c
  misc_feature (434)..(434): n equals a,t,g, or c
  misc_feature (513)..(514): n equals a,t,g, or c
  misc_feature (524)..(524): n equals a,t,g, or c
  misc_feature (531)..(531): n equals a,t,g, or c
  misc_feature (565)..(565): n equals a,t,g, or c
  misc_feature (593)..(593): n equals a,t,g, or c
  misc_feature (614)..(614): n equals a,t,g, or c
  misc_feature (647)..(647): n equals a,t,g, or c
  misc_feature (701)..(701): n equals a,t,g, or c
  misc_feature (703)..(703): n equals a,t,g, or c
  misc_feature (710)..(710): n equals a,t,g, or c
ggcgattcanattaatanaaaangaaacctgaaaaaataaaagaattacccaaacacnnananaangaaagaggaatgaaaaantgnattntnataaannnnnntaccttanggatgaaaaaacttgnnattcatcccagcagntgccatggatggattttgggggaacatggctgactcaagtgtggctgtgtggagtggtgtgaatgtggnaggtgtttctctccaggaattgaatccagaaatgggaactgacaatgatngngaaaattggaaggaagtgcataagatggtggntgaaagtgcctatgaagncatcaagctaaaaggatataccaactgggctattggattaagtgtggctgatcttattgaatccatgttgaaaaatctatccaggattcatcccgtgtcaacaatggtaaaggngatgnatggcattgagaatgaagtcttcctgagccttccatgtatcctcaatgcccggggattaaccagcgctatcaaccagannctaaaggatnatgaggntgctcagctcaagaaaagtgcaaataccctgtgngacattcagaaggacctaaaagacctgngactagagagctctaggctgnagaaatttaaaaactaccatgggagtaactcgngcctttagctttcatcccgggcatgcatcacagtttgctttgagcttttcatgngngaatttngt

SEQ ID NO: 1762 - DNA, 441 bp, Homo sapiens
  misc_feature (428)..(428): n equals a,t,g, or c
ggttgaaaattaggtctgaattcaagagaaagtacggcaagtccctgtactattatatccagcaagacactaagggcgactaccagaaagcgctgctgtacctgtgtggtggagatgactgaagcccgacacggcctgagcgtccagaaatggtgctcaccatgcttccagctaacaggtctagaaaaccagcttgcgaataacaagtccccgtggccatccctgtgagggtgacgttagcattacccccaacctcattttagttgcctaagcattgcctggccttcctgtctagtctctcctgtaagccaaagaaatgaacattccaaggagttggaagtaaagtctatgatgtgaaacactttgcctcctgtgtactgtgtcataaacagatgaataaactgaatttgtactttagaaacacgtanaaaaaaaaaaaaa

SEQ ID NO: 1763 - DNA, 437 bp, Homo sapiens
  misc_feature (355)..(355): n equals a,t,g, or c
  misc_feature (404)..(404): n equals a,t,g, or c
  misc_feature (415)..(415): n equals a,t,g, or c
  misc_feature (430)..(431): n equals a,t,g, or c
ggttcttgtgtggtttggcccttctccttttgaaaaggtaaggtgaaggtgaatctagcttattttgaggctttcaggttttagtttttaaaatatcttttgacctgtggtgcaaaagcagaaaatacagctggattgggttatgaatatttacgtttttgtaaattaatcttttatattgataacagcactgactagggaaatgatcagttttttttttatacactgtaatgaaccgctgaatatgaggcatttggcatttatttgtgatgacaactggaatagttttttttttttttttgccttcaactaaaaacaaaggagataaatctagtatacattgtctctaaattgngggtctatttctagttattacccagagtttttatgtagcagggaaaatntatatctaaanttagaaatcatttgnnttaata

SEQ ID NO: 1764 - DNA, 140 bp, Homo sapiens
  misc_feature (26)..(27): n equals a,t,g, or c
  misc_feature (32)..(32): n equals a,t,g, or c
  misc_feature (69)..(69): n equals a,t,g, or c
  misc_feature (92)..(92): n equals a,t,g, or c
  misc_feature (128)..(128): n equals a,t,g, or c
  misc_feature (139)..(140): n equals a,t,g, or c
gtggggccaaacacagaatcagcaannaggangtcatgctgctggttccagcagaagtatgatgggatnatccttcctggcaaataaattcncgtttctatccaaaagagcattaaaaagatttcagngaataaaaaann

SEQ ID NO: 1765 - DNA, 119 bp, Homo sapiens
  misc_feature (74)..(76): n equals a,t,g, or c
  misc_feature (98)..(98): n equals a,t,g, or c
  misc_feature (102)..(102): n equals a,t,g, or c
ggttgaatatatggacttagcaactaaaaataccacagatggttaacctggactggggcaaagcatgataatannngatgatcgtatgttgctgtctncatncgtttttaatgggtcag

(The sequence listing continues in the following parts.)
